United States Patent Application Publication US 2024/0093182 A1 - sequence listing, part 5

SEQ ID NO: 9152 - DNA, 1140 bp, Artificial sequence
  DNA replication origin
agcacggggttatagattaacagcatcccaaggcagaagaatttttcttagtacagaacaaaatggagtctcctatgtctacttctttctacacagacacagtaacaatctgatctctctttcttttccccacatttcccccttttctattcgacaaaaccgccatcgtcatcatggcctgttctcaatgagctgttgggtacacctcccagacggggtggcggccgggcagaggggcccctcacttcccagatggggtggccaggcagaggtgccccccacctcccagacagggcggctgccgggcgggggctgccccccacctcccagacggggtggctggccaggcgggggctgccccccacctccctcccggacggggtggctggctgggcggagacgctcctcacttcccagacggggcggctgccgggcggaggggctcctcacttctcagacagggcagccgggcacagaggctcctcacctcccagacggggtggcggttgggcagagacactcctcagttcccagacggggtcgcagccgggcagaggcgctccccacatctcagacgatgggcggccgggcggagatgctcctcacttcctagatgggatggcggctgggaagaggcgctcctcacttcccagactgggtggccgggcagaggggctcctcacatcccagacgatgggcggccaggcagagacgctcctcacctcccagacaggttggcagccgggcagaggctgcaatctcggcactttgggaggccaaggcaggcagctgggaggtggaggttgtagcgagccgagatcacaccactgcactccagcctgggcaagatggagcactgagtgagccagtctgcaatcctggcacctcgggaggcggaggctggcagaccactcgcggtcaggagctggagaccagcccggccaacacggcaaaaccccgtctccaccaagaaatacgaaaaccagtcaggcttggcggtgcccgcctgcaatcccaggcactcagcaggctgaggcaggagaatcaggcagggaggttgcagtgggtcgagatggccgcagtacagtccagcctcggctcggcatcagagggagaccgtggaaagtgggagacagagac

SEQ ID NO: 9153 - DNA, 1209 bp, Artificial sequence
  DNA replication origin
gctgcgaggaggagcggaaggcggagatgcgccgcggctgcacacggtcgcccgcgccccactccccggcgcctgccttccgcggagacgtcgctggtgtctgccacgtgcggcagcccggagcccaggaggggagggcgggccgcctggcgggggtgggcaatgcctcccggcctccagacgctatataaacagacccggacgcgaggcagcggcggagggcgagcgtgacgctggaggaggagtgggagctcccagcctgcgcgggtcctctctttacctgccagggcttttccgggtaatctgggaccgacagggatgccagcaccccgtcatctcacccaaagggcgccaggccagagattcctggggaaaagtcgccggctgcaggcggttgtcccaggaattcctccatggtgccggcgggagcgcggcgagccggggcgcggcggctgcgggaggtggaggcgacccgggacagggccggtcccagggagaggggatcccccgagccgcgcgttccgccgttcaggccaggtagggggtggggaaggaggaggaagaggatcccgaagcaagacagagctgaggctcagagttctcaggcagcagcttctggaggacaccgtggagacccaaggcggctttatttgggtctgcaaacacccggggccccggttaagattcggcagggccaccccgctcctcccccgccttgcacgaccgcactccgcgcgccttgtcactgcgagggctacctgtcctcgcacactcctccgcgatggccagaaaacgtgggactcgagataagactctggcagatggtactcctccctccgcctaacgtatcaatgcaccaacgcccctgaccgcacactcaggaacctgtggcagcctcgccaagggacagcgtgcccagcaccgtgcactgggcactcttggatctggagctcacaactccggaaggaatggggacttagatgaggtgacagacatgcatgcatgcaatgcaggctgaatccgcctgtctggagccaaaaataaacgccatggtcacctctttgttacaacctggatatgatgcccacatgcgtggggtagacatgcttgggatagataagcctgtggacttcagacggtattttctctttcccttttttcttctttctcgtcctcatctctgtccctccctccttttcttctcgccct

SEQ ID NO: 9154 - DNA, 1094 bp, Artificial sequence
  DNA replication origin
tggctgcctctactctattattgtacaccttaaaggtgaggttaattaagtcctgttgtggggtttgagggccagaatttaatttttggagttttatttaatgtcaggagcagattaggtaataaaataaaatgcatattaagaataagacggccttctgacctttcagggtctagggctgtaaagcgtctcagggttgctgccaaacaagccaaaaactgggctgggtttttatattcgacgaaaaagagcctaaacgctaactgattttgggaggggtcagataaagaaaaaggagcattaaccttgactatgcctttagctccagccacctgtttaagaggaaattgctgggcaggttggggagggctagtcacggaacgaaactgtaagccagaccgggtgtgaggaggggaggtgataaaaggattatagggttggggagcagaggctaaggaagaattgggacctggctcagcctggcgaggagcagcctggggaggaggggagaggtcagatgggtctgtagaaaaggaagattagaaagactcagcgacgcttggggttgggattgaggggacaggcaggagggaaagaaggaagatttgggataagtcgcattgggaacagagactagggagggaacaatgtgtaaaagaatgcctggacaccaggcacctcagaccatttgcccattttacgacaagaattatctagatcttgtaggatggaaaaatcaaaagtgccattttctggctatttggaatgactgtcgagtttgtattggggtcaagtggcattgtagaagaaaataaggcatttaggttttaggtcaggtatgagttgaagaggttttacgttcttgagaacacaggctaaggaagaaggaggaatggagggtggaaggctgcccatagtgaaggaggcaagcccagagaaaagagagagtagagacttggagagaaagggtgggggtgcttgccctccaggaaagtggagaaggggtagagacacggggagaaggggttggggggttcttgcccaccagaaaagcggagaaggggtagagacacagagagaaggggtgtggggtg

SEQ ID NO: 9155 - DNA, 1732 bp, Artificial sequence
  DNA replication origin
tcttaaaacttaggatagcctaggtgtggtggctcacagctgtaatcctagcactttgggagtacgaggcagattgcctgagctcaggagttcgagaccagcctgggcaacaccgtgaaacctcgtctctactaaaatacaaaaaaaaaaaaaattagctgggcgtggcggtgtgcacttgtagtcccagctacgggggaggctgaggcaggagaattgcttgaacccgagaggtggaggttgaggtgagccaagatcgcaccactgcactctactccagcctgggtgacagagtgagagactccgtctcaaaaaaaaaaaaaaaaaaaaaaaaaaaaaaaaaaaaaaaagaaaagaaaaaaaaccccaaaaaacttaggataaaatcttaaaacgttttgttcgacttaaatttaaattagcagtttaggatatagtacactgataatgtaattacatacattctgctataaaggcatagacatctttattgggagatatgggcagaaaaattatttcctcagggtggggcatttggctaaacacttgccaatatcctttactgtgtaatttaggtaacacaggcagaaaaggcgtttgaaaagcagaaatcaagtggcaaatatcagatctgagggacgcaatgagggtggagttgaaatccgtggtccttggatttgaaacttaccagcccgtgaacaaggttggtattgcttttggcataagacgacagcctttcttttcattagctcaggaggaatactggctttccaagtgagctcctccaatccagtgatatttgcacatctcacctgggcctttcggttacaaattcaccaccttaaggagccgtgtgaaaaagcaagaacaatcaataagaaggaaaaaaaaaaacccttcagctataaatcagccacgtggagctgctgcagcagcagcggtagtcccacttcctggttggcttcctgaaagcctctcgacaaggggctcagggaagtgggtctaagggagaggtgcagacgagagcgactccaggtccaacggagggggcggcgggccacgggatcccggagggcacaggcgttaaggacggagttattgtccataattacaataaaagtttggggatctgaaagctttaaggagctgagctgcagggcaaaggctaagaaccggactcgggaaaagtgcaagttagttacaaggtagcagggactgtgaagggggctcgcgtggagagcaggggactgcggatctggaagggggcaggtagagaggaaggcagcctggcagagcgaggcacacgggtcagtcggagctctgcggtggccgccagaggggagggggccacggggaggagcggagggaagagcccggggaaaggtgtagccgaggggagttccggatctggagctggaaagggcaggcagcggagagggcggcagccgtagcggtaggggtgggggaaagagggggaggagagccggaggagggggaaggagggaggggagagcggtggcggcggctgcgccgggctgtgagtctctcgccgccggaggaagatgaggctgaagattgggttcatcttacgcagtttgctggtggtgggaagcttcctggggctagtggtcctctggtcttccctgaccccgcggccggacgacccaagcccgctgagcaggatgagggtgagtgacccgcccggccccctccggcggcagcgaccggcaac

SEQ ID NO: 9156 - DNA, 1213 bp, Artificial sequence
  DNA replication origin
agattagggattgggttttctggcacaaggctcctttctgtcaaaggactgcaaattttcctgggttgacgtgggcttaattttttttttttccccaaggcagaagaatttttcttagtacagaacaaaatggagtctcctatgtctacttctttctacacagacacagtaacaatctgatctctctttcttttccccacatttcccccttttctattcgacaaaaccgccatcgtcatcatggcccgttctcaatgagctgttgggtacacctcccagacggggcggccgggcagaagcgcccccccacctcccagacggggcggcggccgggcggggtctgccccccacctcccggacggggcggctggcctggcagggactgccccccacctccctgacggcgcggctggccgggcggggactgtcccccacctcccagacggggcggctgccgggcggagacgctcatcacttcccagacggggcggctgccgggtggaggggctcctcacttctcagacggggcggccaggcagagacgctcctcacctcccagacggggtcgcggccgggcagaggcgctcttcacatctcagacgggtcggtggggcagaggcgctccccacattccagacgatgggcggccgggcagagacgctcctcacttcctagacaggatgagggtcgggaagaggctctcctcacttcccagactgggcggcggggcagaggggctcctcacatcccagacgatgggcggccaggcagagacgctcctcacttcctagacggggtggcggccgggcagaggctgcaatctcggcactttgggaggccaaggcaggcggctgggaggtggaggttgtagcgagccgagatcacgccactgcactccagcctgggcaacattgagcactgagtgagcgagactccgtctgcaatccctgcacctagggaggctgaggctggcagatcactcgcggtcaggagctggagaccagcccgaccaacacggcgaaaccccgtctccaccaagaaatatgaaaaccagtcaggcatggtggcgcccgcctgcaatcccaggcactcggcaggctgaggcaggagaatcaggcagggagattgcagtgggtcgagatggcggcagtacagtccagcctcggctcggcatcagagggagaccagggagagggagctcggcatcagaggg

SEQ ID NO: 9157 - DNA, 1476 bp, Artificial sequence
  DNA replication origin
gcagtggctctcggggtctgacccggcgagcggcatttggggtgcgggccggcgagggctgggtctgtggagggccggcgggcagtcggaggaggcggaaactgcccctgaccgggcccggttctgggagttttcaatgtcggtcacgaggtgcttagcggttaagtgaggctcgcgacgtgggagctgggggacatttctgtcaggaaaggcgttttgagggcgcttgcggagtcaccggactcggtgaagggcgggcggcggcgtctcgggccccgggagccacttgctgggctgagccgcggccgctcgggccgggaggaggaggaggaggagggtgtgcgccggggcgcgggcgggggcgcgggcggccgcccttgggaggacgccctcgggaggaggggggcgcgggcagggcgggagcggatttgggcgggaagcggagccccgccagcgcccgccctggcagctgcgggctccgcgccgaccctccggcttcccctctcccccctcggccccgtcaggtggacgcggatctgtcaacatgggtaaaggagaccccaacaagccgcggggcaaaatgtcctcgtacgccttcttcgtgcagacctgccgggaagagcacaagaagaaacacccggactcttccgtcaatttcgcggaattctccaagaagtgttcggagagatggaaggtgaggcaggagagggacggagctcagggggtgcaggtgtggttttcggctaggagggccttaggcaggtagtaggcaactcatgagcttcaactttgccaccccagtgactcacctgaatatcttaagagttccaggcagacgattttaggtttttacttatataagacttcgaaagcaaaatgctgttaaggaaaatgtggtccttaaagatgatcttgtcgtctttggatgtttataggtaacaattttgctgtatttttggctcttattttatgtccacagaccatgtctgcaaaggagaagtcgaagtttgaagatatggcaaaaagtgacaaagctcgctatgacagggagatgaaaaattacgttcctcccaaaggtgataagaaggggaagaaaaaggaccccaatgctcctaaaaggccaccgtaagtttaaaataacccaaattgctccttggatttttccttcagtttattaaactctgttgcttcctttcagatctgccttcttcctgttttgctctgaacatcgcccaaagatcaaaagtgaacaccctggcctatccattggggatactgcaaagaaattgggtgaaatgtggtctgagcagtcagccaaagataaacaaccatatgaacagaaagcagctaagctaaaggagaaatatgaaaaggtacagtgtcatcttttttaaagccgtggataagactaggtataggtaataactgtagaaaacctgggaaatttagttaatcttgtattaatggttgtcagct

SEQ ID NO: 9158 - DNA, 861 bp, Artificial sequence
  DNA replication origin
gagttctacgacaacctcagcgacagcgggaggagctgggcaatcggttttgcagggcaaactccaggctctcctcatttattattctctgggcggcgcacgggagaccctgcagggcaacagagcagagcgactacagctcccaggagccaacgctgcagggctgagccgacgcgggggacagacaggacctaaatggtggtcggaggaagggcaaggcagacctcttctgttaccttagcgccagcaaaccgagccgccgccgtcgccaagccaggagaccaacccccagtctcccgactaagtatttttaaatctggcggggctttccttcccgagccaaccactcccaccgtttacagccccaaccagtcagcgtgaggcccgccatttttcaaaccctcttcccgccgccaatcaggatcgagcagtacattcctctcctgaccggttctaacgggtctgggagttaacgacctgggcgacccaccgaacctgctaggctggggcgtggagggcgggtctggtaagacactgaccaatcgttagcctccgtggcaagggggcggggactatctgggtttgaataatcgtcagaaccaatcagattagtggggatgtggcccgtggcctagctcgtcaagttgccgtggcgcggagaactctgcaaaacaagaggctgaggattgcgttagagataaaccagttcacgccggagccccgtgagggaagcgtctccgttgggtccggccgctctgcgggactctgaggaaaagctcgcaccaggcaagaataccctccaataccctcgggttcgtggacctgcctttccccattccctcagagcctctactcggtctc

SEQ ID NO: 9159 - DNA, 1424 bp, Artificial sequence
  DNA replication origin
cgtagcggtccaactgctgaagtccccatgtgacagtgagcggggtccccgctccaggagacgctcgagtctgcgtcccggccctcagcactgtccactgtttcggtgccagcagagaccagcaggcccgggacagttggtgtttggccgtgccgctgtctaacttggtgtgcagagtgaattgccgctgccggagcggagagaggcggagcggccaggagagaggggatttctgtcagcgccggcctcgggagctcggagacatgaacggcttcacgcctgacgagatgagccgcggcggggatgcggccgccgcagtggccgcagtggtcgctgccgcggccgccgccgcctcggcggggaacgggaccggcgcgggcaccggggctgaggtgccgggcgcgggggcggtctcagcggctgggcccccgggggcggccgggccgggccccgggcaactgtgctgcctgcgggaggatggtgagcggtgcggccgggcggcaggcaacgccagcttcagcaagaggatccagaagagcatctcccagaagaaggtgaagatcgagctggataagagcgtaagtaaaccgcgggaccgccctgccctcccgcccctcggtggggccccaggagccgggcaaaggcacgggttgtcggcggggtcccccagacaaccgcactggctgcagtgcggtctcgtggagtctgtgtttggaagcaaataacaaagtcgctgcaactcctaccgccaccccaacacacacaccacacacaggctgtcgttcccctcttctttcccaccctggcccccaacctcccgctgcctgcgtctctcccgcgcagtcttccctcttccttctcctctgcgaccgggacacgaaacaaaggggaccggcgcactgagggcccagagtagttttcttgcagcccggcagctcttctggaatggaggcgcctttgttttgctgcccaagctggtgtttggccccaggcggtactaaatcccgtcgtctaggagaaagcggaggaccttcacgaacaaggaagatcctgttcttttctgtgttccgtctcctccggagcggagtgagagggaagccgagctcacccgccgcctggcagtgagccggggttgtaaacggcgtttgcgctgtcagctccgagggcagctactccgatggtggggagcacgtagcctctgcggttttgccatccccttggcagccatcaggattttttgcacgtcttttcgtttgaccatctatgaggtttttagaaacagccgttgctacttttgggagatctggctagcggtaaatgaataacatggtatcgagaacctaccacaagtcctgcatatttttatcttgcgcttggcttagaagtaaatgtaaaagcctgttagctcagtccgtgtttgtttc

SEQ ID NO: 9160 - DNA, 1140 bp, Artificial sequence
  DNA replication origin
gcgggcccgggcgcccgggggctggggggtggggggtgggggaggacgccgagcgctgaggcaggggcccgggccgagggcgcggcggggctgcgcgcacgctggggcgcgtggaggggcgcggagggcgaaatgagtctggtaggtggttttccccaccacccggtggtgcaccacgagggctacccgtttgccgccgccgccgccgcagctgccgccgccgccgccagccgctgcagccatgaggagaacccctacttccatggctggctcatcggccaccccgagatgtcgccccccgactacagcatggccctgtcctacagccccgagtatgccagcggcgccgccggcctggaccactcccattacgggggggtgccgccgggcgccgggcccccgggcctgggggggccgcgcccggtgaagcgccgaggcaccgccaaccgcaaggagcggcgcaggactcagagcatcaacagcgccttcgccgaactgcgcgagtgcatccccaacgtacccgccgacaccaaactctccaaaatcaagaccctgcgcctggccaccagctacatcgcctacctcatggacctgctggccaaggacgaccagaatggcgaggcggaggccttcaaggcagagatcaagaagaccgacgtgaaagaggagaagaggaagaaggagctggtcagtaccagggggcggcaggcggtggggctgagggggtcagggaactggtgctcccggcctctttccaattgggctgagaaatggcatctcgtgttctttggctgcgtcccgcttcaaggttgtttgcaccaggttgtgtaaggatggcttccggcataagcagagagttgaggggagggtgtcagcaggaggaggagaaggttagggatgctttgcgctggtgatcttacctccgggttatcgctgctcccctagtacttaggacggaccttgaaaactctgggtcgcgatcgatcgcgatcgcactggtctggatgcctcaccccgtctctgttagacccttcttttggcctccaatccaatcttgctttcagatgtttccagaataagtctcgaagaagcccttgattccaattatttcactattgatcgcaccccctaccccactcc

SEQ ID NO: 9161 - DNA, 1167 bp, Artificial sequence
  DNA replication origin
tccctggcgttggtttcttctcttcttggaatgcttttggcagatcctccgcgttttccgggtctcttgggagtctgaacatgcattttcctttatttcagacaggattccgagtgttaactagattgtgccctccccactacctatcctgcccatcttccttctcagccgtcgggtgcgggaggaacgcccttgccaacctcagcctttttgatcttccgcgggcagagactcatcagagccaggaggactgtaactacccccggggcgtgtaccgccgaagcctgaagaggctggttgggccaaaatagcagtcgctgcaggcaccagtttcagcccgtcacctgagtgccggttcctgtgggcgcgccagtctcgcaggcagcgcgcccaagctcgcggatcgccctctcacatttttagaagccaagaaaagcacttttgaaattcactccttcgaccgtgggcagaggagcaggtgggcgccgagccctagctgagggtggggggtcgcggaggagaggaactggaaaatgggaaataggtgtctgctgacctagagttcttcggctttgattttaagcggcagtgaggctgggtggtttcgcccccctcatcccctcggtcgctggcgcagattgatcctggagctagttacgggtgttaaactggtacgcgggtggggcaattcattaggcaagaaatggattagttgtttattatctataaacattccaaccacagcaaccaatcataaaaccgcggaagggcctgtaaagtaaagcagcagcgaagcctccatgtgggcagctcaggcttagcgattgttcccgggtgataaagggtcgattagggaagtagagctaggaaggtgggggcgggggagcgggcgataattaagcgagtcgtcaggaaattgctttctagatggggatcatgatgcctctaacttgaacggggcaggagaaatattggggtgatttggaagacggtgataagggaaagcacaaaataaggattggagggccgcagtgaggtcattagtgaagctgatgccggagataaaagctgttgattaattgaggggagcaatttagtctttggtttcttggtaaaatgcttagtcactaaccatgaaagcggcctaataatattttatgggggtgg

SEQ ID NO: 9162 - DNA, 968 bp, Artificial sequence
  DNA replication origin
ccccgcccggccagccgccccgtccgggagggaggtgggggggtcagccccccgcctggccagccgtcccatccgggagggaggtgggggggtcagccccccacccggccagccgtcccgtccaggaggtgaggggcgcctctgcctggccgcccctaccgggaagtgaggagcccatctgcccggccagccgccccgtccgggagggaggtggggggatcagccccccgcccggccagccgtcccgtccgggagggaggtgggggggtcagccccccacccggccagccgcaccgtccgggagggaggtgggggggtcagccccccgcccagcagggaggtggggggtggtcagccccccgcccggccagccaccccttccgggagggaggtaggggggtcagccccccgcccggccagccgccccgtctgggaggtgaggggcgcctctgcccggccgcccctactgggaagtgaggagcccctctgcccagccaccaccccgtctgggaggtgtacccaacagctcattgagaacgggccatgatgacaatggcggttttgtggaatagaaaggggggaaaggcggggaaaggattgagaaatcggatggttgccatgtctgtgtagaaagaggtagacacgggagacttttcattttgttctgtactaagaaaaattcttctgccttgggatcctgttgatcggtgaccctacccccaaccctgtgctctctgaaacatgtgctgtgtccactcagggttaaatggattaatggtggtgcaagatgtgctttgttaaacagatgcttgaaggcagcatgctcgttaagagtcatcaccactccctaatctcaagtacccagggacacaaacactgcggaaggccgcagggtcctctgcataggaaaaccagagacctttgttcacttgtttatctgctgaccctccctccactattgtcctatg

SEQ ID NO: 9163 - DNA, 1105 bp, Artificial sequence
  DNA replication origin
gggcggggggctgaccaccccccacctccctgctgggcggggggctgacccccccacctccctcccggacggtgcggctggccgggtggggggctgacccccccacctccctcccggacgggacggctggccgggcggggggctgatccccccacctccctcccggacggggcggctggccgggcagatgggctcctcacttcccggtaggggcggccaggcagaggcgcccctcacctcctggacgggacggctggccgggtggggggctgacccccccacctccctcccggatgggacggctggccaggcggggggctgacccccccacctccctcccggacggggcggctggccgggcggggggctgatccccccacctccctcccggacggggcggctggcctggcgggggctgaccctcacctccctcccggatggggtggctgccgggcagagacgctcctcacttcccagacggggtggctgccgggcggaggggctcctcacttctcatatggggcggttgccaggcggagggtctcctcacttctcagacggagcggctgggcagagacgctcctcacctcccagacggggtcgcggccgggtagaggtgctcctcacatcccagacggggcggcaggggcagaggcgctccccacatcttagacgatgggcggccgggcagagacgctccttacttcctagatgggatggtggccaggaagaggcgctcctcacttcctagatgggatggcggccgggcagagacgctcctcactttccagactgggtagccaggcagaggggctcctcacgtcccagacgatgggcggccaggcagagacgctcctcacttcccagacggggtggcggccgggcagaggctgcaatcttggcactttgggaggccaaggcaggcggctgggaggtggaggttgtagcgagccgagatcacgccactgcactccagcctgggcaccattgagcactgagtgaaccagactccgtctgcaatcccggcacctcgggaggccgaggctccatatatcctctttagtgagatatctgttaacatcttttgcctattttttaattgtat

SEQ ID NO: 9164 - DNA, 1177 bp, Artificial sequence
  DNA replication origin
acggcaaccatccgatttctcaatcttttccccacctttcccccctttctattccacaaaaccgccattgtcatcatggcccgttctcagtgagctgttgggtacacctcccagatggggtggtggccgggaagaggggctcctcacttcccagtaggggcggccaggcagaggcgcccctcatctcccggacgtggcggctggccgagcggggggctgacccccccacctccctcccagacggggcggctggccgggtggggtgctgacccccccacctccctcgcggatggggcggctggcctggcgggggctgacccccacctccctcccggacggggtggctgctgggtggagacgctcctcacttcccagacagggtggctgctgggcggaggggctcctcacttctcagacggggcagttgccaggcggagggtctcctcacttctcagacagggcggcccagcagagacgctcctcacctcccagacggggtggtggccgggtagaggcgctcctcacatcccagacggggcggcggggcagaggcgctccccttatctcagacgatgggcggccgggcagagacactcctcacttcctagatgggatggcggccgggcagagaagctcctcactttccagactgggcagccaggcagaggggctcctcacatcccagacgatgggcggccaggcagagacgctcctcacttcccagatggggtggcggccgggcagaggctgcaatcttggcactttgggaggccaaggcaggcagctgggaggtggaggttgtagcgagccgagatcacgccactgcactccagcctgggcaccattgagcactgagtgaaccagactccgtctgcaatcccggcacctcgggaggccgaggctggcggatcactcgcggttacgagctggagaccagcccagccaacacagcgaaaccccgtctccaccaaaaaaatacgaaaaccagtcaggcgtggcggcgcgcgcgcctgcaatcgcaggcactcggcaggctgaggcaggagaatcaggcagggaggttgcagtgagccgagatggcagcagtacagtccagctttggctgggcatcagagggagaccgtggaaagagagggagagggagaccgtggggagagagaggggagaggggagaggg

SEQ ID NO: 9165 - DNA, 926 bp, Artificial sequence
  DNA replication origin
agtgtctctgcccggccgcccatcgtctgagataaggggagcgcctctgccccgccgccccgtctgggatgtgaggagcgcctctacccggccaccaccccgtctgggaggtgaggagcgtctctgctgggccgccctgtctgagaagtgaggagaccctccgcctggcaactgccccgtctgagaagtgaggagcccctccgcccagcagccaccctgtctgggaagtgaggagcgtctccacccagcagccaccccgtccgggagggaggtgggggtcagcccccgccaggccagccgccccatccgcgagggaggtgggggggtcagcaccccacccggccagccgccccgtctgggagggaggtgggggggtcagccccccgctcggccagccgccacgtccgggagatgaggggcgcctctgcctggccgcccctactgggaagtgaggagcccctcttcccggccaccaccccatctgggaggtgtacccaacagctcactgagaacgggccatgatgacaatggcggttttgtggaatagaaaggggggaaaggtggggaaaagattgagaaatcggatggttgccgtgtctgtgtagaaagaggtagacatgggagacctttcattttgttctgtactaagaaaaattcttctgccttgtgatcctgttgatctgtgaccttacccccaaccctgtgctctctgaaacatgtgctgtgtccactcagggttaaatggattaagggcggtgcaagatgtgctttgttaaacagatgcttgaaggcagcatgctcgttaagagtcatcaccactccctaatctcaagtacccagggacacaaacactgcagaaggccgcggggtcctctgcctaggaaaaccagagacctttgttcacttgtttatctgctgaccttccc

SEQ ID NO: 9166 - DNA, 1143 bp, Artificial sequence
  DNA replication origin
cgccccgcctctccaaaaagctacaccgacgcggaccgcggcggcgtcctccctcgccctcgcttcacctcgcgggctccgaatgcggggagctcggatgtccggtttcctgtgaggcttttacctgacacccgccgcctttccccggcactggctgggagggcgccctgcaaagttgggaacgcggagccccggacccgctcccgccgcctccggctcgcccagggggggtcgccgggaggagcccgggggagagggaccaggaggggcccgcggcctcgcaggggcgcccgcgcccccacccctgcccccgccagcggaccggtcccccacccccggtccttccaccatgcacttgctgggcttcttctctgtggcgtgttctctgctcgccgctgcgctgctcccgggtcctcgcgaggcgcccgccgccgccgccgccttcgagtccggactcgacctctcggacgcggagcccgacgcgggcgaggccacggtaggtctgcgttagggtttgcggagaacccgagagtttgcgttagggtctgcggcggacccgagaacctgcgcgggggaaagtgtgtgtgctttaagcttgtgtacgtgggatccaaagttactgagctcagtgcacgctgctttggagaaaaatcttcttctttttaaatagaaagttgttactagagaggcaagcaagttacacgagtgaagggcccggagaggtgcccagtgagagatcccgaaatctatttcagactggtttcctctggggcaaccaaggggtcttgaaccctgcccagtcagcggggctctggagagtatgagttcattttggtcgggaaatgctcgtttctttccccagctgattcatgggactccaaacagattctgggacactggtgatcagtcaacccagccttactttcctggagtgttcatagtctgcagagcaccaggcgctgtgagcgactttagaaaaaaagtgtcagggactttagtaaccaggctccagagctttcagagttcacttgaagttggtcagacttgagatgtaacgggagattagagtcagttagatcacaatcaagcaatgcaaggcttgtttcaactttataagctcttcattcctaaaatctggtcatg

SEQ ID NO: 9167 - DNA, 1261 bp, Artificial sequence
  DNA replication origin
gagaggcggggcgggggacaccagaacaccccgcgatgttcagcccctccaaacccgccagagccctcgtccccctcctccctccccttccccgaagtgagaggagccgggccgcgggcgctgcggcgggggcgctggcggcggtgccgggggcgggaggagggcggcggggcggctggcggcggcggggcccgggagcgccgcggcgcaggatcctccagagcgcgccgggctgagcggcggcggcggcggcggcgggcgcaggggcagggcatgactgacgcgccctctgcctgcgcttatgtgagagaaagcggccgagggagggagcgtgccgagcccgggctgccctcccctctcactctccctcggaagccgtctccctggagctccccgtttccctcgcctcctccccggcggccccacctcccccggcccccctctggatctctccctccccgcccctgtcccctgcggggagcgggcggccggaggggcaagttcagtcccggggctggcggttggcgggaccggctttagaggtgatgcgaccaccctggaccacgtgcagcggggagaaactgggcaccgtggggtggagggagcccccgctttatcctcggccactcccgagttcttgtcctccctcccgcacgcctggcccccagagccctgctcaaagtttggaaatgtcctgggggttgtaaaagttccaagaaaaggtcatcactatgtcagagaaccctatgggacctcggaggggtcccctctctcccttggtctgtgtagttgaaagttgcctgatgatccaagaaccgcagttctcaggatgcagtgcaggctgttgggatggatgctaatgatccctttggaatcctaaacttctgacaggtgaagagaagggccagaatcttcgtggagagtaaagagacacattgtcagcttctgcaagaagttggtttacttgaaaaagggggtgataaagagagatgtgtgtgagacatattccagaaaggatgtgtagcatccaaagaaaagtgactgcatttccccattggaaaagcactggggtttccgttgggctggtggcattggctagctgcctccttggggcagggtgagcaggttacagaggaccacgctaaggggtttcaacagtgtacagaacatcaaaagtctgcctttcactcccaatctacttttaagtacacagatgttataggtccataatatcttaccggaagaagagactttcttatct

SEQ ID NO: 9168 - DNA, 2833 bp, Artificial sequence
  DNA replication origin
tcctaatattaacaaggatgactggatattggagtcacaagtggcagtaattaaatgatagataattgaacagacttgtttaatagtaataggcaggaaggccaaaattatatggtggtgttaattttaatgtagagtttcaaagtttgaatctgtagaagccaacataaatttatccttgctattaaaccacaaattttaaattgtctgacataaaaggatatttgacttaaggaaatttaagatttaaatttaatttttaaacataatatttaaaattttagactggagagttttagcctataccccattcccttagtggaactagttcacacccccactccttcctcaatgagggggaagctgtgaatctgtgaacggccacatttatgggctttatatacagctgctagtctttcccaaagggactgaaaacaatttaaccatgtacccatgcagtgaggaaagagaaataccgagactttgggggattactgaatactggctctgaaatagtaataattactacagaattaaaatgactttctggtttactatcataatgggggactcagatgataaacaggaattttgacttgaatccattctcatgagctcagagtgtccctaaatgcatactgtgattatttttccattttgaattaactgttggcatcaacacatacagacacaggaaacattcttcttttagttatgtgacctatggagtgagagataatgctgtagaaagagctaagttaaatcccgagaacagccaatcccctagaattagtaaaccaaaagcaattatcacactgatggaaaaatggcagtttcttcttcaggagaatcttaatgaaacaagcaatgtgcaaataaaactctgatctctttggcaaaggcagaaaattgagaatctacttttggcatgttattggttacgggcagaaagttaacccctgatcatggaataccgagtccccatgagacagacagcccatcagtatttgaagtttagaatgtaatgtgacagaggtagaataggacaagcagagcaactgatgaggctttagcctcgctttttggaaaaagagtgagcatgttttcttttgtgtgagcaagatttacaacctgttaaggatgatgttgctgtacttgtttttagattgagttacaggatgatgtggatactgagggctacaatggacatgattattttgcactctacctcctttccaatttgtttctagtgaatagcccattggataaaggctaaaaatctaaaaatggatgtattctttgcaaatagagatattgatacaaattgggttttatcactaacatgcccaaactagagcatgggatgacagaaatgccaaattcctgctgcttttttttctatatttgctggcaagtggttagatttactattccatatacatacatatatttatgcgtggagacaattgtagtggtgcttgtggtggtggtggtggcgacggcggtggtggtggtgacggtggtggtggtgatggtggtgtgggtgatggtggtgatggtggcaatggtggtggtggtagcaatggtggcagcagtggtggtgatggtggcgatggtggcaatggtggtggtggtggcagtgattgtgttggtggcaatggcagtggtggtagcggtggtgaggatggtggcgatggtggtggtggtggtggcggtggcagcggcggtgatggtggtggtggtgatggttgtagtggtggtggtgatggtggcgatggtggtggtggcggtggcggcacggtgaaggtggtggcagcggtagtggtggtggcagtggcggtgatagtggcaatggtggttgtggtggtggtgatggtggtggtgtggtggcggcacggtggtggtggtgatggttgtggcagtggtgatggtggcggtggtggtggtgatggtgatggtgttggcggtggtggcggtggcagtgatggtggtggtggtgatggtggtgatggtgatggtggtggtggcagtggtggtggcggtggcggtgatggggtggtggtggcggtggtgacggtgatggtggtggtggtagtgatggtggtgatggtggtggtggtagtggtgatggtggtgatggtgatggtggtggtggtagtggtggtggtggtgatggtggtgatggtgatggtggtggtagtggtagtgatggtggtgatggcggtggtggtgatggtggtggtggtggtggcagtggtggtgacggtggtggtgttggtggtgatgggggtggtggtggtggcagtggtggtggcagtggtgctgttggtggtggtggtaatggtggtcatggtaatggtggtggtggtgatgggggtggtggcgtggtggtggttgttgcagtgatggtggtggtggctctggtggtgacagtgttctgcaatgccttcctgatacttggagagaaaccacactatggcatgaatgattttaacaatagttcgagtggcagactctaaagaatattcttccaataattttataagcaccaagttcttctactaaatatcttctctccttaatatactttgaatggtttctgtttcaggccctgaatccctgactggaaggaggcacagtgatataaaaaatgtaagaactatagaatgaaaacagaatacatagttttaaggcagtgaatataaaagaataaaaagagaaaaccgactcaatttaaaagaaagtgtgcaaagagaaaagaactatgagaaatacatgacaaaagaaaagtaaacaattagagtatgcaaaaaagtttaaatataatactaat

SEQ ID NO: 9169 - DNA, 1530 bp, Artificial sequence
  DNA replication origin
gtgctggagatgtgactggggtttctctcacagttgaggcaaggaattgcaactcagaaatacgttgctacttggctgcctctactgtattattgtacaccttgaaggtgaggttaattaagtcctgttgtggggtttgagggctggaatctaatttttggagctttttctaatgttgggaggggcttgggtaataaaatgcatattgagaataagatggccttctggccctctgggtctagggtggtaaagcatctaatggttgttgccaaacgggccatgaactgagctaggtttttatatttgatgaaaaagagcttaaacactaactgatttgggagaggtcagatgaagaaaaaggagcattaaccttgactatgccttcagctccagccacctctttaagaggaaattgttgggcaggtgggggagggctagtcccagaatgaaactgtaagcaggactgggcatgaggaggggaagtaatagaaaggttatagggtgggggagcagaggctgaggaagaattgggacctggttcggcctggtgaggagcagcctggggaggagaggtcagatgagtccatagaaaaggaggattcaaaggactcagcttggggtggagactgaaggaacagacaggagagaaagaagaaagatttgggatgagccacattgggagcagagactagggagggaccaatgtgtaaaagaatgcctggacatcaggcacctcagaccatttgcctatttttcgacaaaaatcatccaggtcttgtaaaatggagaaatcaaaagtgtcattttctggctatttagaacctttattgagtttgtattggggccaagcggtgttgcagaagaaaataagatgcttaggttttaggtcaggcgagcgttgaagaggttttaagtttttgagaacacaggttaagggagaagaagggggaatggagggcggaagtttgcccacagtgaagtaggtaagttcaaagagaaaggtggagacacagagaagggggtggtgagcagccctaggctgcagtgtgggtgagcagccaaagcaggcgtccccacaattgacttgccaccaagggaatgtgggtgaatgaccaaggcaggcatcctcgtggtgatcagacaccaatggagtgtgggcgaataatcaggcaggcgtccccacagtgattaatcaccaagggaagactatcttcccgagtccatgacgggtgccggagttttgggtccacggataaaatgtgtctcctttgtctctactacagaggaaaaagaactggaattggaaggacggggagattgaagggtagcgagagagggagaatgaaggatagcaaaagaggctggagaagagagtgaaaagactgcttacccgatttgaaattggtgagatgttccttgggatggttgctctgaggacccgaggttgtaggtgtatctcctcacggagtgatggtgaggacaggggctggtctcccaaaggagtcctcccatctcaggtctttggcacca

SEQ ID NO: 9170 - DNA, 2339 bp, Artificial sequence
  DNA replication origin
aggaaggatgcgttagtcttgggagaccctgggcccttctggcaatgactcctttcaccttccctcccacttcctcataccctgtaaaagagacggcactctattccaagagtgacaagctgggagttaggagtcttttttctttctttccttccttccttccttccttccttccttccttccttccttccttccttccttcctcccttcctttctttttttgagatggagtgtcactctgttgcccaggctggagtgcagtggcatgatcttggctcactgcaagctccgcctcccgggttcaagctattctcctgcctcagcctcccgagtagctgggattacagacgcccggctaattttagtatttttaggagagacggcgtttcaccgtgttggccaagctgatctcgaactcctgacttcaggtgattcacccgcctcggcctctcgaagtactgggattacaggcgtgagccactgcgcctggccaggaataatttttaatggcatctctgtgagtgagacccacttagaaaaagggggcgcttcattacacttcaggtctgacaataacattggtccctacagggttgttttgttataatggtgaagagaaaacagctgctacccatcgggcccccggtgtgtacaggatctgccccttctccctcggcctgtgtggctttactccagggactccagtttcctcccacatccccaagaggtgtcctttagccctttgagctggtgcgtcctcagggcccagtgtgagtgtgggggcgtgtgaatgagtgtgagtgtgacagtgggtgtgggtgagtgtgggtgaccgggagggagtttgggtgaatgcaggtgagggtgaatgtgggtgagtgtgggtgagcaggagggagtgtgggtgagtgggtgagtgaaggtgtttgtgggtgagggtgagtgggtgagggtgagtgtgggagtgggtgactgtgaatgtgagagtgggtgtgggtgaatacaggtgagtgggaggaagtggggggtgagagtgtgagagtgtgagggtgagtgtgggtgactgtaggtgagtgagggtgactgggtgtgagtgagggtgagtgtgggtgagatgaggtgagggtgtgagtgtgggggtgagggtgaatgcagatgaatgtgaatgtgtgagggtgagtgtgactgggtgagtgtgggtgtgtgtgagggtcagtgaggttgagtgagggtgtgtgagggtgagtgtgggtgagggtcactgagtgtaggtgattgtgagtgtgggtgtgagtgtgggtgagggtgtatgagtgagggtgcaggtgtgtgggtgagagtgggtgatggtgagggtgagtgtgagggtgtgtgagtgtgagggtgagtgggtgtaggtgagggtgagggtgtgggtgaatgtgagtgggtgggtgtgtgggtgagggtgtatgtgggtgtgggtgagggtgagcatcagtgtggctgagtgtgcttgggtgggtgagtgagggtgaatgagggtgagtttgggtcagtgtgggtgagtgtgtaggtgagtgtgacagagtaaatgagcaagggtgtgtgtgggtcagtgtgggtgtgtgggtatgtgtgaatgtgtgggtgtgtgactaagggtgagtgtgagtgagtgtgggtgagggtgaaagtgagtgtgagtgagggtgagggtgtgtgggtgtgtgggtgacggtgagggtgagtgagggtgtgtgtgaatgtgattgggtgggtgtgtgggtgagtgagggtgtgtgggtgagtgagcatcggtgtgggtgtgattgggtgggtgagtgtgggtgagggtgaatgaaggtgagtgaaggtgaacgagggtgagtgtgggtgagtgagggtgaatgagggtgagtgtgggtgagtgagggtgaatgagggggagtaggggtgagggtgaatgagggggagtgtgggtcagtgtgggtgcgtgtgtgagagtgaatgagggtgtttctgggtgcgtgtgtgtgggtgagtgtgagtgagagtgaatgagtgagggtgtttgtgggtgcgtgtgtgtgggtgagtggagtgagagaatgagtgagggtgtttgtgggtgcgtgtgagtgtgtgggtgagtgtgagtgagaaagaatgagtgagggtgtttgtgggtgagtgtgagtgtgtgggtaagagtgagagtgcatgagtgagggtgtttgtgggtgcgtgtgagtgtgtgggttagtgtgagcgagagtgaacgagtgtgttttttgggtgcgtgtgagtgtgtgggtgagtgtgaatgagagtgaatgagtgagggtgtttatgggtga

SEQ ID NO: 9171 - DNA, 1237 bp, Artificial sequence
  DNA replication origin
ggagagggagggagggagagggagggagagggagggagggagagggagggagggagagggagggagagggagggaaagggagggagagggagggagagggagggagagggagggagagggagggagagggagggagagggagggagggagagggagggagagggagggagagggagggagggagagagagggagagagagggagagagagggagagagagggagagagagggagagagagggagagagagggagagagagggagagagagggagagagaggccaaaagagaaatcagtcatgagaattatgcctgagaaagaactttgggtttggttgctggtacataaaaattaactggaagcaaatagagaagtctattaggttactaaggtaattgcatgaccaaagaaaccacaaatccaggctcaaacagcctttgactctttgaattttaatcacatcctcaggctttcttgcacgaagaagaaagattgtgaaaacctgggaagagaacatgtgctaaacagattcctgcctttggagaatacaataaaaaacaacgaggaaagtctcagtggcaaaacagaacaatacacaagcaaattgccccagaattctgaatcaggaaccaatcaagggacttttcccaccaccaggtcgagagaacctctctgcgaccacccagaaaaatttcgtcattgccttgcccggctactgctgtgtcctcctcttctttccttttctagaggggaatattttccccattgtcttatccttgtctcaccatcgtgcattatctgtccaggagggactgataataattgtgtttttccttcttagatctccaaaacacaagaaccaatgataaaaacggcaaatttacatgcctacagagaacaggttggtagcagaggtaaatattttaagaattttggagattgtattggatgggagagtaagagtacattgccaacactcagcttctaaagatgttttgccatgaatcgccacttctttccagtttttaaaaagatgacagaaatctggattgttatgtgatgttggatcaaaatttcaaaaggagtttcatgggctcacagaaacatttgcgtagtcaaacatggcctgtgggctgcctatctcctatctttgacatggtgtttttcagactaatcaaatagacaatgccaaaataagaggatcataagtaattgattatccaagggtcaaagact

SEQ ID NO: 9172 - DNA, 997 bp, Artificial sequence
  DNA replication origin
gccgaccccccccacctccctcccagacagggcggctggccgggtgggggggcgacccccccaccttcctcccggacagggcgctggccgggcggggggccgacccccccacctccctcccggacggggcggctggccgggcagaggggctcctcacttcccagtaggggcggccgggcagaggcgcccctcacctccccgacggggcggctggctgggcaggggggctgatccccccccacctccctcccagacggggcggctggccgggcagggggctgacccccccacctccctcccggacggggcggctggccgggcagagggctcctcacttcccagtaggggcggccgggcagaggcgcccctcacctcccggacggggcggctggccgggcaggggggccgacccccccccacctccctcccggacggggcggctggccgggcagaggggctcctcacttcccagtaggggcggccgggcagaggcgcccctcacctcccggacggggcggctggccgggcaggatcctgttgatctgtgaccttacccccaaccctgtgctctctgaaacatgtgctgtgtccactcagggttgaatggattaagggcggtgcaagatgtgctttgttaaacagatgcttgaaggcagcatgctcgttaagagtcatcaccaatccctaatctcaagtaatcagggacacaaacactgcggaaggccgcagggtcctctgcctaggaaaaccagagacctttgttcacttgtttatctgctgaccttccctccactattgtcccatgaccctgccaaatccccctctgtgagaaacacccaagaattatcaataaaaaaataaattaaaaaaaaaaaaaaaaaaaaaaaaaaaaagaatggactttcccaggccagctgtggtggctcacgactgtaatcccagcactgtggcaggccaaggcgggcagatcacctgagatcaggagttcaagaccagc

SEQ ID NO: 9173 - DNA, 1016 bp, Artificial sequence
  DNA replication origin
ggagcccctctgcccggccagccgccccgtccgggagggaggtgggggggtcggccccccgcccggccagcgccctgtccgggaggaaggtgggggggtcgcccccccacccggccagccgccctgtctgggagggaggtggggggggtcggcccccctgcccggccagccgccccgtccgggaggtgaggggcgcctctgcccggccgcccctactgggaagtgaggagcccctctgcccggccagccgccccgtccgggagggaggtgggggggtcagccccccacccggccagccgccccgtccgggagggaggttggggggtcagccccccgcccggccagccgccccgtccgggatggaggtggggggggtcagcccccctgcccggccagccgccctgtccgggaggtgaggggcgcctctgcccggccgcccctactgggaagtgaggagcccctctgcccggccaccaccccgtctgggaggtgtgcccaacagctcattgagaacgggccaggatgacaatggcggctttgtggaatagaaaggcgggaaaggtggggaaaagattgagaaatcggatggttgccgtgtctgtgtagaaagaagtagacatgggagacttttcattttgttctgcactaagaaaaattcctctgccttgggatcctgttgaaaaaatatttattttttaaaaacatcagatggttcatttttcagcatggtattgaaaacaagaaaagctaattagattatccaaatatttaataacttcattttcatttccacaatgcattataccatcacaatgtcttaaagactcaaattcattcattaggacaaacatttccctagacagaaccctgatgtatgttgtgacagtaatcctcatacactcttgcattcagaacttaaaagtttgtttagagggtccagaaataggactctggttcctcatagtccagtaactgaatagctagctccttttggctgacaaattcctcccctttga

SEQ ID NO: 9174 - DNA, 1722 bp, Artificial sequence
  DNA replication origin
cccagctcgcgcccgccagctcccggcgccgcggcccggcactaggaccccataaaggaaggagggcgcgccggcggcggcgccgcacttaccgcgctcggctcgcccgcgccgccggctcgctccccggcagcagccgccgcgtccgcccgagccgcgcgcacaccgcgccgggccaaattcaaaggagccgggcgcgggggaggggggccccgccgagggagcggggagcgggcgccggcggggcgggggcggggagggggcgcgagtgttacaacttccttccctgcccgcccccggccgcgcggcccggggacgcgggaggggagggcgcccgcgcgccaatgagttcactttctttctctcccccgcgctccccctctccccgcccgccggcccctccagcctcctccaaggcggcggaccaggccgggccggagttttcggggttcagcccgcgagcgggaggaccggggaggcgagggaggaggaaggcgagaagggccaggtgaggaggcccgcgggacgcccggccagggagcggcatccaggaccgtaattgtgcggcgggggacgcgccgggccgagtgtgcccgagcccgggcgcgtacacgtgtccgtgtgtgtgtgtgtgtgtgtgtgtgcgggagtgtgcgagggagaggaggagaggagaggagcctaccatgcgcttcccccggtgcagatcgcgggagagcccaatcacggggcgagctggacctggctgtgatcatttataatccttgactcctccgctccgccacttgtcaagatgacaggtactttatttcttcttcttctttattcaaaaaaagagattccccgtttactgcctttttctgtcaaatgggatttgccggactgaaccacgttcgccgcccctccctccttccctcctcccggccgcgtcgggttcgggaaagcaccgaggctcccatgctgtgaccaatcagtgcctttactactctcgccgtgatttaggggtcatccgtgaataacacttcacgctgatgaatggctcttgccggctttcggctctgatgaggggtctgcccgccgccgattgaaaacactaatgaacttactgcgccatttgaaattcacacgcaccaacaaaatgggggtacgtgcgtgggggtctgtccttttctgctgcgggtggcggggaggcggccctgggggagggggcgggtaattgctttggacttaagtggaaacacttctctgtgtaatcaaacctctaaccttcttagaaaactacttttcttgatcttccgtagggtgggcatttcaggtcagctgagtcacccgaggaggtggcagtgcaagacactgccgggaagacggattccgaggcagaagggtgtaattaaggatttccacccccggtaggcggcccgtcctttgcagagcctctgaaaatgacccgcgccttcctttccacagtgttctttcgtccgagaccgaaaagcgcaaatgacctttggacagggaagggaggcagtaaacactcagacttccttaccagcccctggtgggcactgcagcagaacaattgtctgccccccaggttcaagcacctaggcctccgccccgcatcacctggccaggggcggacccgggagtcctccgaaggctccactccccacttttactactcttctttcctctccattctcccctcagattagcggccggaca

SEQ ID NO: 9175 - DNA, 1416 bp, Artificial sequence
  DNA replication origin
ccgctccccgctccctcggcggggcccccctcccccgcgcccggctcctttgaatttggcccggcgcggtgtgcgcgcggctcgggcggacgcggcggctgctgccggggagcgagccggcggcgcgggcgagccgagcgcggtaagtgcggcgccgccgccggcgcgccctccttcctttatggggtcctagtgccgggccgcggcgccgggagctggcgggcgcgagctgggacggcgcgtggccccgggaggcggcggacgcggggacatcttctcagcgcgcggattctctccacggtccggcctccccgtccccgccccgccctcgcgccagccacctccggccgccggctcaggtgggaacttcgccggcgcctctcgcccggggagccaggcgccgcgcccccgtactggggagccccggggtccctgaggaaggcagtccggaggctgggcgcccagtgggggcggggaggggagcccgccaggtcctcttcggcccccgatgtgtggcgaggccccgcgtcttctgcgggggcgtcttaacaggatcctggggggcttccagcgagcggaaagccccgggatgtcaccgctttccggggcaggcaggggacagaaggcttctgcagcgatcagggagccaagttgaaaaggagtgaaggagggagagtgcggggcgaggggtagcgtggggagtggtggatcacggctgaaacttgatcgggaaactctggatggggttggaaacacacacaaaatatcctgagctgggcgtttcaaaaattacgaatttatgagcctgcaactgagattctaagtccctctcgtgttttacaaccgattacaaagagcttcacgtattttaggttgaggcgggttgtgtctgattgatctttgctgagcatcttactatgcagcttggattccattcttactgcctcacctttaaggtagctggagtggtaacttgttaatttttattgtagagagagggtaacaagtacttgtaccgtgtaatacatcacacacgtgtgtttccccaagtcactgtaatttggaggtagagaaaagtttccaggtacgtgtgaggaggtgcaatggaaatgaaaggctgagagctgtcctagactttttacagggccccagacggctgggatgcccgagaacaggactgtctcttcatcatgctctatttcttatcttctgacaatgtattttgtcaaacattggtagactctggcagaatccactgggtggtcttttcactagaaatagacatatgttgaggcattacctttcccttctcttgtcaaaagaaaaaaggtggatatggcatctctggaaagcttggaagagtatcccaaaagatggtattgtaactgaacagaacttggtgatttgatcccttag

SEQ ID NO: 9176 - DNA, 807 bp, Artificial sequence
  DNA replication origin
cttcgctgggggcacggctgctcacaggccccggcccgcgtgtgtggagcggggcgagggggtgaggcgagggggtgaggcggcggccgagccggggcgctgggcgcggggctggcgggaggcggcggtggcggcccggcgcgaaggggttaagcggcgcaccgccccctcggcggccgggtgtaaacagaggagcctcagcctatcatgtctggccgccgcgcgcagcccgagcccggagccaggcgctgtaacacgatacgctccagacccaggcaacttggcagcgctgggctcggttcctcacggccacagcgagggcgcgccgcggcaaggtgggtgagcggcggcggcggcggcggcctggggcgggctggcggagcgcggctcccggtgaggctccccgcgcggcagggtcgctcgctcgctccggggaccgcggcggtggcggtggcggtggtggcggcggcggcggcggcggctccgctcttctcccttgtggtgtcggaatgggaggaggctcggcgcgggtttgaatcggtgcggaggcaacattcgcatctgagatgaggtggctttttaacccctgagggaccacatttaaggatttcgaagagatggaggctgaactttctcgatgactcttcgtcacccggagtggtgcaggtagccgcggggagaatggagtcttttgttcccggtatttttaattagatggattttttttttatgagtagtgtactgtcctaatccgtgaggcaaagctgcccttttgcctgcattcggtgacttttacgaattcgttgg

SEQ ID NO: 9177 - DNA, 1062 bp, Artificial sequence
  DNA replication origin
tggaatgagttaagactttaagggactgttgggaaggcctgtttgttttgaaatgtgagaacatgagatttgggagaggccaggggtggaatgatatggtttggctctgtgtccccacccaaatctcatcttgaattgtaatccccataatccccaggttttgagggagggacctggtgggaagtgactggatcatgggggtggtttcccccatgctgctctcatgaaagtgagtgagttctcacaagatctgatggttttataagtgtttgacagttccttctatgtatgcattctctctctctcctgtcgccatgtcaaacatgcctcttccctttccaccatgattttaagttttctgaggcctctgaagccatgtggaactgtgagtcaattaagcctctttcctttataaattatccagtcttgggtatttccttacagcaatatgagaacgaactaatacagtgtgtgtgtggtgagtgtgtatgtgttgtgtgtgtatgtggtgagggtgtgtggtgggtgtggtgatagggagtgtgcatggtgagtgtatttgtgtgtggtgatggtgtgtgcgtgtgtcgtatgtatgtggtgagggtgtgtgtgtgtggtatgtatgtggtgagggtgtgtctgtgtagtgatggtatgtgtgtgtgctgtgtgttggtgtgtgtggtgagggtgtgtatgtgtgttgtgatagcatatgtgtgtggtgtatgtgtgtttgtatggtgtgtgtgtgtgtttgtatggtgtgtgtgtggtgatggtatgtgttggtaagtgtgtggtgagatggtgtgtgattgtgtggtgtgcatgtgtgttgtgcatatttgtgtggggtctgtgtgtgtgtggtgtatgtgtgtggtgaggaggtgtgtgtagtgatgtgtgtgtgtgttgtgagggcgtgtgtgttgtgtggtgagagtgtgtgtgtgtatgtgatggtgtgtgtggtgtgtatctgatatgtgtgtatgtggtgtgtgtgtatgtggtgtgtgtggtggtgtgtgtgtgtgtggtgtgagtgtgtat

SEQ ID NO: 9178 - DNA, 861 bp, Artificial sequence
  DNA replication origin
ttatttacttcaagagtttagagtggcagtttggggatagcactaggagatatcacctgtgatgtcttggagaaagagtgtaaaccggcagtgtaaacaagagcagggcatgtgtgagtagttgagaacagtgaataggagtatgactaacagatgaggatgaaatttgggcttgactgaagtaatgggggctgtctgtgaagccttgcagcagtacagcccaggtaatttgctgagcctaatgggtgtcagggtcagtctaagtgaaggcaaagagaggctgggatgaagggtgcaaggaatagtaaagaaagcatgtttgagatccagaacagaataatgggtagtagagggaggtattgaggataggagagtctatgggtttggcaccacggggtggataggcaaaacaatttggttgataaggcgcagattctgaactaacttgtaaggcttgtctggttttaggacaggtaaaatgggggaatggtaaggagagtttataagctttaaaaggccacgctgtagcaggcgagtgataacaggttttaatctttttaaagcgtgctgtgggatgggatattggcgttgagcggggtaagggtgattaggttttaatgggatggtaaggggcatgtgatcggttgccagggaaggagtagagatgtcccatacttgcgggttaaggtggggggatatgagaggaagacgcgaaggaggctttgggttggggagaagggcggcaatgagatgtggctgtagtccaggaatagtcagggaagcagataacttagttaaagtgtctcagcctaataagggaactgggcaggtggggataacgaaaaaggagtgcttaaaaga

SEQ ID NO: 9179 - DNA, 977 bp, Artificial sequence
  DNA replication origin
agcaaataattgtaattgctcagaaatttatttaactgggcctgggtgtctgccttttatctgcaaccctagccgcctgctccggcctccctcccctgccattatcttccagcccagggctcacagaagggccctgggggtgggctctgacctgcttcaggagcacagcaaggtggcggcggccagcgagcctgggcagaactgctctgaaatccatgagtgcccgagcccctggccccccatgcaccgccagcagcctgcggtctgaacatcatctctcccagctgggtgcaagtctggcaggatttgaacatacggaggaggcagcagggaggggagggtgaggcctgcctggggcgccttccagcagggggaaccgagcctcaggtgcttcctgctgagtggtgcttggctttggccggtgcacttcgatttgttctatttttaactgtcttcaatttccctcctggggaaagggagaaggaggagggaaacaaggaggtggggagtggggagtggggagtgaatccgggggactcgggagtggttggtggggctgtgctgaattctgaggaacagcaacgccaaggcaaagacagagggcgaggctttttggggaagagagagagggtggccggccaggcaggagcacagggcacctgagagggctcagggacagaggaagtcccattcttggctgaggagagacagaggggcctgggcttgggtgccagaccaagctagtcagaaggactctgcagcacccagtgattgatggcacatagcggacatggtgactctgagcacacacgctggggtgactaggaggatgatggtaccattacccaaaaacatcccaggagaaggaggaacagtgggaggtagaggccccaaccccacactgggggaaatgtccacaggcatttgcggatggtgactgttcagcagtgcgtggctcattccagagcgccctggcc

SEQ ID NO: 9180 - DNA, 994 bp, Artificial sequence
  DNA replication origin
ggggggagaggagaaggaggggagaggagaaggggggagaggagaaggaggggagaggagaaggggggagaggagaaggaggggagaggagaaggaggggagaggagaaggaggggagaggagaaggaggggagaggagaaggaggggagaggaaaaggggggagaggagaaggaggggagaggagaaggggggagaggagaaggaggggagaggagaaggggggagaggagaaggaggggaggggagaaggaggggagaggagaaggaagggagaggagaaggaggggagaggagaagagggggagaggagaaggaggattttgtccagaggttgggtgggaaagtaatccaaatgctctagtgaaggtgccagggctagttctaaagatgagaaaaatttacttcccaaagagtgtttatgtttctcacattaaaaaaaaaaaaaaaaaaaaaaagatgagagtaagagcaaaaaaggagaagaggaaaacaaggaaatggagctgtgcagaccctctctttgttttaggctgtatttttagagcagctttcgattcacagtaaaaccgagaaggtagagagatttctcatatcctccctgcccccatatatgcatagcaacccccgttatcaataccccccaccagagcatgaattcattacaattcatgaaccttcactgacatgtcattgtcacccaaagaaaatatttttgacattagggttcactcttggtgttgtacattctatgggtttgggcaaatgtatcatgacatagatccacaattacagtatcatacagaacagtttcactgccctaaaattcctttgcattccacctgttcatccttccccccttcatacctaaccttggtaaccactgagatttttactctctatagttgtgccttttccagaatgtcacatagttggaatcatgtagtatgtaatcttttcatactgccttatttcacttagtcatatactcctga

SEQ ID NO: 9181 - DNA, 1196 bp, Artificial sequence
  DNA replication origin
gtcccgactggctgtagcagtacaggtatgtcagtgccagcgacctgggtggctgatgaagggagcatgtgcagaggcagtaggagtagctgtggctgagccctgagggctccagcgcttaaggtggttggagaaagaagggcccgtgagaaggagcacacagagcagtgctttaagaaagaaggcctcattttgggaggccgaggcggggagatcatgaggtcaagagatcgagaccatcctggccaacatggtgaaaccccgtctctactaaaaatacaaaaattagctgggcgtgttggtgcgtgcctgtagtcccagctacttgggaggctgaggcaggagaattgcttgaaactgggaggcggaggttgcagtgagccgagatcgcgccattgcactccagcctggcaacagagtgagactttgtctaaaaaaaaaaaaaaaaaaaaaagaaggcgggcttgtcagctgtatcggaggctgccaagaggcctaagattaaaagtgttcatggggttcagcaacgtggaggtcagaggtgatattgccaagtacagtttcagccaagtacagtttcagcggagcaatagggttgcaagccacattggagcctcttgaaggagaacagagggtgagacaatggggacagctttatttagatcgggctttgggatgtgtggctgagaagagagcagagaagtggggtggtggctggaatggagataaggccacgggaaaggattgcattgtttgtaggataggagaatctggttttggctttggtttttgcttttctgtagcagacatttgtttgttgatgggaatagtccaagacagagagagtgagatagagatttctggaacagaggcaaggtgctcaaggctgtgaggatcggtctctcagacaccctggttgataataagaggaaggactgagaggggaggtgggaggacagcagacacagggtcctggagcgaaaggcagagtgtgatcagttgcaccattccggtggaggaagcagggtcatcggttgagagagctgggagttggagcttggatgccgggagaagagaagagctgattgtgtggggtgggagaagaatgtcctaggaatgtagggcagtgtcaggagctcacatcttatctgagaatctcgagttgggcggttgcttcccattttctacctgcagac

SEQ ID NO: 9182 - DNA, 1249 bp, Artificial sequence
  DNA replication origin
ctgcgtcacggggaccgggaggcgtacggcgacgcggagcagcgcctttgcggcgtgcgacccgcccccgccgtccctccctccctcccctcagggcttcgggcccccggggccagccgccgtcctgcgaacgcgcggcgcccgggccgctgcccccttccggccccgcggcggccccgcctcctcccccgacttccttccctgagcacggcggcggcggggacgagcaccggcctgcgcgcggagccggcaccggatggtgggcgggggccagccgtgcgggtacgcggcccgcgcgcccctagccaccgccgcgtggcaccgtcccgagcgcgtggcgcggggcgctggctgccgggcgggggcctggggccgcggacgctgggggcgcctcggccgcgctcagcctttagatcggagaatgcgggcggggtgggggcgctcggggtccccgcagtcactccagggtcgatttctcggcgggcgccgcggcctgtgcgaggccgggccccttggagtgccccgggaggtggtgctgggcgtctgaacaccacatcccttcctgcgcccgtgtgtgggttgggaatgccgggtgtaggccctggatcagagctgacggggttgcgagcggcgtggggtgtgcctgggacggtgaccggatgtgtcttcctgaatcgttgtattcgagctccagttctctctgtttctacagctgggcctcagtcctcacagggctctagtgggcgttcagccacaccaggagaaggcgcccaggggattaacaggacccttccctctcctgctcttccctcgccccccatggctccccctccctcctatttagtaggtacttctccagcaccccacagcgatgatggatgctggccctaaagccaggtgggaaaccaggctgattcagcacctgtcttttcctgttaggggggttgccaggcctctcagatgtggggcagcgtaatcagtgggtgaccgtggttcccagcacccactctccactgcatccttgtcttaggcactgccgccctgcactgtagcagatgcctaaataaagtgtggagcctgaagcagaagttttgggagatgcttgccttcctttagaccacattcctcgcctttctcaagatttctccgtggtacccaccccgtttttgtgttgtcttccttccttgcccttgtttcattccttttgaaagcgaccactcccctgaagtcctaggacccccttcgtggg

SEQ ID NO: 9183 - DNA, 1166 bp, Artificial sequence
  DNA replication origin
caggcccccgcccggcagccagcgccccgcgccacgcgctcgggacggtgccacgcggcggtggctaggggcgcgcgggccgcgtacccgcacggctggcccccgcccaccatccggtgccggctccgcgcgcaggccggtgctcgtccccgccgccgccgtgctcagggaaggaagtcgggggaggaggcggggccgccgcggggccggaagggggcagcggcccgggcgccgcgcgttcgcaggacggcggctggccccgggggcccgaagccctgaggggagggagggagggacggcgggggcgggtcgcacgccgcaaaggcgctgctccgcgtcgccgtacgcctcccggtccccgtgacgcagcccgcggtccggccggcggtgttcagagcccgagcacaaactacttcccgggtgccagaccgccccgaggtcgccccgctgcccgggtcacgcgtggcgctgggtggccgcgagttgggcgctcccgggcctgactgcacgaccgtcgggggctgcttggtttggtggtggtggcggtggtgaggttttccccaccatccgtgttccatcaactgcttagagacacggctatggagattgtgattaaaagacgaccccaagaatctagtgccgtgaaactggcggggcgggaggtggggagacctggtttgggtctctggagtgagcccgctgtgtcgcagcgtccccgtggggacccttggccggtggctgggtcacagtttcacacactggatggggcagggaactgggtccggcgggggcgctgtgcctcgaggctcagtgcctcgaagctagatttgcatttggctgcgcctgacaggctttcagtttctgctcaaattgtgcggaagggcctgaggtgtttgctaaagcctgccgcgccctgctcgacccgtatcaccgcacaggcaccccacctgcatgttacctcctggtaatgctcgcccacttatatagtgcacattttgttgcagttgtttcaaagatgagaaaaacagggcaataggaaagaccatcagtgacatttctggagtcgtatgccccaagcaacttaatctggttttcatgaacttcgttaccctgtgcagacgtctagccccttacagtggttctagcacagagaatgacagaagaac

SEQ ID NO: 9184 - DNA, 895 bp, Artificial sequence
  DNA replication origin
atcccatctaggaagtgaggagcgcctcttcccagccgccatcccatctaggaagtgaggagcgtctctgcctggccgcccatcgtctgagatgtggggagcgcctctgccccgccaccccgtctgggatatgaggagcgcctctgcccggccgcgaccccgtctgggaggtgaggagcgtctctgcccggccgccccgtctgagaagtgaggagaccctctgcctggcaaccgccccgtctgagaagtgaggagcccctccgcccggcagctgccccgtctgagaagtgaggagcccctccgcccggcagccaccccgtctgggaagtgaggagcgtctccgcccggcagccgccccgtccgggagggaggtgggggggtcagccccccgcccggccagccaccccattctggaggtgaggggcgcctctgcccggccgcccctactgggaagtgaggagcccctctgcctggccaccaccccgtctgggaggtgtacccaacagctcattgagaacgggccatgatgacaatggcggttttgtggaatagaaaggggggaaaggtggggaaaagattgagaaatcggatggttgccgtgtctgtgtagaaagaggtagacatgggagacttttcagtttgttctgtactaagaaaaattcttctgccttgggatcctgttgatctgtgaccttacctccaaccctgtgctctctgaaacatgtgctgtgtccactcagggttaaatggattaagggcggtgcaagatgtgctttgttaaacagatgcttgaaggcagcatgctcgttaagagtcatcaccactccctaatctcaagtacccagggacacaaacactgcggaaggccgcagggtcctctgcctaggaaaaccag

SEQ ID NO: 9185 - DNA, 1306 bp, Artificial sequence
  DNA replication origin
tgccttcaagcatctgtttaacaaagcacatcttgcaccgcccttaatccatttaaccctgagtggacacagcacatgtttcagagagcacagggttggaggtaaggtcacagatcaacaggatcccaaggcagaagaatttttcttagtacagaacaaactgaaaagtctcccatgtctacctctttctacacagacacggcaaccatccgatttctcaatcttttccccacctttcccccctttctattccacaaaaccgccattgtcatcatggcccgttctcaatgagctgttgggtacacctcccagacggggtggtggccaggcagaggggctcctcacttcccagtaggggcggccgggcagaggcgcccctcacctccagaatggggtggctggccgggcggggggctgacccccccacctccctcccggacggggcggctgccgggcggagacgctcctcacttcccagacggggtggctgccgggcggaggggctcctcacttctcagacggggcagctgccgggcggaggggctcctcacttctcagacggggcggttgccaggcagagggtctcctcacttctcagacggggcggccgggcagagacgctcctcacctcccagacggggtcgcggccgggcagaggcgctcctcatatcccagacggggtggcggggcagaggcgctccccacatctcagacgatgggcggccaggcagagacgctcctcacttcctagatgggatggcggctgggaagaggcgctcctcacttcctagatgggatggcggccgagcagagacgctcctcactttccagactgggcagccaggcagaggggctcctcacatcccagacgatggggggccaggcagagacgctcctcacttcccagagggggtggcagccaggcagaggctgcaatctcggcactttgggaggccaaggcaggcggctgggaggtggaggttgtagcgagccgagatcacgccactgcactccagcctgggcaccattgagcactgagtgaacaagactccgtctgcaatcccggcacctcgggaggccgaggctggcggatcactcgcggttaggagctggagaccagcctggccaacacagcaaaaccccgtctccaccaaaaaaatacgaaaaccagtcaggtgtggtggcgcgcgcctgcaatcgcaggcactcggcaggctgaggcaggagaatcaggcagggaggttgcagtgagccgagatggcagcagtacagtccagcttcggctgggcatcagagggagaccgtg

SEQ ID NO: 9186 - DNA, 1596 bp, Artificial sequence
  DNA replication origin
gagagggcacaaaggctccccacgccgcgccccgagcccctccggcaccccaagggcggtccggggtggtgggaaagcgccaagccctgggagtgcgtcggtgggtccgggacggcggggcctccgccagggctcctggccctcgatgacctcggctgagaccgcgagccgcgcggcggaaagcggaggaactcccgtccggccctgtagccgcccgcaccgcgccccgtcacccgccgccccttcgcgtccgggcgctccagccgcggggccccggaagctcctggtccctggcctcccctgcttggttcggggcggttggccgtggacgcgccccgactctagtcccttccgtccagccgcccgccccaggatgtccccccaccgcagccccgccgtggccaggaggtgtgggcggccacgccggagggacccacggcggcgccggacgcccgcccttcctaggccctggcccggccggggtgggccgggacgttccctgttgcataggcatttatttattcagcagctactacgtacgtgctggcccgcactgccgagggaccggacgcctgccccaggcgggacaatgccgggtgcagcgctggcggggcctggacgccaagcttcagggtccccagcccctcagtcagagggggcgcctcccaggccctggactcctctccagccgggtctacaccaccgtcccccgtcatcttcttctgggttactgagcagcttcttttaaaatagcaacaccgaggaaggccccgaagcccagtcttgcacctcgtggtgtgaagtcgtttaatcctgcccgctaatgcgtaaggactttccaccgtgtgcaggactccgcgctgggcaggggctctcgcagggtttgaaccgacctccgcctcccctgcgggttcacaggcctgcgaggaagtcgcgtgaaggagattcgctactgtgtgaggctggcctgcgcggcgtgggcagtagctgtccggggctggggacagctttcggctccccaggccatcccgtcggggcatctgcggccaatctcgaaggtggagaggctcagggttggaacagacttcacggaaggggtcctagaagaggaaaggggtcgtgtttgcccttagagcagtctgggcgtgaagcggaaactttaaaccaccagaaactctggagagcttggagcacctgggaaggagcaaccagagtgggccggaggtagggaaggaaggcacccacggcgaatttgcccgctttgaccgcatttagggcggccgcttgtgcagccagccttctggaaggtaggctttgcgcttggtgaagagaagcccccacctccggatctgtgttccgccccagtccattcatcaggaggtgatcacacaagtcaagcttctctagttcccggtggaatgagacgccctggtggggtcttaaggttgaacgtttgaatactgtaaaaaagatgggacctgcctacaattaatctctcacactactgagcgaatgtgcgttgttttggacttccctaaattggcccaaatgcatagccaacacttgaattgcggtgtactaacaacatcattcagc

SEQ ID NO: 9187 - DNA, 1170 bp, Artificial sequence
  DNA replication origin
acatctttcctgttatttcctgagagtggagggtggagaggagcccgcagggttcttggtcacacacaccggagagcaggtgagtctgatgcttgcgtttggtgccggcggggcaggccggggcggggcgggagagtaggggggagaggctgctcctccccttccatgtcttcttgcttcatggacgtcttgtcagctccttgctgtaggggtaacagtcacagattagaggagtagaagtagactattcattgtcttcaactgtaaacaatacgccctacttgtccttattactgctactcaaacatcaacatcttagaaaaaatgcctcctccctccagatcttcttcagactgaaaccctatcgcaggggcctcccgcttgcacggggtctcagccacaaatcatcagaggcagcggctccacagctgcccccttccgggctctgacgacccatcccttagagccaggtggggagggagggagaggtgatcaagaggaatggcgggaaccaaccccggaggggactgagctggcggtcaggctccagcagaacttgcctttggttgtccagagagagcatggctgctggacgcccaggcaggctgcaaaccgtgcccgttagacgtgtctagtgctgcagcgtggaacggggcttggggctgagtgcgccctacgtttgcctgtggaagatgagcaggaagggagaagggaaggcagggagaaaggagggagggaggaaggaaagaagggagagagagggggaggaaagaagggagggaggcagaaaggagaagggaaggaagaaagaaaaagggagggaagaaagaaaggagggagggaaggaaggaagaagggaaggaagaaagaaggaaagggacgatgttggaggaaacccagactcggaggataggcagactgaagttttgaagaggtgtggcttaggcctgagggaagaagagccaccggccatggctaactcaaggtgggctcacatctgagggtaggcgtcatgtttagaatggtgagtttcattttcaacttttttttcaacatctcctctttcccatagtttgattttgtaaggccttagatgcatgttaattttcctgtctgcagggcttggatttgatggacggactagttgccccactgggatcctgaacggcc

SEQ ID NO: 9188 - DNA, 766 bp, Artificial sequence
  DNA replication origin
gaccccgacggccagcatgggttgtcttgtgtggttttcttgcccatcctccagctgggagaaggggccacgtccctgcgctggatcatagcaggcgtttgatggccatctctccaacaagagacagcatgcagtggactcctatggtgtgccaagcccttcacctgccttatctcctagtcctcccaaccagccttagggggtggggactagtaatagccacagttttcaggtgagggagctaggcatagaaagcttcagcaacctccccaaggtcaggcatgtggccagtaagtgctggggccaggcctgcacccgagcacctgcactcctgggctgagtgaataaacgcacgagtccaggcatgccagggagacatctttcctgttatttcctgagagtggagggtggagaggagcccgcagggttcttggtcacacacaccggagagcaggtgagtctgatgcttgcgtttggtgccggcggggcaggccggggcggggcgggagagtaggggggagaggctgctcctccccttccatgtcttcttgcttcatggacgtcttgtcagctccttgctgtaggggtaacagtcacagattagaggagtagaagtagactattcattgtcttcaactgtaaacaatacgccctacttgtccttattactgctactcaaacatcaacatcttagaaaaaatgcctcctccctccagatcttcttcagactgaaaccctatcgcaggggcctcccgcttgcacgggg

SEQ ID NO: 9189 - DNA, 1506 bp, Artificial sequence
  DNA replication origin
cctgcagtgccttcacccaatcagccaagctgttccccctaatctgaggggtgaatgcagagcttacttagggctgtgcccattacccagtccctgaaatgcacctttacggcctgggagaggagggagggggtgtggagtgaagagtcccagcaccaaatgacgggcacaaggagcagtcaggcaggtacgaactagctaaggtctattgggcatctttagtaggtctcatttgatcctccaaatattctcatctagaatgagaagaggctcagagaaggtaagcaagttgcaaaagtcacacaggtagtatcagaggtcaccagcctggaggaagaggaagggcaggagcagctgaggcatctggcagtgggcagggacaccccgggagatgagatcgcagaggggggtggcagagaggtggggagtgggggatggggcagcaccgcaggggccgggcggggtgggggtggaagggggacaggcacgtggggacccccacagagccactgcgctgggggcgggtaaggaagagggcgtgggggaagcctgggcaccgggcagaggtggacagtggggagggggaggagcgggggagcagaggcgaggaggagggaccccggtggggagcgcaggagttcctgctgtggtctttgcagagaggccagaataagagataagaaagtcaaggtggatggaaaagaaggaaaacggatcattcccggcaacgtgggtgagccgggcggggcggggagccggggtcgggggagcggggcctttatgtgaagtggagtcagtcaggcacagaaagacgggccccgcgtgctctcacttctgtggaagctgaaaaagtgggccccagagggtccacttggagggcagaatagcgcaacagcaataacacaaaaacaaaaacaaaaaggctgagtttcattcacattggaaggacgtgtgaatcgtgtgtccccagacaagccttgtccctgctaataaacgtggtcaaatattccacttttattacctttgaagaaaattacctgctgaatgtttcaaagcctggagtctccaggccaataccaattattgtaattgtccttaaaggattaattgcttgagtgttttagtttttattttatagagaggatttcttctcccgacccccgccttacagactattcaatacgggataccaatatcctaaggactacacgttccaggaattccctgcggggttctcaggacctgccgctagtgttaaaaagatcattaagagcagaacatctcttccttccctggagctcctgctaatttgtgtttaaagacctagactctagcagagttcatctttacagcgaggtaatatattatttacgtggactccagacaccaaaacatctataaattcacacatagttaaccttcttctcctccttcctttctttccttattaagcaaattcaagacctggtctgttacccgatataaagatctttcaacagcttcacc

SEQ ID NO: 9190 - DNA, 1027 bp, Artificial sequence
  DNA replication origin
tgcttatgaaaaattaaaaatcagcctgtagtattaatacctaagggggctttggcagatatggctaaggatgctccttccctcatttcctcaggggattccgggggcggctctaacctttaaaactgcctctgcctgcttctgcctctgctcgaggcgtgggagttctatggccattgccttttacaagatgcagcagagaagagaaggcaggagaagcaatgccctggcttttatgggcataataacaggtttcggaggacaaatgaagacccaggctacctcatatccagataagaaattatccaatggaaaggaaaacttgaagggtgaggagggaagctagggaattcgactgctggtatggttcccagaagagaggccccttgtcctgcctacctgtacctccaaggccgaattgcaactggccagcggggacgcggcggtggggtggggcgggggggggggggcgggtggtgcggggagaaagggaagcagagaggtggggaaggatgatggcaattttaaaaggtttgggggacccatgagtaaggtggccatgcccattcccagcagaagccagcgaagctgcaagatctggagcatccatcccttctccctggcacggcacagaggagtagactagaaatgacagtgtgccatgtgtgggcaagtggactgagagggcctcagagagaacctgtgctccccagcacagtgcagtaggcgatggaatgttcacccgtgcctgagaggggcatgagcacagcagggagagtcacctgacctaaagaggcgctgctacagggatgaggaggaagcagcagtggcctttgtgggccaaaacctggtgggaagatggctatttcaggggatgcctgggagcgcctcaccttgtccctgaccctgcctttgtgcctcagcactgtgtcagctccctggaatggatactcaaattcgtacagaaggaagtaaaatcttcaggtgactgaaattaagtttccaccatttggtaggatgggacctt

SEQ ID NO: 9191 - DNA, 1319 bp, Artificial sequence
  DNA replication origin
ctccctccacacctccctgcaagctgagggagcgggctccggccttggccagcccagaaaggggctcccacagtgcagtggtgggctgaagggctcctcaagtgccgccaaagtgggagcccaggcagaggaggcgccgagagcaagcgaggattgtgaggacttgccagcacgctgtcacctctcaatgcctgtaatcctagcattttaggaggccggagtacgcagataacttgaggtcaggagttcgagaccagcctgaccaacatggtgaaaccccgtctctactaaaaatacaaaaaaatagcgccccagaagagcctcgtcctgggcagcggtggcgcggcggtcgctgtgatagccacggggctgggcggctgaccgctgggctaggagagggcccagcgccccgaatcttggtggccgctgctggagcgcggcctgcgccatggccacctccgccgcctcctccgagcgtttcaagaagctgcacgaaatcttccgcggcctccacgaagacctacaaggggtgcccgagcagctgctggggacggcggggaccgaagagaataagtcgatcagggattttgatgaaaagcaacaggaagcaaatgaaatgctggcagggatggaggaggagctacgttatgcacccctgtctttccataacaccatgacgtctaagcttcgaaactaccggaaggaccttgccaaactccatcgggaggtgagaagcacgcctttgacagccacaccaggagggcgaggagacatgaaatatgacatatatgctgtagagaatgagcatatgaatcggctacagtctcaaagggcaatgcttctgcaaggtcctgaaaacctgaaccgggccacccaaagtattgaacgttctcatcagattgccacggagactgaccagattggctcagaaaccatagaagagctgggggaacaacgagaccatttagaacgcaccaagagtagactgataaacacaactgaaaacttgagcaaaagtcgaaagattctccgttcaatgtccagaaaagtgacaaccaacaagctgctgttttccatcatcatcttactggagctcgccgtcctgggaggcctggtttactacagattctttcgcaaccattgaacttcctgtagggaagggtttgtggaccagaactttcaccttgtgaatgcatgaggttagggatgtggatggaataagcatattgctgctgagggctaacagttcaggcatgcactgtgtaaccaggctgtgggaggaggcaggaaagatggaaagccacttaaatgtgaaggaa

SEQ ID NO: 9192 - DNA, 1102 bp, Artificial sequence
  DNA replication origin
cgctccgccgcccgggcgattggtctgccggctctgggctagcgggggagggtgtggggggcggccaaacggcaggccgcgccccgccccccttaaaggggaagcccggggagccagtctctgcgcctcgcgtctgaatgggacccgggaggggaggcggctcggtccttcgtgccgtcctccccgctgggaggggcagctccagctccgctcggctcgctccgcccggccacaccggctttttccccatcaggcggtccgagtgcggctcctcgcgagcctgcaaaggagcagcaggcggttccttttcggacgacctggagcgaggcctgcgggactgcgcgccccggcgggcggcgtgcggctcccggcatgcgcggcggctgcgttcccgccgcctccgagctcgcctggggctgccgcccgcctcctgccgggccctcgggctcgcccggcaccgcggggcttgatcagggaggtaggcggtgctccctccggcccccggcgtcgtgtgccctgcgggtttcgtggcccttcccctacgctggaatcttctgtgtcatttagggggaggggatgcgggacggcatctgtttgacaacgcattggtcccacagacagcctttaaaaacaactgcttttggggggtgtcagaacatttaagcacaggacgtcggtgaggcttcctggcggagtggggcacacgccagctttacgggactttttgctcagtcctgccccaggactgcaatcggaggggacctggggcatggaggagacgcgagtgaaaacctagtcagcgggcgggccctcggccccataatctacgtgatctcctagtggggtttaatttcggtgtagtgtaaatgagatgtcaggcagaggagctgattttaattacagatggacatttttgaaagaaatgggtgcaaatagaatgaatgcatggataattttaatggaatgcctatgtaaacaaggccaattgtgagtactacctttgagttaaaatgtgagtgagtggtgacaaatttggatcttcttagatccagtttgcagcgttggtacacctgaatggtgacctatttagagcacttttgaa

SEQ ID NO: 9193 - DNA, 1155 bp, Artificial sequence
  DNA replication origin
ggggccgcttgtcagcccccgctgcagacccagcggctgcagctgccgctgaggggaatcagccattttaagcagcaagcatttgttcaggcgctggcccgccccgtgccgcagaccctgcggccccggcccgggactgcagccgggcaagggtcggagggagtgagcggccgggctcccgctggtctgcggggcgcgcttccccacctcactcgcccccaccccggagtgcgggtgctttggaacgtgcggggggagggggcgagaggccgcggaggcggactgagggggccttcctccgcgctcctgccccggcccggaggagagcagtccgttccgctctctcgccccgggaaagttcgcgggcgccccgcgttgtagccctagcccagttctttcggcaaaatggttaagaggggaggggtcccccgcgggagaggaagagaggggcgtgtgtggcggggagggcccccgcgccgggggcggggcctgcgggcttgacgaggggcgtgggaggggcgcggcgcgcgttcccgcgggcctggaaaatggctggtcgcgagaggggcggtggcgagctggctgctggggagggagtcggggctgtgcgggggcgttggttcggccccagcggagtccgaatcggggtttgcagcatgttttgcggtgatgtttccaacctctttcccagtcaatggatcaggacggcgatcagcagctcggaccgtcgcggatcctggctccgcgtaggttccgggacatgtgtcacttccgggcttcaggaggaagtgggttggttgactgggcaaccgcctggcgtccccgagcccctccttctccgactttaagtgtggaggcgaaaccaccctttgccggccgacccgggaacccgggacagaatcgaccttccttacagtgttaccacctactatcggtggtgctactaggagggcagtttaaaaggggaaatgtgttgcgcttaataaccttgaatcgaggaacagaccttgaacatagtatggaaacagccatacgaactttaaagataatttcctggacccattctctgtttttgtagacacgccagtaatcctatactttaaaagtctctaaggaatccacttcttgggtgacataagtgtctgatgtttttta

SEQ ID NO: 9194 - DNA, 1649 bp, Artificial sequence
  DNA replication origin
tgtgaggatgagtgtgagtgtgggtgagtgtgaggatgagtgtgagtgtgggtgtgaggatgagtgtgagtgtgtgtggtgtgaggatgagtgtgggtgagaggatgagtgtgtgtgggtgagtgcgaggatgagtgtgagagtgggggtgagtgtgaggatgagtgtgagtgtgggtgtgaggatgagtgtgagtgtggtgtgaggatgagtgtgagtgtgtgtggtgtgaggatgagtgtgggtgagaggatgagtgtgtgtgggtgagtgtgaggatgagtgtgagagtgggggtgagtgtgaggatgagtgtgagtgtgggtgagtgtgaggatgagtgtgagtgtgggtgtgaggatgagtgtgagtgtggtgtgaggatgagtgtgagtgtgtgtggtgtgaggatgagtgggtgagaggatgagtgtgtgtgggtgagtgtgaggatgagtgtgagagtgggggtgagtgtgaggatgagtgtgagtgtgggtgagtgtgaggatgagtgtgagtgtgggtgagtgtgaggatgagtgtgagtgtgggtgtgaggatgagtgtgagaaagtgggtgagcgtgggtgaaagcgagtgtgagtgtgggtgagcatgagaaagtgtgggtgagtgtaggtgagggtgagtgggtgacagtatgagtgagggtaagtgtgggtgactgggtgagggtgggtgtgggtatgagggtaagcatgggtgagggtgtgtgggtgggtgagggcgaggatctgggtgtgtgggtgagtgtgcatgagtgtgggtgtgggtgagtgtgtgggtgagtgtgggtgagagtgagggtgagtgtgagggtgagggtgtgggtgagggtgagtgtgggtgagtgagggtgtgggtgtatgggtgagggtgttagggtgagtgtgggggtgagtgtgggtgagggtgagtgaggatgtgggtgtgggtgaatgtgagtgtgggtgtgggtgagtctgaatgtgggtgtgggtgtgagtgggtgagggtgagtgtgaggatgagtgtgggtgagggtgagtgagagtgggtgaggtgtgggtgagggttgtgagggtgtgagggtaagggtgtgagtgcgggtgagtgagggtaagtgtggatggggagggtgtgtgagtgggtgtgggtgagtgtgagtacaggttagggtaagtgtggatgggggagggtgagcgtgagtgggtgtgggtgagtgtgggtgagtgtgagtgcaggtgagggtgtgtggatgggggagggtaagcgtgagtgggtgtgtgtgtgggtgggtgagtgtgagtgagtgcaggtgagtgagggtaagtgtggatggggagggtgagcgtgagtgggtgtgtgtgtgggggggtgagtgtgggtgagtgtgagtgagtgcaggtgagggtaagtgtgggtgaatgtgggtcaccctgcgatgggagggcatcctgaccggagcgggtcccacctggcatcctgaactgctgggatgcccctatttccccccacttccttttcccaccacccggacctgaaataaggggatacttcttacttgttttgattagttcttcttaaatatttgtatggctcacatttattacaatgtgtaacatgagaagtgttttggcctttat

SEQ ID NO: 9195 - DNA, 874 bp, Artificial sequence
  DNA replication origin
ggcgttcgcaacaacgaagagaaagcgaaggcagcggcccagaggccgggcgtccccctttcgcgcctcggctgtgggggcggcacagtcttggcactggcagacgccaactgcgcgcgccccgagcctcggcagcgcccagccgccggcagtgggctgtgggctacgagccggagccgcggctggtggggcctgggaagtgcagcgtctccctgacgcttggaggagcggcgtaaagttccgggacagcgattggtgtagagcgcggtcactcaggcccagaaagtgcttcctgtgccgggggaggtgggtacagggaagtctcgcctgttggaactggctgtggggctgcggcggtggggacgggccacggcgttctgtgacatccccccgcctcccctcgtcttctcccggctggcggcgaccggcctcagctgcagcgggcccggggcgtggggcctgggtgagtccgggcccggagacccgcggggccaggcgggaccgccgaggaagagagctagctcttaacaatgctggtttgggggcctgcgttttgcaatcccatcgacgggtgcaatcctggcacttctcttttagacccgaggaaagacgcacccgtttctagggcctcccaggtttaagacgggggaataagaggaggaagatatctgcctttagggactgcaaggttatttctctacctttcctcactggagctaccagaacagatactgggaccatggggacggtgtttctcctacgttggattgttgcttctcatctttaacatcgaaacatcatttcgtccccacactgtcgttcctcttttgttcgttttgtagttgaacatctctgaatcccattcttagcagcc

SEQ ID NO: 9196 - DNA, 1300 bp, Artificial sequence
  DNA replication origin
cctccgcctcccgggttcaaatgattctcgcacctcagcctccccagtagctgggattacagatgtctgccaccacgccaggctaatttaattttttattttttattttttttttttgagacggagtctggctctttcccccaggctggagtgcagtggcgggatctcggctcactgcaagctccgcctcccgggttcacgccattctcctgcctcagcctcccgagtagctgggactacaggcgcccgcaccacgcccggctaatttttttgtatttttagtagagacggggtttcaccgtgttagccaggatggtttgatcttatgacctcgtgatccgcccgcctcggcctcccaaagtgctgggattacaggcgtgagccaccgcgcccggcctaatttttgtatttttagtagagatgcggtttcaccttgttggccaggctggtctggaactcctgacctcaggtgacccacccgccttgtcctctcagagtgctgggattacaggcgcgccacctagcctggctaatttttttagcagagacggtttttatttttagtagagacggtttcaccgtgttggccagtctggtctcgaactcatgacctcaagtgaaccgcccccctcagccactcaaagtgctgggattacaggcgtgagccgccgcgccagcctgggtggattttctgtgcacggaagggaagcagcaccggaacccctcctgttcccctaagcaccgtggacactgcccacctgacagcggagggggagcagccggaaaataaaatgtcgcagggcgcagttacgcgtatctgttagtgtttgtgtgtggtaaaagatctgtcactcaatgagtgcccgttttcaaagaatgaacataaaatgaacatttattaaacataatttaatctcttctccatgtcaggccctttcactgatttcccaaggtgaccattcggaccattcgtacattaatattgattttaagttgataaaggttgtgtttgaagttgtcttcttgattttatccttgcagctgaagataccttgtgaactttacttttcagagcagagcgtctgagcggtgggcaaggcacaaagcgcgagggaagccgctggagggagctgctctcctgcacggagggcgcaggcgccagctgctgccaacaccacgggaaagccctcaccctaaccttggactcctgaccccaggctcctaatgcacatcattattccataagaacaggggagaaacggagagggcacgaagcacaaacaccgaagctctgggataa

SEQ ID NO: 9197 - DNA, 1167 bp, Artificial sequence
  DNA replication origin
agacctcatctcaaaaaaaaaaaaaaaaaacaaaagaggaaacaaacaaacaaaaaacctacaccagcccagcctctctagcgaggctcacccgcccgcccggcccccgcacccggtctcggcttctctggccaggccgcggggccgttcggcgcggggcggggcgtcggggagtttccgcagcggttagaccggccaggggacctcgggacaatgagcctttctgttttaaagccggaacccagccgggccgcgccgcgaggaggctcccctgaggctggcaggagagacctgcagaaactcgtgcgcgccgagcgaggcgggcgccctggggctggggcacgcggccggcgggggccgccagggagcggccgtggcgggaccaggactacggtgcgccccgccgccgccagcacccgccttgggaagcccgtccgacgcgtacgctgcaggggccttcaataggggctgtcgccacctgcacccgcgccgctgcggttcgcaggaaactcctgtggcttttcggaagcacaatgcagaacgcccggtgagggtttgcaaagccgccctgggagatgccgcagtgtgaaacctttacggttgcacctggcctctctgctgcatctggcctgtctgctgcacctggcctctctgccccacctggcctctctgccccacctggcctctctgctgcatctggcctctgctgcgcctggcctgtctgctgcatctggcgcctgttgcacctggcctcttggctgcaactggcctctcagctgcgcctctttgttgcctctgcaaactcgggtgccctggagcttcctacccagaagtgagtgccgtgcacactgcaggtgcgaggtgcccctccttctgtctgttctgtttggtttggcagatgacagcactctcagtggggcctgaaaccttgacagtcatggctttctttgtaaggactctcttccttcattaaatcgcttgtatttggattacagagatctgtcataaagagattcagtacttaataataacgtggggaaaggatcaccaggtactgttaagaaaaaagcaaggacagaacagtgaatacggtaatgatcttgtttcgtaatacaaaacaaaacagacactatgcaaatacaaacccaaaggaaaatgatcatgcat

SEQ ID NO: 9198 - DNA, 973 bp, Artificial sequence
  DNA replication origin
cagccccccacccggccagccgccccgtccgggagggaggtggggggatcagccccccgcctggccagccaccccgtccgggaggtgaggggcgcctctgcccggccgcccttattggaaagtgaggagcccctctgcccggccagccgccccgtccgggagggaggtgggggggtcagccccccttccggccggccgccccgtccgggaggtgaggggcgcctctgcccggccgcccctactgggaagtgaggacccctctgcccagccagccgccccatccgggagggaggtgggggggacagccccccgcccggccagccgccctatccaggaggtgaggggcgcctctgcccggccgcccctactgggaagtgaggagccgctctgcctggccagctgccccgtccgggagggtggtggggggtcagcccccgcccggccagccgccccatccgggaggtgaggggcgcttctgcccggccgcccctactgggaagtgaggagcccctctgcccggccacgaccccgtctgggaggtgtgcccagcggctcattggggatgggccatgatgacaatggcggttttgtggaatagaaaggcgggaagggtggggaaaaaattgagaaatcggatggttgccgggtctgtgtggatagaagtagacatgggagacttttcattttgttctgtactaagaaaaattcttctgccttgggatcctgttgatctctgaccttacccccaaccctgtgctctctgaaacatgtgctgtgtccactcagggttgaatggattaagggtggtgcaagatgtgctttgttaaacagatgcttgaaggcagcatgctccttaagagtcatcaccactccctaatctcaagtacccagggacacaaacactgcggaaggccccagcgtcctctgcctaggaaaaccagagacctttgttcacttgtttatctgctgacct

SEQ ID NO: 9199 - DNA, 1555 bp, Artificial sequence
  DNA replication origin
ggctgaccccccctcccccctcccggatggggcggctggccaggcggggggctgtcccccccacctccctcccggacggggcggctggccgggcagaggggtcctcacttcccagtaggggcggccgggcagaggcgcccctcacctcccggaaggggcggccggccggaaggagggctgacccccccacctccctcccggacggggcggctggccgaccccccccccgcctccctcccggacggggcggctggccgggcagaggggctcctcactttccagtaggggcggccgggcagaggcgcccctcacctcccggacggggcggctggccaggcggggggctgatccccccacctccctcccggacggggcggctggccgggcagaggggtcctcacttcccagtaggggaggccgggcagaggcgcccctcacctcccggacggggcggccagccgggcggggggctgacccccccacctccctcccggacggggtggctgccgggcggagacgctcctcacttcccagacggggtggttgccggacggaggggctcctcacttctcagacggggcggttgccaggcagagggtttcctcacttctcagacggagcggccgggcagagacgctcctcacctcccagacagggttgcggcccagcagaggcgctcctcacatcccagacagggcggtggggcagaggtgctccccacatctcagacgatgggcggccgggcagagacgctcctcacttcctagatgggatggcggcggggaagaggtgctcctcgcttcctagatgggatggcggccgggcagagacgctcctcactttccagactgggcagccaggcagaggggctcctcatatcccagacgatgggcggccaggcagagacgctcctcacttcccagacggggtggcggccgggcagaggctgcaatctcggctctttgggaggccaaggcaggcggctgggaggtgtaggttgtagtgagctgagatcacgccactgcactccagcctgggcaccattgagcactgagtgaacgagactccatctgcaatcccggcacctcgggaggccgaggctggcggatcactcgcggttaggagctggagaccagcccggccaacacagcgaaaccccgtctccaccaaaaaaaaacgaaaaccagtcaggcgtggcggcgcgcgcctgcaatcgcaggcactcggcaggctgaggcaggagaatcaggcagggaggttgcagtgagccgagatggcagcagtaccgtccagctttggctcggcatcagagggagaccgtggagggagagggagaccgtggagggagagggagagggagagccagacctattatttttaaactgtctctcatgcctgacactagactcatttgcagatttttaatttgtattttttagagacaggatctcatgctgttacctaggctaaagtgcaatggtgcaatcatagctcactgcagcctcgaactcctgcactcaagtgatcttcctgcctcagcctcccgagtagctgg

SEQ ID NO: 9200 - DNA, 1153 bp, Artificial sequence
  DNA replication origin
gctgggccgggggcgcgggccgggctgcccctggcctttcccccgccggcgcctctgccgggcccaggacgatggccagggagtgaggcgcgatctgcagaaacttctccatcttcccaggcatctgccgcgccgacctggctcaccgaggccgcctcccgccgctcccaggaacagccgccgggacgtggctgcaagaccagcggggagcgcgaccgtcccccagggcagggctggccgcgcctcccccgcgcccgcgtccctgcagcccgggcgcccggcgcagtccctgggcgcagcccgcgggtcgctgcggggaagggacggtgtgcggggcccgctccggcctgagctctggaccgcgttacctgcagctccgggccacccttcgggcagcgctcattttccggcctcggcaccctcgcctccccgggcgcccagcggccccgcgggggcggagacgcgggaggaggcagtgagggggcgggcagtgcgcaccgcgcccgggaaccccctcggctggacgcggcctgaggaatcccaaggagtcctatgagggaggtggtcggggagcgcggatggcctaggggtgagcctttgggtgttgggcctcgagggagatcagaaagcgggggttgcgggggacgcaacggcgacacttggaaggcacggattccggagcggcgagtgtcgctcctccccacgctccacccctgcccccacctcccacctctcgctggaacaagtggattcgctgactggttaatgaatgtacccttagaagtggctttttaaaaaacttagtcaaccaccaaaaattgtcatcagtccctcctcccaaactcttgaggaattctactctcttgtcttcagcatatactttggcctaccctagaggaaacccaatcaaccattaaccctcggtttatgaagaggttacagaaatttaccaggaaaggtaacgatgatgcttttaagaaaattccttacgtttgtttctgtgccaaattctgtatgacttatattttaatcgagagaggctagtagtcatatgtgaaaagagatgattgtcataagaagcattaagagttatgctacatttacccagagcggtatttaaatttcaacgtgcatcaccgtcacctgaacacgt

SEQ ID NO: 9201 - DNA, 895 bp, Artificial sequence
  DNA replication origin
gtctggaaagtgaggagcgtctctgcccagccgccatcccatctaggaagtgaggagggtctctgcccggccacccatcgtctgagatgtgaggagcccctctgccccgctgcccagtctgggaagtgaggaccgcctcttcccggccgccatcccatctaggaagtgacgcgcgcctctgccccaccaccccgtctgggatgtgaggagcgcctctgcccggtcgcgaccccgtctgggaggtgaggagcccctccgcccggcagccaccccgtctgggaggtggggagcgtctccgcccagcagccgccctgtccaggagggaggtggggagtcagcccccgcccagccggctaccccgtccgggaggtggggggcgcctctgcccggccgccccttctgggaagtgaggggcccctctgcccggccgccaccccgtctgggaggtgtactcaacagctcattgagaacgggccatgatgacgatggcggttttgtcgaatagaaaagggggaaatgtggggaaaagatagagaaatcagattgttgctgtgtctgtgtagaaggaagtagacataggagactccattttgttgtgtactaagaaaaattcttctgccttgggatcctgttgatctgtgaccttacctccaacacctgtgctctctgaaacatgtgctgtgtccactcagggttgaatggattaagggcggtgcaagatgtgctttgttaaacagatgcttgaaggcagcatgctcgttaagagtcatcaccactccctaatctcaagtacccagggacacaaacactgaggaaggccgcagggtcctctgcctaggaaaaccagagacctttgttcacttgtttatctgctgaccttccctccactgttgtc

SEQ ID NO: 9202 - DNA, 1150 bp, Artificial sequence
  DNA replication origin
gaggtaaggtcacagatcaacaggatcccaaggcagaagaatttttcttagtacacaacaaaatggagtctcctatgtctacttccttctacacagacacagcaacaatctgatttctctatcttttccccacatttcccccttttctattcgacaaaaccgccatcgtcatcatggcccgttctcaatgagctgttgagtacacctcccagacggggtggcggccgggcagaggggcccctcacttcccagaaggggcggccgggcagaggcgccccccacctcccggacggggtagccggctgggcgggggctgactccccacctccctcctggacagggcggctgctgggcggagacgctccccacctcccagacggggtggctgccgggcggaggggctcctcacctcccagacggggtcgcgaccgggcagaggcgctcctcacatcccagacggggtggtggggcagaggcgcgcgtcacttcctagatgggatggcggccgggaagaggcggtcctcacttcccagactgggcagcggggcagaggggctcctcacatctcagacgatgggtggccgggcagagaccctcctcacttcctagatgggatggcggctgggcagagacgctcctcactttccagactgggcagccaggcagaggggctcctcacatcccagacgatgggcggccaggcagagacgctcctcacttcccagagggggtggcagccaggcagaggctgcaatcttggcactttgggaggccaaggcagggggctgggaggtggaggttgtagagagccgagatcacgccgctgcactccagcctgggcaacattgagcactgagtgaacgagactccatctgcaatcccggcacctcgggaggccgaggctagcagatcactcccggttaggagctggagaccagcccggccaacacagcgaaaccccgtctccaccaaaaaaatacgaaaaccagtcaggcatggcggcgcgcgcccacaatcgcaggcactgggcaggttgaggcaggagaatcaggcagggaggttgcagtgagcagagatggtggcagtacagtcctgcttcggctgggcatcagagggagaccgtggaaagagagggagagggagactgtgg

SEQ ID NO: 9203 - DNA, 2962 bp, Artificial sequence
  DNA replication origin
atgctcaaaaagtttatatagattcttcaaggagaaaaaaaaaattttggagaatgccatattttccatccttaagacaaggatttgtgcttattattctttatgattttcatttatagtaattgatacttatgagatttctttttaaaaaaagtcaaaagggctgggcatggtggctcacacctgtaatcccagcactttgggaggccgaggcaggtggatcacttgaggtcaggagtttaagaccagcctgaccaacatggtgaaaccccgtctctactaaaaatacaaaaattagctgggcttggtggcaggtgcctgtaatcccagttacttgggaggctgaggcaggaggattgcttgaacccaggaggtggaggctgcagtaagccgagatcacaccactgcactccagcctgggtgacagagtgagactccgtctcaagaaaaaaagaagaagtcaaaagaagaagaacatgttgccaccttctcctccattctttcatcatgtgacaaatgggagaaaggatgagggaaaggatgagagaaaggatgagagaaaggatgagggaaaggatgagggaaaggatgagagaaaggatgagagaaacgatgagggaaaggatgagggaaaggatgagggaaaggatgagggaaaggatgagggaaacgatgagggaaaggatgagggaaacgatgagaaaggatgagggaaaggatgagagaaaggatgagagaaacgatgagggaaaggatgagagaaacgatgagagaaaggatgagggaaaggatgagagaaaggatgagggaaacgatgagggaaacgatgagggaaaggatgagggaaacgatgagggaaaggatgagagaaacgatgagaaaggatgagggaaaggatgagaaaaagaatgagagaaacgatggaaaggatgagagaaacgatgagggaaaggatgagggaaaggatgagagaaaggatgagagaaacgatgagggaaaggatgagagaaaggatgagggaaaggatgagggaaaggatgagggaaaggatgagggaaaggatgagagaaaggatgagggaaaggatgagagaaacgatgagggaaaggatgagaggatgagagaaaggatgagggaaaggatgagagaaaggatgagggaaaggatgagagaaacgatgagagaaacgatgagggaaaggatgagggaaaggatgagggaaaggatgagagaaacgatgagggaaaggatgagggaaaggatgagagaaacgatgagggaaaggatgagagaaaggatgagggaaaggatgagggaaaggatgagagaaaggatgagggaaaggatgagggaaaggatgagagaaaggatgagggaaaggatgagagaaaggatgagggaaaggatgagagaaacgatgagggaaaggatgagagaaaggatgagggaaaggatgagggaaaggatgagagaaaggatgagagaaaggatgagggaaaggatgagagaaaggatgagagaaaggatgagggaaaggatgagggaaacgatgagggaaaggatgagggaaaggatgagagaaaggatgagggaaaggatgagggaaaggatgagagaaaggatgagggaaaggatgagagaaaggatgagggaaaggatgagggaaacgatgagggaaaggatgagggaaaggatgagagaaacgatgagggaaaggatgagggaaaggatgagggaaaggatgagggaaaggatgagagaaacgatgagggaaaggatgagagaaaggatgagggaaaggatgagggaaaggatgagggaaaggatgagggaaaggatgagggaaacgatgagggaaaggatgagagaaaggatgagggaaaggatgagggaaaggatgagggaaaggatgagggaaaggatgagagaaaggatgagggaaaggatgagggaaaggatgagggaaaggatgagggaaaggatgagagaaacgatgagggaaaggatgagggaaaggatgagagaaacgatgagggaaaggatgagggaaaggatgagggaaaggatgagagaaacgatgagggaaaggatgagagaaaggatgagagaaaggatgagggaaaggatgagggaaaggatgagagaaaggatgagggaaaggttgagagaaacgatgagggaaaggatgagagaaaggatgagggaaaggatgagggaaaggatgagggaaaggatgagggaaaggatgagggaaaggatgagggaaaggatgagagaaaggatgagggaaaggatgatgctgccttatcatactctcatcaaggttaattctaggttgaacgatctgaccacaccctgtacctcggaagcagcattcccttcagccatgggaggttctttttttctgcatttagcggtggaacttttaagatttatgttaataaggaagaggaaattaatttaaacctatttaataaaacgaatggttttgtaagttggtgtaagggtgcgtcagcgtaagtagtagagagtagaaatctataagttcctgatggtcaaaatggtcaagttgttattcacacttgtgattgtagggtatgggtgtcaactgctttttcaaacatagatggcaaatgtgaagaacttcccagaactgaggttgaagctccagataaggtaggcaagtcatttactgatgaacccggggcactttggagtgggaaaggcagtattaggaataatcgcacgcaggaacttttctgggcagagtgggacttacggtcaccctagttctagacctcagcaatggttcccagattccataattcaaggtgaaatgaaatcaaagtaaggcatttcctccttgttctggcatctaagttgaaggactgttctcttctataaaatacaggtggcttaaggtcctggaaatgccgaaaggagattgtcttcattgtcaggc

SEQ ID NO: 9204 - DNA, 1519 bp, Artificial sequence
  DNA replication origin
gtctgccgccgcccctccggcctcccgcacgcccgatcccgggtcagccccggaggcctcggctgcctcatttgtttgggtcttttgtgccgtggctcccagttggccaagcactcctgcgctgaatcgggccattgtctgcgctcccattgccttcacgctgcaagtctcggcgcccccaccccgcccgccccctccccgcctcctcccggccggggagcctcctaacgtgcctttccccccaggaatctggaagctataagccgggcggattgcaaatgaagtgtaatgcattgtgggacgtgtgtaaaatcggagccttcgccgtgggggtgtgggggggcgtggggagggccggacccgccgctggcggtgtagacgccgacgaggaggggctgggaaaatgtgcgcagagtccgcccgggtcgtgcccgccgtagacggatgaaggagcgcgctgcgccccggcgctgaggccccgaggatcggggcggcaggtcgccctccccaccatgaagaagacccggagcacaaccttgcggcgagcctggcctagctcggatttctcggaccgggcctcggaccgcatgaggtcccgcagcgagaaggactaccgcctgcacaagcgtttccccgcggccttcgcgccccaggcttcgcggggctacatgacatcaggttggttggtgaccgcgtttctgcccccgggccggggccgcgggacgtgctcggtacgccgcggcccgggtgcttggaggagaggacgggcagtgatggatgcgataagttatggggaaagcaggaaaaaattagctcccatccaccattttgtacctcccaagatccacagcaggccctctcaatatggggttggagagctattagttaggtaaaacgagggaggggggacgagccgggcgttttggctgcagggagataaatgactgcaagccccggcgctgcagcctcctcgagctttgtggaggatcctgcgcccagggttgcctgcagtgccaggcttgctggctgctgcattgtggccggttatctgagtgggtatttccagcagccccctgttctccaaaaggaacaggttccatgcgcagctctggatgggctgagtcaggggagagtcctgcagacatcccaggctggtctgatttgcacgcagagaactgtgttggagcttactgaacgcgttctgtgggggtaatggtgtggatgcggattgaatgctcacatgattctgtgtggatttaacatatgttgctttgaattaggctgtatggaaagaatggaggctgtatcatgtgtttgcatgtcagacaggagggacaaacaaaacggtaaatggaaagggaaggcttcaaaaaagatttccgcttaaaatgcagtgctgtgaaaagccttcctgaaggagccagttctttttttggaaatacaacggaatggctttggtttgatttgggaacccagggatgaaattcttgagggaaatgctgaaggaggaaaagcctgg

SEQ ID NO: 9205 - DNA, 857 bp, Artificial sequence
  DNA replication origin
gttcttcaactctgataagttattctagaagaatatctttctgataccattagacagttttatcatctgtccttatgtaatgtccttagttttatcagctcaaaaatagggatgcaattgatatcaacatattgagatcattaggggtttatcattggaaaaggggtaagagaggagctttagacgggaagctcattcgggcacttatgcttagggtgacagaggaaaccagtggcgggggttgtggggggcggtttccagtagtgcaggtgaaaacctaaagcaaaagaaaggaacggatttagagacatccagagagtgagtagagtggctctgttgactgtttcattatgagggaagggggtggttagggaagaagggacagcaggtgtctgtctcacattcatgtgtcatgtggctgccccagtggtggtgctacagtccaaaccaggagatacaagaaggggcaggatttatgggatagagtgaacattcagttttggacatgttgagtttgaggcactgggggtatctaggtggaatcatctgataggtaaagagagaggggggcagggagggagggagagggagagattgagaaagacaggtgggtcaggcaatcagagagagttttgggaccagggagggagttttgaccccttcagctctatatggccaagagtggttatgcctgagacggtgggtgggcctgcccctgtggggcacatagctggggaagagaggaggtgtgggtgaggatggagccttcgagagctctcttttagacgccagcagaggaaacagttataagaagaggaaactcagaccatagttatgaatttagaatctgcatttgg

SEQ ID NO: 9206 - DNA, 1184 bp, Artificial sequence
  DNA replication origin
gggtccccgcaggcgcccccggccggcctcgcgcgctgggcctgacccgcctcggctacggagcgggcgaggtgggggcggggagcctccggggaccgagcggcgcagtgggggccggcgtcccctcggggtcccggggcgcgggccgcggcggggtggggacgcgagtgcccgccccgtgccctccgacccggctccgggcgccgggtgacattcgcccgctggccgaacatggttggtgcaaagccgcggcggccgccacttcctttccgcctcgccggtagggctcgcccaccgagtgaagccggccgcggccaatcgcggcgcccgcctgctcccagtggcacggcctgggggccggcgtccgccggggctggggaagccgttccaagttccaagggtcgcgggtgtaactcatgcccctcccagcacgcgccggcgtctccccttggcccccggtctgggtgcgtttgccaccctctcctccttgttccctaagaagcgggggaggggaaggaggcgggcagcctgggcagggcgccagagccgtggtcgggcaccaggtgaaacgcccgggtcagtctgtgtaggccggacccttggcgctcggctgcggatgtgatcccggggactggcggccgaggtagctcagaagagcgaggtggctttcgctcgtttctgacccgctactgtctgaaacttggggacatattgcccgccccctccctcttcaacctcctccctccggttgctccttgtccttggttatggaaggaaaaaactcagttgttctaaatgaggaaaagtggtgctggcattcgtcttcagccaccggcctccttatggctgtgactcggtctgcttttgatgaatggccaggaggtatggaggatagttagatttcctgttgtggattttcaggcatcaccgagactgctgtcaagcctgcagtcatttactagttttcatatcgactgcaggttctctttgagcagttcagtttttggtgcttaagggcaggtgcacaacggggtctggggttagaccaggcggtggatagtcttgatgctaggcagatgcagttatccctaccaggcccagagggtgactctgtttaacttcaccacgcacgcagattcaggattctctgatttccccaactttcctttattcttcttttagtg

SEQ ID NO: 9207 - DNA, 952 bp, Artificial sequence
  DNA replication origin
attttcatttactctcaacagtcacaccagccctgctaactggatggtcgcagccccgtgccttcgccggacgccctcctggaaccttcaggccaccctgaggatggagactcgggtgcccgctctcctcccctaccgccgcgggcctgcgccccccgccccggaccccgactcggacgttctagccgcacgtgcgggcgcccctgggtgcgagccgcggactcacgagccgctgcttgttgctcccgccgccgcgacctggggaagcgaaaatgaaattgacttttccgagaaatgatgaaagcggcgctgcccgccaatgagctgctgcggcgaacttccgcacctcccggccgggccgctcgcgccctccctccgcctccacctcccggttgcacaagcttgaaacaaacactggggaggaagggcggagggaggagggcggagaggggaggcgagggagggagcgcggccggaggagggcggggggtggggggatttccagccgcggctcttcgcagtttcctctccttgttttgctttcgatctggactgttctcaggcaagccggggagtaacttttagttttgctcctgcgattattcaactgacgggctttcatttccatttcacataccctagcaacacttataccttgcggaattgtattggtagcgtgaaaaaagcacactgagaggtaacatttttcaaataatagttgtgactgtgtgtgtttctctcgagggcatgtttctggggactgtggggggccgtgtgtgtatgcgtgtcctgatgccttgacacgatgttttgcagacggaaaatgccggggttcataaatattaatactgatttttggaggaacagtcggcgcaattatggatcatctgattttaggggaagcaggttctgctgctgttgctgctgctactggggctgctgaggctgcgag

SEQ ID NO: 9208 - DNA, 1241 bp, Artificial sequence
  DNA replication origin
aaagttactccccggcttgcctgagaacagtccagatcgaaagcaaaacaaggagaggaaactgcgaagagccgcggctggaaatccccccaccccccgccctcctccggccgcgctccctccctcgcctcccctctccgccctcctccctccgcccttcctccccagtgtttgtttcaagcttgtgcaaccgggaggtggaggcggagggagggcgcgagcggcccggccgggaggtgcggaagttcgccgcagcagctcattggcgggcagcgccgctttcatcatttctcggaaaagtcaatttcattttcgcttccccaggtcgcggcggcgggagcaacaagcagcggctcgtgagtccgcggctcgcacccaggggcgcccgcacgtgcggctagaacgtccgagtcggggtccggggcggggggcgcaggcccgcggcggtaggggaggagagcgggcacccgagtctccatcctcagggtggcctgaaggttccaggagggcgtccggcgaaggcacggggctgcgaccatccagttagcagggctggtgtgactgttgagagtaaatgaaaattcgttttgtgacaccgaccacctccaaggaatgaaaggagcagtcagccgaaacgacagcattacttgcgtccttacctaattggaaccttatccgtggctgagggtgccaccattggaggggccgccgccccctctgacaccacctggcgctccgctccatttaggagctagaacgaaaaggaggcccatcccccagtaagtcacagcccacgccaagatgagttctggagcctgtgcgaccgaagtttcttcaccgcagggcgaggtggacaagggtgtgagttactttgacttcaagacgtctcagtggcggctggttctggagagaggctttatgctggagcacttccagcaaagttcggctggggcctccttaactcactggctggtcacccttggcctcggttttcaaccaaagcctaaggcctcagttttcaacgctgtaaatggaaataaatgagagaagaaagtacagcccgtgtgacaagtgcagcaagcaatgcaacttccttgggacctaccctttgtggtcccttgctttaaaagtatagattcacatttagttagacctgtttcttcctcgcatgcaatttcaccagtcttttcccagacttctgtactcaacagaggaagttccttcctgggagaccatagctg

SEQ ID NO: 9209 - DNA, 1009 bp, Artificial sequence
  DNA replication origin
ctggccaaggctggagccggctccctcagcttgcggggaggtgtggagggagaggcgcgggcgggaacccgggctgtgcgcagtgcttgcgggccagctggagttccaggtgggcgtgaactcggccgaccccacactcggagcggccggccggccccaccggccccgggcagtgaggggcttagcacctgggccagcagctgccgtgctcaatttctcgccgggccttagctgccttcccgccgggcagggctcgggacccgcagcccgccatgcctgagcctccccccgactccgtgggctcctgtgctgcccgagcctccccgacgagagccgccccctgctccacagcgcccagtcccatcgaccacccaagggctgaggagtgcgggagcagggcaccgggactggcaggcagctccacctgcggccctggtgcgggatccactgggtgaagccagctgggctcctgagtctggtggggacgtggagaacctttatgtctagctcagggattgtaaatacaccaatcagcaccctgtgtctagctcagggtttgtgaatgcaccaatcgacactctgtatctagctgctctggtggggccttggagaacctttgtgtccacactctgtatctaactaatctgatgaggacgtggagaacctttgtgtctagctcagggattgtaaacgcaccaatcagcgccctatcaaaacagaccactgggctctaccaatcagcaggatgtgggtggggccaggtaagagaataaacgcaggctgcccgagccagcagtggcaactcgctggggtctccttccccactgtggaagctttgttctttcgctttttgcaataaatcttgctactgcgcactctttggctccacactgcttttatgagctgtaacactcaccgcgaaggtctgcagcttcactcctgagccagtgagaccacgaacacatccgaacatcagaaggaatgaacaactccagacgcgccaccctga

SEQ ID NO: 9210 - DNA, 1357 bp, Artificial sequence
  DNA replication origin
gaaggtatgaggaggctgtgcggtgactgccgccctcgctccgggccgtcagccctgcccccgctccctgcgttctcccaggccctgcgcccgcccgggtacctgcccggtctggaaggcggagtgtttgttttgccacctcgcccgggcgggggcgagcagtgaagcccgcggagcgagagacttggcccggaggcgggagcctgggccggggccggggaagccaggcagcgggttaaggcttttgatttagggagagggacctgggggtaacctaaggaaaggcctcaggtcatcggaggggagacctggcccgggggcgggaggctgggctgggaccggggaggccgggcagcgcgaggccgggccggggaggccaggcagcgggaggcctggccaggggaaccgagcccggggccgggaggtcgggcacggggcaccgagctccgagggcgggagacctggcggccggccgagtgccggaaggccgggtcaggcggcggaaggcagcggcaagctgggaaacggacggcgctaccgccggcggaggagtggccccgggaagcggtgctgcgagggctggggcggccgggtgctgactgtgagatactcgccctgggggctgatccttccaattttggacgaggcttccgtctctgctgccttccatgcctggggcctggattatcccgggttgacaatgtggtttagctcttccagagagatagttgcagggtttaaactccaattccttttcggccctgcagagtttcgtgagtgctcgcagctcatacctgtggctgtgtatccgtggccacagctggttggcgtcgccttgaaatcccaggccgtgaggagttagcgagccctgctcacactcggcgctctggttttcggtgggtgtgccctgcacctgcctcttcccccattctcagtaagtggcacccaagcaggaaaccggaaaacatcgttcgcagccccctctcgcccacccacttcttttcctgcttagtcgccaagccttgtcgaccttgtaaatgtctgccagatctgtccgcgtctctctatctctgatttcagccgtctgaccacagcagcctcttccctggtctctccacttccagacccgcctgctcctttgcagtccactttttacagcacaggcagagggatctttatgaaatgaaagtctagaaagctcgtcctttgcccttaggttaaacccagcacttaatatggctaacaaacccctgcgtgtgttgggtcctgagtgcccccacccctccttatctttagcaccggttcgatttctgcacggcaatgctgaccttcatacctagtgtctgcctgcaacacc

SEQ ID NO: 9211 - DNA, 910 bp, Artificial sequence
  DNA replication origin
gccccggccgaggcgccggctgacgttgcccttcagggccgagcccggagcagcggccgccgcggaggcgcgtgagccaccccaggctcgtggggccgcgccgcctttccggcctcctgcccgcggccccgcttccctcggcagccggaggcctccggggtgcccgtgctgccgcagcttcctgtgtctgagtcgcgggcggcgcgggcgcggggctggtgcgcggccggggatgcgcgcgggaccgacccttgtgtgtgcggcggcggggaccggcccggcgaagcagccggaggccgcgcttcggctgggaggaggtggcccagctgggccgctgacgttgccctcgtccgcggcccccgcctgcccagaggccgggctcgcgggcgttcggaccgcgcgtggggcgagactgcactcgcgcccgctgagatgccggccccacgcagcgcggcggcacgaggcccacaggcagctcagaggccgctgccagaggcagacattctctcggtgactccagaggagtgcccgtggcccttgcacttggccgtggagtcattgatctaaggagtgctggcattttttgaaattgagaagcaaagatgatgtctgtcacctggcagcgtagacggagagtggcggtagatgacttgaatggacacgtggattcgagtctggggacaggcgttcccccagtcggtgcgttgtgagagtgtggaaaccccttccccactcagtccaatttcaaggttatggagcataattaagagtgaccattctaaaagcgttctctagtgccctggctaagacttttaagcttcttggtgcaggagtgtctaaagtcccgcgactctcactgccctgtcttttattttcttgacctttgattagcgttgagagaaactggtta

SEQ ID NO: 9212 - DNA, 1245 bp, Artificial sequence
  DNA replication origin
aaaagtgtcttgaggagaagacgtaaggtgagacagccagtgacgaccatccacatgttacgggttgaattgtcacccccacattccccaagttcatatgttcaggggtttgttgttgttgttgttgttgttttgagacagagtcttgctctgtctcccaggctggaatgcagtggcgtgatcttggctcattgcaacctccacctccctgggttcaaacaattcttctgcctcagcctcccgagtagctgggactacaggtacgcaccaccatgccccgctaatttttttatttttagtagagacagggtttcaccatgttggccaggctggtcttgaactcctgacctcagttgatctgcctgcctcggcctcccaaagtgctgggattacaggcatgaaccaccgtgcctgggcattcaggtatcttagaatgggaccttacttggacattacctcatgattacagaggtcatcaagttaaaatgaggcaattcgggtgggccctagtccagtatgactggtgtccttatagaaagaagggatttgcacacacacaccacagggaagatggtgtgaggagacatagggagaagatgggcatctgcaagtcagagtggccgggcacacatgctctttcatgggcctcggaagcagccagccctcccacgccgtgattttgtacttctagtctccagaaccaggacagaccatacatttcggttgttgaagccacttagtgtgtggtacttcgttccagcagcccttgaaaacaatagaccacagaacttgggaggtgcctgcagaggttctggggctgagggaccggttggagaagaggaaaaaggagaggcaaagatgacaaaatcacggatggggaggcgagatctggacagaaaaaccagggattagccaagcgggaaccagtgaaaacgaacgtggagtccattttttctagatctggaagatggagatctaaaaggactgagctgctagagaggttgctggtgtgtgcgttgtcctcaccccactgcaccactgcgcccagcacactgtgggagacacccagggaaagtccttcagttatttgtgggagtgaactgcagtgtggctgaggcctggagcgaaccacggtcagtttcccctgcctgcagcccaggcatagccctgcgttggttgtgcccacactctgggggcagcctgagtgccaagtgtggtactgctctcactagcatttaacctctg

SEQ ID NO: 9213 - DNA, 919 bp, Artificial sequence
  DNA replication origin
acacggaagggccttgaaacacgatgccgagtgaaaaagcccgtcactcatgccgtgtattgaacgaaccattccctttttgtgaaatgtccagaacgggcaaatgcatagagacagaaagcagattagtgaaggggacggggaggacagggagtggagtgcggctgtctcagcagatgtgggtttcctttcaggatggagagaacgtgctggaattgggtcctgtgatggttgcacaatgttgtgaggattaaaaaccactgaactgtacctttcaaaggcccatgttatggtgtgtgaattgtatctaaaaaataaatagccaccaaagggccttgaatgacaccactgaacggggcgcagtgtgcccgtgcgtgttggtgcctggtgtgtatgagatggggcgacgcgtggccatgcatgttggcgcctggtgtgtatggggtggggggacgcgtggccatgcgtgttcgtgcctggtgtgtatggggtgggggacgcatggccatgcgtgttggctcctggtatgtatggggatggggggacatgtgcccatgcgtgttggtgcctgatgtgtatggggtgggggacgcgtggccatgcgtgttggcgcctggtatgtatggggatgggggggacatgtgcccatgcgtgttggtgcctggtgtgtatggggtgggggacgcatggccatgcgtgttggcgcctggtatgtatggggatgggggggacatgtgcccatgcgtgttggtgcctgatgtgtatggggtggggagacgcgtggccatgcgtgttggcgcctggtgtgtatggggtgggggacgcgtggccgtgcgtgttggcgcctggtgtgcatggggttggggacgcatgcagtagaacctgggagaggagtgttgtacagatgcaggttctgggg

SEQ ID NO: 9214 - DNA, 860 bp, Artificial sequence
  DNA replication origin
gaaaacgtttattaccagggggagatccttcagaagactcattcgctctttgcctcccccagcccagatttttggggtacaatatttacacattatgtgtacaatatatacagcatttctcctaaaagcgcccaaagcgaggagaaatctggcgggcgagtgggcgtcagagcaccggggggtgctggggcgtgtgcaggttaagggcgttggggtgcgcgtggccgatcaggttgaggtaatgccggtccaggccctgcaccggtgtcaggaaggggctgtgctgctgcgctgggctagcgagcggcactggcgcgctgggcaggtagggcagcgcggggctgcgggccgcgccaggcggccaggggaaaggcccggcaccagagccctgcgggaacacagcggcctcgcccgggctgtgaccagcgaattcgggccccgcagggtgcagctgataggagaaatccggctccgggagcgaacccagcggcggaaaggcgggctccgcgcccaggcgggccttggactgcaagaaggcgaggatgcgcgcgtacttcgtgtccttggtctccatccgctccaccgtggtgaggtaatgcaccaggttcttcatgcactcgtggtagccatagtggaagtagttggcaaactccgctagaagttctgctggaggaacgagaaagcccgtaggacggacacaccctgagtgccccttccccacgcgagcccaaagcgggtgcagggcacctcccaccacattttctggccaaagttcccatttgaggcccgccctctcctctgcgcagtcttagagactggcgaggcacgcgcaaacgccctctttccctgagagcctgacc

SEQ ID NO: 9215 - DNA, 989 bp, Artificial sequence
  DNA replication origin
ccggggactccggccgccgctcgcccctgaagcccgagacaggacggccgccggcgcctgcggcccgcgcggggctggggccggcgccgccactgtcggtcgcatcggggtgcatgctgcttcctgggccgctaaggacaggcacatctcctgccccccggtcccccgccggcgctccggaggcagggggagcccgcgctcatgcctcgcccgcggcccaccgagggagcggcccccgcagacgccgccgggcccctctcggcgacccctcagcgccgccaccaggcgctgggcccgtagctgccgggccgggcgcagccagggagccccaccgtgttgtgactgaagcctggccagcctgacgcgggcggggcggggccgccctgaagtgcgtgtcgggcggggcccggagccaccgcggccgctgagtgacagccgggaggcgcccacccacagcgcgggggcggggtccgggccggggccccacggggagagggcgcgacccagcgcggtgcacacctctctttcccacgctcccctcctcctctacaggatgccgtctgttcatggaaaattttgctgcaggtgtcagcggcgctggtaattcctgagctcaggtgatcccgtaattctccctctccgctcatcactgacgagtaacctcttcgctttgcttacagccggcaaacatttctgcctggttttcactcgctatttaaataggcaaccgttcccgagactccctgtcacagtttctaacgaccttccctttcccaccctgccgccttagggaaggaatcagacacgtgcggtggagtaagtgaagcctgcaattcctagctatggaaaggtccaaagaagtcggcctggtgcaacagggtgcacgcagctgcccataatcactttggctccacttctggtttttgttttgttttgttttgttttttgttttttaccaactattcagttcaaatgctatcagccacgca

SEQ ID NO: 9216 - DNA, 1135 bp, Artificial sequence
  DNA replication origin
gaggcagcagcagcggcggcgccgggggccccgggcggccggagctggtggaagcccgtggcggtggccgcactcgccgccgtggccctctccttcctggggcccggcagcggggaggcggcgggggccgcggggctgagctccgtcctgttcaggctcagcctgtacctgagctgcgcggcggccgccttcctgctggggatcctgtttgccctcgtctgccggagcccgcgcgcccagccgcccgacttcgccgccgcctggagccggctggccgcgacctcagccgcccgccgcccgccgggggtaagtacccgactcctggccgcccagctccgccggccctccccgcttccggtgccagctcccgcgccccgagctccggggggccgcggcatgcccttgtcgaagcgggaagccgggagccagggggctgggctgcgggcccggccgtggacgcgagcgttccccggcgcccgcgcgcggcgggctccgggctccgggctccgcgctccgcggtgctggaggagatgcgcgttatttactgggctctgtagtcactcgacaaccatcctcagtcacaaccctaagggtgtccccagaccttcggtgtcgcttgccgtgggaggggaagaagggaatcacagcgttcgctacgtgcaggctctgcgcacggtcctggcgatccgcttggttcttctggccgttctcggtgggaggcaactttatgaccgtttgccgatgaggaaacttgcttcggtccctggcccagcgcctcacccccaagcccgcgtacccttcccaccaccctatcctgccttccaccatgcggatacgtattatagttgtgcagtccccgctggcttctgtgatttggaagggggatgccagaaatcactggtttgcaacaaaaggaaagccatcctcagcgcgctgtgggacactagggcgggggttagggaatgtaggaaagaacagtgttttaaatgagcgcttctcttcttcagtgccaaacccactgccccatctttcttccacattccttctcataatcctttaaagggaactttattctatcccagcttaacactcactgcttgactgagtgataccatcattctaatgaaattgccca

SEQ ID NO: 9217 - DNA, 948 bp, Artificial sequence
  DNA replication origin
cactccgtctgggaagtgaggagcgtctccgcccggcagccaccccgtctgggagggaggtgggggtcagccccccgcccggcagccgccccgtccggaagggaggtgggggggttagccccccgcccagccagccgctccgtccgggaggtgaggggcgcctctgcccggccgcccctactgggaagtgaggagcccctctgcccggccagccgccctgtccaggagggaggtgggggggtcagccccccgcccagccagccgccccatccgggaggtgaggggcgcctctgcccggccgcccctactgggaagagaggagcccctctgcccggccagccgccccatccgggagggaggtgggggggtcagccccccgcccggccagccgccccgtccgggaggtgagaggcgcctctgcccggccgcccctactgggaagtgaggagcccctctgcccggccaccaccccatctgggaggtgtactcaacagctcattgagaacgggccatgatgacaatggcggttttgtggaatagaaaggggggaaaggtggggaaaagactgagaaatcggatggttgccatgtctgtgtagaaagaggtagacatgggagacttttcattttgttctgtactaagaaaaattcttctgccttgggatcctgttgatctatgaccttacccccaaccctgtgctctctgaaacatgtgctgtgtccactcagggttgaatggattaagggtggtgcaagatgtgctttgttaaacagatgcttgaaggaagcatgctcgttaagagtcatcaccactccctaatctcaagtacccagggacacaaacactgcggaaggccgcagggtcctctgcctaggaaaaccagagacctttgttcacttatctgctgaccttccctccactattgtcctgtgaccctgccaaatcccc

SEQ ID NO: 9218 - DNA, 1291 bp, Artificial sequence
  DNA replication origin
tttctattccacaaaaccgccattgtcatcatggcccgttctcaatgagctgttgagtacacctcccagatggggtggtggccgggcagaggggctcctcacttcccagtaggggcggccgggcagaggcgcctctcacctcccggacggggcggctggccgggcggggggctgacccccccacctccctcccggatggggcggctggccgggcagaggggctcctctcttcccagtaggggcggccgggcagaggcgcccctcacctcccggatggggcggctggctgggcggggggctgacccccccacctccctcctggacagggcggctggccgggcagaggggctcctcacttcccagtaggggcggccgggcagaggcgcccctcacctcccggacggagcggctggctgggcggggggctaacccccccacctcccttccggacggggcggctgccgggcggggggctgacccccacctccctcccagacggggtggctgccgggcggagacgctcctcacttcccagacggagtggctgccgagcggaggggctcctcacttctcagacggggcggttgccaggcagagggtctcctcacttctcagacggggcggccgggcagagacgctcctcacatcccagacggggcggcagggcagaggcgctccccacatctcagacgatgggcggcctggcagagatgcttctcacttcctagatgggatggcggccgggcagagacgctcctcactttccagactgggcagccaggcagagaggctcctcacatcccagacgatgggcggccaggcagagacgctcctcacttcccagacggggtggcggccgggcagaggctgcaatctcggcactttgcggggccaaggcaggcagctgggaggtggaggttgtagcgagccgagatcacgccactgcactccagcctgggcaccattgagcactgagtgaacgcgactccgtctgccatcccagcacctcaggaggccgaggctggcggatcactcgcggttaggagctggagaccagcccggccaacacagcgaaaccccgtctccaccaaaaaaatatgaaaaccagtcaggcgtggcggcgcgcgcctgcaatcgcaggcactcggcaggctgaggcaggagaatcaggcagggaggttgcagtgagctgagatggcagcagtacagtccagctttggctcggcatcggggagaccgtggaaagagagggagagggagactgtggggagagggagaccgtggggagagg

SEQ ID NO: 9219 - DNA, 1125 bp, Artificial sequence
  DNA replication origin
cgggcgactgcgcgcgaggtaaaggaacttgcgttccccggcgccgaggcggcagcagcgcagtgcacagcggcttctgaaggcggcgtcgacggggagctgcgcgtggctcccagtttcctggttacgtgcgcgccggcagagccaaaacctgcagccgaaactcccgcttctccgtaaggattaaagggcgggcgcactaccgggagacgtgtcaaactcagcgcgcctcatggcggccgcggagccccacccgctcctactccagtcctctcacgcccactgacttaccctgcgcacgcgcgctgaggctccgtggggccgccgcgggccccgccccgaggtgggagggcctgacgcatccacagctggccaatcggcggatggcctcgcgcgcccgccccctccccctgcccccggcgccgggctccacgtgccagtgtttgtgtacgtgcggccgtggcggggctggacagggtccgggtcgttgaggattaggctgctcgggcgtaaccggagctggggcgcggctgccaagggccggcccggaagtcccagcggtctttaaattctcccgtgctagggccagcctgcgcattcttacctgtcggggtgcggcgagtgtctcacctctctgcacttccaaggactcttgtcatctgccttaggcgggaaatgctgttgctggattgcaaccccgaggtgagattcgggctcacagagcccgagcttttgtcctgcaggctcaagcttctagattcgtcttctcgttaatgcggggacggaccactgggcgctgcctggtcagagctggttgtgaagggcggggaggtttccagcccggaggggcgcgggactggacaaaggtgggaagggtgctggatctgttctcttcctgcaggtggatggtctgaagcatttgctggagacaggggcctcggtcaacgcacccccggatccctgcaagcagtcgcctgtccacttagccgcaggaagcggccttgcttgctttcttctctggcagctgcaaacgggcgctgacctcaaccagcaggtaactaggtaactgttgctgtgtacagccgtcccctccaacccagacacacacaaacatttctcagacgc

SEQ ID NO: 9220 - DNA, 1082 bp, Artificial sequence
  DNA replication origin
tcagtcgcctgggactccaccttcaatgtcctcagattcccctagctgggtacccccatcttattcataatttatgtggtgcttgaaagctttagctatgtggctatttcaaacatcctccccatataatatcctgtagtccgtaaatatttactataaaaagtagttttctttagaaaaggtatacacccctccctggatatccacaggggattggttccagagcctctgcggatagcaaaatctgcagatgcccaagtccctaatacaaaatggggtagtatttgcatagcttctatgtgtatcctgctgtatactttaaatcatctctcgattacttgtaataccttatacaatgtaaatgctatgtaaatggctgttatactgttcaaaatttgcatttaaaaattgtggtactgttatttttaaaaattttcccccctgaatattttccatctgtggttggttgaatccaaggatgcggaactcccagataccgagggctgactgcatatcgttttagtgtgtgtccaaaaaactcaacaattcttacttagcattcagagaagcaacggagcgtagcgtggtggtgaagacaggcagtccggagccgccctgctgaatgcccgctccattcctcgctgcctgtgtgaccttagggagttaacctctctgtgcccgtttccttatctgcaaaatggggatcgtggtagcacccacctcgtaaaagtgttgtgagaattaaacagttgatccattacgtgcttagaacagcactggcacaaagcgcgagtgccgtggtggctgctgtccgtgtcatcacggccgtgggaagcacgccaggtgagcaggtggcacaggccagatgctgccgcctgtgtatagttaaaggagccttttacggtctggcgattttacctgtgtcactgcagccactttccttcaccccctccgaagaatttaggatcttggacgctgaaaggagaacggagtcaacttcatcctcttcccggtgctgcttttctgtaacagaaccgtccggggctgttctgtcgcgggtcgtggcgtggcggggctgaagg

SEQ ID NO: 9221 - DNA, 1218 bp, Artificial sequence
  DNA replication origin
gtggatggcgggaggtggatggcgggaggtggatggctgggggtggatggctgggggtggatggcgggaggtggatggctgggggtggatggctgggggtggatggcgggaggtgggaggtggatggcgggaggtggatggcgggaggtggatggctgggggtggatggcggggggtggatggcgggaggtggatggcgggaggtggatggcgggaggtggatggctgggggtggatggctgggggtggatggtgggaggtgggaggtggatggcgggaggtggatggcgggaggtggatggcgggaggtggatggctgggggtggatggcggggggtggatggcggggggtggatggcgggaggtggatggcgggaggtggatggctgggggtggatggctgggggtggatggcgggaggtggatggctgggggtggatggctgggggtggatggcgggaggtggatggctgggggtggatggctgggggtggatggcgggaggtgggaggtggatggcgggaggtgggaggtggatggcgggaggtgggaggtggatggcgggaggtggatggcgggaggtggatggcggggggtggatggcggggggtggatggcggggggtggatggcgggaggtggatggcgggaggtggatggcgggaggtggatagctgggggtggatagctgggggtggaaggcagaaggagatggacagggggaggttctctgttctgtgggtcagagagtgaactgatacgaggaaggtgcctcctgggggaagcaaacattttcattaatatttaagaatagcacaaacagtggtgactatgatatgatttgcctttagacatgggattgtacaggtgtatgttttggcagagagcaaggtgcatactaggatcaaggactaggcaagtggcaagctcaggaagtgtaatagattctctaatatcagaggaagaaaagtgataaatagcctgtgtccaatttgtcagtgccttaagaaaggcagcctgcgggctttactggggcggtagtttcagcattgggttgcgcttgtcttcgacgtagggagcagtatcctccttaggggcaagctaggatggtgtcccatttgtggaaccaggctgtccttcccaagtggatacccatttgggttaatgtgagtcaagcttttgtgactctgtggtactgtaacaaggctgagctgcttgt

SEQ ID NO: 9222 - DNA, 1199 bp, Artificial sequence
  DNA replication origin
gggcctgcggggggcgccgtcgaggtctcgaagagtttggccaagagagacccaaggtccagcacagcagccttcatgcctcgacagtggacacgccgtcctcgccgccgcccgagagttcagaccgcggagatccggccgaggcggcccgggccggggcgaggagcctgaggtccccgcacccggagccccggaggcccctggctccctctcctccccgaggacgctcagctccgcgccgctggggtcgcccttccccggcccgggtccgtccgccgagcgccccggctgcggagagcagccccgcctcgtcccagcgccgtgagacccccgagggccgaagggccaggagccccgggaagcgcggccgccgcccgccccagacgcccgccgcccgccgcccgccgcccgcggttgctacgttcaacacacccggccgcgctccaggctaattgggccccaggtgcggctcgggctgtgcccgcgggggacgtcccactccccgcctggttccgccttaaaggaacacgcccccatttcccctgcgccccgagcctcgcagatcccatccgccgagctcagggcccagggctgggaaagagaatcctggctccagaaggttctggaacttacccagcctgacaagcttgcacgtgctggggtcaggccacctctctgacgatagggaaggtgggtagaaagatgtatttgggcgaacgagcttgaaacagcagcatccactcccccaccccagggtcctactcaaaccctgttactaagggtggggtgggagcaaccgcgaggtgcgccacccactaacctgcaaacaagaccggctctgagagctgaagtagaaagacctacgcacacctgtttaaacacctgtcggagtgaaccaagagactgtgtaattcaaatgtttgagaactcaaattataatcggaacgactacaaattcaaagacagatatggaaggcaacgttttctattcagtggaataaattgtattttgcttaatctgaaaaatatgtgtgaaaggtagagcgtataggtgcgagcatctaaaggggtgtggggtcagtgttgaacagagttaaaaaataagatactgcagccaggctcggtggctcatacctgtaatcccagcaccgggattgggaggtgggaggatggcttgagcccaggagttccaggccagc

SEQ ID NO: 9223 - DNA, 1215 bp, Artificial sequence
  DNA replication origin
gtgctggaccttgggtctctcttggccaaactcttcgagacctcgacggcgccccccgcaggcccctcctccagaccctcgggaggtgctgccgctgcagggtcggggggctccagggcgggcaccccgttgggtaccgccccgaccctcctccgcgccctggctccggactccccctccgcctcgcggcggtcgcccgccccgctgctctcctccccctactcccggggctccgccgccagccgcgccgcgggagcagtggggaccctgctctcttggcccagtagccctagagcgggtaaagccccgccccagccccccactccctccggcgggggctgctcccctgctcgcctggtggtcccagcgcggccgccctcgggccccggcggggtctgggccgcgctccccaggaacccgctccagcctggccccggagagcgagagctcggcgcctgcgtggcccccggggctggccccagaaccctgttccttacgctgcctgacatcggcgaggagggggcctcggacggcgactccggggatggcgaagcgtgagtagcagcgtggtccgggcgcgtgtaccttttgccgggacccccgacccctccgcctgccgcactcaccttcgcaggtgcacttcaggaaatgaaatatttgtagtaactttcataaccccctgggcaccctccttgcacgtttcctgggtttttactccttggctttgcgggctttcagacataagctgtgacatgctttgtccagctttctcagagtgaatcctaaggggccttgaaggaagggacagaattttgtttctcttctaccagaagcattgctacttagagtgtttgtttggttttcttaaggactttttgaagtccctttctttgtctcagaatatagcaggtgtgcagggaaaccgaatacacacgtctgcagcaagtgttttaagaagtggtgagacctggtgctttcctaatgtctaaggaccagtccctagtcttatcctaagtgggatgggtctcctttgtgtgacatctagttaatttacatatgcatgacatcatctgacacaaatggagttgtaatggccaggacacgtctgattattaccctagagctcctgagagctttccacagtgccctgagtcactgcagaaacgttgacttcatgggaacattttcactgggaatcggaggccgattccctca

SEQ ID NO: 9224 - DNA, 1180 bp, Artificial sequence
  DNA replication origin
agataccatagttttcctgatagatatgtatacacatacacacacatcacacatatacacatatacatgtatcaggatttaaaatctcattaattttataatttataaccacttaccacttttataaaagtggggaggattccagtgttcttagttcaacaatggattactgttttgtttgtgtttgtttttttgagacagagtctccctctgtcgcccagcctggagtgggtggggcgatctccgcctcccaggttgaagtgattctcatgcctcagcctcctgagtagctggaattacaggcacgcaccaccacacccagctaatttttgtatttttagtagagactggggtttcaccatgttggccaggctggtcttgaactcctgatctcaagtgatccgcccacctcagccttccaaagtgctgggattacaggcgtgagccaccctggctggactactgtttttgttattggtagtgatttcttgtcaccgtgctagggtggtgcatcagaaataaactgggctttttagtaaaaactcggaaatacatggtttacctctgtaaatacgggatacttggcaggagaaattgtacctgttgaaacttagatggcctcagctctcaaaagagactggctacggcaggacggggatgagtgttgtaccggcacccagtgcactaactgtcattactaaaatccctgtcgtgggaaaggcatgcctcgtgcagtgcccaccctctgagactcaaaaatgtagttcacctccgcgacctcaccccttcttcccttagcatgtgaaaatgacggcttggcagtttcaccagctcacaggagagcgtccagctgctctgctcctggtataatcctgggcctccaaaactgaaacgagcacatggtaacgcaagcggcaggcatgctcggggtgtgcaggagatgcaccggcttgtgtgagccggtagggcaggacgggcgtggaagggtccacgtctttagtatgcatgcttagatctagcgttcctgttgatggagtaatggttctcgcattgaccagatccggggcttcattttttaaacctcattcgtccactccccaccccagcctggtgtgcgcaccctttgatggggcggggataggcgagatggtcctgtggttctctgccttcttctggtgaa

SEQ ID NO: 9225 - DNA, 1355 bp, Artificial sequence
  DNA replication origin
ccaaaacacatctcattataaaatatatataattacaaaacattacatctaattaaaaaattacacaaaaatctaattacaaaggattatatagactattaatatataattagcatctgattataacaaaaggtaacacttattgaacgtccactctacaccagacactacacaaaatgttttatctcctttaattctcacagcttcctacctcataaatcaggaaattgaggttttgagaaacagggactgatttacaatcacggagtattaaatgcagacatcaagcccagaactagtagtctatatacgcaagtttcactctgctatcagctagactgtctcccatgtggggagatgtgtgtgtgtgtgtgtgtgtggtgtggtgtgatgtggtgtgtgtgtggtgtggtgtggtgtgtgtggggtgtggtgaggtgtgtgtgtggtgtgtggtagtgtgtgtggtatgtgtgaaggtgtgtgtgtatgtgtggggtgtgtaggtgtggggtgtgtacatgtgtggtgtgttgtgggttgtgtatgcatgtggtgtatgtgtgtggtgtgtgtatgatatgtggtgtgtgtggtatgtgtgcatgtgtggggtgtgcgtgtggtgtgtagtgtgtgtgtatgtgtgtatttggtatgtgtttgtatagtgtgtggtgtgtgtgtggtgtatggtgtgtggtgtgtttgtgtgggatatatgtttggtgtgtggtgtgtttatgtggggggtgtgtgcagtgtgtgtgtgagtggtgtgtgtgtatgtggtatgtattttctgtgtgtgtggtgtgtttgtgtgtggtgtgtgtttggtgtgtggtgtgtttgtgtggggtgtgtgtttggtgtgtggtgtgtttgtgtcgggtgtgtgcagtgtgtgtgtgagtggtgtgtgtggtgagtggtgtgtgtggtgagtggtgtgtgtgtagtgtgtgtatgtggtatgtgtttggtgtgtggtgtgtgtgcgtgtagtgtgtgtatgtggtatgtgtttggtgtgtggtgtgtgtgcgtggtgtgtgtagtgtgtatgtggtatgtgtttggtgtgtggtgtgtgcgtggtgtatggtatgtggtgtgtttgtgtggggtgtgtgtttgtgtggggggtgtgtggggggatgtgtgcagtgtgtgtgtgtggtgtgtttggtgtgtgtatgagtggtgtggtgtgtgtctgtgtgtggtgtgtgtgtgtgtgtgttgtttgacatggctgggctccctccaactatactataaattctgtgtagctcaggactaggactcctgccttacccgtgttctctgctccccccacaaggtgggcagtg

SEQ ID NO: 9226 - DNA, 1166 bp, Artificial sequence
  DNA replication origin
ccccgctggggcgcgccgggctgccgcggtgacctttccgacgcccctgaccccgcatccggaggcggccggaagtgtcgccggcctcctcccggcgcagcctccgggcctccagtgcaatcactacgccctggggcccggaaaccgttttccggtctttcgctttcggctggggcgtggaggccgcggtgctgcgtaggccgggccgggcgcaggaacagccccgtggcgccctctctggccgccgcccgggcgggaaacgtcgttccggggaccgggcgaccccgcagcggggagcgcgccaggtccgcgcggggaagtgggcggtgtgcggccggcaccgcctcgcaccacgcccccgcgggcccgcactttcccggagtgcaccccgcggccgccagccggggcgatggcggggctctggctggggctcgtgtggcagaagctgctgctgtggggcgcggcgagtgccctttccctggccggcgccagtctggtcctgagcctgctgcagagggtggcgagctacgcgcggaaatggcagcagatgcggcccatccccacggtggcccgcgcctacccactggtgggccacgcgctgctgatgaagccggacgggcgaggtaagggccggcgctcctcctggagcgcaacggggtccgcagccccgttcccaccctccgatcagccaggaacccgctgcttgtggcgctggccgcaggagagaggagcctgtcaccctgtggagaatgcactcccagttctagtcgttgccccttggcacccgccgacactgctagtgccccatcccaaagtgagcattttctttgtgtgtagcacaggatgcggtatttccaaacccctgccctcggtcttttcccacctcaccgctgctcagctctcaaagccctgccgtttcctcctgccttggcttgggaagccttaggaacagaagctccctgggagcacagagcggttttaaactggccaacaccttaacgcccagagccgccctcctctcgctgccactttggaaaataagagactagagattcactggacgcttcctcccggcatcacaagacttgactgctgcttcagttcccgcttgaccttcatactttagccctttaaaggatgttacataataacaattaagagacggc

SEQ ID NO: 9227 - DNA, 1202 bp, Artificial sequence
  DNA replication origin
attttgaagtttttgtgtgtgctggagatgtggctgggttttgtctcacagcagaggcaaggaatcgcaactcagaaatacattgctacttggctgcctctattattgtacatcttgaaggcgaggttaattaagtcctcttgtggggtttgagggctggaatctaatttttggagtttttttttgtttgttttttggttttttttttttaatgtcaggagctgactgggtgataaaatgcatattgagaataagaggccttctgacccttctgggtctagggctgtaaagcgtctcagggttgctgccaaacgggccatgaactgggctgggtttttcatatttgatgaaaaagagcctaaacgctaactgatttgggagaggtcggataaataaaaaggaacattaatcttgactatgcctttagctccaaccacctctttaagaggaaattgttgggcaggtgggggagggctagtcgtggaatgaaactgtaagctggaccgggtgtgaggaggggaggtgatagaaggattatagggtggaggagcagaggctgaggaagaattgggatctggcttggcctggcaaggagcagcctggggaggaggggagaggtcagatgggtccatagaaaaggaggattggaaagactcagcaacacttggggttgggattgagaggacagatgggttgggattgaggggacagatgggagggaaagaaggaagatttgggacaagttgcattgggaacagagactagggagggaccaatgtgtaaaagaatgcctggacgtcaggcacctcagaccgtttgcccattttatgacaagaattatctagatcttgtaggatggaaaaatcgaaagtgccgttttctggctatttggaaccattgtcgagtttgtattggggttaagcagcattgcagaagaaaataaggcatttaggttttaggtcaggtgtgagttgaagaggttttaagttcttgagaacataggctaagggagaagaaggaggaatggagggtggaaagttgcctatagtgaaggaggcaagcccagagaaaagagagggtagagacatggagagaaggggtgggggggtgcttgcccccaggaaagtggttcttgccactaagggtgaaggatcaaggcaggcattcgcgcggtgatcagatacctctgaaacgtgggtgaa

SEQ ID NO: 9228 - DNA, 1024 bp, Artificial sequence
  DNA replication origin
ggactgagaagggagtgcgtgtaagcttcaggccgggcccagccctccggaggctgcggttcgaggttccgctcgcgggggcccggcgctctctggtgggcgcaggtggacgccggggcgacttggcgccgctgggctccgttccccaggctttctgctcacccgtttccccgctctctttccaagtccctaaccagctgacccgtttatgagacactgtcaccgagtcagggctgattcaaatgctgaccgaagtttgtccctaggaggcttcctgtgtcacagtcacaaaatggtacaagcttcagctgcacagaacctgggggtgccccgcgggccccgcgaggagcgggcttaggtttggctggcagcgaacaccggcccgggaggcctccgcggggagctggggtcttggagtgagcgtgaccatcgccgcttcccgatgtgtgtgtgccttccgtgtgtgtgtgtgtgtttcctgtgtctttcatgtgtgtgttctgtgtgtatttcatgtgtgtgttttgtgtgcgtgttccatgtgtatgtgtgtgtgcatctgtgttttatgtattttgtgcgttgcgtgcgtgtttcatgtatctctgtgtgttttatgtgtgtagttcatgtgtgtgtttgcgtgtttcatatgtatgtgcgtttcatgtgtgtattttgtgtgctgtgtgcttgtttcatgtgtgttttgtgtgtattttatgtgttgtgtgcatgttttttgtgtgtgttttgtgtgtttcatgtgtgtgaatgtgttttatgtgtgtttcgtgtgtgaatgtgtgttttatatgtgcatgtgtcgtgtgtgtgttgtgatgtgatgtgggggggtgggtagactatttttattatcactaagccttcagcattcaaatgtttatgtttgtttgttttaaaaatacaacacagccttaacaatacattgcgggatcaaggttggggatactgttccccagttcatcagggaagaggtgaaggagctgagtgagcaggggta

SEQ ID NO: 9229 - DNA, 4945 bp, Artificial sequence
  DNA replication origin
tatcaaacgttttttcagcatcaattgaaatgatcatatggtttttatccttcattctgttgaaacaaactatttcttacaatttgaattaaaaaagctttgctgccttcttagcttggccttttgtccattcatactttctttcccctcctttgtctagaatgccaggtatgaatacagtccaaaaaatctccaggaatcacagctgggaagattgctgtgtatctactattcattaaagtttctgtgtttaatatattggacccagcccactgtgttaacatttcaaaatgctttatttcttttctacaaaaagggcacaaagtaatttctaaactttatttttatgaccaagtcgaactagaaaatgtttaaaatgatactgaaactaggtaggaacacttgcagttgtgccgtgtgtgcagttcattgggaagtatgatgattatgggtgggtaatgccatgtgttcacatcgttaggaagtatggtggttatgggtgggtaatgccatgtgttcacatcgttaagaagtacggtggttatgggtgggtaatgccatgtgtgcacggcgttaggaagtatgatggttatgggtggctaatgtcgtgtgtggggcattaggaagtatgatggttatgggtgggtaatgtcatgtgtggggcgttaggaagtatgatggttatgggtgggtaatgtcgtgtgtggggcgttaggaagtatgatggttatgggtgggtaatgtcgtgtgtggggtgttaggaagtatgatggttatgggtgggtaatgtcgtgtgtgcggtgttaggaagtatgatggttatgggtgggtaatgtcgtgtgtggggcgttaggaagtatgatggttatgagtgggtaatgtcgtgtgtggggcgttaggaagtatgatggttatgagtgggcaatgtcgtgtgtggggcgttaagaagtatgatggttaagggtgggtaatgccgtgtgtggggcgttaggaagtatgatacttatgggtgggtaatgccctgtgtgcagtgttaggaagtatgatggttacgggtgggtaatgccgtgtgtgcggcgttaggaagtatgatggttatgagtgggtaatgccgtgtgtgcggcgttaggaagtatgatggttatgagtgggtaatgccgtgtgtggggcgttaggaagtatgatggttacgagtgggtaatgccgtgtgtggggcgttaggaagtatgatggttatgggtgggtaatgccgtgtgtgcggcgttaggaagtatgatggttacgggtgggtaatgtcgtgtgtggggcgttaggaagtatgatggttatgagtgggtaatgccgtgtgtggggcgttaggaagtatgatggttatgggtgggtaatgtcgtgtgtggggcgttaggaagtatgatggttatgagtgggtaatgtcgtgtgtggggcgttaggaagtatgatggttacgagtgggtaatgtcgtgtttggtgcattaggaagtatgatggttatgggtgggtaatgccgtgtgtgcggccttaggaagtatgatggttacgagtgggtaatgtcgtgtgtggggcgttaggaagtatgatggttatgagtgggtaatgttgtgtgtggggcgttaggaagtatgatggttatgggtgggtaatgtcgtgtttggtgcgttaggaagtatgatggttatgggtgggtaatgccgtgtgtgcggcgttaggaagtatgatggttacgagtgggtaatgtcgtgtgtgcggtgttaggaagtatgatggttacgggtgggtaatgccgtgtgtgcggcgttaggaagtatgatggttacgggtgggtaatgtcgtgtgtgcggcgttaggaagtatgatggttatgggtgggtaatgtcgtgtgtggggcgttaggaagtatgatggttatgggtgggtaatgccgtgtgtgcggcgttaggaagtatgatggttatgggtgggtaatgtcatgtgtggggtgttaggaagtatgatggttacgagtgggtaatgtcgtgtgtggggcgttaggaagtatgatggttatgagtgggtaatgttgtgtgtggggcattaggaagtatgatggttacgggtgggtaatgttgtgtgtggggcgttaggaagtatgatggttatgggtgggtaatgccgtgtgtgcggcgttaggaagtatgatggctacgggtgggtaatgttgtgtgtggggcgttaggaagtatgatggttatgggtgggtaatgtcgtgtgtggggccttaggaagtatgatggttacgagtggttaatgtcgtgtgtggggcgttaggaagtatgatggttacgagtgggtaatgtcgtgtgtggggcgttaggaagtatgatggttatgggtgggtaatgtcgtgtgtggggcgttaggaagtatgatggttatgggtgggtaatgtcgtgtgtgcggcgttaggaagtatgatggttatgggtgggtaatgtcgtgtgtggggcgttaggaagtatgcatggttatgggtgggtaatgtgtgtgcggcgttaggacagtatgatgggttatgagctgggtaatgccgtgtgtgcggcgttaggaagtatgatggttacgggtgggtaatgttgtgtgtggggcgttaggaagtatgatggttatgggtgggtaatgtcgtgtgtgcggcgttaggaagtatgatggctacgggtgggtaatgttgtgtgtggggcgttaggaagtatgatggttatgggtgggtaatgtcgtgtgtggggccttaggaagtatgatggttacgagtggttaatgtcgtgtgtggggcgttaggaagtatgatggttacgagtgggtaatgtcgtgtgtggggcgttaggaagtatgatggttatgggtgggtaatgtcgtgtgtggggcgttaggaagtatgatggttatgggtgggtaatgtcgtgtgtgcggcgttaggaagtatgatggttatgggtgggtaatgtcgtgtgtggggcgttaggaagtatgatggttatgggtgggtaatgtgtgtgcggcgttaggaagtatgatggttatgggtgggtaatgccgtgtgtgcggcgttaggaagtatgatggttacgggtgggtaatgttgtgtgtggggcgttaggaagtatgatggttatgggtgggtaatgtcgtgtgtggggccttaggaagtatgatggttacgagtgggtaatgtcgtgtgtggggcgttaggaagtatgatggttacgagtgggtaatgtcgtgtgtggggcgttaggaagtatgatggttatgggtgggtaatgtcgtgtgtggggcgttaggaagtatgatggttatgggtgggtaatgtcgtgtgtgcggcgttaggaagtatgatggttatgggtgggtaatgtcgtgtgtggggcgttaggaagtatgatggttatgggtgggtaatgtcatgtgtggggcgttaggaagtatgatggttacgagtgggtaatgtcgtgtgtgtggtgttaggaagtatgatggttacgggtgggtaatgccgtgtgtgcggcgttaggaagtatgatggttatgggtgggtaatgtcgtgtgtggggcgttaggaagtatgatggttatgggtgggtaatgccgtgtgtggggcgttaggaagtatgatggttatgggtgggtaatgccgtgtgtggggcgttaggaagtatgatggttatgggtgggtaatgtcgtgtgtggggtgttaggaagtatgatggttacgggtgggtaatgccgtgtgtgcggcgttaggaagtatgatggttatgagtgggtaatgccgtgtgtggggcgttaggaagtatgatggttatgagtgggtaatgccgtgtgtggggcgttaggaagtatgatggttatgggtgggtaatgtcgtgtgtggggcgttaggaagtatgatggttacgagtgggtaatgtcgtgtgtgcggtgttaggaagtatgatggttacgggtgggtaatgccgtgtgtgcggcgttaggaagtatgatggttatgagtgggtaatgccgtgtgtggggcgttaggaagtatgatggttatgagtgggtaatgccgtgtgtggggcgttaggaagtatgatggttatgggtgggtaatgttgtgtgtggggcgttaggaagtatgatggttatgggtgggtaatgtcgtgtgtgtggtgttaggaagtatgatggttacgagtgggtaatgtcgtgtgtggggcgttaggaagtatgatggttatgggtgggtaatgtcgtgtgtggggcgttaggaagtatgatggttatgggtgggtaatgtcgtgtgtgcggcgttaggaagtatgatggttatgggtgggtaatgtcgtgtgtggggcgttaggaagtatgatggttatgggtgggtaatgtcgtgtgtgcggtgttaggaagtatgatggttacgagtgggtaatgtcgtgtgtggggcgttaggaagtatgatggttatgggtgggaagtatgatggttacgagtgggtaatgtcgtgtgtggggcgttaggaagtatgatggttatgggtgggtaatgtcgtgtgtgcggtgttaggaagtatgatggttacgagtgggtaatgtcgtgtgtggggcgttaggaagtatgatggttatgggtgggtaatgtcgtgtgtggggcgttaggaagtatgatggttatgggtgggtaatgtcgtgtgtgcggtgttaggaagtatgatggttatgggtgggtaatgtcgtgtgtgccgtgttaggaagtatgatggttacgggtgggtaatgccgtgtgtgcacagcgttgggaagtatgatagttatgcgtgggtcattactgacagttgagcttgacatgtcctgtctccagaagtgggtgccgaggctcccttcccactgccattccactggcccagaggaag

SEQ ID NO: 9230 - DNA, 1653 bp, Artificial sequence
  DNA replication origin
aggaggatgaaggaaacatggtaagaaagggagtgtgaggaggaagagggaggaggggaagcagacacgaggaggagtgggggacaggaggaagagcagagaggaggaggagtgtaggagaagaagaggactggaggagaaaaggaagagacgaggccaggcgcggtggctcacgcctgtcatcccagcactttgggaggctgaggcgggcggatcacctgaggtcaggagttcgagaccagcctggccaacgtggtgaaaccccgtctctactaaaaatacaaaaattagccgggcgtggtggtgggtgcctgtaatctcagcacttggggctgaggcaggagaactgtttgaagccaggaggtggagggtgcagtgagctgagatcgtgccattgcactctagcctgggcaatgagtgtaactccatctcagaaaaaaaaaaaaaaaaaaagaggaagagaggaaggaagaggaggagtggggaggagaaagagaagaggttgacaagaggaggaaaagtgagaagggggaggaggaggggtagtgaggaggaggggtgatgaggaggagtggcgacgaggtggagggaggaggagaaagagtggagacagtgaaatggggaggaagtggagtagggaggaggttgggggaggaggtggagtggggaagaggcagagtggggaggaggaagaggaggagtggagaagaggtggagggaagaggaggagtggggaggggagtggggaggaggaagagaaggaggaggaatggagaagaggtggagggaggggggaggaatgggagggaggagtggggaggagggaagagtggggaggaggaagagaaggaggaggaatggaatggagaagaggtggagggaggaggagtagggaggaagaagagtggggtgaagaaagtggagtagaagatggagcgagaaggaaggattgggggctagaagaagagcaagagggaagaggaaggtcaaggggggaggagagggcagaggaaaagcaccagtggcagcaggtctgattaagcaataagctcttaggaatcctagaacagtgagaatatctcaaaaatcaaagcacggaaaggaaagagataaaagcttggctttatctttaaaatgctcatcttttaatactgatagcgacttcttgaattctacgtttcccatttttctagaaagaaacctttggataagaaagaaaagcaacagaggccaatggaaaagctcatttcaaagaaccccaggaccaccttggcactcgaagcccacctggataatgacactgtagtttcccctggagaagacgggcgcgttgtcattgacatcggacacatcgatgttcacggtcgtcgtgttgactctgggtggactgccattatcagaagcttgaaccgtgagcgtgtaacctgaaatcttttcaggcaaaagacagaatgcacgttcattttcacaaggccgacagagctccaatgaggagtgtcctcctgagagtcctgacgggcaggtcccagtgagctaccactatctgttgcatcctgcctgtgagcgatgccctaatctcctacaaacgagtgcatgcaagtaatacacatttcccaacagcaagaattaccaataatgattagattctctgat

SEQ ID NO: 9231 - DNA, 1262 bp, Artificial sequence
  DNA replication origin
cagtttgtgaaaaggtaagcagctcttcccttacatttgtgtgttatgaatttcaatttcttaattctttcaatgggaccatcatttggcgctgtggtgtaattcacatgtgttttatgatcacttactgattaagcagaggtgttaaatggggtaagacttggaaaagcttcagaactatttgcgggaatgctcaataaatcaaaagcctcattctagaaaactaaattacggacaggactccagttgcatccaacactgaaaatgctctgtaaccttttcatgaggggattctcttaatatggggatacagctgttttgggggaaggatctgacgggaaacaaagtgccgacgtgccgtgagacactgttttgggggcatctgctcttctgcacgctggagaagctcagaggtggacagcgtgcttcctgcatctgcgcggctcaccattcagtgggaactaaaagtagacgtaggaagggctgctccctccaaggttagatgagggcatgtggctcgagcaggggtggtccctggggccagagggtgagaagggctgcccagagaaagggctggctcagcttcggggggcagtaagtgggtcgtcaggagtgggtggggaggggccatggagtgtgaggagggattgtgggagtagccactgagtttgccagaagtggggagtctgcactgagagtcttggaaaagggtgaactggattacagtgggcagtggcggtcgttccaagggatttgaactcgatcctagagaaaatagggactttggagccttttatatcggtaaggtagagatgacatgagacgagttcttaagcttagtttggaagcatcgtgcccattatttagacagggaggagtggatgcaagggggccctggaaaggcagaggtggggaaggagtgaaaggaccaaagccaccaccgaggaagaccatctggtgtgacagccagccagcatgccatcgagcccgactttctacatgagtagggggagcgaccaaggccgtggcaaagaggagtctgagccgggggctggttttagaggagttccgtgttgagttccaattccagtttgctaaagtaatgagacatacagttgaccatgttttttagacattgagagatggcgagatgttggatgggtattagggaaaggtgtggaaacttggcgttgtctctggatagctgaaaattgacttcatttgagaggatactaacaaaagggaaaaagaagagagagcta

SEQ ID NO: 9232 - DNA, 1263 bp, Artificial sequence
  DNA replication origin
tagaccaattcacagaatcgactacccagaaatctaacaaaaggagcttcataaacagtggagctgtccctctttgccaagcattctcattactaaagaccctacgtctatgaataattaacagtgcacctctttcccaataattatatttttaattagtgcagttaaaagtttagcatgaaatatcacgtgcaccaactaaaatccctataaaacccaggaagtgtattctagttttctttcttggaaacacaaaatatcttaaatttcattgcttcctttatacttctgtaacttatttttgggccattgtcataggctgtagatgctatcctaatcgctggcagagaaaggcagtcggactataagagaacagtagcccaggttgacctgttaaggtgtgggacaaagggaatgatttgtgtttagattatttttcctctttagctgagaacctggaaatatgaatttgggtgggggcgggaggggggtgcagcagctgccacctggagaagagcacaggaatcagctggacagtgagaggcaccaggatacagcggggatggattgaaaagcagagggatcagctgggcggcgagacactaggatactgtggggatggattgaaaagcagaggagtcacctgggcagtgagacactaggataccgcggggatggattgaagagcagaggagtcagctgggcggcgagagactaggataccgcaggaatgggttgaagagcacaggagtcagctgggaggtgagacactagggtactgcagggatggattgaagagcagagggatcagctgggcagtgagacactagcataccgcggggattgattgaagagcacaggaatcagctgggaggcgagacactacgataccatggggatggattgaagagcagaggagtcacctggacggtgagacactaggataccgcggggatggattgaagagcagagcagtcagctgggcagtgagacactaggataccgcggggatggattgaagagcagaggagtcagctgggcagtgagacactaggataccgcggggatggattgaagagcagagggatcagctgggagatgagacactaggatactgcggggatggattgaagagcagaggggtcagctgggaggtgagacactaggatacctcggggatggattggggcttggaagtaacactcagaagtcaacagagcagccattgtgtatccaggtcaggggcagcagatgccgatttga

SEQ ID NO: 9233 - DNA, 1215 bp, Artificial sequence
  DNA replication origin
catgccgaggaccgtgccagatcctgggttcctcggggcagtgaggggccggattaatctatgcctccgtccttacccgtgacctgtgcacttgaacatcctattccaagacagaaaagtactcacggggtagctccagggaccagcagctccggcagggacccccagggaacagggctgcctgccaactgggaccccaaaggctgctggtgagcccagggcaaggccgctgcacctgcgccagggatgcttgaaatccaccgaaaggggacagccacgtgcttcccctcagggatggagagcctgagttgggtgtggacctcaacacttcctgaaagtgaaaactgaaagtgtttggacaaactgaggagaaagtgagcaacacaccaaaaagagcggtgatggggaggggagaaagaagggaggagagaaggagtcgggggaggaagggagaagagggagggaggaggagggggagaaggagagggagggagaggagcgggagggggaagaagggggaaagaagaggagggagagggaggagaaggaggggaaggggggagggagaaggaggagagaaggagagggagtggggaggagaaggaggcgggaggaaggcgaggggtgggagatggaaagtggagaggactggggaggggagaaggaggcagagtgggaggggagaactttcaataaagttgcacaagctcattgaaggaggagaaggagggggagggaggaggatggggagggagatggagcggggtcgagagacagcagtaggagagaaagcagtccagaaggaagggtcctggggaaatgggcatcacagtgtctcctggcaggagggtggtgggtaaggaatttcgacagtggacttggatagattgggaagggcctcaaggtaaagggtgttttcctacatcccggaacaagtagtgagttgtaaggacagggttgataaactcccactcaggaaagttagagacatgaagaagtaggttccactgtttaaaaaaaaaaaaaaaaagtcgtatatgtcttattcaagtcaccctattttaatttcatagtcatccattattccgtctctgctttcctcagccttcagccaagcggtgactctccctctcccagttccgtgggtggctggggtcatgggggtgttctgtggcttccctccctctctcccacctctctgtttttcagagtgtg

SEQ ID NO: 9234 - DNA, 1468 bp, Artificial sequence
  DNA replication origin
ggatcgggcgccgtggaacatggggcagcgctcgtcggggagactcaggcccggcaggagcatctggcagtgcggagggagactcaggcatggcaggctgcaggtccccagccctgcccgaggggaggcagctaaggcacggcaagaaatccagcacagagccggtgggccggcactgctgggggacccggcacaccctccgcagctgctggcccgggtagtaagctcctcactgcccgggacttgcgagccggcctgcggctcccagtgtgaggcccgctgagcccacgcccacccggaactcgtgctggcccgcaggcacccgcgaagccctggttcccgcccatgcctctccctccacacctccctgcaagctgagggagctggctccggtctcggccagcccagcaaggggctcccacagtgcggcggcgggctggagggctcctcaagtgccgtcaaagtgggagcccaggcagaggaggcgccgagagcgagcgtgggctgcgagggctaccagcacactgtcaactctcaccacggccatccctctttccaatcaagccgacctggaaaacagaaactcaaagcaaagagctcatcctacttcctctttaccctcctgtctgtcaccttgctgaagaatctcactcatgtgcacatcagtttcaagttctgtctctattctctgcatggccacggagaagccaccagctgataccagagcggcaaagggttgtgtgggagatgaggaattccgcctggaagaggctgagtgtaagtggacttgaggagaaccaggggacgatgcccacactggagctggaggggcctggagctcgggagaagggcgctggctggaggttaggtgggggtttgggaccatgaacgcgggtgggtcgctcgggagaacacgtggaggaacgagagcagcggggggtgaaagagccctggggcgccggcctcccgcatgctgtggaggacccctaaggatggcagagaatgcccagcgccgcccatgaatgagaacgagggaaaaacgcctcacgtagagccgggcgtcgggattgtccaaacggagaggtccccttagcgaagtgcgcctcggcttagtttagacgcgcgctgtcctgccagagggctgcgatgagacgtgggcaccggggctgctctggagcgcccctgacggcacggccggggaagtgaggagccacaggcagcggagggcaggaaggcgggaggagtggcaggaaggcgggaggagtggcaggaaggcgggaggagtggcaggaaggcgggaggagtggcaggaaggcgagggacagcctccgcttccagcgtcccccagaacgcggagaggcagcctgagtcttactctcccaccacatcaattcccagcaccgtgggccccggggccactttattttttgtatttttttgagatggggtgtctctgtcgcccaggctg

SEQ ID NO: 9235 - DNA, 1392 bp, Artificial sequence
  DNA replication origin
cacatgtttcagagagcaaggggttgggggtaaggtcatagatcaacaggatcccaaggcagaagaatttttcttagtacagaacaaaaagaaaagtctcccatgtctacttctttctacacagacacagcaaccatccgatttctcaatcttttccccacctttcccccttttctattccacaaaaccgccattgtcatcatggcctgttctcaatgagctgttgggtacacctcccagacggggtggtggccgggcagaggggctcctcacttcccagaaggggcggctgggcagaggcgccccccacctcccggacggggcggctggccgggcgggggctgacccccacctccctcccggacggggtggctgccgggcggagacgctcctcacttcccagatggggcggctgccgggcggaggagctcctcacttcccagacggggcggctgccgggcggagacgctcctcacttctcagacagggcggcggggcagaggtgctccccacatctcagacgatgggtggccgggcagagacactcctcacttcctagacgggatggcagcctggaagaggcgctcttcacttcccagactgggcagccaggcagaggcgctccccacatctcggacgatgggcggccaggcagagacgctcctcacttcccagacggggtggcggccgggcagaggctgcactctcggcactttgggaggccaaggcaggtggctgggaggtggaggttgtgtcgagccgagatcacgccactgcactccagcctgggcaccattgagcactgagtgaacgagactccgtctgcaatcccggcacctcgggaggccgaggctggcagatcactcgcggttaggagctggagaccagcccggccaacacagcgaaaccccgtctccaccaaaaaaatacgaaaaccagtcaggcgtggcggcgcgcgcctgcaatcgcaggcactcggcaggctgaggcaggagaatcaggcagggaggttgcagtgagccaagatggcagcagtacagtccagcttcggctcggcatcagagggagaccgtggaaagagagggagagggagaccgtggggagaggggagaggaacacttcactcttatcttttgcttcctactaaatgtcaagcttcttcccaaactctccactttgcagctcatactctgttaaactggaaaatagttatcacttcataaaattgtgtgcagccagcatagataataaatgtaggcaattaataaagaagctatggttttgtgagcttaatgtggacctggtttctagttctaataaacatagatatggacatttcaacattaggtttcaaatcttattactaaacaagatagatatgcatcagatgat

SEQ ID NO: 9236 - DNA, 892 bp, Artificial sequence
  DNA replication origin
tggcctcccaaagtgccgagagtgcagcctctgcccggccgccaccccgtctgggaagtgaggagcgtctctgcctggccgcccatcgtccgagatgtggggagcgcctctgcctggctgcccagtctgggaagtgaagagcgcctcttccaggctgccatcccgtctaggaagtgaggagtgtctctgcccggccacccatcgtctgagatgtggggagcacctctgccccgccgccctgtctgagaagtgaggagcgtctccgcccggcagccgccccgtctgggaagtgaggagctcctccgcccggcagccgccccatctgggaagtgaggagcgtctccgcccggcagccaccccgtccgggagggaggtgggggtcagcccccgcccggccagccgccccgtccgggaggtggggggcgcctctgcccagccgccccttctgggaagtgaggagcccctctgcccggccaccaccccgtctgggaggtgtacccaacagctcattgagaacaggccatgatgacaatggcggttttgtggaatagaaaagggggaaaggtggggaaaagattgagaaatcggatggttgctgtgtctgtgtagaaagaagtagacatgggagacttttctttttgttctgtactaagaaaaattcttctgccttgggatcctgttgatctatgaccttacccccaaccccttgctctctgaaacatgtgctgtgtccactcagggttgaatggattaagggtggtgcaagatgtgctttgttaaacagatgcttgaaggcagcatgctcgttaagagtcatcaccactccctaatctcaagtacccagggacacaaacactgcggaaggccgcagggtcctctgcctaggaaaacc

SEQ ID NO: 9237 - DNA, 1019 bp, Artificial sequence
  DNA replication origin
agataagtgaacaaaggtctctggttttcctaggcagaggaccctgcggccttccgcagtgtttgtgtccctgggtacttgagattagggagtggtgatgactcttaaggagcatgctgccttcaagcatctgtttaacaaagcacatcttgcaccacccttaatccattcaaccctgagtggacacagcacatgtttcagagagcacagggttgggggtaaggtcacagatcaacaggatcccaaggcagaagaatttttcttagtgcagaacaaaatggagtctcctatgtctacttctttctacacagacacagcaaccatccgatttctcaatcttttccccacctttcccccccttctattccacaaaaccgccatggtcatcatggcctgttctcaatgagctgctgggcacacctcccagacggggtggtggccgggcagaggggctcctcacttcccagtaggggcggccgggcagagacactcctcacttcccagatgggatggcggccgggcagaggctgcaatctcggctctttgggaggccaaggcaggcggctgggaggtggaggttgtagcgagccgagatcacgccactgcactccagcctgggcaccattgagcactgagtgaaggagactccgtctgcaatcccggcacctcgggaggccgaggctggcggatcactcgcggttaggagctggagaccagcccggccaacacagcgaaaccccgtctccaccaaaaaaatacgaaaaccagtcaggcgtggcggcgcacgcctgcaatcgcaggcactcggcaggctgaggcaggagaatcaggcagggaggctgcagtgagccaagatggcagcagtacagtccagcttcggctcggcatcagagggagaccgtggaaagagagggagagggagaccgtggggagagggagagggagaccgtggggagagggagaccgtggggagagggagaccgtggggagagggagacggagagggagaccgtggggag

SEQ ID NO: 9238 - DNA, 936 bp, Artificial sequence
  DNA replication origin
aacccccttctccccatttgaaaaaagttccatgaaacaagactcacccctgttaccgcgaagcactctgctatttccaatgccacctcctcccaaacgtaaaacaaaggagaaactgcagtggaaacgtggactgccctgcgccccctcccaagacccaccctccggactgacgcggtctaatcaggctacagccacccatcagctccgccagggttagggagggcgtggccggccccgccctggggcgccgccctggagccacctggcccgcgcgttcactctctgcccggagccgcctggcacctgggcggcgcgctcaccctcagcccggggcccccaggcacccggcccgcacgcaaaccctcagcccggggccccctgacccccgcgttcacccctcagcccggccgccgggcactgcgcatccgccacgtggcagcgcctccagagcccagacgcccggcgttggcacgtggtgagcgctcaataaatgtctgttgaacaaatacgcgtgggtgtaatcacatttacccttttaggccggacgcggtggctcacgcctgtcgtcccagcactttgggaggccgagacggggggatcacatgaggtcaagcgttcgagaccagcctggccaacatggcgaaaccccgtctctaccgaaaaatacaaaaattagccaggcatggtggtgctcgcctgtaatcccagctactcaggaggctgaggcaggagaatcgcttgaacccgggatgcggaggttgcagtgagccgagatcgcgccactaagctccagcctgggtgatagagcgaggctccatctcaatagaacaaaacaaaacatttacgcttttgcagatcgaggaaaaaaatcaagcggaggaggcagtttttaccccccgaaatagaggttgactcgaacgcaaacccccacac

SEQ ID NO: 9239 - DNA, 963 bp, Artificial sequence
  DNA replication origin
tttttcggtagagacggggtttcgccatgttggccaggctggtctcgaacgcttgacctcatgtgatccccccgtctcggcctcccaaagtgctgggacgacaggcgtgagccaccgcgtccggcctaaaagggtaaatgtgattacacccacgcgtatttgttcaacagacatttattgagcgctcaccacgtgccaacgccgggcgtctgggctctggaggcgctgccacgtggcggatgcgcagtgcccggcggccgggctgaggggtgaacgcgggggtcagggggccccgggctgagggtttgcgtgcgggccgggtgcctgggggccccgggctgagggtgagcgcgccgcccaggtgccaggcggctccgggcagagagtgaacgcgcgggccaggtggctccagggcggcgccccagggcggggccggccacgccctccctaaccctggcggagctgatgggtggctgtagcctgattagaccgcgtcagtccggagggtgggtcttgggagggggcgcagggcagtccacgtttccactgcagtttctcctttgttttacgtttgggaggaggtggcattggaaatagcagagtgcttcgcggtaacaggggtgagtcttgtttcatggaacttttttcaaatggggagaagggggttgtgttgctcactacttggaatgtgtcggtcaaaggggttagatagtcagggaggggaagcgtgttctcatcctgggaccaggccggagccggcctcgccgggagacttgtagccctcgccctgcggtgacccgtggctggccactggcctcaaatgttgaaaacgggcagatgggcaagtaatacactctcaagaaagcaagtgtctggcggtgatttcctaaattgcattttttattttatttcaaaacttcatgtaaatatgtttccttacaatatctggctaagtcttttcta

SEQ ID NO: 9240 - DNA, 1972 bp, Artificial sequence
  DNA replication origin
ggggtttcaccatgttggtcaggatggtctccatctcctgacctcatgttccacctgcctcagcctcccaaagtgctgggattacaggtgtgagccactgcgccaggcaccacggcctcaatttttcaaatggactaattctagagttttcctcatgttgaaacgggacaagttcccttgtccccctcacatggcgtgcaacacggggagtggctgacttcagttccctgctgctcagacctgtatggggagcatgcagacgggcaggtcgtggggctccaaccccatggcagtgtctaggggtgaatgcttacagctcctgaggccccagtgggcgtgtgttacagggtgctctcagctttcgtcatctgtaggtgtcgtgttcatcagctcgattagatcttctgccttattgcaaggacaggcggctttctgtaccctgggttcttgccttggtgtaccagaaaaatcagatcacacgtgggcttggagaatgagtgcaaggtctgattgaatgttggaggtagctctcagcaggtgggtggggagggggaaggggatggagtgggattgaatggaggaagtagctctcagcaggtgggtggggagtgagaaggggatggagtgggattgaatggaggaagtagctctcagcaggtgggtggggagtgagaagggggtggagtgggattgaatggaggaagtagctctcagcaggtgggtggggagtgggaaggggatggagtgggattgaatggaggaagtagctctcatcaggtgggtggggagtgggaaggggatggagtgggattgaatggaggaagtagctctcatcaggtgggtggggagtgagaaggggatggagtgggattgaatggaggaagtagctctcagcaggtgggtggggagtgggaaggggatggagtgggattgaatggaggaagtagctctcatcaggtgggtggggagtgggaaggggatggggtgggattgaatggaggaagtagctctcatcaggtgggtggggagtgagaaggggatggggtgggattgaatggaggtagtagctctcagcaggtgggtggggagtgggaaggggatggagtgggattgagtggaggaagtagcactcagcaggtgggtggggagggggaaggggatggatttagaaggtgattttcccttttagtcgggccgctgggtggccggactcccctccaacggccccggccagattcccctcggccccccatctccgccggctgatggcctgccagcgtgttcttccccactctgctcctctggacgtccagctgcctgtgtactctaacacgggcatgttcctctcaaagtccagtgggttgtgtctgtgcctgctagggtctcagggtttttataggcacaggtcggggccgtagtgggccagggtggtcttggaaaatgcagtatttgggcacgaagacaggagtgcctgtcctcacctaggtctgtgggcacaggcctgagggtggacccctagccagggacccacctttctctacccagcacttccctgaccctctcacatctcaatgtgagtgggtaggaactggaggggaatgtaacttaagcctcttaactgtgatcatgtgcttctctccccagtaaacatccctaatctctctgctagcctagccgacccctgtaagggcaaagcactaatgtgaaagtaaaggtgttgtgcaaaggtgagcacggccctggagtctgagatgctgccgtgcagaagtggagctcaaggcttcaggctctggcagagagcacccccgagcacgcggcatgcagccagcttcctgggccctccaaatccaatccccctacccgattcctagagtccgggatttcctctgagctcgcaagtctctgaaacttaaaggcagtccagcagagtaattaatacagagatccactgctctcctgacttcgggcagtt

SEQ ID NO: 9241 - DNA, 1855 bp, Artificial sequence
  DNA replication origin
ccccgaggtggctttcggcatcgatcaggagcctagcagtgttggccacgagcaaatagtgtttaactgggaggaaggggacatgggggcatgacaatattctctgcacatcgatttggaatttcctgcaattaaaaatgttatttaaggccgggcgcggtggctcacgcctgtcatcccagcactttggaaggtcgaggcgggcggatcacgaggtcaggagttcaagaccagcctgaccaacatggtgaaaccccatctctactaaaatacaaaaattaaccgggcgtggtggcgcgcgcctgtaatcccacctgctcgggaggctgaggcaggagaatcgcttgaaccagggaggtggaggttgcagtgagccgagatcgcgccactgcactccagcctgggtgacagaacaagactccatctcaaaaaaaagaaaaaaaaagttattaagaaagaaaaggaaagagagggaatacctgagaaaagtaaaagctgtggcagggaggagggaggaggcgggtggaaggctgaaggtggtagcctgggcatagggaggagggaggaggcgggtggaaggctgaaggtggtagcctgggcatagggaggagggaggaggcgggtggaaggctgaaggtggtagcctgggcatagggaggagggaggaggcgggtggaaggctgaaggtggtagcctgggcatagggaggagggaggaggcgggtggaaggctgaaggtggtagcctgggcatagggaggagggaggaggcgggtggaaggctgaaggtggtagcctgggcatagggaggagggaggaggcgggtggaaggctgaaggtggtagcctgggcatagggaggagggaggaggcgggtggaaggctgaaggtggtagcctgggcatagggaggagggaggaggcgggtggaaggctgaaggtggtagcctgggcatagggaggagggaggaggcgggtggaaggctgaaggtggtagcctgggcatagggaggagggaggaggcgggtggaaggctgaaggtggtagcctgggcatagggaggagggaggaggcgggtggaaggctgaaggtggtagcctgggcatagggaggagggaggaggcgggtggaaggctgaaggtggtagcctgggcatagggaggagggaggaggcgggtggaaggctgaaggtggtagcctgggcatagggaggagggaggaggcgggtggaaggctgaaggtggtagcctgggcatagggaggagggaggaggcgggtggaaggctgaaggtggtagcctgggcatagtcactggatggagcagtcaaaaggtgggagaaaatgcttttcgatgattcctgcgtgacgctacactgcaaaaatgctaaggacagcccacaccacctatgcaggtgtccttggggtaacgtgaaggtttaggaaatcctagctggggcaaaaatcagcgagaatggccacctgctcttagacctttcccttccatcctcttcctccaagtccccagactggtgcatttcccctgaggcggggcctcctccagcaccacttcttcccaagggccgtgatgtgctggaagcagtggcagcagatggcagtggtccaccagagttccaggggcctgggctctccacactgggcctcaccctccctctctttcctaaacccaccaagcggggtctggtctttaggacgtggtatgaccttgcaaatatgtgttcacaggcccaaattccaagacaagaactaaaactccctcaagagaaagaaaacaaactaaacagcataataaagatcagatatttattgactgcttactagagcgttgttactggcattgg

SEQ ID NO: 9242 - DNA, 1368 bp, Artificial sequence
  DNA replication origin
tttaaaagtgactttaaagtgaccataaaacaatcaaaagatattctagacaagccaatgcttttcacaaataatttataatagcctatctttttacaagatatctgccctctatcggagataccagtatttaaaacaataatatgctaatagaatttcatcagatggtatattttagtgggccaggaagatgggagttacatgagtttctcccccaaagatcagttctgggaaaatagattctcaaagtgtgtttgggagggtgaaagagactcgagagaaatcatttttaattttgtgtgtgttttagaaaaggacatgcaggtttcgttacttaaatgagtttgtattttttggagatccatactgatatttatagatgaaatgatatttttccagtaagcgttcaatgagagaagcagaacccctaggagaggtaaacagtaagggtcctaggggagctggtcacaccatttatgccaggctgctgctgctgctggtggggctgctgctgctgctggtgctggtgctgctgctggtggggctgctgctgctgctggtgctggtgctggtggggctgctgctgctgctgctgctggtggggctgctgctgctgctgctgctggtgctggtggggctgctgctgctggtgctggagactgagtgttcaggcgggtagctgggcagggaacatgatgtacagcgggtgaacaggggcgacactggaacttgggagaatgggccagagcccacacaaggacaagctgtgagccgggttcatctctcgccacgttcaagccttcaccctcaatgcgcaggtgcctgcaggagaaggtgacttttcacatggagctagaccctggcctgggccagaaaccagagaagccgaaggaggatctcacggagcacggggagcggcaaggcccgctctgcctgtgacggaagagaagcaacagcatgtctggaagcggcagcctcatgccccgcacggaccccccacgcatcaaatcaacctggcccagcgctctgcggccttccggatctcacgcagctcccctgtgggccaggctccctggaactgtgccgcagaagaaattctaggaagtgcaatagcggctttgctaaactgacgcggtgcaaattcaccaccggtgtgatgccccgaggtggctttcggcatcgatcaggagcctagcagtgttggccacgagcaaatagtgtttaactgggaggaaggggacatgggggcatgacaatattctctgcacatcgatttggaatttcctgcaattaaaaatgttatttaaggccgggcgcggtggctcacgcctgtcatcccagcactttggaaggtcgaggcgggcggat

SEQ ID NO: 9243 - DNA, 2043 bp, Artificial sequence
  DNA replication origin
cccgtctccactgaaaatacaaacaaaaaaaaagaaaaaaggaaaaaaaaattagccgggcgtggtggcgggcgcctgtggtcccagctactcgggaggctgaggcaggagaatggcgtgaacccaggaggcagagccgcagtgagccgagattgtgcccctgcactacagcttgggcgaaagagcaagactccgtctcaaaaaaaaaaaaaatagataaagtttctcatattttcttctacacctcaactgattgtctttctcactctccttgagggccacatttagtctgcttgcaggtgctaacacggggaatgatgatttggtcagattcatgttttcaatcactcctcacagtggaagataagagttgagggatgcaggattcaaggagggaagtgtaggaaccaagatattatgatggatcaagcaagagaaagtcaggatctgactgagagagcaggcatggagtgaaaaggagggctaaatttgagaaatacctaggtagtagaattggtacgatccgcccattgagtaggggtggggagtggctctgagaggccggagtgaggcctgagtgaagggatgggagaagcaaatccattgagtagggatggggagtggctctgagaggccggagtgaggcctgagtgaagggatgggagaagcaaatccattgagtaggggtggggagtggctctgagaggccggagtgaggcctgagtgaagggatgggagaagcaaatccattgagtaggggtggggagtggctctgagaggccggagtgaggccggactgaagggatgggagaagcaaatccattgagtaggggtggggagtggctctgagaggccagagtgaggcctgagtgaagggatgggagaagcaaatccattgagtaggggtggggagtggctctgagaggccggagtgaggccggactgaagggatgggagaagcaaatccattgagtaggggtggggagtggctctgagaggccggagtgaggcctgagtgaagggatgggagaagcaagtccattgagtaggggtggggagtggctctgagaggccggagtgaggccggactgaagggatgggagaagcaaatccattgagtaggggtggggagtggctctgagaggccggagtgaggcctgagtgaagggatgggagaagcaaatccattgagtaggggtggggagtggctctgagaggccagagtgaggccggactgaagggatgggagaagcaaatccattgagtaggggtggggagtggctctgagaggccggagtgaggccggactgaagggatgggagaagcaaatccattgagtaggggtggggagtggctctgagaggccggagcgaggcctgagtgaagggatgggagaagcaaatccattgagtaggggtggggagtggctctgagaggccggagcgaggcctgagtgaagggatgggagaagcaaatccattgagtaggggtggggagtggctctgagaggccggagtgaggcctgagtgaagggatgggagaagcaaatccattgagtaggggtggggagtggctctgagaggccggagtgaggcctgagtgaagggatgggagaagcaaatccattgagtaggggtggggagtggctctgagaggccggaagggatgggagaagcaaatggcgcacattgtgtttcggtgactgagagaatagtggttatgtttaatgagacagaagattcagtggataagcagattttagtggtgggttcaattaagaaattgacctcatctttatacagattcacttccttttaattttctctcaacacactcatccaaaatttggttgtgttgtttttctgctgaacaacctgtattattctcctttcttttccaaatctccacattttggcccaacccgtgttccatggtgaattcagacagtaaaagaagcaactgtttttcaagtgccttctttgttatttataacacaatgctttttattccaattttgtagttgacttcttttctctaatagat

SEQ ID NO: 9244 - DNA, 2012 bp, Artificial sequence
  DNA replication origin
attaagataatgtatcaaaaatccaaatggagggttatctatatatcttttgaaaggaggttacatattcgcatcatttgaagcattggaaatagctttacagattctcagcctcacgcttactttacggaatcagggtcatttgatgtaggtttcatcttctgtggcattggagcatagaatacaggagggaacacctctgctgaagacaaaaccaccagcagaggaggatgaggaaatatacaaaaaaactttcaaccaaatgcaacgaaggatttcagtggagctttttattactgtttaaagtctgggctttgctgaagagcttgggacccatacaatgtgcccattactgtatgtgcgtccctgtgtgtgcttcactgtgggagtgtttccctgtgtgactgcttccctgtgtgtgtgtgtgtccctgtgtgtgtgctccccgtgtgtgtgcttccctgtgtgtgcgcgcccgtgtgtgcgtccctgtgtgtgcgcgcccctgtgtctgtgcgtccctgtgtgtgtccctgtgtgtgtgcttccctatgcgtgtgtgtccctgtgtgtgcttccctttgtgtgtccctgtgtgtgcgtccctgtgtgtgcgcgcccgtgtctgtgcgtccgtgtgtgtccctgtgtgtgtgcttccctctgcgtgtgtccctgtgtgtgcttccctttgtgtgtccctgtgtgtgtgcttccctttgtgtgtccctgtgtgtgtgcttccctttgtgtgtccctgtgtgcctccctgtgtgtgcttcactgtgggactgcttccctgtgtgtgtgcatccctgtgtgtctgcttccctgtgtgtgtgcctatgcgtgcttccctgtgtgtctgcttccctgtgtgtgtgcctccctgtgtgcttccctgtgtgcgcttccctgtgtgtgtgcatccctctgtgtgtgcgtccctgtgtgcatccctgtgtgcttccctttgtgtgttcgcctccctgtgtgtgcttcactgtgggactgcttccctgtgtgtacttccctgtgtgtgtgcatccctgtgtgtctgcttccctgtgtgtgtgactccctgtgtgtgtgcttccctgtgtgtgtgcttccctgtgtatgcttcactgtggaactgcttccctatgtgtgtgcgtccctgtctgtgcttcttgtgtgtgtgtccgtgtgtgtgtgcgtccttctgtgtgttatttgctgtgtgtacgtccctgtatgtgcattcctctgtgtgcttccctctgtctgcttccctgtgtgtgtgcgtccctgtgtgcgcgcttccctgtgtgtgtgtccctgtgtgtgtgctcccgtgtatgtgtccctgtgtgtgtgctcccctgtgtgtgtgtccctgtgtatgctgccttttgggtttccctatgtgtgcatccctgtgtctgtttccttgttttgtgtgcgtccctgtgtgtgcattcctgtgtgtgcgtccttgtgtgtgtccttttctgtctgtgctttcctgtgtgtgtgcctcctgtgtgtgcatccctgtgtgtgtgtctgtgtgtgcatccccgtttgtgtccctgtgtgtgcgtccttgtgtgtccttttctgtctgtgctttcctgtgtgtgtgcctcctgtttgtgcttccctatgtgtgtgtccctgtgtgcgcatccgtgtgtgtgtgtcccagggtgtgtccttttctgtctgtgctttcctgtgtgtgcgtccctgtgtgtgcttccctgtgtgtgcgtccctgtgtgtgcatccctgtttgcgtccctgtgtgtgtgcccgtttgcgtgtgtccctgtgtgggcatccctgtttgtgtgcgtccctgtgtgtgcgtccctgtgtgtgcgtccctttgtgtgtccttttctgtctgtgcttccgtgtgtgtgtgcatccctgtgtgtgctttttgtaatctgcttccttttatgtgtgctttcttttgtgtagcttcttgtccttgtaattctttctgtgtgtgtacttccttg

SEQ ID NO: 9245 - DNA, 3736 bp, Artificial sequence
  DNA replication origin
cggctttcatttgagtcatctcactctggctaagagccatttctggggaactagtatgtgtgttcggaggcaggagaacacactggctttttgagattccagagttcttgcactgattctttctcatgtgtgaggtctggtgttcctttcactgtgatgtaagttgaggatagtcagctggcttcatttctcagtgttttcagagggccaagaccatttagaatctttatttgtacctggatttctgccgtagttttcgcaggtatcttgggctgtgatccagtaggtgaggtttaacagggtaggccggtggataggctcttactcacagggttcttttctattttggtgcagttggcagtagtgcttcgtggtggtatttcatgcagttgcagtaatgctctgtggtggtgtttggtgtagttgcaggagtgctctgtggtggtgtttggtgtagttgtagtagagctctgtggtggtgtttggtgtagttgcaggagtgctctgtggtggtgtttggtgtagttgcagtactgctctgtggtggtgtttggtgcagttgtagtactgctctgtggtggtgtttggtgtagttgcaggagtgctctgtggtggtgtttggtgtagttgtagtagagctctgtggtggtgtttggtgtagttgcaggagtgctctgtggtggtgtttggtgtagttgcagtactgctctgtggtggtgtttggtgcagttgtagtactgctctgtggtggtgtttggtgtagttgcaggagtgctctgtggtggtgtttggtgtagttgtagtagagctctgtggtggtgtttggtgtagttgcaggagtgctctgtggtggtgtttggtgcagttgtaatagtgctctgtggtggtgtttggtgtagttgcatttgtgctctgtggtggtgtttggtgcagttgcatttgtgctctgtggtggtgtttggtggagttgcatttgtgctctgtggtggtgtttggtgcagttggcagtagtgctctgtggtggtgtttggtgcagttgcaggagtgctctgtggtggtgtttggtgtagttgcatttgtgctctgtggtggtgtttggtgtagttgcatttgtgctctgtggtggtgtttggtgtagttgcatttgtgctctgtggtggtgtttggtgtagttgcatttgtgctctgtggtggtgtttggtgtagttgcatttgtgctctgtggtggtgtttggtgtagttgcagcagtgctctgtggtggtgtttggtgcagttgcatttgtgctctgtggtggtgtttggtgcagttgcaggagtgctctgtggtggtgttcggtgtagttgtagtagtgctctgtggtggtgtttggtgcagttgcaggagtgctctgtggtggtgtttggtgcagttgcatttgtgctctgtggtggtgtttggtgcagttgcaggagtgctctgtggtggtgtttggtgtagttgtagtagtgctctgtggtggtgtttggtgtagttgtagtagtgctctgtggtggtgtttggtgtagttgcagtagtgctctgtggtggtgtttggtgtagttgcaggagtgctctgtggtggtgtttggtgtagttgcatttgtgctctgtggtggtgtttggtgtagttgcatttgtgctctgtggtggtgtttggtgtagttgcatttgtgctctgtggtggtgtttggtgtagttgcagcagtgctctgtggtggtgtttggtgcagttgcatttgtgctctgtggtggtgtttggtgcagttgcaggagtgctctgtggtggtgttcggtgtagttgtagtagtgctctgtggtggtgtttggtgcagttgcaggagtgctctgtggtggtgtttggtgtagttgcatttgtgctctgtggtggtgtttggtgcagttgcatttgtgctctgtggtggtgtttggtgcagttgcaggagtgctctgtggtggtgtttggtgtagttgtagtagtgctctgtggtggtgtttggtgtagttgtagtagtgctctgtggtggtgtttggtgcagttgcaggagtgctctgtggtggtgtttggtgtagttgcatttgtgctctgtggtggtgtttggtgcagttgcatttgtgctctgtggtggtgtttggtgcagttgcaggagtgctctgtggtggtgtttggtgcagttgcatttgtgctctgtggtggtgtttggtgtagttgtagtagtgctctgtggtggtgtttggtgcagttgcaggagtgctctgtggtggtgtttggtgtagttgcatttgtgctctgtggtggtgtttggtgcagttgcatttgtgctctgtggtggtgtttggtgcagttgcaggagtgctctgtggtggtgttcggtgtagttgtagtagtgctctgtggtggtgtttggtgcagttgcaggagtgctctgtggtggtgtttggtgtagttgcatttgtgctctgtggtggtgtttggtgcagttgcatttgtgctctgtggtggtgtttggtgcagttgcaggagtgctctgtggtggtgtttggtgtagttgcagtagtgctctgtggtggtgtttggtgtagttgcaggagtgctctgtggtggtgtttggtgtagttgcatttgtgctctgtggtggtgtttggtgtagttgcatttgtgctctgtggtggtgtttggtgtagttgtagtagtgctctgtggtggtgtttggtgtagttgcatttgtgctctgtggtggtgtttggtgtagttgcatttgtgctctgtggtggtgtttggtgtagttgcatttgtgctctgtggtggtgtttggtgtagttgcatttgtgctctgtggtggtgtttggtgtagttgcatttgtgctctgtggtggtgtttggtgtagttgcatttgtgctctgtggtggtgtttggtgtagttgcagcagtgctctgtggtggtgtttggtgtagttgcagtagtgctctgtggtggtgtttggtgcagttgcaggagtgctctgtggtggtatgtggtgtagttgcagtagtgctctgcggtggcgagtggaggagagagatgactcctaaccgggtccactcgcgagcattagagaagctccctgtgatcactggctttgtacctgcctttcctttgttaggtgttgtggtccatagggctctctcagggagagagcagcaggacccttcacagcaggtcctttggagggaggtatgccttgtcactccactcactctgcaatccccggcacctaactcttctcagcgttgaaaatgacaccttccccacttcttgggcattgcagacgccggcaagtcccaacaggctgccagcagtgggggtgcgtggagtgaccctatccagtgactgggcgcttcccaagggaactggaacttttcccacccacagagttcaggcagaggtggctccacagtgttggaatccccaactggcatgttccacctggctgggagcagcatgggtgagtgtggttgcctgcactgtcatccaggtgtgtttcctggggggacctggagctgcacctgcccccagaattcaggcggaagtgggttcactctgctggaggctcttgcaggcctggcctgccccgctatgaacagcaaaggcaaatgaagtcaccgcctcccaccatccacgtgcttcctggtgagaggtgacagcgtgctggcagtcctctcagctctgaggcgcct

SEQ ID NO: 9246 - DNA, 773 bp, Artificial sequence
  DNA replication origin
ttgtaagggattgaggtttgggagattaatcggacacgatcagcagggaaagcacgtatgtttttatgagaattatgccgagataggtaacagatgaggatgaaatttgggcttgactgaagtaatgggggctgtctatgaagccttgcggcagtacagccttggtaatttgctgagcctaatgggtgtcagggtcagtctaagtgaaggcgaagagaggctgggacgaggggtgcaggggaatagtgaaaaaagcatctttaagatcaagcacggaacagtgagttgtggaggagggtattgaggacaagagtgtaggggtttggcaccacagggtggataggcgaaacaatttggttgataaggcatagatcctgaactaacttgtaaggcttgtctggctttaggacaggtaaaatgggggaattgtaaggatagtttataggctttaaaaggtcatgctgtagcaggcgagtgataacaggctttaatctttttaaagcatgctgcgggatgggaatattggcgttgagtggggtaagggtgattaggttttaatgagatggtaaggggtgcatgatcggtcaccaaggagggagtagaggtatacttgtgggttaaggtggggggatacaagaggaggacgcaaaggaggctttggattgggaggaggggcggcaatgagatgtagctgtagtccaggaatagtcagggaagcagataatttagttgaagtgtcttggcctaataagagaactgggcaggtggggata

SEQ ID NO: 9247 - DNA, 949 bp, Artificial sequence
  DNA replication origin
taaaaggattacagggtggaggagcagaggctgaggaagaattgggacctggctcggcctggcgaggagcagcctggggaggaagggagaggtcagatgggtctgtagaaaaggaagattagaaagactcagggacgcttggggttggtactgaggggacaggcgggagggaaagaaggaagatttgggacaagttgcactgggcacagagactaggaagggactgatgtgtaaaagaatgcctggacatcaggcacctcagaccgtttgcctattttacgacaagaaatatttagatcttgcaggatggaaaaattcaaagtgccattttctggctatttggaactactgtcaaatttgtattggggtcaagcggcattgcagaagaaaataaggcatttaggtttcaggtcaggtgtgagttgaagaggttttaagtttttgagcacacaggccaagggagtagaaggaggaatggagggtggaaggttgcccatagtgaaggaagcaagcctagagaaaagagagagtagagaaatggagggaaggggttcggaggttcttaccttccagaaaagtgggaaaaggggttggggcgcagagataagaggtcggggcagggaaataagggatggggcacagaaataaggggtcagggcatggaaataagggattggggcacagagataagaggtcggggtgtggaaataagggattgaggtgcagagatataagaggttgttgcacggaaataagggattggggcacagagataagaggttgttgcacggaaataagagattggggcacagagataagaggttggggcacagaaataagggattggggattcttgcccagtagaaaagcaggacttgccactaagggtgaaggagaaggggttgaggggtacttgcccctctcccagaaaagcagagaaggggtagag

SEQ ID NO: 9248 - DNA, 2731 bp, Artificial sequence
  DNA replication origin
gtttaagatgggaaagtctacctacatttttaacaaaatatcagtagaaaaaaaaaacaacagaaaaagaaacagagttctctccagcctctcagaagggctgcagtgactggcatagtaaattatgggaaagttccacattgtggctcagcatgcccaagaacaaagccatggacagtttttcacaagagaaatctcagggaataggagcagattatatagcacaaaacatgccacagcctcaacaatgttttgagccctgaaacaagtaacaggacaatagggttgttggaaagtttagagtctaatcttgattctaaaacatgtgatatggtcacgtgccccatgacgtctcagtcgatgacagaccacatgtacaacagtggtctcgtaagattatagtactgtatttttattgtaccttttctatgtttagatacacaaatacttaccattgtgttacaactgcctacagtattcagtacagtaccctgctgcttgcagcttaggagcaatagactttatcatacagcttaggtgtgtgagaggctctaccatcctggtttatgcaaagacactctatgatatttgcacaatgacgaaatcacctaaggacacatttctcagagcaaatcctggtcattaagctacacatgactgtatataagctgcagtgtgcgactgacatgtctctaccaatgattaactattcttcaatggagagcaacattccaagaattaaattgtaaaagcccgtctaataacaagtgttctgtatttctgagacaattctgtctttgcctccgagaaatggctacttcacaaactcccgtaacggaaatttcacaggtgaaaggcggagctagccatgagcacagccaggatccatttatgtcaattaggaagtgggttagcagcccaggtgaaactggatacgagtgaaaggactagatgcagtacactagaattctcctctctgacccgtggaccaggaagaatccctctgcactgtgtaaatatgtgaaataacgggaagaccaaagaggagtcccctcggagtcccgtgcttgaagccagctgctggatagccagacaccgtagcttactgtggacgagcactccatccccagatgaagaaagagggtgcactgcataaggagacgctgctgattagacttcagaggaaattctttatcagaggtgcgtatacataaagcgcaaaaatcacagagaatatataggctcaagagagaagtcctgaggacccattttagggagaatttttcaagtagaggaagagacagaataggatcaaatggggggacgaaatgtgtttaaatgattcggagagaagaaaaatcagccaagggagacgtcaaggagaaaaataaggcaagtagcacagcactgtgatgatgacaatgctgaaatgggaggaggctgagggcggtccagacaagccacatgctaacgaaggcaggaacgtggcggggtgaacagatgctaaggaaggcgggagcgcggcggggtgaacagatactgacgaaggcgggaacgtggcggggtgaacagatgctgacgaaggcgggagcgcggcggggtgaacagatgctaaggaaggcgggagcgcggcggggtgaacaaatgataacgaaggcgggagcgtggcggggtgaacagatgctgacgaaggcgggagcgcggcggggtgaacagatgctgacgaaggcgggagcgtggcggggtgaacagatgctgacgaaggcgggagcgcggcggggtgaacagatgctgacgaaggcgggagcgtggcggggtgaacagatgctgacgaaggcgggagcgcggcggagtgaacagatgctaaggaaggcgggagcgcggcggggtgaacagatgctgacgaaggcgggagcgcggcggggtgaacagatgctgacaatggcgggagcgcggcggggtgaacagatgctgataatggcgggagagcgacggggtgaacagatgctgacgaaggcgggagcgcggcggggtgaacagatgctaaggaaggcgggagcgcggcggggtgaacagatgctgacgaaggcgggagcatggcggggtgaacagatgctgacgaaggcgggagcgcggcggggtgaagagatgctgacgaaggcgggagcgtggcggggtgaacagatgctgacgaaggcgggagcgcggcggggtgaacagatgataacgaaggcgggagcgcggcggggtgaacagatgctgacgaaggcaggaacgtggcggggtgaacagatgctgaggaaggcgggagcgcagcggggtgaacagatgctgacgaaggcgggagcgtggcggggtgaacagatgctaaggaaggccggagcgcggcggggtgaagagatgctaaggaaggcgggagcgcggcggggtgaacagatgctgacgaaggcaggaacgtggcggggtgaacagatgctgaggaaggcgggagcgcagcggggtgaacagatgctgacgaaggcaggagcgcggcggggtgaacagatgctaaggaaggccggagcgcggcggggtgaagagatgctaaggaaggcgggagcgcggcggggtgaagcacaaggatgtgactgagaagacgacgtcgctgttggagaatatggtgactttgactgagaaggcgacgtcactcttggagattatggaggccgtgagggccgtccaaacacaacag

SEQ ID NO: 9249 - DNA, 1905 bp, Artificial sequence
  DNA replication origin
ctccctgtacccggttacagaaataagctctcttctttcccagtttatcagcatctcattattgggccacgagaataagcagccagactctcagtttggtctgggaacaaacggacttatccctgtaggtaataaaatgcctttgtccatagctcctggctatgagcagtgaacgaggccaaggttctgcatggcccattgaagaggagacactactggcaacagcaagccaggcaggctgctctccaggtgctaggtaccagtcttggcctcaatccttaactatctgtgtgaattggacaagtccatcagttccttggtgtctcagttgattcatctataaaatgaggaaaataatgtgtaatgtgtaagaaagctctgtggatcaatgtttaaaatacgtgagagaaacaccaaaagcaacaccaaagcgtgcagtcatggaagtcatgacttcagcgtgaagtcatgattactgaatcagtgaggaataagggtggagggtggggtcacggagatggaaacaccagtggaataagggtggagggtggggtcgtggagatggaaacaccagtggaataagggtggagggtggggtcacggagatggtaacaccagtggaataagggtggagggtggggtcatggagatggaaacaccagtggaataagggtggagggtggggtcgtggagatggaaacaccagtggaataagggtggagggtggggtcgtggagatggaaacaccagtggaataagggtggagggtggggtcgtggagatggaaacaccagtggaataagggtggagggtggggtcgtggagatggaaacaccagtggaataagggtggagggtggggtcgtggagatggaaacaccagtggaataagggtggagggtggggtcacggagatggtaacaccagtggaataagggtggagggtggggtcatggagatggaaacaccagtggaataagggtggagggtggggtcgtggagatggaaacaccagtggaataagggtggagggtggggtcgtggagatggaaacaccagtggaataagggtggagggtggggtcacggagatggtaacaccagtggaataagggtggagggtggggtcgtggagatggaaacaccagtggaataagggtggagggtggggtcatggagatggaaacaccagtggaataagaggtagaaggtggggtcgtggagatggaaacaccagtggaataagggtggagggtggggtcatggagatggaacaccaggggaataagggtggagggtggagtcatggagatggaaacaccagtggaataagagatagagggtggggtcgtggagatggaaacaccagtggaataagagatagagggtggggtcgtggagatggaaacaccagtggaataagaggtagagggtggggtcgtggagatggaaacaccagtggaataagggtggagggtggggccatggagatggaaacaccagtggaataagaggtagagggtggggtcgtggagatggaaacaccaggggaataagggtggagggtggggtcatggagatggaaacaccagtgaggcactagggatacattcacatgatttggaaatgcaaagacatggaagacagagcacagaaagaaatgacaagcagctccaatttctgagtgcaggtaactgaaagaatgatggtatcaccgaaaaaataaagtagttgtgtgggggctcacttgacggggaagacaaggagttcacttgtgcacaaatcaatctgaactgaaagcaaggaaccaaccgtgctctagggagtaagagatacccaaccaaaactcaggaagtgattgccatttaagctcagcttccgatcaattcacatagttaaatccacat

SEQ ID NO: 9250 - DNA, 1664 bp, Artificial sequence
  DNA replication origin
tgatggtgtgtgtactagtgcagtggtgatgtgatggtgtgtgtactagtgcagtggtgatgtggtgatggtgtgtgtgtgctagtgcagtggtgatgtggtggtgatggtgtgtgtgctagtgcagtggtgatgtggtggtggtgtgtgtactggtgcagtggtgatgtggtggtggtggtgtgtgtactagtgcagtggtgatgtggtgatggtggtgtgtgtgctagtgcagtggtgatgtggtgatggtgtgtgtattagtgcagtggtgatgtggtgatggtggtgtgtgtactagtgcagtggtgatgtggtggtggtgtgtgtactagtgcagtggtgatgtggtgatggtgtgtgtactagtgcagtggtgatgtgatggtgtgtgtactagtgcagtggtgatgtggtgatggtgtgtgtgtgctagtgcagtggtgatgtggtggtgatggtgtgtgtactagtgcagtggtgatgtgatggtgtgtgtactagtgcagtggtgatgtggtgatggtgtgtgtgtgctagtgcagtggtgatgtggtgatggtgtgtgtgctagtgcagtggtgatgtggtggtggtgtgtgtactggtgcagtggtgatgtggtggtggtggtgtgtgtactagtgcagtggtgatgtggtgatggtggtgtgtgtgctagtgcagtggtgatgtggtgatggtgtgtgtattagtgcagtggtgatgtggtgatggtggtgtgtgtactagtgcagtggtgatgtggtggtgatggtgtgtgtactagtgcagtggtgatgtggtggtgatggtgtgtgtactggtgcagtggtgatgtggtggtgatggtgtgtgtactagtgcagtggtgatgtggtgatggtgtgtgtactagtgcagtggtgatgtggtggtgatggtgtgtgtactagtgcagtggtgatgtggtgatggtgtgtgtactagtgcagtggtgatgtggtggtgatggtgtgtgtactagtgcagtggtgatgtgttggtgatggtgtgtgtgctggtgcagtggtgatgtggtgatggtgtgtgtactagtgcagtggtgatgtgatggtgatggtgtgtgtactagtgcagtggtgatgtggtgatggtggtgtgtgtgctagtgcagtggtgatgtggtgatggtgtgtgtattagtgcagtggtgatgtggtgatggtggtgtgtgtactagtgcagtggtgatgtggtggtgatggtgtgtgtactagtgcagtggtgatgtggtggtgatggtgtgtgtactggtgcagtggtgatgtggtggtgatggtgtgtgtactagtgcagtggtgatgtggtgatggtgtgtgtactagtgcagtggtgatgtggtggtgatggtgtgtgtactagtgcagtggtgatgtgttggtgatggtgtgtgtgctggtgcagtggtgatgtggtgatggtgtgtgtactagtgcagtggtgatgtgatggtgatggtgtgtgtactagtgcagtggtgatgtgatggtggtggtgtgtgtactagtgcagtggtgatgtggtggtggtggtgtgtgtgctagtgcagtggtgatgtgatgatggtggtgtgtgtgctagtgcagtggtgatgtggtggtggtgatgtgtgtgcttgtggt

SEQ ID NO: 9251 - DNA, 1702 bp, Artificial sequence
  DNA replication origin
ccagcgtcctgtctcagggtcaccatcattcacagttatgtaaagaagccagaggaattgcagtgcacttaagtaaacttaaaaatcatctcctaattattattgatcttctcatcagagacaaggtgcccaagaactgaatgggagggaggtgggcacgccaccttatagcccaagaatcattagtcaggacagcctatttataaaaatagcttgctaagaggagttttaaagaccacagaagagtacatttctttactagttttatttactaaaagtgtaaaaattagacttttaaatcatttgattccagaggcacattttttaaaaaatgtagtttttgagaattataagaggtatattaaaaaattttaagtttgtctcttttttttgaaagctgaaaattaatctaatgctattcttgtcaaccaaaataggagagagctgagggacacagcatggaaaacatgaaagagctgagggacacaggatggagaatatgaaaataggagagaaccgagggacatgcaaggagaataggagagagccgagggacacggcacagagaatgggagagagccgagggacacggcacggagaatgggagagagccgagggacacggcacggagaatgggagagagccgagggacacggcacagagaatgggagagagccgagggacacggcacggagaatgggagagagccgagggacacggcacggagaatgggagagagccgagggacacggcacggagaatgggagagagccgagggacagggcacggagaatgggagagagccgagggacacggcacagagaataggagagagccgagggacacggcacagagaatgggagagagccgagggacagggcacggagaatgggagagagccgagggacagggcacggagaatgggagagagccgagggacacggcacggagaatgggagagagccgagggacagggcacagagaataggagagagccgagggacagggcacggagaatgggagagagccgagggacacggcacagagaataggagagagccgagggacacggcacggagaatgggagagagccgagggacacgcaaggagaataggagagagccgagggacacggcacggagaatgggagagagccgagggacacggcacggagaatgggagagagccgagggacagggcacggagaataggagagagccgagggacagggcacagagaatgggagagagccgagggacagggcacggagaataggagagagccgagggacacggcacggagaatgggagagagccgagggacacggcacggagaataggagagagccgagggacacggcacagagaataggagagagccgagggacacggcacggagaatgggagagagccgagggacagggcacggagaatgggagagagccgagggacacgcaaggagaatgggagagagccgagggacacggcacggagaatgggcgagagccgagggacacggcacggagaatgggagagagccgagggacagggcacggagaatgggagagagccgagagacacgcaaggagaatgggagagagccgagggacacggcacggagaatgggagagagccgagggacacggcacggagaataggagagagccgagagacacggcaaggagaatgggagagagccgagg

SEQ ID NO: 9252 - DNA, 1220 bp, Artificial sequence
  DNA replication origin
gaaatatgttgctacttggctgcctctactctattattgtacaccttgaaggtgaggttaattaagtcctgttgtggggtttcagggccagaatttcattttaggagttttatttaatgtcgggagcagattgggtaataaaatgtatgttgagaataagacggccttttgatcttttaggctcttagggctgtaaaacatctcagggttgctgccaaacgagccatgaactgggctggatttttatatttgatgaaaaagagcctaaacgctatctgatttgggataaagaaaaaggagcattaaccttgactatgcctttagctccagccacctttttaagagtaaattgctgggcaggtgggggagggctagtcacagaatgaaactgaaagccagaccgggtgtgaggaggcgaggtgataaaaggattatagggtggaggagcagaggctgaggaagaattgggacctagctcagcctggtgaggaggggagaggtcagatgggtctgtagaaaaggaagattagaaagactcagcaatgcttggggttgggactgaggggacaggtgggagggaaagaaggaagatttgggatgagttacattgggaacagagactagggagggactgatgtgtaaaagaatgcctggacatcaggcacctcagaccgtttgtctattttatgacaagaattatttagatcttgtaggatggaaaaattgaaagtgccgttttccagctatttggaactactgttgagtttgtattggtgtcaagtggcattgcagaagaaaataagatgcaagatgcttagattttaggtcaggtgagagttgaagaggttttaagttctcaagaacacaggctaagggagaaggaggaatggaaggtggaagctttcccatagtgaaggaggcaagcctagagaaaagagagtagagacacggagaaggggtggggggttcttgccctccagaaaagcagagaaggggttggggcgtggaaataaggagctggggcacagagataagaggtcggggcacggaaataagggatcggggcacagagataagaggttggggttcctgcccctcctccagaaaagcagaacttgccattaagggtgaaggagaaggggttgaggggttctttcccctcccccagaaaagtggagaaggggtagagacatggagagaagggattggggttcttgccc

SEQ ID NO: 9253 - DNA, 932 bp, Artificial sequence
  DNA replication origin
gaagcggacgcgaaataaacactccctgacagcctacgtctctgtagaacccgcctccgtcttcacccaaacgctgaatggctcagagttccacttccgggtttctgccggggagctacggcggccgcagagggccaaaaggcatccgcgcgcagctgctccctggcgccctctcaaggagcccctgaggattcgcgcctcccggaagggagaaaagcccgcccgaggcgcggtgctgacggtggctgggctgccgggtgcgctgtggaaccgcctcctgctagagcagcgggctggcgacggtcctcgccggggcgggaagcggctcaggctgccctcgctggcctgcggcggcgcggctggaagcgcgggccactcgtgcgtgggtcactcaggactgcgcctcgcgcgactgtgtgtgcaggaaacaagcaggaaataccctaaaagagaatgaagcgccatgttgagggtcgcggacgtcgcgagtgctgtgggaatgtgggctgaggtggagagttatggtagcccgtgttacaggctcaggggtctgaaagaagcctaatcgtggaggcggcatctgaggagggtcttgaaggctgggcaggcatttgcccgacagagatggaggaagctagtcctgtctgatggaggaaacagggcggaggcgtggagggagccgtgcagcgctggtgtgaggagcagcgagcaggccaggcctgtaaagcagagtgagggaaccaggatagagaaggcaagtcggggtcctgtggtcgctgaagaatttgaatgaaatcagtaaacaggtgagagggatccatcgcaagagcatgggatgaaaggaggagtagtccacggtgattcctctgcagcggtgggtgttattaatcgcgtatgtgacaccaaaaccaccccactcaagctgtggctct

SEQ ID NO: 9254 - DNA, 993 bp, Artificial sequence
  DNA replication origin
ttggggaagtgtgggggagtgtgggggaggttgggggaggttgggggaggttggggaagtgtgggggagtgtgggggaggttgggggagtgtgggggagtgtgggggagtgtggggaagtgtgggggaggagtgtgggggagtgtgggggagtgtgggggagtgtgggggagtgtgggggaggttgggggaggttgggggaggttggggaagtgtgggggaggttgggggagtgtgggggaggttgggggagtgtggggaacctctcccacctcccagctgcttccaggagccacttctttcgagatgagacactctgctgcctgtctgttcccatttggctgcaatagaccattgacaacattcagagaacaagaaggggcctcacctgttttccctgacacgtcggaggcagatggacattcccaggggacctggggtagaacctgttcatctgcccacccccaggctgtgctggcttcatcttatctgtgtgatggtggcggtgggaattaccaaggggtcatcacacagaccatggacaagttctacaagagccagggagaagagccctgtccgtgcttgctgcccagcacccagctcacacacacacctcttatttgacagcttccccaaagcgggctttgcagtccaggctccccgagaagcttggggaggagactctgccagtctgaagggcctatccctaaaaaggtgccaccctcaccaggctcatcctggcaatcttggattatctttgctctgaggttttggagtgggggacagggagacagcagacactgcacatcacccatctttccagagagcatcagccctccagactggggcaggtcagacctccacttgggcgtttttctcactggttgccagttgggggaagcagcatttgtgagcacctgcctgtcttcccaggtcctgttcagaaaccccatctgtgcctttggagagactgccctgagcacacaggcccagc

SEQ ID NO: 9255 - DNA, 1578 bp, Artificial sequence
  DNA replication origin
agccggggctctgagggcccagcccgggcctgccgggtggccggggaagatgttggcagcggcgggggcggtgcccctgcattgcggcccctgggctccctgccggggacggtggaaccgggtggctggcgaggcggcgggggtggaccccagggacagggcggcctggggatgggggtgcggatgggggtgggagagcggctggggcgcctccgtgactcagccccggcctgtctggcccctcccgtctccgcagttctgggaggtgatctctgatgaacatgccatcgactccgctggcacctaccacggggacagccacctgcagctggagcgcatcaacgtgcaccaccacgaggccagcggtgcgacccccgtccttcccccaccgccctcctgggaacgcggccctcccctcgctcatgccctcccgccccacgcaggtggcaggtacgtgtcccgcgctgtgctcgtggatctggagccgggcaccatggactctgtgcgctcggggcccttcgggcaggtcttcaggccagacaacttcatttcccgtgagctgcgggcgaggactggggtgcggctccttagccagggcagctcgaaatccaggaacgctccaaggtcatcctgtgggaactgtggcgccagggcccctgaacaccctcctgtcctccgagtcgagtcgctccatctgcctcctaaacgggcttcgggaggaaggcccgcgtgtctcctcaaggtgaggagctactgatgtaaactccctgcaaggacctgagctggggccgtggctactgccttccctgagaatgggccacctgcagcgaggtctgtgaacccgtctcaggttcgactcctgacttaattcctaacaggggaagctgctgtcctgtaactcctggggagggggtttcatttgttccacctgcagcgagttctgtgagcccgtctcaggtttgactcctgtcttaattcctaacgggggaagctgctgtcctgtaactccgggggaggggttttcatttgttccacctgcagtgaggttagcccctctcaggtttgactcctgacttaattcctaagagaggggaagctgctgtcctgtaactccgggggagggggtttcatctgctccacctgcagggcgaatggtgctctcacctcacacgtgacacttggccctttctgcattatggtggtgaccactgatgaccgtatacctggccgtcgagtgaccggctgtgctgtcttacaggtcagtgtggggccggaaacaactgggccaagggacgctacaccgaaggcgcggagctgacggagtcagtgatggacgttgtcagaaaggaggctgagagctgtgactgcctgcagggtttccagctgacccactccctgggtggggggactgggtctgggatgggtacccttctcattagtaagatctgggaggagtacccagacaggattataaacacattgagcatcctgctcttgcccaaggtgtcagacaccgtggtggagccctacaacgccaccctctcagtccaccagctcatagaaaacgcagatgagacc

SEQ ID NO: 9256 - DNA, 1164 bp, Artificial sequence
  DNA replication origin
agatccacgagcacagcgcgggacacgtacctgccacctgcgtggggcgggagggcatgagcgaggggagggccgcgttcccaggagggcggtgggggaaggacgggggtcgcaccgctggcctcgtggtggtgcacgttgatgcgctccagctgcaggtggctgtccccgtggtaggtgccagcggagtcgatggcatgttcatcagagatcacctcccagaactgcggagacgggaggggccagacaggccggggctgagtcacggaggcgccccagccgctctcccacccccatccgcacccccatccccaggccgccctgtccctggggtccacccccgccgcctcgccagccacccggttccaccgtccccggcagggagcccaggggccgcaatgcaggggcaccgcccccgccgctgccaacatcttccccggccacccggcaggcccgggctgggccctcagagccccggctgccaaccttggcgccgatctggttcccgcactgcccggtctgcgtgagcacaagctccctcgtggccaaggcaggattagggcggcaggagaagcgcgagaaggaggagcagacgcacagcgacccagcccggcctccgccaacgcttaaacagccccgcgcccacctccctcagcctaggattgggctcccagaataagcaacagctttacttccacacaggtgcacccacctgtgactcccctggcgttgaacgtctgttggagaactcaggtgtccttgcgtggtcccttccacgttggggaaagctgctcagctggagaacttcctcccacgtctttagtaagactaaatccctagctgagctgaaactgaattttcctcccatgtgggaggggaagacgcttgtttccatatgcacggagtgcctttgcacctgtcctagattgatgacatatttttgtaattgatgaatcttttcatctattaggagatctgtcgttaggaaaggccttccacatgttaacaggacttaattatacgttttactttggagcagttcaaatctgcagtaagctatgggtgttagagatagtcaggcctctgatttagctagagtcttctttaggattagccctttcacctttccagaggactgcggtctccacacagagtgaaggtaat

SEQ ID NO: 9257 - DNA, 921 bp, Artificial sequence
  DNA replication origin
tcgaaaagcactgtgaaaatccctgtcctgttttgttctgatctaattaccgctgcatgcggcccccagtcagtaccctctgcttcctcaatggatcacgaccctctcacgcagacccccttagagttgtaagcccttaagagggacaggaattactcagtcggggagctcggtttttggagacatgagtctgcggatgatcccagctgaataaagcccttccttctacaactcggtgtctgaggggttttgtctgcggctcctcctgctacagaaggagaggaagggagagaggaatggagagatagaaccagagggagagagagagacagcgatagagagagagagagacagagagtgggggaggagagagagagagagagggaaagagagagcgcgacagaagagcgcgaggtggaaggggaagtagagaaagggagaggctgagggagttgcagagcgagagcgacagagccttggagagggaggctctgctcaggtagacaggccccctttgagcaggccggggtggggtggagggtgcttaggccgggctagaacagggggtcagggccccccatgcgggaaaaccaacggagccctgagacgtgttttttcttggattggttgtttgctttgggggtgcgtttcatagggtccttcctttgtttgcttctttctgtcttctcgatgcggtggccccccagatttgtagatgcgcccatccgtctggcgagagccctggctctgagcctgtccacggggccaggcctgggtctctctcgtgtcctcgggactggaatttacacgaagtcggtggcaaagtgcacagggacggatttcctcacggctggcgagggcaatgtccttcccccgggtaaagcagcccacgggttccggagcggaggtctcggctggcgt

SEQ ID NO: 9258 - DNA, 913 bp, Artificial sequence
  DNA replication origin
gtcgcgctctctctttccctctctctctctctctcctcccccactctctgtctctctctctctctatcgctgtctctctctctccctctggttctatctctccattcctctctcccttcctctccttctgtagcaggaggagccgcagacaaaacccctcagacaccgagttgtagaaggaagggctttattcagctgggatcatccgcagactcatgtctccaaaaaccgagctccccgactgagtaattcctgtccctcttaagggcttacaactctaagggggtctgcgtgagagggtcgtgatccattgaggaagcagagggtactgactgggggccgcatgcagcggtaattagatcagaacaaaacaggacagggattttcacagtgcttttcgatacaatgtctgtaatctatagacaacataaccgagtaggtcaggggtatatctttaactaccaggcccagggtgtgacaccgggctgtctgcctatggatttcatttctgccttttagtttttactaaaagcggtgcgcccatgtgtgtctgtttgggaatgggtttgctcgtgattgtggtggggtgtgtctggatgtccgtcagtaactttgtcccgggatcaggctgcctactctatcgccagcgcatgggtgtcacagttgctgtgttagtctcagtacgcagaaattgggcataagacaatatgaggggtggtctcctcccttacttcaagctatctttgtctgtgtctgtgtctttgtgtgtccgtgtgtgtgtgcccgtgtgtgtctccgtgtgtgtccgtgtgtgtgtgaccgcgcgcgtgctcccgtgtgtatctgtgtgcgtgtcggggtgggtttgctcgtggtggtggggtgtgtctgggtggcccatcagcccctctcc

SEQ ID NO: 9259 - DNA, 1498 bp, Artificial sequence
  DNA replication origin
ctccccctctatacgcccaagcaccagtcgccgcgctgcgttttccgccggcctcgcagagcgtcccgctatcgccggcggccagaccacgcgcaggaccgctgaggcgcccgaggcctccattccctgccagggctctggactctccaggcggcctccctttagctgacactccaggccttcccctggctctccagctccggagcttccaacacttggggcctgctcaggacggggtgtgatcccaggtgtcagggcccagggcccacggtcctgggatcccctctggtcctccgccttgccgcggaaaaattattttggattcctcgccgcccctcctgcaaggccccctcttgccccacgctcccagagaagccagggctgcccgggggcgaacagccggcccagccccgcgggccctttttctcacaacgcccacaccattgtcgcttgtcccgaggaagaccggcccgtggccaacggggcaggaaggccctgctttgtcccgcgctggcactagagccccggcagcctgatcccgggaaagaggggctgacggacacccagacacaccccaccaccaccacgagcaaacccaccccccccacacacacacagatacacacgggcgcgcgcacacgcacacggacacgcacggacacacacacaaagacacagacggcttgaaggacagaaagggagagagggatggagagatagaaacaaagggtgagacagagacagagatagagacagagagggtggggagagacggagagaaggtgacagaagagcgagaggtggaggggaagaagagaaaaagagaggatgagggagctggagagcgagagccatagagccttggaggaggctctgctctggcagacagggcccctttgagcaggccggggtggggtggagggtgcttgggctgggccagaacaggggggcagggccgtccaagggagaggactaactgagccctgagacgtgttcactcttggattggttagttacttcaggggtgcgtttggtagggtccttcctttgtttgctcctttctgtcttcttgatgcagtaggctccgagatttgtagagtgcgcctgtccatctgaccggagccataacgccgagcgtgcttacagggctcaagacctgggtctctctcgtgtccccgagactggattttacacgaagtcggtggcaatgaaaatccaagtgcacagggacggttttcttggtggctgacgaaggcaatgtccttccgcggtggaaaccagcccatgcgttgtggagcgcaggcgtgcggaaaagtgggagtagagtcagggggccgttgggaagcacggcgacaaaagggggaaagagggagggagcggggagccaaaagccttcagcaccctgtattcccagggggtctcgcatcccaagtactaaccaggcccgactctgcttagctttcaaggtcagtcgagatcccgtgcgttcagggtggtg

SEQ ID NO: 9260 - DNA, 729 bp, Artificial sequence
  DNA replication origin
gcttctctgggagcgtggggcaagagggggccttgcaggaggggcggcgaggaatccaaaataatttttccgcggcaaggcggaggaccagaggggatcccaggaccgtgggccctgggccctgacacctgggatcacaccccgtcctgagcaggccccaagtgttggaagctccggagctggagagccaggggaaggcctggagtgtcagctaaagggaggccgcctggagagtccagagccctggcagggaatggaggcctcgggcgcctcagcggtcctgcgcgtggtctggccgccggcgatagcgggacgctctgcgaggccggcggaaaacgcagcgcggcgactggtgcttgggcgtatagagggggagagcagcccggccgcgggcgagcggctccgggggtgcctgatcccagcctcgcggccccgggttggtggtgacgcctggaatcagacgcgcgtagctggaccgggctcttggaccagccaggcgccaccgccattgtctacggccataccattctaaacacgagagaaacccaagccggggcccgtgggcacgctcggggccactgctcccaccacagggacgggcgcactcgacaactttcaggacccacagcaccaagaggacagggaggagccagcaaaggaatgacgctacgaaacgcacccccaaagccaccaaccaatccaagtgaaaacacgtctcagggctccctt

SEQ ID NO: 9261 - DNA, 931 bp, Artificial sequence
  DNA replication origin
ctccggatcgccagcctgagttacttcatcccggagcgattcagacgaattccgtttccgaaggaatgagcgaattccccagagagcaatgagctgagactcaggtggttgtccgtttttcatccacatggttcacagatgacatatccccacgctgagccctgcaacagagcgcgaggcggatagtcccatccacacaggaatcacgctcaggccaactaaagcgtgattctggattccacgtttctttgccctctgcagaggtgcctgttgctcaagtctctgcccccgccccccgaaagtgtgaccatgttgactgtttgtttcccgagctctgtggggacccagaaacttccaggaatgcgtggaacaccagcatcgtgtcggtgctctcctttccagtttcaaacaggctatattgcagaccccccattttgcaggaaacaggaatccatcgtcaggccgtgatgcacgggacgtttcttttctctgtggtttcgatctcgttgtctacatgaaaatgaacgagatccacacacctgcgtgtgtgagactatcagggcaactgtgacacccacgcgctggcaatagagttggcagcctgatcccaggacaaaggtactgacggacatccagacacaccccaccacaatcactagcaaacccactcccaaacacacagacacacacgggcgcacgcgcgggaacacaagcacacacacagacacacaaagacacagacagcttgaagaaaagcaaaggacagagggatggaaagatagaaacggaaggagagagagaaacagcgagagagagagagagagagagagggaggagagcgggcaaggtggagagggaagtagagaaagggagcgggcgagggagctagagaaggagagcaacagagccttggagaaggaggctctgctct

SEQ ID NO: 9262 - DNA, 1457 bp, Artificial sequence
  DNA replication origin
cctggggctctcccacagggggctttcgtgagccaggcagcgagggccgcccccgcgctgcagcccagccaggccgcgccggcagagggggtctcccaacctgccccggcgcgcggggatttcgcctacgccgccccggctcctccggacggggcgctctcccaccctcaggctcctcggtggcctccgcacccgggcaaaagccgggaggaccgggacgcgcagcgcgacggcctgccgggcccctgcgcggtggcacagcctgggcccgctcaagcggggccgcagggccaaggggtgcttgcgccacccacgtcccaggggagtccgtggtggggctggggccggggtccccaggtcgccggggcggcgtgggaaccccaagccggggcagctccacctccccagcccgcgcccccggacgcctccgcggcaagcacagatgccagccatccaggcgcctcccaaccgctccaggagccggggcgctcgtctacagtcacctccagcctgttatatgagctcctgtagacaccagagtttcagcaaaaggcacgacctttcctagatccggcgccactgggggagctgaaggacgtggaagagcccgctctgctggaaccactcctcagccaggaagaacaccgggctctgctggaggagcaggttggagcggggttggggcggggtgggggcaggatggcgccctctctttcgcggtgaacctctgactcggtatggagaggcgtgccttcccttccagctgacctgtctaggatccctgagttccaggtccggtgagagactccacacagaggagggctgtcattctttcctgagcatcccggggatcccagggcccgcccaggtaccgggaggtggactgtctactgcgcatgcgcaggtttgcaggcagcagcctaggttttccaaccagcccaggcggagctctcattcctttttccccagcgttcttcagtcgagttggcggagacctcagtccgcgaagcgctgggccggggcagaagccaggccagttctcctttccgtggctcgactcctctgcctcttcgctcaccaacacttgccaacccccgtcccgccagcctcctcgccagcaccatggagcgccttgcaactaaatgtagacccgagaccccgtgcaaaccagggtgctgccctttccaggcaagaggcaaggcaggcagagatgaggacgggaacggagacagagtgggagggaaggatggagctaggaaaggatggatggacggagggaccctggaaaggagagaaagagggagggagggagaaagggaggaaaaaaccaggggaggaagggaagagcagacggaaggatggaccgagggacaaaaggagcaagaaacagataaaggaaggcagacagaaaaacggtcttctgcctccagaaccaacaggacccagcactccgggaa

SEQ ID NO: 9263 - DNA, 1478 bp, Artificial sequence
  DNA replication origin
agagggcgccatcctgcccccaccccgccccaaccccgctccaacctgctcctccagcagagcccggtgttcttcctggctgaggagtggttccagcagagcgggctcttccacgtccttcagctcccccagtggcgccggatctaggaaaggtcgtgccttttgctgaaactctggtgtctacaggagctcatataacaggctggaggtgactgtagacgagcgccccggctcctggagcggttgggaggcgcctggatggctggcatctgtgcttgccgcggaggcgtccgggggcgcgggctggggaggtggagctgccccggcttggggttcccacgccgccccggcgacctggggaccccggccccagccccaccacggactcccctgggacgtgggtggcgcaagcaccccttggccctgcggccccgcttgagcgggcccaggctgtgccaccgcgcaggggcccggcaggccgtcgcgctgcgcgtcccggtcctcccggcttttgcccgggtgcggaggccaccgaggagcctgagggtgggagagcgccccgtccggaggagccggggcggcgtaggcgaaatccccgcgcgccggggcaggttgggagaccccctctgccggcgcggcctggctgggctgcagcgcgggggcggccctcgctgcctggctcacgaaagccccctgtgggagagccccaggcgcgcagggcacgtggggtgcgggaagccccgttccccacgcgccggtgtgggcgaaggcgacccacgagggagcagggtgacccccgccaggggccgcgctgcacaggccgcctgcctgcgcgggcgccctgccaccctgtcccgggtgcctggcccttcgattctgaaaccagatctgaatcctggactccgggaggcccgtctctctggccagctcctcccgggcggcgatgcctggaaagcgatccttctcaaaggctcggaggagcagggcggtctgggatccggtgacggcggtccgctttcgccggccttctggcgggccgcgtctcccgggccagggccgagattcccgccggtgctgcctcagctggcgtgacctctcattctgaaaccaaatctggaccctgggctccggaatgccgatggcctgggccagccgttctctggtggcgatgcccgggtacgggttccgctcaaagcaggctcgcagggcctcgctttggctcggggtccaaacgagtctccgtcgccgtcctcgtccccgggcttccgcggggagggtgctgtccgagggtgtcgggagggccatcgcggtgagccccggccggaatttcacggacggacgcgggcagagagaggccggcgggctcccgtgcacctcagccggcctgtgcactgcggcaggtgcagccaggaggcccttagaaagacctaccacctccaccgcgttatgaacatgcatgagctcggggcccaaggtcc

SEQ ID NO: 9264 - DNA, 895 bp, Artificial sequence
  DNA replication origin
ccagggccgagattcccgccggtgctgcctcagctggcgtgacctctcattctgaaaccaaatctggaccctgggctccggaatgccgatggcctgggccagccgttctctggtggcgatgcccgggtacgggttccgctcaaagcaggctcgcagggcctcgctttggctcggggtccaaacgagtctccgtcgccgtcctcgtccccgggcttccgcggggagggtgctgtccgagggtgtcgggagggccatcgcggtgagccccggccggaatttcacggacggacgcgggcagagagaggccggcgggctcccgtgcacctcagccggcctgtgcactgcggcaggtgcagccaggaggcccttagaaagacctaccacctccaccgcgttatgaacatgcatgagctcggggcccaaggtcccggggtagcccgccctccgaagccgaaaaccacagggaccagggccttgtggggtgggtgggtgcagggccggattggaggggaaagaggggcttccggggctggctctctgaggttctccagtaattctatggaaactggaagccgctgtcttgactcagttttcaggcagaaaccaccccgaagggtggagtgtggaactgagcttccgtgacggtcttgagttttccaggccctctgtgggtgtcgccgttgccgtgatagttcacacacgcaggggtgtggatctcgttcgttttcatgtagaaaacgagagcgaaactgcagagaaaagaaacgtcgggtgcatcacggcctgaccacggattcctgtttcctgcaacaaggggagtctccactgtggccggtctggaaaccggaaaggagagcgaagtcacgatgctgcttttccacgcttcgctggaggt

SEQ ID NO: 9265 - DNA, 947 bp, Artificial sequence
  DNA replication origin
ccggaggccgaggaccgcttttcctccctgccttcctccccccgtccgtccccggctccctcccgcccgcccccagtccctgcgtcgctctgtctctccctccgttcctccctgcctccctgcctccctgcctccctcctaacgtccctccgcccatccttccgcccctctaggtctcccgttcctctctccatctctgcccgccttccctcccgcctggaacgctcagcgtcccggtgtgcgccgggcctggggtctgcgttccgccgccaggcgctccgtgctggcagctgggcggctgcaggggcccgggcggcgggcgacggtggcccgggggcgacagggaggaggcgagccgccggagcggtgtcaggcccggacgctgcgcggggcccggtgtttcgcgggacgggggtctccacccagcccaggggacgacgcgttttccgggggtggggggtggggggtggggatggggcggtcaggcggcggggtgggctggtggagaggcaggagagctctgcccgggctgctcccacagcccaggcggctgcccgcaaacccgcgcgtgcgcagtaggcggcccacctgctggtacctgggccggctctgggatccccgggatgcccaggaaagaatggcagttctccgcggtgtggagtctctcaccggcctggacctagaaggcaggaatcccaggccggtcagcccggtggagggggcggggcggagacacgcccctccgtagccagccaggtgttccccgcgaaagagaggccaccgccctgccccgaaccacccgaccccgtcccaaccccgcgtcctaaagctcctccagcagagcccggtattcttcctcgctgaggggtgcttccagcgaggcgcctcttccgaggcctccagctcccccggggcctccgtttctaggagaggttgcgcctgctgca

SEQ ID NO: 9266 - DNA, 1100 bp, Artificial sequence
  DNA replication origin
gggcctcgctttggctcggggtccaaacgagtctccgtcgccgtcctcgtccccgggcttccgcggggagggtgctgtccgagggtgtcgggagggccatcgcggtgagccccggccggaatttcacggacggacgcgggcagagagaggccggcgggctcccgtgcacctcagccggactgtgcactgcggcaggtgcagccaggaggcctgcccggacagccagccagccagccagccgcccttgtaaaggcccacaggcaggcaggctccaccccttcatgaatggcggtgagcccccctgggacagcccgccccaccccggaagggacccagggcgtcgaggcctggggccggccggcggggtggtggtggtgggggggggggggggggggggagggcgtggtggcggtggtggtggtggggccggagagacgaagaggaagggggagaggggggaggggggaggggggcgcgtttcgggggccggctctccggacctctccagggatcccgcgggaacgggaagccgctctctgggctcccacgcgtcggcagcagggagaaaccagcctgggagggtggaggggagtgtggaactgaacctccgtgggagtcttgagtgtgccaggccctctctccgtgaaggaggcaatgcctgtgggcgtcgccgttgccgggacggtctcgcacacgcaggcgtgtggctctcgttcatttccacgtagaagaccagagcgagaccccagagaggagatgcctccccggcgtgatggcctgacgatggattcccgcgtgcggcaacgtgggggagtctgcagtgtggccggtttggaacctggcaaggagagcgaaggcaccatgccgggcttgcacccttccctgcatgtttccgggtgcccgcagagctccgggagcaaacagtcggcatggccagcctttcgggggccggagagacgtgagcaacaggccgccttgcggagggcaaagccacgcggaaaccaaaatcacgcctccgtcgtcctgcgtgtggctcctccgtggccgggtctgtcggcctcgcgccgcgttgcagggctcagcctggggatgtgcggtct

SEQ ID NO: 9267 - DNA, 965 bp, Artificial sequence
  DNA replication origin
cccgctactcccggaggccgaggaccgcttttcctccctgccttcctccccccgtccgtccccggctccctcccgcccgcccccagtccctgcgtcgctctgtctctccctccgttcctccctgcctccctgcctccctgcctccctcctaacgtccctccgcccatccttccgcccctctaggtctcccgttcctctctccatctctgcccgccttccctcccgcctggaacgctcagcgtccccggtgtgcgccgggcctggggtctgcgttccgccgccaggcgctccgtgctggcacctgggcggctgcaggggcccgggcgggcgggcgacggtggcgcgggggcgcagaggaggcgagccgccggagcggtgtcaggcccggacgctgcgcggggcccggtgtttcgcgggacgggggtctccacccagcccaggggacgacgcgttttccgggggtggggggtgggggtggggatggggcggtcaggcggcggggtgggctggtggagaggcaggagagctctgcccgggctgctcccacagcccaggcggctgcccgcaaacccgcgcgtgcgcagtaggcggcccacctgctggtacctgggccggctctgggatccccgggatgcccaggaaagaatggcagttctccgcggtgtggagtctctcaccgggcctagacctagaaggcaggaatcccaggccggtcagcccggtggagggggcggggcggagacacgcccctccgtagccagccaggtgttccccgcgaaagagaggccaccgccctgccccgaaccacccgaccccgtcccaaccccgcgtcctaaagctcctccagcagagcccggtattcttcctcgctgaggggtgcttccagcgaggcggcctcttccgaggcctccagctcccccggggcctccgtttctaggagaggttgcgcctgctgcagaaactcc

SEQ ID NO: 9268 - DNA, 1109 bp, Artificial sequence
  DNA replication origin
gggcctcgctttggctcggggtccaaacgagtctccgtcgccgtcctcgtccccgggcttccgcggggagggtgctgtccgaaggtgtcgggagggccatcgcggtgagccccggccggaatttcacggacggacgcgggcagagagaggccggcgggctcccgtgcacctcagccggactgtgcactgcggcaggtgcagccaggaggcctgcccggacagccagccagccagccagccgcccttgtaaaggcccacaggcaggcaggctccaccccttcatgaatggcggtgagcccccctgggacagcccgccccaccccggaagggacccagggcgtcgaggcctggggccggccggcggggtggtggtggtggtggtggggggggggggtggtgggggagggcgtggtggcggtggtggtggtggggccggagagacgaagaggaagggggagaggggggaggggggaggggggcgcgtttcgggggccggctcttctgacctctccagggatcccgcgggaacgggaagccgctctctgggctcccacgcgtcggcagcagggagaaaccagcctgggagggtggaggggagtgtggaactgaacctccgtgggagtcttgagtgtgccaggccctctctccgtgaaggaggcaatgcctgtgggcgtcgccgttgccgggacggtctcgcacacgcaggcgtgtggctctcgttcatttccacgtagaagaccagagcgagaccccagagaggagatgcctccccggcgtgatggcctgacgatggattcccgcgtgcggcaacgtggggagtctgcagtgtggccggtttggaacctggcaaggagagcgaaggcaccatgccgggcttgcacccttccctgcatgtttccgggtgcccgcagagctccgggagcaaacagtcggcatggccagcctttcgggggccggagagacgtgagcaacaggccgccttgcggagggcaaagccacgcggaaaccaaaatcacgcctccgtcgtcctgcgtgtggctcctccgtggccgggtctgtcggcctcgcgccgcgttgcagggctcagcctggggatgtggggtctgtga

SEQ ID NO: 9269 - DNA, 1031 bp, Artificial sequence
  DNA replication origin
cagccccaccacggactcccctgggacgtgggtggcgcaagcaccccttggccctgcggccccgcttgagcgggcccaggctgtgccaccgcgcaggggcccggcaggccgtcgcgctgcgggtcccggtcctcccggcttttgcccgggtgcggaggccaccgaggagcctgagggtgggagagcgccccgtccggaggagccggggcggcgtaggcgaaatccccgcgcgccggggcaggttgggagaccccctctgccggcgcggcctggctgggctgcagcgcgggggcggccctcgctgcctggctcacgaaagccccctgtgggagagccccaggcgcgcagggcacgtggggtgcgggaagccccgttccccacgcgccggtgtgggcgaaggcgacccacgagggagcagggtgacccccgccgggggccgcgctgcacaggccgcctgcctgcgcgggcgccctgccaccctgtcccgggtgcctggcccttcgattctgaaaccagatctgaatcctggactccgggaggcccgtctctctggccagctcctcccgggcggcgatgcctggaaagcgatccttctcaaaggctcggaggagcagggcggtctgggatccggtgacggcggtccgctttcgccggccttctggcgggccgcgtctcccgggccagggccgagattcccgccggtgctgcctcagctggcgtgacctctcattctgaaaccaaatctggaccctgggctccggaatgccgatggcctgggccagccgttctctggtggcgatgcccgggtacgggttccgctcaaagcaggctcgcagggcctcgctttggctcggggtccaaacgagtctccgtcgccgtcctcgtccccgggcttccgcggggagggtgctgtccgaaggtgtcgggagggccatcgcggtgagccccggccggaatttcacggacggacgcgggcagagagaggccggcgggctcccgtgcacctcagccggactgtgcactgcggcagg

SEQ ID NO: 9270 - DNA, 947 bp, Artificial sequence
  DNA replication origin
aggaccgcttttcctccctgccttcctccccccgtccccggctccctcccgcccgcccccagtccctgcgtcgctctgtctctccctccgttcctccctgcctccctgcctccctccctccctcctaacgtccctccgcccatccttccgcccctctaggtctcccgttcctctctccatctctgcccgccttccctcccgcctggaacgctcagcgtccccggtgtgcgccgggcctggggtctgcgttccgccgccaggcgctccgtgctggcagctgggcggctgcaggggcccgggcgggcgggcgacggtggcgcgggggcgcagaggaggcgagccgccggagcggtgtcaggcccggacgctgcgcggggcccggtgtttcgcgggacgggggtctccacccagcccaggggacgacgcgttttccgggggtggggggtgggggtggggagggggcggtcaggcggcggggtgggctggtggagaggcaggagagctctgcccgggctgctcccacagcccaggcggctgcccgcaaacccgcgcgtgcgcagtaggcggcccacctgctggtacctgggccggctctgggatccccgggatgcccaggaaagaatggcagttctccgcggtgtggagtctctcaccgggcctggacctagaaggcaggaatcccaggccggtcagcccggtggagggggcggggcggagacacgcccctccgtagccagccaggtgttccccgcgaaagagaggccaccgccctgccccgaaccacccgaccccgtcccaaccccgcgtcctaaagctcctccagcagagcccggtattcttcctcgctgaggggtgcttccagcgaggcggcctcttccgaggcctccagctcccccggggcctccgtttctaggagaggttgcgcctgctgcagaaactccgggctc

SEQ ID NO: 9271 - DNA, 1078 bp, Artificial sequence
  DNA replication origin
tttggctcggggtccaaacgagtctccgtcgccgtcctcgtccccgggcttccgcggggagggtgctgtccgagggtgtcgggagggccatcgcggtgagccccggccggaatttcacggacggacgcgggcagagagaggccggcgggctcccgtgcacctcagccggactgtgcactgcggcaggtgcagccaggaggcctgcccggacagccagccagccagccagccgcccttgtaaaggcccacaggcaggcaggctccaccccttcatgaatggcggtgagcccccctgggacagcccgccccaccccggaagggacccagggcgtcgaggcctggggccggccggcggggtggtggtggtggtggtggggggggggggtggtgggggagggcgtggtggcggtggtggtggtggggccggagagacgaagaggaagggggagaggggggaggggggaggggggcgcgtttcgggggccggctctccggacctctccagggatcccgcgggaacgggaagccgctctctgggctcccacgcgtcggcagcagggagaaaccagcctgggagggtggaggggagtgtggaactgaacctccgtgggagtcttgagtgtgccaggccctctctccgtgaaggaggcaatgcctgtgggcgtcgccgttgccgggacggtctcgcacacgcaggcgtgtggctctcgttcatttccacgtagaagaccagagcgagaccccagagaggagatgcctccccggcgtgatggcctgacgatggattcccgcgtgcggcaacgtggggagtctgcagtgtggccggtttggaacctggcaaggagagcgaaggcaccatgccgggcttgcacccttccctgcatgtttccgggtgcccgcagagctccgggagcaaacagtcggcatggccagcctttcgggggccggagagacgtgagcaacaggccgccttgcggagggcaaagccacgcggaaaccaaaatcacgcctccgtcgtcctgcgtgtggctcctccgtggccggggctgtcggcctcgcgccgcgttgcagggctcag

SEQ ID NO: 9272 - DNA, 1073 bp, Artificial sequence
  DNA replication origin
tggggaccccggccccagccccaccacggactcccctgggacgtgggtggcgcaagcaccccttggccctgcggccccgcttgagcgggcccaggctgtgccaccgcgcaggggcccggcaggccgtcgcgctgcgggtcccggtcctcccggcttttgcccgggtgcggaggccaccgaggagcctgagggtgggagagcgccccgtccggaggagccggggcggcgtaggcgaaatccccgcgcgccggggcaggttgggagaccccctctgccggcgcggcctggctgggctgcagcgcgggggcggccctcgctgcctggctcacgaaagccccctgtgggagagccccaggcgcgcagggcacgtggggtgcgggaagccccgttccccacgcgccggtgtgggcgaaggcgacccacgagggagcagggtgacccccgccgggggccgcgctgcacaggccgcctgcctgcgcgggcgccctgccaccctgtcccgggtgcctggcccttcgattctgaaaccagatctgaatcctggactccgggaggcccgtctctctggccagctcctcccgggcggcgatgcctggaaagcgatccttctcaaaggctcggaggagcagggcggtctgggatccggtgacggcggtccgctttcgccggccttctggcgggccgcgtctcccgggccagggccgagattcccgccggtgctgcctcagctggcgtgacctctcattctgaaaccaaatctggaccctgggctccggaatgccgatggcctgggccagccgttctctggtggcgatgcccgggtacgggttccgctcaaagcaggctcgcagggcctcgctttggctcggggtccaaacgagtctccgtcgccgtcctcgtccccgggcttccgcggggagggtgctgtccgagggtgtcgggagggccatcgcggtgagccccggccggaatttcacggacggacgcgggcagagagaggccggcgggctcccgtgcacctcagccggactgtgcactgcggcaggtgcagccaggaggcctgcccggacagc

SEQ ID NO: 9273 - DNA, 944 bp, Artificial sequence
  DNA replication origin
tactcccggaggccgaggaccgcttttcctccctgccttcctccccccgtccccggctccctcccgcccgcccccagtccctgcgtcgctctgtctctccctccgttcctccctgcctccctgcctccctgcctccctcctaacgtccctccgcccatccttccgcccctctaggtctcccgttcctctctccatctctgcccgccttccctcccgcctggaacgctcagcgtccccggtgtgcgccgggcctggggtctgcgttccgccgccaggcgctccgtgctggcagctgggcggctgcaggggcccgggcgggcgggcgacggtggcgcgggggcgcagaggaggcgagccgccggagcggtgtcaggcccggacgctgcgcggggcccggtgtttcgcgggacgggggtctccacccagcccaggggacgacgcgttttccgggggtggggggtgggggtggggagggggcggtcaggcggcggggtgggctggtggagaggcaggagagctctgcccgggctgctcccacagcccaggcggctgcccgcaaacccgcgcgtgcgcagtaggcggcccacctgctggtacctgggccggctctgggatccccgggatgcccaggaaagaatggcagttctccgcggtgtggagtctctcaccgggcctggacctagaaggcaggaatcccaggccggtcagcccggtggagggggcggggcggagacacgcccctccgtagccagccaggtgttccccgcgaaagagaggccaccgccctgccccgaaccacccgaccccgtcccaaccccgcgtcctaaagctcctccagcagagcccggtattcttcctcgctgaggggtgcttccagcgaggcggcctcttccgaggcctccagctcccccggggcctccgtttctaggagaggttgcgcctgc

SEQ ID NO: 9274 - DNA, 1075 bp, Artificial sequence
  DNA replication origin
cggggtccaaacgagtctccgtcgccgtcctcgtccccgggcttccgcggggagggtgctgtccgagggtgtcgggagggccatcgcggtgagccccggccggaatttcacggacggacgcgggcagagagaggccggcgggctcccgtgcacctcagccggactgtgcactgcggcaggtgcagccaggaggcctgcccggacagccagccagccagccagccgcccttgtaaaggcccacaggcaggcaggctccaccccttcatgaatggcggtgagcccccctgggacagcccgccccaccccggaagggacccagggcgtcgaggcctggggccggccggcggggtggtggtggtggtggtggggggggggggtggtgggggagggcgtggtggcggtggtggtggtggggccggagagacgaagaggaagggggagaggggggaggggggaggggggcgcgtttcgggggccggctctccggacctctccagggatcccgcgggaacgggaagccgctctctgggctcccacgcgtcggcagcagggagaaaccagcctgggagggtggaggggagtgtggaactgaacctccgtgggagtcttgagtgtgccaggccctctctccgtgaaggaggcaatgcctgtgggcgtcgccgttgccgggacggtctcgcacacgcaggcgtgtggctctcgttcatttccacgtagaagaccagagcgagaccccagagaggagatgcctccccggcgtgatggcctgacgatggattcccgcgtgcggcaacgtggggagtctgcagtgtggccggtttggaacctggcaaggagagcgaaggcaccatgccgggcttgcacccttccctgcatgtttccgggtgcccgcagagctccgggagcaaacagtcggcatggccagcctttcgggggccggagagacgtgagcaacaggccgccttgcggagggcaaagccacgcggaaaccaaaatcacgcctccgtcgtcctgcgtgtggctcctccgtggccgggtctgtcggcctcgcgccgcgttgcagggctcagcctg

SEQ ID NO: 9275 - DNA, 1066 bp, Artificial sequence
  DNA replication origin
agccccaccacggactcccctgggacgtgggtggcgcaagcaccccttggccctgcggccccgcttgagcgggcccaggctgtgccaccgcgcaggggcccggcaggccgtcgcgctgcgggtcccggtcctcccggcttttgcccgggtgcggaggccaccgaggagcctgagggtgggagagcgccccgtccggaggagccggggcggcgtaggcgaaatccccgcgcgccggggcaggttgggagaccccctctgccggcgcggcctggctgggctgcagcgcgggggcggccctcgctgcctggctcacgaaagccccctgtgggagagccccaggcgcgcagggcacgtggggtgcgggaagccccgttccccacgcgccggtgtgggcgaaggcgacccacgagggagcagggtgacccccgccgggggccgcgctgcacaggccgcctgcctgcgcgggcgccctgccaccctgtcccgggtgcctggcccttcgattctgaaaccagatctgaatcctggactccgggaggcccgtctctctggccagctcctcccgggcggcgatgcctggaaagcgatccttctcaaaggctcggaggagcagggcggtctgggatccggtgacggcggtccgctttcgccggccttctggcgggccgcgtctcccgggccagggccgagattcccgccggtgctgcctcagctggcgtgacctctcattctgaaaccaaatctggaccctgggctccggaatgccgatggcctgggccagccgttctctggtggcgatgcccgggtacgggttccgctcaaagcaggctcgcagggcctcgctttggctcggggtccaaacgagtctccgtcgccgtcctcgtccccgggcttccgcggggagggtgctgtccgagggtgtcgggagggccatcgcggtgagccccggccggaatttcacggacggacgcgggcagagagaggccggcgggctcccgtgcacctcagccggactgtgcactgcggcaggtgcagccaggaggcctgcccggacagccagccagcc

SEQ ID NO: 9276 - DNA, 941 bp, Artificial sequence
  DNA replication origin
cggaggccgaggaccgcttttcctccctgccttcctccccccgtccgtccccggctccctcccgcccgcccccagtccctgcgtcgctctgtctctccctccgttcctccctgcctccctgcctccctccctccctcctaacgtccctccgcccatccttccgcccctctaggtctcccgttcctctctccatctctgcccgccttccctcccgcctggaacgctcagcgtccccggtgtgcgccgggcctggggtctgcgttccgccgccaggcgctccgtgctggcagctgggcggctgcaggggcccgggcgggcgggcgacggtggcgcgggggcgcagaggaggcgagccgccggagcggtgtcaggcccggacgctgcgcggggcccggtgtttcgcgggacgggggtctccacccagcccaggggacgacgcgttttccgggggtggggggtgggggtggggagggggcggtcaggcggcggggtgggctggtggagaggcaggagagctctgcccgggctgctcccacagcccaggcggctgcccgcaaacccgcgcgtgcgcagtaggcggcccacctgctggtacctgggccggctctgggatccccgggatgcccaggaaagaatggcagttctccgcggtgtggagtctctcaccgggcctggacctagaaggcaggaatcccaggccggtcagcccggtggagggggcggggcggagacacgcccctccgtagccagccaggtgttccccgcgaaagagaggccaccgccctgccccgaaccacccgaccccgtcccaaccccgcgtcctaaagctcctccagcagagcccggtattcttcctcgctgaggggtgcttccagcgaggcggcctcttccgaggcctccagctcccccggggcctccgtttctaggagaggttgcgcctg

SEQ ID NO: 9277 - DNA, 752 bp, Artificial sequence
  DNA replication origin
ccgccccgccccctccaccgggctgaccggcctgggattcctgccttctaggtccaggcccggtgagagactccacaccgcggagaactgccattctttcctgggcatcccggggatcccagagccggcccaggtaccagcaggtgggccgcctactgcgcacgcgcgggtttgcgggcagccgcctgggctgtgggagcagcccgggcagagctctcctgcctctccaccagcccaccccgccgcctgaccgccccctccccacccccaccccccacccccggaaaacgcgtcgtcccctgggctgggtggagacccccgtcccgcgaaacaccgggccccgcgcagcgtccgggcctgacaccgctccggcggctcgcctcctctgcgcccccgcgccaccgtcgcccgcccgcccgggcccctgcagccgcccagctgccagcacggagcgcctggcggcggaacgcagaccccaggcccggcgcacaccggggacgctgagcgttccaggcgggagggaaggcgggcagagatggagagaggaacgggagacctagaggggcggaaggatgggcggagggacgttaggagggagggagggaggcagggaggcagggaggaacggagggagagacagagcgacgcagggactgggggcgggcgggagggagccggggacggacggggggaggaaggcagggaggaaaagcggtcctcggcctccgggagtagcgggacccccgccctcc

SEQ ID NO: 9278 - DNA, 1131 bp, Artificial sequence
  DNA replication origin
ggggtccaaacgagtctccgtcgccgtcctcgtccccgggcttccgcggggagggtgctgtccgaaggtgtcgggagggccatcgcggtgagccccggccggaatttcacggacggacgcgggcagagagaggccggcgggctcccgtgcacctcagccggactgtgcactgcggcaggtgcagccaggaggcctgcccggacagccagccagccagccagccgcccttgtaaaggcccacaggcaggcaggctccaccccttcatgaatggcggtgagcccccctgggacagcccgccccaccccggaagggacccagggcgtcgaggcctggggccggccggcggggtggtggtggtggtggtggtggggggggggggtggggggggagggcgtggtggcggtggtggtggtggggccggagagacgaagaggaagggggagaggggggaggggggaggggggcgcgtttcgggggccggctcttctgacctctccagggatcccgcgggaacgggaagccgctctctgggctcccacgcgtcggcagcagggagaaaccagcctgggagggtggaggggagtgtggaactgaacctccgtgggagtcttgagtgtgccaggccctctctccgtgaaggaggcaatgcctgtgggcgtcgccgttgccgggacggtctcgcacacgcaggcgtgtggctctcgttcatttccacgtagaagaccagagcgagaccccagagaggagatgcctccccggcgtgatggcctgacgatggattcccgcgtgcggcaacgtggggagtctgcagtgtggccggtttggaacctggcaaggagagcgaaggcaccatgccgggcttgcacccttccctgcatgtttccgggtgcccgcagagctccgggagcaaacagtcggcatggccagcctttcgggggccggagagacgtgagcaacaggccgccttgcggagggcaaagccacgcggaaaccaaaatcacgcctccgtcgtcctgcgtgtggctcctccgtggccgggtctgtcggcctcgcgccgcgttgcagggctcagcctggggatgtgcggtctgtgaaccgcgcgggtgaagacccgacggcaacccgagtcc

SEQ ID NO: 9279 - DNA, 1049 bp, Artificial sequence
  DNA replication origin
cacggactcccctgggacgtgggtggcgcaagcaccccttggccctgcggccccgcttgagcgggcccaggctgtgccaccgcgcaggggcccggcaggccgtcgcgctgcgggtcccggtcctcccggcttttgcccgggtgcggaggccaccgaggagcctgagggtgggagagcgccccgtccggaggagccggggcggcgtaggcgaaatccccgcgcgccggggcaggttgggagaccccctctgccggcgcggcctggctgggctgcagcgcgggggcggccctcgctgcctggctcacgaaagccccctgtgggagagccccaggcgcgcagggcacgtggggtgcgggaagccccgttccccacgcgccggtgtgggcgaaggcgacccacgagggagcagggtgacccccgccgggggccgcgctgcacaggccgcctgcctgcgcgggcgccctgccaccctgtcccgggtgcctggcccttcgattctgaaaccagatctgaatcctggactccgggaggcccgtctctctggccagctcctcccgggcggcgatgcctggaaagcgatccttctcaaaggctcggaggagcagggcggtctgggatccggtgacggcggtccgctttcgccggccttctggcgggccgcgtctcccgggccagggccgagattcccgccggtgctgcctcagctggcgtgacctctcattctgaaaccaaatctggaccctgggctccggaatgccgatggcctgggccagccgttctctggtggcgatgcccgggtacgggttccgctcaaagcaggctcgcagggcctcgctttggctcggggtccaaacgagtctccgtcgccgtcctcgtccccgggcttccgcggggagggtgctgtccgaaggtgtcgggagggccatcgcggtgagccccggccggaatttcacggacggacgcgggcagagagaggccggcgggctcccgtgcacctcagccggactgtgcactgcggcaggtgcagccaggaggcctgcccggacagc

SEQ ID NO: 9280 - DNA, 948 bp, Artificial sequence
  DNA replication origin
actcccggaggccgaggaccgcttttcctccctgccttcctccccccgtccgtccccggctccctcccgcccgcccccagtccctgcgtcgctctgtctctccctccgttcctccctgcctccctgcctccctgcctccctcctaacgtccctccgcccgtccttccgcccctctaggtctcccgttcctctctccatctctgcccgccttccctcccgcctggaacgctcagcgtccccggtgtgcgccgggcctggggtctgcgttccgccgccaggcgctccgtgctggcagctgggcggctgcaggggcccgggcgggcgggcgacggtggcgcgggggcgcagaggaggcgagccgccggagcggtgtcaggcccggacgctgcgcggggcccggtgtttcgcgggacgggggtctccacccagcccaggggacgacgcgttttccgggggtggggggtgggggtggggagggggcggtcaggcggcggggtgggctggtggagaggcaggagagctctgcccgggctgctcccacagcccaggcggctgcccgcaaacccgcgcgtgcgcagtaggcggcccacctgctggtacctgggccggctctgggatccccgggatgcccaggaaagaatggcagttctccgcggtgtggagtctctcaccgggcctagacctagaaggcaggaatcccaggccggtcagcccggtggagggggcggggcggagacacgcccctccgtagccagccaggtgttccccgcgaaagagaggccaccgccctgccccgaaccacccgaccccgtcccaaccccgcgtcctaaagctcctccagcagagcccggtattcttcctcgctgaggggtgcttccagcgaggcggcctcttccgaggcctccagctcccccggggcctccgtttctaggagaggttgcgcctgct

SEQ ID NO: 9281 - DNA, 726 bp, Artificial sequence
  DNA replication origin
ggctacggaggggcgtgtctccgccccgccccctccaccgggctgaccggcctgggattcctgccttctaggtctaggcccggtgagagactccacaccgcggagaactgccattctttcctgggcatcccggggatcccagagccggcccaggtaccagcaggtgggccgcctactgcgcacgcgcgggtttgcgggcagccgcctgggctgtgggagcagcccgggcagagctctcctgcctctccaccagcccaccccgccgcctgaccgccccctccccacccccaccccccacccccggaaaacgcgtcgtcccctgggctgggtggagacccccgtcccgcgaaacaccgggccccgcgcagcgtccgggcctgacaccgctccggcggctcgcctcctctgcgcccccgcgccaccgtcgcccgcccgcccgggcccctgcagccgcccagctgccagcacggagcgcctggcggcggaacgcagaccccaggcccggcgcacaccggggacgctgagcgttccaggcgggagggaaggcgggcagagatggagagaggaacgggagacctagaggggcggaaggacgggcggagggacgttaggagggaggcagggaggcagggaggcagggaggaacggagggagagacagagcgacgcagggactgggggcgggcgggagggagccggggacggacggggggaggaaggcagggag

SEQ ID NO: 9282 - DNA, 1168 bp, Artificial sequence
  DNA replication origin
ttggctcggggtccaaacgagtctccgtcgccgtcctcgtccccgggcttccgcggggagggtgctgtccgagggtgtcgggagggccatcgcggtgagccccggccggaatttcacggacggacgcgggcagagagaggccggcgggctcccgtgcacctcagccggactgtgcactgcggcaggtgcagccaggaggcctgcccggacagccagccagccagccagccgcccttgtaaaggcccacaggcaggcaggctccaccccttcatgaatggcggtgagcccccctgggacagcccgccccaccccggaagggacccagggcgtcgaggcctggggccggccggcggggtggtggtggtggtggtggtggggggggggggtggtgggggagggcgtggtggcggtggtggtggtggggccggagagacgaagaggaagggggagaggggggaggggggaggggggcgcgtttcgggggccggctctccggacctctccagggatcccgcgggaacgggaagccgctctctgggctcccacgcgtcggcagcagggagaaaccagcctgggagggtggaggggagtgtggaactgaacctccgtgggagtcttgagtgtgccaggccctctctccgtgaaggaggcaatgcctgtgggcgtcgccgttgccgggacggtctcgcacacgcaggcgtgtggctctcgttcatttccacgtagaagaccagagcgagaccccagagaggagatgcctccccggcgtgatggcctgacgatggattcccgcgtgcggcaacgtggggagtctgcagtgtggccggtttggaacctggcaaggagagcgaaggcaccatgccgggcttgcacccttccctgcatgtttccgggtgcccgcagagctccgggagcaaacagtcggcatggccagcctttcgggggccggagagacgtgagcaacaggccgccttgcggagggcaaagccacgcggaaaccaaaatcacgcctccgtcgtcctgcgtgtggctcctccgtggccgggtctgtcggcctcgcgccgcgttgcagggctcagcctggggatgtgcggtctgtgaaccgcgcgggtgaagacccgacggcaacccgagtcccggtcttttgtcccggaggaaaccgcccac

SEQ ID NO: 9283 - DNA, 1018 bp, Artificial sequence
  DNA replication origin
gccccagccccaccacggactcccctgggacgtgggtggcgcaagcaccccttggccctgcggccccgcttgagcgggcccaggctgtgccaccgcgcaggggcccggcaggccgtcgcgctgcgggtcccggtcctcccggcttttgcccgggtgcggaggccaccgaggagcctgagggtgggagagcgccccgtccggaggagccggggcggcgtaggcgaaatccccgcgcgccggggcaggttgggagaccccctctgccggcgcggcctggctgggctgcagcgcgggggcggccctcgctgcctggctcacgaaagccccctgtgggagagccccaggcgcgcagggcacgtggggtgcgggaagccccgttccccacgcgccggtgtgggcgaaggcgacccacgagggagcagggtgacccccgccgggggccgcgctgcacaggccgcctgcctgcgcgggcgccctgccaccctgtcccgggtgcctggcccttcgattctgaaaccagatctgaatcctggactccgggaggcccgtctctctggccagctcctcccgggcggcgatgcctggaaagcgatccttctcaaaggctcggaggagcagggcggtctgggatccggtgacggcggtccgctttcgccggccttctggcgggccgcgtctcccgggccagggccgagattcccgccggtgctgcctcagctggcgtgacctctcattctgaaaccaaatctggaccctgggctccggaatgccgatggcctgggccagccgttctctggtggcgatgcccgggtacgggttccgctcaaagcaggctcgcagggcctcgctttggctcggggtccaaacgagtctccgtcgccgtcctcgtccccgggcttccgcggggagggtgctgtccgagggtgtcgggagggccatcgcggtgagccccggccggaatttcacggacggacgcgggcagagagaggccggcgggctcccgtgcacctcagccgga

SEQ ID NO: 9284 - DNA, 939 bp, Artificial sequence
  DNA replication origin
cggaggccgaggaccgcttttcctccctgccttcctccccccgtccccggctccctcccgcccgcccccagtccctgcgtcgctctgtctctccctccgttcctccctgcctccctgcctccctgcctccctcctaacgtccctccgcccatccttccgcccctctaggtctcccgttcctctctccatctctgcccgccttccctcccgcctggaacgctcagcgtccccggtgtgcgccgggcctggggtctgcgttccgccgccaggcgctccgtgctggcagctgggcggctgcaggggcccgggcgggcgggcgacggtggcgcgggggcgcagaggaggcgagccgccggagcggtgtcaggcccggacgctgcgcggggcccggtgtttcgcgggacgggggtctccacccagcccaggggacgacgcgttttccgggggtggggggtgggggtggggagggggcggtcaggcggcggggtgggctggtggagaggcaggagagctctgcccgggctgctcccacagcccaggcggctgcccgcaaacccgcgcgtgcgcagtaggcggcccacctgctggtacctgggccggctctgggatccccgggatgcccaggaaagaatggcagttctccgcggtgtggagtctctcaccgggcctggacctagaaggcaggaatcccaggccggtcagcccggtggagggggcggggcggagacacgcccctccgtagccagccaggtgttccccgcgaaagagaggccaccgccctgccccgaaccacccgaccccgtcccaaccccgcgtcctaaagctcctccagcagagcccggtattcttcctcgctgaggggtgcttccagcgaggcggcctcttccgaggcctccagctcccccggggcctccgtttctaggagaggttgcgcctgct

SEQ ID NO: 9285 - DNA, 1135 bp, Artificial sequence
  DNA replication origin
cgctttggctcggggtccaaacgagtctccgtcgccgtcctcgtccccgggcttccgcggggagggtgctgtccgagggtgtcgggagggccatcgcggtgagccccggccggaatttcacggacggacgcgggcagagagaggccggcgggctcccgtgcacctcagccggactgtgcactgcggcaggtgcagccaggaggcctgcccggacagccagccagccagccagccgcccttgtaaaggcccacaggcaggcaggctccaccccttcatgaatggcggtgagcccccctgggacagcccgccccaccccggaagggacccagggcgtcgaggcctggggccggccggcggggtggtggtggtggtggtggggggggggggtggtgggggagggcgtggtggcggtggtggtggtggggccggagagacgaagaggaagggggagaggggggaggggggaggggggcgcgtttcgggggccggctctccggacctctccagggatcccgcgggaacgggaagccgctctctgggctcccacgcgtcggcagcagggagaaaccagcctgggagggtggaggggagtgtggaactgaacctccgtgggagtcttgagtgtgccaggccctctctccgtgaaggaggcaatgcctgtgggcgtcgccgttgccgggacggtctcgcacacgcaggcgtgtggctctcgttcatttccacgtagaagaccagagcgagaccccagagaggagatgcctccccggcgtgatggcctgacgatggattcccgcgtgcggcaacgtggggagtctgcagtgtggccggtttggaacctggcaaggagagcgaaggcaccatgccgggcttgcacccttccctgcatgtttccgggtgcccgcagagctccgggagcaaacagtcggcatggccagcctttcgggggccggagagacgtgagcaacaggccgccttgcggagggcaaagccacgcggaaaccaaaatcacgcctccgtcgtcctgcgtgtggctcctccgtggccggggctgtcggcctcgcgccgcgttgcagggctcagcctggggatgtgcggtctgtgaaccgcgcgggtgaagacccgacggcaacccga

SEQ ID NO: 9286 - DNA, 1020 bp, Artificial sequence
  DNA replication origin
ccggccccagccccaccacggactcccctgggacgtgggtggcgcaagcaccccttggccctgcggccccgcttgagcgggcccaggctgtgccaccgcgcaggggcccggcaggccgtcgcgctgcgggtcccggtcctcccggcttttgcccgggtgcggaggccaccgaggagcctgagggtgggagagcgccccgtccggaggagccggggcggcgtaggcgaaatccccgcgcgccggggcaggttgggagaccccctctgccggcgcggcctggctgggctgcagcgcgggggcggccctcgctgcctggctcacgaaagccccctgtgggagagccccaggcgcgcagggcacgtggggtgcgggaagccccgttccccacgcgccggtgtgggcgaaggcgacccacgagggagcagggtgacccccgccgggggccgcgctgcacaggccgcctgcctgcgcgggcgccctgccaccctgtcccgggtgcctggcccttcgattctgaaaccagatctgaatcctggactccgggaggcccgtctctctggccagctcctcccgggcggcgatgcctggaaagcgatccttctcaaaggctcggaggagcagggcggtctgggatccggtgacggcggtccgctttcgccggccttctggcgggccgcgtctcccgggccagggccgagattcccgccggtgctgcctcagctggcgtgacctctcattctgaaaccaaatctggaccctgggctccggaatgccgatggcctgggccagccgttctctggtggcgatgcccgggtacgggttccgctcaaagcaggctcgcagggcctcgctttggctcggggtccaaacgagtctccgtcgccgtcctcgtccccgggcttccgcggggagggtgctgtccgagggtgtcgggagggccatcgcggtgagccccggccggaatttcacggacggacgcgggcagagagaggccggcgggctcccgtgcacctcagccgg

SEQ ID NO: 9287 - DNA, 968 bp, Artificial sequence
  DNA replication origin
ccgcttttcctccctgccttcctccccccgtccgtccccggctccctcccgcccgcccccagtccctgcgtcgctctgtctctccctccgttcctccctgcctccctgcctccctgcctccctcctaacgtccctccgcccgtccttccgcccctctaggtctcccgttcctctctccatctctgcccgccttccctcccgcctggaacgctcagcgtccccggtgtgcgccgggcctggggtctgcgttccgccgccaggcgctccgtgctggcagctgggcggctgcaggggcccgggcgggcgggcgacggtggcgcgggggcgcagaggaggcgagccgccggagcggtgtcaggcccggacgctgcgcggggcccggtgtttcgcgggacgggggtctccacccagcccaggggacgacgcgttttccgggggtggggggtgggggtggggagggggcggtcaggcggcggggtgggctggtggagaggcaggagagctctgcccgggctgctcccacagcccaggcggctgcccgcaaacccgcgcgtgcgcagtaggcggcccacctgctggtacctgggccggctctgggatccccgggatgcccaggaaagaatggcagttctccgcggtgtggagtctctcaccgggcctggacctagaaggcaggaatcccaggccggtcagcccggtggagggggcggggcggagacacgcccctccgtagccagccaggtgttccccgcgaaagagaggccaccgccctgccccgaaccacccgaccccgtcccaaccccgcgtcctaaagctcctccagcagagcccggtattcttcctcgctgaggggtgcttccagcgaggcggcctcttccgaggcctccagctcccccggggcctccgtttctaggagaggttgcgcctgctgcagaaactccgggctcgccaggagctcatccagcagc

SEQ ID NO: 9288 - DNA, 765 bp, Artificial sequence
  DNA replication origin
cgcggggaacacctggctggctacggaggggcgtgtctccgccccgccccctccaccgggctgaccggcctgggattcctgccttctaggtccaggcccggtgagagactccacaccgcggagaactgccattctttcctgggcatcccggggatcccagagccggcccaggtaccagcaggtgggccgcctactgcgcacgcgcgggtttgcgggcagccgcctgggctgtgggagcagcccgggcagagctctcctgcctctccaccagcccaccccgccgcctgaccgccccctccccacccccaccccccacccccggaaaacgcgtcgtcccctgggctgggtggagacccccgtcccgcgaaacaccgggccccgcgcagcgtccgggcctgacaccgctccggcggctcgcctcctctgcgcccccgcgccaccgtcgcccgcccgcccgggcccctgcagccgcccagctgccagcacggagcgcctggcggcggaacgcagaccccaggcccggcgcacaccggggacgctgagcgttccaggcgggagggaaggcgggcagagatggagagaggaacgggagacctagaggggcggaaggacgggcggagggacgttaggagggaggcagggaggcagggaggcagggaggaacggagggagagacagagcgacgcagggactgggggcgggcgggagggagccggggacggacggggggaggaaggcagggaggaaaagcggtcctcggcctcc

SEQ ID NO: 9289 - DNA, 1041 bp, Artificial sequence
  DNA replication origin
ctcgtccccgggcttccgcggggagggtgctgtccgagggtgtcgggagggccatcgcggtgagccccggccggaatttcacggacggacgcgggcagagagaggccggcgggctcccgtgcacctcagccggactgtgcactgcggcaggtgcagccaggaggcctgcccggacagccagccagccagccagccgcccttgtaaaggcccacaggcaggcaggctccaccccttcatgaatggcggtgagcccccctgggacagcccgccccaccccggaagggacccagggcgtcgaggcctggggccggccggcggggtggtggtggtggtggtggtggggggggggggtggtgggggagggcgtggtggcggtggtggtggtggggccggagagacgaagaggaagggggagaggggggaggggggaggggggcgcgtttcgggggccggctctccggacctctccagggatcccgcgggaacgggaagccgctctctgggctcccacgcgtcggcagcagggagaaaccagcctgggagggtggaggggagtgtggaactgaacctccgtgggagtcttgagtgtgccaggccctctctccgtgaaggaggcaatgcctgtgggcgtcgccgttgccgggacggtctcgcacacgcaggcgtgtggctctcgttcatttccacgtagaagaccagagcgagaccccagagaggagatgcctccccggcgtgatggcctgacgatggattcccgcgtgcggcaacgtggggagtctgcagtgtggccggtttggaacctggcaaggagagcgaaggcaccatgccgggcttgcacccttccctgcatgtttccgggtgcccgcagagctccgggagcaaacagtcggcatggccagcctttcgggggccggagagacgtgagcaacaggccgccttgcggagggcaaagccacgcggaaaccaaaatcacgcctccgtcgtcctgcgtgtggctcctccgtggccggggctgtcggcctcgcgccgcgttgcagggc

SEQ ID NO: 9290 - DNA, 1058 bp, Artificial sequence
  DNA replication origin
cccggccccagccccaccacggactcccctgggacgtgggtggcgcaagcaccccttggccctgcggccccgcttgagcgggcccaggctgtgccaccgcgcaggggcccggcaggccgtcgcgctgcgggtcccggtcctcccggcttttgcccgggtgcggaggccaccgaggagcctgagggtgggagagcgccccgtccggaggagccggggcggcgtaggcgaaatccccgcgcgccggggcaggttgggagaccccctctgccggcgcggcctggctgggctgcagcgcgggggcggccctcgctgcctggctcacgaaagccccctgtgggagagccccaggcgcgcagggcacgtggggtgcgggaagccccgttccccacgcgccggtgtgggcgaaggcgacccacgagggagcagggtgacccccgccgggggccgcgctgcacaggccgcctgcctgcgcgggcgccctgccaccctgtcccgggtgcctggcccttcgattctgaaaccagatctgaatcctggactccgggaggcccgtctctctggccagctcctcccgggcggcgatgcctggaaagcgatccttctcaaaggctcggaggagcagggcggtctgggatccggtgacggcggtccgctttcgccggccttctggcgggccgcgtctcccgggccagggccgagattcccgccggtgctgcctcagctggcgtgacctctcattctgaaaccaaatctggaccctgggctccggaatgccgatggcctgggccagccgttctctggtggcgatgcccgggtacgggttccgctcaaagcaggctcgcagggcctcgctttggctcggggtccaaacgagtctccgtcgccgtcctcgtccccgggcttccgcggggagggtgctgtccgagggtgtcgggagggccatcgcggtgagccccggccggaatttcacggacggacgcgggcagagagaggccggcgggctcccgtgcacctcagccggactgtgcactgcggcaggtgcagccaggaggcctgcc

SEQ ID NO: 9291 - DNA, 951 bp, Artificial sequence
  DNA replication origin
gcttttcctccctgccttcctccccccgtccgtccccggctccctcccgcccgcccccagtccctgcgtcgctctgtctctccctccgttcctccctgcctccctgcctccctgcctccctcctaacgtccctccgcccgtccttccgcccctctaggtctcccgttcctctctccatctctgcccgccttccctcccgcctggaacgctcagcgtccccggtgtgcgccgggcctggggtctgcgttccgccgccaggcgctccgtgctggcagctgggcggctgcaggggcccgggcgggcgggcgacggtggcgcgggggcgcagaggaggcgagccgccggagcggtgtcaggcccggacgctgcgcggggcccggtgtttcgcgggacgggggtctccacccagcccaggggacgacgcgttttccgggggtggggggtgggggtggggagggggcggtcaggcggcggggtgggctggtggagaggcaggagagctctgcccgggctgctcccacagcccaggcggctgcccgcaaacccgcgcgtgcgcagtaggcggcccacctgctggtacctgggccggctctgggatccccgggatgcccaggaaagaatggcagttctccgcggtgtggagtctctcaccgggcctggacctagaaggcaggaatcccaggccggtcagcccggtggagggggcggggcggagacacgcccctccgtagccagccaggtgttccccgcgaaagagaggccaccgccctgccccgaaccacccgaccccgtcccaaccccgcgtcctaaagctcctccagcagagcccggtattcttcctcgctgaggggtgcttccagcgaggcggcctcttccgaggcctccagctcccccggggcctccgtttctaggagaggttgcgcctgctgcagaaactccgggctcgccagg

SEQ ID NO: 9292 - DNA, 793 bp, Artificial sequence
  DNA replication origin
tctttcgcggggaacacctggctggctacggaggggcgtgtctccgccccgccccctccaccgggctgaccggcctgggattcctgccttctaggtccaggcccggtgagagactccacaccgcggagaactgccattctttcctgggcatcccggggatcccagagccggcccaggtaccagcaggtgggccgcctactgcgcacgcgcgggtttgcgggcagccgcctgggctgtgggagcagcccgggcagagctctcctgcctctccaccagcccaccccgccgcctgaccgccccctccccacccccaccccccacccccggaaaacgcgtcgtcccctgggctgggtggagacccccgtcccgcgaaacaccgggccccgcgcagcgtccgggcctgacaccgctccggcggctcgcctcctctgcgcccccgcgccaccgtcgcccgcccgcccgggcccctgcagccgcccagctgccagcacggagcgcctggcggcggaacgcagaccccaggcccggcgcacaccggggacgctgagcgttccaggcgggagggaaggcgggcagagatggagagaggaacgggagacctagaggggcggaaggacgggcggagggacgttaggagggaggcagggaggcagggaggcagggaggaacggagggagagacagagcgacgcagggactgggggcgggcgggagggagccggggacggacggggggaggaaggcagggaggaaaagcggtcctcggcctccgggagtagcgggacccccgccct

SEQ ID NO: 9293 - DNA, 1370 bp, Artificial sequence
  DNA replication origin
cgcaggcgcagtgacgcacgccgcctggggcgcagcgcagagataggcggaacctcagtaatctgaaaagccaggttgccccctccttgcggccgggcactaaagggcccacttgctgaaggcgctgtgccagcgtgccccctgctggtgactggggcaactgcagggttctcttgcttccattagtggccagcggcccctgctggctgcggggcaccgcagggtcctcttgcacacagtatagtggcggcatgccgcctgctggcagctggcgacattgcagggccctcttgctcatagtatagtgacaggacgcccgcctgctggcagctggggacactgccggccactcttgctccaagtgtagtggctgttggctcccctgctggcagctggggacactgccgggccctcttgcttgcagtttactgggggcacgcccccttctggccgcttggggcactacaggatgctcttgctcacagtgtagtggcagctcgccgcctgctggcaaccagggtactgcagggttctcttgctcatggtgtggtgcccgtccaccacctgctggcagctaaggacactgcagggccctcttgctcagagtgtagtcgtcgtacaccccctgctggcagctggggatgctgccgggacttttgctggcactgtcgtggcagcacactacctgcaggccgatggggactatgcagggacctcttgttcagggtgtgagggctggcacgccctactggccgcctcctgcaccacttaaagtcggagcgccagttgttaagcaccatcagttctggaaattgaaactgaaatggagctattactgaggagagttgatgtcccagttcttgtctaacttggaagaaagatttttcaccaagaggcagtaaaaacatggcagataacttcattgaaaacaaatacagtgtaaagagcttattgtagaataatagggaggagtgggctgattgtgcaggaaaacagcctgagagtcctgtgcagggaattttattttggacttcttcacatttctgcctctgtctcaagtctccacctgttttctttgtctggttttcctgctactgccttaggtccctgagttgccccacttaggcttatgggacctcctcactgttggttgaggcacatgtgtggtgatcaatccgaatccactctggtaccaggctccttccccccatcccaggcaggctgacagcggtcatgtttctgcctacagcgcctgcctatctcttttgaatgtccttctctaccctactctgtacttatggtgccaggtttctcttaagaatgtcccctttgtccttcttatcagcatgtagccagcaatattgtgacat

SEQ ID NO: 9294 - DNA, 781 bp, Artificial sequence
  DNA replication origin
gccagaatttcacggaagaacaagggcacagagaggccagcgagctcccttgcacgtcagccggggtgcgcactgcgcgcaggtctagccaggaagcgggcaaagacagacagaggtatgcttttgaccgccaggcgctccgtgctggcagctgggaggctgcaggggcccgggcgggcgggcgacggtggcgcgggggcgcagaggaggcgagccgccggagcggtgtcaggcccggacgctgcgcggggcccggtgtttcgcgggacgggggtctccacccagcccaggggacgacgcgttttccgggggtggggggtgggggtggggagggggcggtcaggcggcggggtgggctggtggagaggcaggagagctctgcccgggctgctcccacagcccaggcggctgcccgcaaacccgcgcgtgcgcagtaggcggcccacctgctggtacctgggccggctctgggatccccgggatgcccaggaaagaaaggcagttctccgcggagtggagtctctcaccgggcctagacctagaaggcaggaatcccaggccggtcagcccggtggagggggcggggcggagacacgcccctccgtagccagccaggtgttccccgcgaaagagaggccaccgccctgccccgaaccacccgaccccgtcccaaccccgcgtcctaaagctcctccagcagagcccggtattcttcctcgctgaggggtgcttccagcgaggcggcctcttccgaggcctccagctcccccggggcctccgt

SEQ ID NO: 9295 - DNA, 1724 bp, Artificial sequence
  DNA replication origin
ctgtgtgcatttttaattgggctgtttaacttattgtttagttttaacaattttttatatattttgaatacaaattctcagatctgtattttgcaaatattttcttcaatatgtggcttgtctttttgttctcttaacaaggtctcttccagagtataaactgtaaatattaagaaatccacattgtcatttcttctgtgtatatcaaccttctgtgtcatttgttaaaattcattaccaaacgcaaaggcacatagcttttcctctatagtttcttctagaaattgtatagttttgcatttttagtgtaatgatgattttgagtgattatttgtgtaagttgtaaagttttcgtctacatgcatatcatttcttatggtttccaattaatcattccctcactatttttgggaaagacacaggatagtgggctctgttagagtagatagctagctagacatgaacaggagggggagctcctggaaaagggaaagtctgtgaaggctcacgtggagggaccaccaaaaatgcatatattagtagcatctctagtgctggagtggatgggcacttgtcaattgtggttaggagggagaagaggtacctacgcagaaacaccctagaacttctcttgagatgccccaatcttcattcactctgcaataaaaatgtcagaatattgctagctacatgctgataagaaggagaaaggggacattcttaagagaaacctggcaccataagtacagattagggcagagaaagacatttaaaagaggcagctgcagtagatacaaacgtgaccgctgtcagcctgcctggtatggcgggaaggaggctggtgccagagtggattcgggttgatcaccacacatgtacctcaatcaacagtgaggaggtcccacaaggctaagtggggcaagtcggggacctaaggcagtagcaggaaaaccaaagaaaacaggcggagacttgagacagaggcaggaatgtgaagaagtccaaaataaaaatccctgcacaggactcttaggctgttatcatgcactatcagcctactcctccctatttttgtacaataagctctttacactgtatttcttttcaatgaagttatcttccatctttgtactgcctcttggtgaaaagctgtcttccaagttaataactgggacatcagctctccgcagtaatagctccttttcagttttaatttgcagaactgatggggattaataactggcgctctgactttaagtggtgcaggaggcggccagtaggggacgccagccgttacgccgggagcaagagggccctgcgtagtccccatctgcctgcatgtggcgtgcagccacgacaatggcagcaagagggcccggcagtgtgcccagctgccagcaggcgtgtgtgctgccactataatgtgaggaagagggccctgcaatgtccctagctgccagcaggcggcgtgccaccactatactgcgagcaagagagccctgccgtgccccggcgccagcagggggcgctggacagcactgtaagcaagagggccctgcagttgtcctagtcgccagtaggggacgcaatggcagagcaccgtgggcaagctggtcctgtagtgcccggctgcaagcagggggcgcccgaaacgggcttttcagattactcaggttccactcgtctctgcgccgccggggacgtgtgtctctgcgcgtgcaccg

SEQ ID NO: 9296 - DNA, 932 bp, Artificial sequence
  DNA replication origin
gcgactgcaacactccccgccaccctcagcccagcgacgtgcgtctctgcgcctgcgccgcgcctcactcccgcccgctcagcgacccctcccctccggggaggcgccggcgtgcgtctacgccctgcgccgcgtctccccaacagcggcgcgcctctctgcgcctgcgccggcgcgccgcgcctctctgcgcctgcgccggcgcgccgcgcctctctgcgcctgcgccggcgccccgcgcctctctgcgcctgcgccggcgccccgcgcctctctgcgcctgcgccggcgccccgcgcctctctgcgcctgcgccggcgccccgcgcctctctgcgcctgcgccggcgccccgcgcctctctgcgcctgcgccggcgcgccgcctttgcgagggcggagttgcgttctctttagcacacacctggagagcatcgcgagggcggagctgcgttctcctctgcacagacttcgggggtattgcgaaggcggagcagagttcttctcaggtcagacccgggcgggcgggctgagggcactgcgagggtggagctgcgttctgttcagcacagacgtggggggcaccgtaaaggcggagcagcattcttctcagcacagacgttgggggtactgcctgcctttgggataactcggggccgcatcgacggtgaataaaatctttcctgtttgctgccctgaataatcaaggtcagagaccagttagaacggtttagtgtggaaagcgggaaacgaaaagcctctctgaatcctgcgcaccgagattctcccaaggcaaggcgaggggctgtattgcagggttcaagtgcagcgtcagaactcaaatgcagcattcctaatgcacacatgacaccctaaatataacaggcatattactcatggagggttagggttagggttagggttagggttaggg

SEQ ID NO: 9297 - DNA, 931 bp, Artificial sequence
  DNA replication origin
cgcgccggcgcaggcgcagagaggcgcgccgcgccggcgcaggcgcagagaggcgcgccgcgccggcgcaggcgcagagaggcgcgccgcgccggcgcaggcgcagagaggcgcgccgcgccggcgcaggcgcagagaggcgcgccgcgccggcgcaggcgcagagaggcgcgccgcgccggcgcaggcgcagagaggcgcgccggcgcaggcgcagagaggcgcgccggcgcaggcgcagagaggcgcgccggcgcaggcgcagagaggcgcgccggcgcaggcgcagagaggcgcgccgcggttagggagacgcggtgcagggcatagacgcacgccggcgcgtccccggcgggggcggggtggcttgtcgggcggggcgggaggtgcggtgcaggcgcagacacgcacgtcgctgggctgagggtggcggggcgtgttgcaggtgcacagtcgcacaacgccgggctgggagcgctggggtggcgcggtccaggcgcagagacacacgtccccagcggcgcggcgtagaggagggtggaacctcagcaatctgaaaagcccgtttcgggcgccccgtgcttggagccgggaactacaggacccgcttgtctacgatgctgtgccagtttgccccctgctggcgactagtgcaactgcagggccctgttacttacagtgttgtccagcgctttcctcttccttgttgttctatttggcctctcagccaattggatggtgcctgtattcatccatttttatacagctatgaggaaatacctgagtctgagcaatttataaagaacaaagaggtttaatgggctgacagttccacatggctgcaggggcctcacaatcatggcagaaggggaagcaaagacgtccttcttcacatggccgcaacaagaagaagtgctgagccaaaggggaa

SEQ ID NO: 9298 - DNA, 1220 bp, Artificial sequence
  DNA replication origin
gggaagatataagatcagtggggtgcttaccatggagccacaaaaaaacaaccagaactgcagaccagggagatgccccacccaggccggcccctccgagcctccgcggggatactacggccccgccgggacggagagggcgaggccgggggagactgcgtcctgcagcgccgcgccgccaccgcccatctctcgccgcgggggccctggatcgggcaggtccccgggaaccgggcagctgaggtcgccgggtcagcttccccggcccagtgcccagcgggatgaagacgccgggccccgggcatccccaggtttggaattaggattaggcgttggagttaaccggactccgcggagttccggggacccggagacagcatgagtctcagcgcgcagtcagcagaggcggtcctggcgccagggtaggtgagggcacaagcaccgaagcgggtggggcagcagccgggcgccggagtgagcgggggcacggacgagggacaaggtggatagaggcgagacccggcaccggagtgggtgtggaaatgagcacccgggcgagtgagggtttgagcttagcgttaaagtcagggttagggttgaagttagggtcacgggtaagtgttagggttacagttagggttggggttggaattggggttagggtttaggggtaggggtatggggttagggttaaagttagagttagggaaggggttagggtaggggttcgggttaggggttagggtgatggctggcgctaggcttggggctggggttgtggtttgggcggggtcggggttaagggttaggtttatggattagggttagggttaaagttggggttaggggatagattttagggttagggttagggttgggatttatggttagggtgaggttcggtttggaatatttttggggtttgtggggttttagggtttggttcaggggttagagttaggttttgggttggggttgggtttagggtcaggggttagggttttgcggttagagttagggttgggttatgattagtgtagtgtcggtattggggtttgggttggggttagggttagggttcaggactagggtttggtttaggggtttgggattagggttaggtgttagagttagcagtagggttagaggctagtggtagcattagggttagtggtagggttagggttagctttttggttaggcttagattagcagtgtgt

SEQ ID NO: 9299 - DNA, 3148 bp, Artificial sequence
  DNA replication origin
ccttagaaacttttattttaacatgtttaatttttttttatcttagtgctcttgcagttttcatgtttgtttaaattggaaatgccaatggtttgaggaaaaacatgttaagcctggaagcagaacttcagcagatgcggctcttttcctgtctgtctttagtgaggctttgagctgcctcgcacaagccggtcagtgatccggtcctcgcccaggttaaggagggtccttgtgcgttgcatgtgagttcccctctccggtgttgctggaggggatttgccgaatactaagtgtcattcttaagcgttacatgaattatttagtaatgcacagtgtctctcagtaaccgtgtgcaactaatactgtatgaattcatgagtatttctggaaccaggagactttttaagatcatatattcattcattcaacaaatctttattgggtgtccattgtgtgctgggcaccattctaggggctaatattccagtgggagagagagatgctaaacatgaaactataaactgggtatcagcataagtgattcacagggtatgttactgggaagcctcgttgagaggccgggtggtcagggaagcctcgatcagagggagggtggtcagggaagccttgatgagaggccaggtagtcagggaagccttgatgagagggagggtggtcagggaagcctccatgagaggccaggtggttggggaagcctcgatgagaggccgggtggtcggggaagcctcgatgagaggccgggtggtcggggaaggctcgatgagaggcagggtggtcggggaagcttcgatgaaaggctgggtggtcggggaaggctcgatgagaggccgggtggtcagggaaggctcgatgagaggccgggtggtcagggaagcctcgatgagaggccgggtggtcggggaagcctcgatgagaggccgggtggtcggggaagcctcgatgggaggccgggtggtcggggaaggctcgatgggaggcagggtggtcggggaaggctcgatgagaggccgggtggtcggggaagcctcgatgagaggccgggtggtcggggaagccttgatgagaggccgggtggtcagggaaggctcgatgagaggccgggtggtcggggaagcctcgatgggaggccgggtggtcggggaagccttgatgagaggccgggtggtcagggaaggctcgatgagaggccgggtggtcggggaagcctcgatgagaggccgggtggtcggggaagcctcgatgggaggcagggtggtcggggaagcctcgatgggaggccgggtggtcggggaagcctcgatgagaggccgggtggtcagggaaggctcgatgggaggcagggtggtcggggaagcctcgatgggaggccgggtggtcggggaagcctcgatgagaggccgggtggtcagggaagcctcgatgggaggccgggtggtcggggaagcctcgatgggaggcagggtggtcggggaagcctcgatgggaggcagggtggtcggggaagcctcgatgggaggcagggtggtcggggaagcctcgatgggaggcagggtggtcagggaaggctcgatgagaggccgggtggtcggggaagccttgatgggaggccgggtggtcggggaagcctcgatgagaggccgggtggtcggggaagccttgatgagaggccgggtggtcggggaaggctcgatgagaggccgggtggtcggggaagcctcgatgggaggccgggtggtcggggaagcctcgatgggaggcagggtggtcggggaagcctcgatgggaggccgggtggtcggggaagcctcgatgagaggccgggtggtcagggaagcctcgatgagaggccgggtggtcggggaagcctcgatgagaggccgggtggtcagggaaggctcgatgagaggcagggtggtcggggaagcctcgatgggaggcagggtggtcggggaagcctcgatgggaggccgggtggtcggggaaggctcgatgagaggccgggtggtcggggaagcctcgatgagaggccgggtggtcggggaagcctcgatgagaggccgggtggtcagggaaggctcgatgagaggcagggtggtcggggaagcctcgatgggaggcagggtggtcggggaagcctcgatgggaggcagggtggtcggggaagcctcgatgggaggcagggtggtcggggaagcctcgatgggaggcagggtggtcagggaaggctcgatgagaggccgggtggtcggggaagccttgatgggaggccgggtggtcggggaagcctcgatgagaggccgggtggtcggggaagccttgatgagaggccgggtggtcggggaaggctcgatgagaggccgggtggtcggggaagcctcgatgggaggcagggtggtcggggaagcctcgatgggaggcagggtggtcagggaaggctcgatgagaggccgggtggtcggggaagcctcgatgggaggccgggtggtcggggaagcctcgatgggaggcagggtggtcggggaagcctcgatgggaggcagggtggtcagggaaggctcgatgagaggccgggtggtcggggaagccttgatgggaggccgggtggtcggggaagcctcgatgagaggccgggtggtcggggaagcctcgatgagaggccgggtggtcggggaagcctcgatgagaggccgggtggtcggggaagccttgatgagaggccgggtggtcagggaaggctcgatgagaggccgggtggtcggggaagcctcgatgggaggcagggtggtcggggaagcctcgatgggaggcagggtggtcagggaaggctcgatgagaggccgggtggtcagggaagcctcgatgagaggcagcgagcagacatacgcaggagggaggggtcgggccaggcagagatcggggagtgtgtgtggggcagagggaactgtgggtgaagttctgtgtctgaggtgtgcctggcatgtggggaggcctgtggctggaggagaggcattggggcctggccccgcctctcacactcacacacacctcctgctccaaccaccgtccctgggttatggatgcagtggcattcaagacactgcagtgtccacaccctggggccctggtt

SEQ ID NO: 9300 - DNA, 1532 bp, Artificial sequence
  DNA replication origin
gatcagtaagtactttttgaataaaccaagctatgttaatagtccatgttttggaaaaactccctagaaaacatccctaattccatggatccatggcaaagaaagaaccagatctgtagaaacgggctggagaagctcacaaaggactcctgggctgagaaagccccacacggtcccactttctttctgtatagtggaggtgtggcaggggtgagctcctaccacgggccccaaagtctccagtaagagtgagattccgggctgcaccctgaccaggcgccactgggtcactgctgaccgtcctggaggtgctgaacagggatgaagccgtttattctggaggcatgccagcattcttgggtcctgctctggcaggagctgtggggccacacaggcttagaaaggtggctcccatcctggacagcaccgtgggcagtactgtcacgaggacgggctgggaggagggtgtggcaggggtgttgggggcctcaggtaggggccagcacagagggacacccagatacccagcacagagggcaggaacaggtcagctccctgcctgggctcagggatggggctggaggttctaggaagcagagcaagtaagcaggacagggaacagtgagaacacaggtgtagatggagaatcaaggcggggcgcagccagggattccagggaggagtagacagaaactcaagggagggaggcctcgaggggatcccagggaggtgtggacagggattctaggaaggagtagacagagactcaaggaggcctcgacggagatcccagggagactgactgcctgctgcataggagggaggctcccagctgtgtccctgagctgcataggagggaggctcccagctgtgtccctgagcttcatccactctgtaacctgtgacaaaacggagcattatctgtcaatgagcacatctgtgccgcagtttttgggatggtgccagggtaggggtgagggacaagttgaggggacaggttgaggtggggtccctgtgaggccctcctggacggagtggaccttatgagacactccctagctgaattcccagcaggaagctggtgcccagagcaccctggactaacgggcgggagagggactttgttttgggaggctctttgtagatcaaggcattaaaattgcacctttggggaaagcatgttccagagcaccagacaccccgaggcaccctgagttgtggggggggagggtgatggaatttggggccctcgctgaagcccttcattatccaagccaggcgcggggtggcacgtagttcccacagcggcccctggacggaggagagggcctgggccgtccacacctgcagaaatctggagctggtccgcctagaccaggggaaatcggggtcccgtccgggtacactggcagaactcaggggtcagatcctctgccctggagcattcagatttgtgcctctacgttatggaaaccaggggcccgtccgggtgcaacgtggcatccacaaaatggcaggtccccgagctccgg

SEQ ID NO: 9301 - DNA, 1114 bp, Artificial sequence
  DNA replication origin
gtgccactagatgactgctcatgatgagggagctgcagtgtgtgtgcaggactccgaaggagtgtaagcctggccaggtgcagtgtacggacagaggaacccctgccagctgtgtccaggcctcggggccaggagagagagcagacacagggcaggggacctgcaagcacaggtccaccagctcagcccaatttcttgtctttgtagaactcaggattcttgtttctgccaaatgtacaaacgtgtgctgacttcaaacccgagggccttccagtttacgagatcatgagcctcactgagggacagacggtgcgggtgtgtgcacgtgttgcagattgtgtggatgtgtgcacgtttgttgcagagtggctggtgtgtgcacacgtgttgcattttgtatgtgtgcacgtgtgctgcagattgtgtgggtgcgtgcacgtgtgttgcagattgtgtggatgtgtgcacgtgtgttgcagagtggccggtgtgtgcacacgtgttgcagattgtgtggatgtgtgcgcgtgtgttgcagattgcgtgggtgtgtgcacgtgtgttgcagattgtgtggatgtgtgcatgtgtgttgcagagtggccagtgtgcacacgtgttgcagattgtgtggatgtgtgcacgtgtgttgcagattgtgtgggtgtgtgcacgtgtgttgcagattgtgtgggtgtgtgcacgtgtgttgcagattgtgtggatgtgtgcatgtgtgttgcagagtggccggtgtgtgcacgtgttgcagactgtgtgggtgcgtgcacgtgtgttgcagattgtgtgggtgtatgcatgtgtgttgcagattgtgtggatgtgtgcatgtgtgttgcagagtggccggtgtgtgcatgtgttgcagattgtatggatgtgtgcatgtgcgttgcagagtggccggtgtgtgcacgtgttgcagactggatgtgtgcacgtgtgttgcagactgtgtgggtgcgtgcacgtgtgttgcagattgtacaggtgtgtgcatgtgtgttgcagattgtgtgggtgtgtgcacgtgtcttgcagattgtgtgggtgtgtgcacgtgtgttacagattttgtgggtgtatgcatgtg

SEQ ID NO: 9302 - DNA, 984 bp, Artificial sequence
  DNA replication origin
tccagcacctgcttgggcacctggctggggaagtctcctgtgccgggtggccacccttcttgctcggggtgtggctgccgggcaggcacatcggaaggcccgctggggttgtggcaatggaggctgccgccgtctgtgctgacacaggctgaggatgcaagaacgtctggacaaaggaaagaggccgtgtcaaagatgaaggttttcctgcgcgttgaaagcagctgctatgctcagcttgctatgaaccatgggacaaaaacacgcatgaaagtagggggttccgagaaaacttgtcccagttcacacgggaagtgaaagcatgtcccactgcacagggcatgcggcgtcatcacggacacgcggcgtcatcacggagacggagtctccagctcacagacatgctcactacctgcagacgcctcaggaggaacaggtcatctcatccctactcatctgctcaaagtgcagcatgcgtgactgcatgtggtgtgtgactgcgcgtgcatgtgtggtatgtgtaactctggcacgtgtgattgtgtgaggcatgtgactggtgtgttactgtgtttgtgtgattgtgtgtgtggtatgtggaactctggagtgtgattgtgtgaggcatgtgactgcgtgtggtgtgtgactgtgtgtgtggtatttggaactctggagtgtgatcgttggaggcatgtgtctgcgtgtggtgtgactgcgtgtgtgatatgtgtaactctggagcatgtgattgtgtgaagcatgtgactggtgactgtgcgcgcgtgtatcgtgtgaggcatgtgactgtgtgtgttgtgtgattctgtgtgcgtgtcgtatgtggaactcgagcatgtgatcatgtgaggcatgtgactgtgtgtggttgttatggcgtgtgtgtgactgcgaggggtgctgcaagattgtgtgtgtcttttctgcccagtacaacagggaagaaaatcaatacaaaggaaa

SEQ ID NO: 9303 - DNA, 1793 bp, Artificial sequence
  DNA replication origin
gggacagctcatgctcatgctgtggtgcagggcctcatgttcctttcttggaggccttgagaatctctcagaacctctctgatcagtgcctcccctggctccaggcctccctgaggctttcctgacagtgtctgtgcactgaggactcctgtctagcctagctggtgcaacccaactcatggcacttcttgtctggacctcggcctgtgctctctcctcccagtgactccttcctgacctcagggagtcacctcagccccttgtccagcccaaggtccctgtcacttgctcccaggccagccaatttctgctggcccagccaccctgtcagggagttctggaggatgccactgcagggctcaatgtgagtggatcccactctgtaaggggggtcatgactgagcctgtctcctccaagtctcaggtaggacactgacattttctaagaagagccacgtactgcgaaagtaagaagaaaccacaggcgggactgacagtgaggagggggacaagaggcaggttcactctaaggcaaggggaggcaggctcgatgcaagggggaaagtgtgggggagagaagtggtggcagcagggtggagagagaggagggaggactgtagggccaggggagaggaagggagggccgcagggtcaggggagagaagggaggactgtgggggaggagaggaggggggagatgagggaggactccagagttagggaagaggaaggagaactgcagggttgggggagaggagggaggactctgggggaggagaggagggaggaccttaggggaaagaggagggaggactttaggttggggaagaggaaggagggccacagtggggacaggagggaggactgtgtggaggggaggagagaggattgcaggggtgaagaggagagatggctgcagggttagggaagaggagggaggaccatagtggggagaggatggagggctacagcttgtgagagaggaggaaccactgtgggggtggagaggagggaggaccatggaggaggagaggatggaggactatggtggggaggagggagggtcacagggtgtgggaaaggagggaggggggcagggtgggagaagtggaacgactgtgggggtggaaaggagggaggacagtggagggggagaaaaagaagtaccatggaaaggaagaggagggagggctgcagaatgggggagaggagggaggaccacaggttgggagagaggagggaggactgcaagtagggagaggagggaggactccaagtggggagaggagtgaggaccatggagggggagaggagggaggaccatggaaggggagtggaaggaggactccatggtgtggtgagctctgccagtgctgtccctgactgatgtctttcctggcacaacctgccacctggtgtccctaaacttgagattcctcagtgagtataggagcctctgcctccgtcttcagcagggacagcaagggcgaaatgggtttagcttcgtggagtgcaggtggggcatgggagagggcaccctggttctgtccccgtcccctccctgtccctgtccctggacccccctgtccctggtctctccccatctctgagcttccatctgcccctgctcaggcagcagcatcttcccatccccggtgcttcccatctctggatgttgcttatggttcagtgcagggcccctaggccacacacagtggctcatgcctgtgagcccagcactctgggaggctgaggtgggtgcgcttgagtccaggagttcaagaccagcctag

SEQ ID NO: 9304 - DNA, 1636 bp, Artificial sequence
  DNA replication origin
gttagagggtaaagctgagaaaaatctaccttacaaggacagcacacagccaggggtggggaaaattaaggcaacaggacagaaaactccagaaccagatggaagtgtggagctgtgggaaatgcgagcgccacgaaggatgtcacagaattcccagaacagaggggcgcagtgcagacacaaagagcacacctgccctcggtgcacctgggcgaccctcaggcacacctgccctcagtgcacctgggcgaccctcaggcacacctgccctcagtgcacctgggcgaccctcaggcacacctgggccaccctcaggcacacctgctctcagtgcacctgggtgaccctcgggcacacctgccctcagcgcacctgggcaaccctcagattccagagccccgaggacgacaggaaagtctgtggcttccaccgagaagcagggcacaggcagaaggctgggagtgggatggaagctaagcacaggcgcagggccttccagctggcgaagggaaactaaagtgactgctggccatgaaggtggagtagagatgcttttagataccacggcctcaaaaatgctcaccccaagatccctttctctgggaagtcctggaagttattctgcataaaacgccaaagtaaatgaaaaaagaggaagacttggatacaggaaataggagaccacaggatggggcagagtggggagggagatggaggagaccccaggaagagcagagggaggaggggagatgggggagacaccccaggaaggagtagaacgaggaagggaagacgaaggagaccccccaggacaggcagagggaggaaggggagatgggggagatcccccaggatgggcagagggaggaggggagatgggggagacccccccaaggacggagtagaacgaggaggggaagatgaaggagactcccaggacgggcagagggaggagggggagatgggggagaccccctgggatgggcagagggaggaggggagataggggagacccccagaataggcagtgggaggagagatgggggagactcccaggacgggcagagggaggagaggagaaggaggagacccccaggatgggcagagagaggagaggagatggaggagacccccaggatgggcagagggaggacaggagatggaggagacccccaggatgggcagagggaggagaggagatggaggagacccccaggatgggcagagggaggagaggagatggaggagacccccaggatgggcagggggaggaggggaagatgggggagacccccaggatgggcagggggaggaggggagatggagccaggatagagcagagggaggaggggagatggaggagacccccaggacagagggcacagactggagacagcccggactggctggtggctgcagcttggcctggactccacttgcctggtgtggggttcctgttcctgccccagggattggaccagctgggcccctggccaatatttgggagctggggtcagtcgtggggaggccaggagcatgcacagtgcctcgcgtccctgctgcacgtctttgtctggaggcccccgtgagggcacgcgcatggacctgaaggccgggggagctttgccagcagaca

SEQ ID NO: 9305 - DNA, 1762 bp, Artificial sequence
  DNA replication origin
agagaccatgttcctgatggtgctgcaatgggtgtttgctgactgcagacggccgagatcgggatgacagagaacgtcggggacagtggcttgaggtttgagatttggtttcgcaggcggcggaaatctcaggacacctacattctccaagcaagctcggcagaggtcaagagtgcatggaccgatgtcatagggaggatcctgtggcggcaggcactaaagagcagaggtgggaagatgggggccgcagggcctgccaggctcaggggcacagctaggggcaggggtcggggctgggactggggtgagagccaggggctgagtccaggggccagggggctgggggccagggctagagctggggctggagctgtggtcggggactgagtccaggggctggggaatgggggctggggctggggtgggggctggagactgaatccaggggccagggggccagcagggccggggtgggggctggagactgagtccaggggtcgggggctaaggctaggagtggggctggggtggggactggagactgagtccaggggccgggggccaaggctaggagtggggctggggtggaggcatgggttgggagctgggctatcaaccttaatgctgagattcaggcggtatgattaaatattgagttcacttgagcacaaagtctgaggatggccaactgggaggatacagacttcaaagggatggggtcattgccccgaagtggggaggtttaagggccatttgtataggcacggtctggggaaacaacaggatcacatcattttctatacagggttggtgcacagttatagcagtttggttggctgcagtcagcgtttcttttttggtaagggtgaggggtatatttcgcattccacgttagggacagaatagccaagggtcttctgtctcagggctctctggtctgagccaggaacagggaggcaaggaaatctctaacaaaaggtcagaaatgaaggggctgagctccgtgactcgatctccaaagtcagtctctctaagggcctaatcactctgaggagcctccagtagccgcactgtccattttcttccccatgggcacccaagaggcccacccggtctggggcacctgggggctcctcggtcagcacttgacaagaaagctcttggattggccccgacagcactcacacacgtgtctctcgtgtccacaagcgaacataaggcactgcggcaacccgagagagtcccccgcaggtctggttccatgtttaaccctctggttgacttcctgcccctgccctgctggtctggcccccgtggccctgggaggctgagctcatggtcagccctcagtcttcctgcaggtgagagggccctccccagagcactcattccccaccctaggatcccttccccaggcctcctccctcaatgtccaccctcgtttgctccccccaccgacttcttcactgagggtgactctctgtgcttattcctccagcctggcggctgcgaacaccaccttcacagcaaccaccccccaccccagaccttctcccacactgagctccaactccaggtcctgccccagcacctcacgagtagccaaagccactgtaaacccagctgtccctctctaccctacaagcccaccctggcagctctggcctctcagacctaaaacccaggcacccaagctacagacacgaccagggctcctgcacggctgcaccccgcctgagccctgacccctccaggcagacac

SEQ ID NO: 9306 - DNA, 1463 bp, Artificial sequence
  DNA replication origin
cgccccagcaccgcgcgcgtcacctccgcctgctccagcaggtagctggctttgaacaggagtgggtagaggttgtgggccacgctgtccaggctctgccgggccacctgggggtgggacaccagagcttctgcagaaatgaagcggagtgacctcattgtgtccatggcccgagacaggaccgctccccacgactttccccaaggcgtgtgcccttcacgcctatctttagctgcagcagctgtgagcagcctgccctgggggccctgccacggggccttatgatcatctgactgctattttggtcctgggacacctgcgtctgcccggcctcggggcacgcagccgttgggagctgcttggctcaggcacccagccgttgggagctgcttggctcaggcacccagccgttgggagctgcttggctcaggcacccagccgacacagaaaggcagcccgtgcccatggcagggctgggcagagaagcctgtgctccatgctgcagaaagccagtcttggcaggcgttcgtgctggcggccggtgaggccagcgggcaggtcctgtttaccatccaagcggggctactgcccagctctgggcacctcccccaccagtcaacggggcagagaacaggccaggcccctgcgcctcactcggtaaccagttccctttccacagtggcctctggggccgctcccacacttcgcctcgcatctggggtgagacgagtggccaggaatggagctgctgttttgccccttccctgtgcctttccttctccccaaggacccggcgggggtggcttccctactttccatgggagagagtggctgggagaggtggagcctccctgatggcctcggatgagcccccagctctctctgagctgcagtgtcctgtctgcaaccctgccgcctgtgcggcagggaaagctgcagggaatgggatacacctgtgttggggggcggtgcctgatggttcactcccagcactgaccgtgttggacagctgatgggtgctgcactcacctctccccgtgacactgccactcagggcagggtcagcacacatcgctgcacacatcactgcacacatcactacagggcaccacgtgtccatgggctttggagggtcacggccatgagacagaggctgagggagactgagagaagtgagtgacggagactgagacagagacagagggacagaaactaagagggagagagacagagactgagggagagagaaagggaaacagaaagagacagactgagagagagacagaaagggagagacagagactaagagagagagagagagactggtaggcagagacagagactgagaaagacagacagacggggagacagaaagagaaacagcagtgggagggggaaggctgctgagcaagcttggagggtgctggtcatgggtgccccaccagcctccctgtctgaccctc

SEQ ID NO: 9307 - DNA, 1732 bp, Artificial sequence
  DNA replication origin
gagcaccgaaagtcagagccaccaggaaagaagcgggctgccatgtgtgacttagggatgtggagagaatgccagttaaaaaaagagaatacggaaattaccaaacagacgaaacagaagtgcctacgtggtgtgaggagttgtctattgttgatgaacgactcaccccaacacttgggggcttcaaacagcaaacacgatttcagctcagaaatctgagcctgtcggtgcctttggctcagggctgctgttggccaagggtgccatctcatccgaaggcctgacagggcgggatcctcccagtctccctcgagggaggcctgggctccatgctgcatggacctccccatggtgggacaggaggcttatgcaggatcctctcagcagatctgcgtgaaggaggcagagagggcagcagctaggaaggggccaggccaaggcagcctcaggcagtggtgagggggatgcccggcggtgggtccaaggggggtgcccagcagtggatcctggagggggagtgcctagcggtgggtccaaggggggtgcccagtgatgggtcctggggaacggggtgcctggcaatgggtgctgggagggagcctggtggtgggtcctgaaggaggggcagctggcggtgggtattggggtcaccgggtgatgggtcctggtggggcaacctagcggtgggtccggggggcacccagttttgggtcctgggggtgggacctggcagtgggtctagggggaaggggtgcctggtaggtactggggaagcacctagaggtgggtcctcaggtgctggggggtgcctggcggtgggttctgggggctgggggcacatggcagtgggtcctggtggggcgtttggcagtgggttttggggagaagtgcctggcggtggtaggggtgcctggtggtgggtcctgaagtgggggcacctggtggtgagtcctggggtggggggtggctggctgtgggtcctggggtggcaccaggcagtagatcctggtgggggatgcctggcggtgggtcctgaaggatgggggtgccctgcggtgggtcctgagggatagaggtgccctgcggtgggaccttgggcagggggcatgcctggcgtggtttctcaggtgggacaggggcacctggcagtggtcccagtcctgggtggggagggacatgtcctgggcgggacatgcaggtgggtgcaggtgcaggtgggtgaagagtgaggcagcctcctaaggagagggttgggatggggcagaccccagctgtgtcccccggctcagcgaggacagtgaggccatgtcccgatgcagttctgctctggagatctcccttagctcagaaccagagtaggtctcactccaactgcccctgtattagagctaggctgccctacaccaaccaagtcagaatatgggatgtggggcaagttggggggtctttagggttcccaggtgagtcaaaggctgtactggaagcctccatggcccttcccagctctgaaaccatgcgggattcatctttgtcagagtggagcggcactgtcctgtggtctcactgccccccgccgtctgctttctgagcagacattctgtcctgtggtctcactgccccccgccgtctgctttctgagctgacattctgtcctgtggtctcactgccccaccccgtccactttctgagtggacgttctcgtggtcacatgcatcacttttctcagacaaca

SEQ ID NO: 9308 - DNA, 793 bp, Artificial sequence
  DNA replication origin
tgaaaataataataaaaactgagggaactcagaggccggtgccagtgcaggtccttggtatgctgagcgccggtcccctgggcccactgttgtttctctatactttgtgtcttacttcttttctcagtctctcgtcccacccaactagaaatacccacaggtgtggaggggcaggccaccccttcacagcgggggtggggacacacctggagtggggtgacatgggggcccctggggtggggacacacctggagtggggtgacatgggggcccctggggtggggacacactcgggggggggtgacacaggggccattggggtgaggacacactccgggagggggtgacacagggcagcaggggtgggggcacacctggggagggggtgacacggggccccctggggtggggacacactcggggtgacatgggggcccccgggttggggacacactcggggagggggtgacacctgaggaggggatgacatggggcccctggggtggggacacacccgtggtgggcgctgtcatgaggtgtgacttttgagcggagccatggacacacagtgactcagatccctggttttgggtctgagaacgacttaaccacaccaagcactgacctgtctgaactgcactgaaagacgcattttatttgcatttagttattctagtgctcagccatttctttgcacaaagtcactcttggtggacaccaagtccaaatgtgtcttaggtggttgtcagctcctccaggggctggtcaagtgctagaccttcaattaaacacc

SEQ ID NO: 9309 - DNA, 1139 bp, Artificial sequence
  DNA replication origin
taaaaatgttggcccagcaccttccctgcctgtttccaaaagctggccgcaatatcaaattcatgtccctggacaaggctccagtaaggcactgcctgcagtgtgcagagagcacttaggtggttgcagagcaggcagagacgaatgtggggagtggaagtcaccatatctgcccactcggcaggaggccgtccattcctgagacgcccccgggaggcaggctcctgtacggcactcatgctgggtacccaacccctacaacccaggcaaacccctaccctgggcagagaagggcctggacacaccaggggcagaaggagaaaggggatggagacaaacctgggtgggggtgacctgggggcagctggggtggggtgacacggggaccattggggtggggacacactccgggagggggagacacggggcagcaggggtgggggcacacctggagtggggtgacatgggggcccctggggtggggacacactcggggagggggtgacacagggaccactggggtggggacacactccgggagggggtgatacggggcagcggtgtagggaaaagagagatcagactgtcactgtgtctatgtagaaagggaagacatgagactccgttttgaaaaagacctgtactttaaataattgctttgctgagatgatgttaatgtgtagctttgccccagccactttgccccaacctggagctcacaaaaacatgtgttgtatgaaatcaaggtttaagggatctagggctgtgcaggacgtgccttgttaacaaaatgtttacaagcagtatgcttggtaaaagtcatcgctattctctagtctcaataaaccagaggcacaatgcactgcggaaagccgcagggacctctgcccttgaaagccgggtattgtccacggtttctccccatgtgatagtctgaaatatggcctcgtggaatgagaaagacctgaccgtcccccagcccgacacccgtaaagggtctgtgctgacatgggttagtaaaagacgaaagcctcttgcagttgagagagagaagtccactgtctcctgctcgccgctgggaactgaatgtcgcggtgtaaaacccgattgtacatttgttcaactctgagacaggagaa

SEQ ID NO: 9310 - DNA, 1101 bp, Artificial sequence
  DNA replication origin
gttaattttgttaataaggagtaagactttagttgtatttcttctttccagcctgtttgcctttgatttcttgtcttgccttccggcactagctggagcttctgggactctgttggacggtccctgacctgagagagaacacactcagcctctcccagctaagtacagtgtcagctgcaggttttccgtagatgctgtttatcaagtcaaggaagctcccctgtattcctgtttttcatgaataggtgttgaatttggtccgtttttttttggtttcaattgatggaatcgtgatttttcttcatcagcttagtaatgtgttagattgcattgatttttgaatattgaacccgtcttttgtctctggagcaatccccacgtggccgtgctgtagaattagttttatgtattatggaatgatgtttgtgaccaggctgcaaaggattgtttctgtgtttgtgggggagtcctatgtgttgtggaatgatgtgtgtggccaggctgcgaagggttgtttctgtgtttgtgggggagtcctatgtgttgtggaatgatgtgtgtggccaggctgcgaagggttgtttctgtgtttgtgggggagtcctatgtgttgtggaatgatgtgtgtggccaggctgcgaagggttgtttctgtgtttgtgggggagtcctatgtgttgtggaatgatgtgtgtggccaggctgcgaagggttgtttctgtgtttgtgggggagtcctatgtgttgtggaatgatgtgtgtggccaggctgcgaagggttgtttctgtgtttgtgggggagtcctatgtgttgtggaatgatgtgtgtggccaggctgcgaagggttgtttctgtgtttgtgggggagtcctatgtgttgtggaatgatgtgtgtggccaggctgcgaagggttgtttctgtgtttgtgggggagtcctatgtgttgtggaatgatgtgtgtggccaggctgcgaagggttgtttctgtgtttgtgggggagtcctatgtgttgtggaatgatgtgtgtggccaggctgcgaagggttgtttctgtgtttgtgggggagtcctgattccgtcattccagtttttcttcga

SEQ ID NO: 9311 - DNA, 1021 bp, Artificial sequence
  DNA replication origin
cccatggccgcctactcttaccgccccggccctggggccggccctgggcctgctgcaggcgcggcgctgccggaccagagcttcctgtggaacgttttccagaggtgcggcctggcaccgcccgggcacctcccgcctccgccgcggcggccccgacccctgtcccgactcccccgaccaaccccgttccctgccggttctactgcggcctcctccgtcccctgtcgggtcccccgcggccccctcccgtcccctgccgccgcccccgacccctgccccagccgacgcggccgcccccgtcccctggcgggtcccccgcggtctcccccgtccgctgcccggtctcctggggccgcccctgcctcctgcccggtccctgtcctgtgcgtcgggcccttcccaagatgcagagtgcgccactgcagacccgaggtcgcggccaccggctcctgggctaggccctttttctcgcctcaagagccgccaggtggagggtctccagggtgcttgtttggggaaagcggaaacagactgcctgggcgctgttaaaatgtcagcagccaaggaagaagcagcgacctggcgtctgctcgggccaggtgacctttatggcggcgccttctgtccctggtcgcttttccaccgaatgtccgaaactgtagtgactgatggccagggaatggcttagttatctgagggaatcttgtcttgtctgtgaaaaagggaaacgggtgcaaatgggaattcagacaggccaggagaggaaggaagggaaggattgaggtgaagatgattgtcctcttaggggaagaccacactggacgtcggctcctggggcacttccttgattccgctgtactcctcagcgggacgggagaggcggaggttccaggagggagccttccagagtcggtgcagggttgacagaagacgtttgttttgcttttcctgaactttcgatcgccagcttatttggtcttcttgatgttatagggtcgataaagacaggagtggagtgata

SEQ ID NO: 9312 - DNA, 1314 bp, Artificial sequence
  DNA replication origin
agcttcctttctagaggggaaggcagatgatggatgaataaatataaatgattctaataggttggtgcagcagtcattaaaagtaatggcaaaaaaaaaaaaaaaaaaaaaaacgaggagccggtgctgcagttcattaatagtaatggcaaaaactgcgatgacttgtgcgccaacctaacccagtaatcacgggtgtgcaaaatgtggcgatgggcaagttccgagtgctaggagagcatctagcttcccggagtcaggagacgggggttggcaacctaaccaaggttaagtccaagggaggggggtgggcagggagcgatatttcagtggagactccaaggacgaatggtatttagagagtaaaccccgatagagagggtttgtgtctggcacagagaagagcctgtgcaaaagccagcggggcgagaggacaccatgtgttcatccacctgaggggcgaccagcaggctggagctcagcgggttgagaggaggatgcagagcccgggaaaggcaccctaggcagagggcacagcagggcaaaggcctggagtcaggcctgagcctgtgtggtttgaggaacggatagaggcctgtccggcaggaagggaacagcacaggggagagaccttaggccagagcagagggcagggctgtgctgggcactgtgggctgtggatggtgctggcatttaagaggggagaccatagaccagggcagagggcagggctgtgccgggcactgtgggctgtggatggtgctggaatttaagaggggagaccatagaccgaagtagagggcagggctgtgctgggcactgtgggctgtggatgggagctggcatttaagaggggagaccataagccagggcagaggggtggggagggctgggccaggcaccagagtggagaccacaggccagggcagagggcagggctgtgagggcactgtaggctgtggatgggagctggcatttaagaggggagtccatagaccagggcagagggcagggctgtgagggcactgtaggctgtggatgggagctggcatttaagaggggagtccatagaccagggcagagggcagggccgtgctgggcactttgggctgtggatgggagctggcatttaagaggggagaccatagaccagggtagagggcagggccgtgctgggcactttgggctgtggatgggagctggcatttatgctcaagtgatgggaatatgttaaaagattttaaggaggggagtaacagttgggattaatgtgtattctgggaatctcaacaaagtaaattcatagttcgaatt

SEQ ID NO: 9313 - DNA, 1340 bp, Artificial sequence
  DNA replication origin
ccagggtagagggcagggccgtgctgggcactttgggctgtggatgggagctggcatttatgctcaagtgatgggaatatgttaaaagattttaaggaggggagtaacagttgggattaatgtgtattctgggaatctcaacaaagtaaattcatagttcgaattttcataagacttctgcacaggcagagagaaataagatcgcatctacagctgtgtggtgattttctttaaaaatactactaagtttttaaacgtgatttcaaatggtgtgtttctgtttcacattggacataagtagattgcaaggctaatggaaagtagaaaagttaactcatgaacataaaagagacatcgatttgaaaacaaaacatttattcatttacttctgctgcagttttcttgactgctgaatttcgtaagaagggattggtcagggagggtcttggggctgaagacctggagaggagctggtgctatcgctgttcaaatctgaaggtggtggagatggagccttggggaggagccggtgctgccttttaagtctatgagagtcgttgagctggaggtccagggaagagctggtgctgccactgatgtcttaggttgtggagctgaagacagtgaaggagctggtttggctgttctgtgagggtcgtggagctggagatccaggtgggagaggtgttctagtttgagggtcatgcagatggagatctgtgaggagctgatgttattttaattggtgggtcgtagagctggagaccagggaggaactggtgtggttctagtttgagggttgtggagctggagacacagggaggagctgaggttctagtttgatggttgtgcagctgaagactcggggaggggctgaggttctagtttgagggccctacagctggagatccggagaggagctgatgttttagattgagggtcgtgcagctggagaaccagacaggagctgatgttatagattgagcattgtgcagctgaagactcggggatgagctgatgttgttcgctttgagggtctttcagctgaagactcggggaggagctgatgttctagattgagggtcatgcagctaaagacttggggaggagctgatcttctagtttgagggtcatgcagctgaagactcggggaggagctgatattctagtttgagggccctgcagctggagatacagataggagctgatgttgtagtttgagggtcttgcagttgaagattcagggaggaactgctcatgtagtttgagggtcatggaactggaaacccagagaggagctgatcttatagattgagggttctgcagctgaagactcgggg

SEQ ID NO: 9314 - DNA, 1315 bp, Artificial sequence
  DNA replication origin
gaggagctgatgttctagtttgaggatcttgtagctgcagacccagagaggagctgatgttctagattgaggatcttgtagctacagacccgtagaggagctgatgttctagattgagggtcatgcagctgaagactcggggaggagctgatgttctagtttgagggtcgtgcagctgaagactcgggaaggagctgatgttctagattgagggtcatgcagctgaagactcggagaggagctgatgttctagtttgagggttgtgcagctgaagcctcagggaggagctgatgttctagtttgagggccctacagctggagaactggagaggagctgatgttctagtttgagtgtcttgcagctgcagacccatagaaaagctaatgttcagtttgaaggtcttgcagctgcagacccggagaggagctgatgttctagattttgagggtcctgcagctgaagactcggggaggagctgatgttctagtttgagggtcatgcagctgaagagccagggaggagctgatgttctagcttgagggacctacagctgaagacttggagagaagctgatgttctagtttaagggtgttgcagctgaagactcggggtggagcttatgttgtttgcattgaaagtctttcagctggatgttcagggaggagctgatgttctagattgagggtcttggagctggagacctagagaggagctgatgttctaatttgagtatcttgcagctgcaggcctggagaggagctgatgtagtttgaaggtcttgcagctgcagaccgggagaggagctgatgttctggattgaggatcttgcagctgaagactcggggaggagctgatgttctaagttgagggtcttgcaactgaagacttgaggaggagctgatgttctagcttgagggtcgttcagctgaagactcggggaggagctgttctggtttgagggtcgcgtagctgaatactccaggaggagctgatgttccaatttgagggtcatgcagctggagatctggcaggagctgatgttccagtttgagggccgggtagctgatgtaacagtttgaaggtcatgcaactggagacctgtgcgggggagaagatgttccagtttgagggccatgcagtttgagacccagcgggaagctgatgttccggtatgagggccatgaagctagagacctggttgggaggtgatgttccaggttgaggaccgtgcagctggagaccgggcgggagctgatgttccagtttgaggtccatgcagctggagacccaggagggagctgatgttccagttt

SEQ ID NO: 9315 - DNA, 1769 bp, Artificial sequence
  DNA replication origin
gctgcagtttgagggccatgcagctggatacccggctgggagctgatgttgcagtttgagggctgtgcgcctggagccctggggcggagctgatattccagtttgagggccgtgcagctggagacctgatgggagccgatgttccagtttgagggccatgcagctggagacccggcggggagctcatattccagtttgcaggccgtgcagctggagacctggtggggagctgatgttccagtttgagggccgtgcaactggagacccggcagggagctgatgttccagtttgagggccctgcagctggagacccatggggatctgatgttccagtttcaggttggtgcagctggcgacccgggtgggagctgatgttctagtttgagggccgtgcagctggcgacccgggggcgggctgatgttccagtttgaaggccgtgcatttggaaaccctggggtgagctgaatttccagtttgagagatgtgcagatggagacccagtgggggagctgatgttccagtttgagggcccagaagctgatgttccagtttgagggcccaggagctgatgttccagtttaaggctgtgcagctggagacccaggggtgagctgatgttctactttgagggctgtgcagcttgagacccggcgggtagctgatgttccagtttgagggccgtgcagctggagacccaggtgggagctgttgttctagttttagggccatgcagctggagacccggggagtggggggagctgatggtgcagtttgagggccatgcagctgaggacccaggggggagctgatgttctcctttgagtgctgtgcagctggagacccggggggagttgatgttccgtttgagggccgtgcagctggagacccaggtgggagctgatgttccggtttgagggtggtgcagctggcgacctgggcgggagctgatgttctagtttgaggactgtgcagctggagacccagcggggagctgatgttgcagtttgagggccatgcagctggagacccatgggggagctgatgttgttttgagagccgtgcagctggagatccgggggtgagctgatgttcccgtttgagggctgtgcagctggaggcctagcgaggagctaatgttcctgtttgaggtccttgcagctggagacctggggaggagctgatgttcttgtttgagggccttccagccggagacccggggatgtgctgatgttcccatttgagagctgtgcagctggagacccgtgggggagctgatgttccctttagaggaccgtgccactggagagcctgcggggatctgatgttccagtttcagggccatgcatcttgagactcggggaggtactgatgttcccgttggagagccgtgcagctggagacctggggaggagctgatgttcccgtttgagggccgtgcaggtggagacctggggaggagctgatgttgttctagtttgtgtgttgtgcagctgcagatccagggatgagatggtcctgcggttcaaatatgagggtcccggagctggagtctatgtgaggagccaatgctgcctctgatgtcttaggttgtggagctggaaactcgcggaggagtcggtattagtgtttctagttgagggttgtggatctggagatacagtggggagcagtgttctagtttgtgggtcgtggagctggagacccagggaggagctggtgtgtttctagttgagggtcatggagctggagacccacggaggagctggt

SEQ ID NO: 9316 - DNA, 1084 bp, Artificial sequence
  DNA replication origin
gggggggagcagctgggggggagcagctgggtgagaacagctgggggggagcagctggggggagcagctggggggagcggctgggggggagcagctggggaggagcagctagtggggagcagctgggtgggagtagctggggggagcagctagtggggagcagctgggtgggagtagctgagggggagcagctggggggaacagctgggtgagagcagctgggtgagaacagctgagtgggagcagctgggggagcagctggggggagcagctgcgggggagcagctgggggggagcagctaggggggagcagctgggggagcagctgggggggagcagctgggggggagcagttgggggtgagcagctggggggagcagctgggtgggagcagctgggtgggagcagctgagtgggagcagctgagtgggagcagctgagtgggagcagctgagtgggagcagctggggggagcagctgggtgggggcagggtccgctggctgcacgggggtggtgagaggagcccttgagggcctgagagcagcgaggccgggaggaaccctaatccctcatctgcacatgacatggggcctgccggagccccacagagcttggaacggagctggggaggagagtttgccaggcctcccgtcccctccttcttcccactgggattgctctgcaggaagaagaacccatcatgtccttgtaaatgtgctggggagagaacccctgacagtgcctggtgctcactcctggggagccactgtctcgggtggtcctggtaccgtgaagtttctgggctcaggtccatggcacctggaaaatgtgtttaagtgaaatgatcttcaaagcccaagaggaaatgttccaggcacccctcagagaccccatgaggcaggaaggacagtggggctatgggggcccccagcttctccagctcgacccgtgcctgggaattacccctgaaatcatgagcagagctggatgctgggtcagttctgtgtgcctggaaattactccctgatatcgatagcagagctggacgctgtggtctgtgggactctacccttaatggcttca

SEQ ID NO: 9317 - DNA, 1457 bp, Artificial sequence
  DNA replication origin
tcaacagctgccactttttctggtccctactactcccacctcctcactccctgcaccagggctgagcccagcctgctgagaacagagcctgggacaggcccacagggacattgcctgtctgggagtgcatgggggacagaggccatcactggtgtgcacggggacggcggccatcactggggtgcacgggcacggcggccatcactggtgtgcacggggacggcggccatcactggggtgcacggggacggcggccatcactggggtgcacggggacggcggccatcactggggtgcacggggacggcggccatcactggggtgcacggggacggcggccatcactggggtgcacggggacggcggccatcactggggtgcacggggacggcggccatcactggggtgcacggggacggcggccatcactggggtgcacggggacggcggccatcactggggtgcacggggacggcggccctcactggggtgcacggggacggcggccctcactggtgtgcacggggacggcggccctcactggtgtgcacggggacggcggccatcactggggtgcacggggacggcggccatcactggggtgcacggggacagaggtcattactggtctcctgccaaggctggggaaggacagaggagatgctgacagaggcagaggaactccagtctgcacagacaacaggagcaaccccactgcctctggaattaacttccagtttccttggtcatcagtaatagtgaagggaaaagaaaggcaaagtcagacagcaaaatgagggatgaacaaacgaactacaaaaagaatgtttatctgagaagccaaaatccagaagcaactgtttctgagtttctgttcatgaaagtcagtccacatgaggccaccagcgtccctgggcccacccctgacacaccccttgccaaggtctttctcctctttcggactctctgaaatgctgtgaacgagccaagcggagcatgacctcctcagaaatcacctcttccacctcggaggacaaaccagctgcccccactcaacaggctgaggctccctggggctccccccagctcttgggggcctggtacagtggcaaaggaccacagcggaggaactgttctccgcccgactgcctttgtcagacacgcactgcccaccagaggggagaatctcaccggctgtttacagcaacctaaacggcacgtgctgagtcagctgtcccggtgccgggtggtgagtgctggaatgtgagcacgccttcctcaccttttcacttcaggtctctgagcatggcacacagttgatgttaacaataaaggcttaaaaaaacgaatcggtggattatgaaatccaccatgtggccccatcagagacacccggggagaaatctcgcaggcttcaccaccctggtgattccctcctgctggccaccaagctccag

SEQ ID NO: 9318 - DNA, 1949 bp, Artificial sequence
  DNA replication origin
tgaggggcccggggcatcgcggcgggaacagggcgcacgtggcgcgttccggtgaccgggtgcccccttgtcttccaggccgaggacgatgatcccgccgggggagtgcacgtacgcgggccggaagcggaggaggcccctgcagaaacagtaaagtatcccgccttctgcttgtgtgggttgttgcacccatggaaggggagggttggggtttgccttgaaaacggagttttaggaacagggcgagcgaggaaggcttcgggagccgggcgggccggggctgagctccggcgcgggcggcgcaggagtcgtctccccgcagcgccccggtgcccggagcccccggcgaggctcgtccctgcgccctcggggccctgagcggtggagcgaggcggcgggcaccgtgaggcgctgaggccaaggacgcgggcggagctccgggcggcagaggcggaggcggcggggccacggcagcttcccaggctccgcaggcgagaccgccacccgctgggacggagggtgtggcacggccgggtgtgtgcgtgtgtggcgaggctatgcgaggctgtgtgtctgcgggtggggagggctgcgggggtgtgtgcggtatgtgtgaggctgtggggggctgtgtgtggggtgtgtgtgtgtgaggctgtgtgtgcgcggggggagctgtgtgtgtgtgggtgtgtgtgtgtgaggctgtggggggctgtgtgtggggtgtgtgtgtgtgaggctgtgtgtgcgcggggggagctgtgtgtgtgtgggtgtgtgtgtgtgaggctgtggggggctgtgtgtggggtgtgtgtgtgtgaggctgtgtgtgcgcggggggagctgtgtgtgtgtgggtgtgtgtgtgtgaggctgtggggggctgtgtgtggggtgtgtgtgtgaggctgtgtgtgtgcggggggagctgtgtgtgtgtgggtgtgtgtgtgactgtgcgggtgtgcgaggctgtgtgagactgtgtgtgcgggtgtgtgtgggggactgtagggagctgtgtgtgtggggtgtgtgagactgtgcaggtgtgcaggtgtgcgaagctgtgtgagactgcgtgtgcaggtgtgtgtggagggctgtggggagctgtgtgtggggggggtgtgtgtgtgaggttgggggctgtgtggggtgtgtgtgaggctgtgtgtggggagtgtgaggctgtgtgtgtgcgagggggactatgtgtgtcggatgatgtccctggctgtgtgtggggatgtgtgtgtgtgtgtgtgtgtgtgtgtcagatgatgtccctggctgtgtgtggggatgtgtgtgtgtgtgtgtgtgtgtgtgtcggatgatgtccctggctgtgtgtggggatgtgtgtgtgtgtgtgtgtgtgtgtgtgtgtgtgtcggatgatgtccctggctgtgtgtggggatgtgtgtgtggggagaggggtgggtgggtgtgtgtgtcggatgatgtccctggctgtgtgtggggatgtgtgtgtgtgtgtgtgtggggatgtgtgtgtgtgtgtgtcggatgatgtccctggctgtgtgtggggatgtgtgtgtgtgtcggatgatgtccctggctgtgtgtgtgtgtgggtgtgcgtgtgtgggtgtgtgtgtgtgtgtgtcggatgatgtccctggctgtgtgtggggatgtgtgtatgtgggggggagggggtgtgtgtgtcagatgatgtctctggctgtgtgtggggatgtgtgtgtggggatgtgtgggtgtgtgtgggtgtgtgggggtgtgtctgtgtgtgtgggtgtgtgtgtcggatgatgtcccccgctgcaggggctgtaggattctgtgtagattcacagcaatgccaccctcactgccctaacacctgctgtgataatgaggtaaggccccttggcgcctggacgtgtcaaatgcttggccttagtgtgtgg

SEQ ID NO: 9319 - DNA, 1296 bp, Artificial sequence
  DNA replication origin
aagagcgcccgggagtggaggccctcagtcacggagtccacccgggcagtcagcgactggggaagagcgcccgcgagtggaggccctcagtcacggagtccacccgggcagtcagcgactgaggaagagcgcccgcgagtggaggccgtcagtcacggagtccacccgggcagtcagcgactgaggaagagcgcccgcgagtggaggccctcagtcacggagtccacccgggcagtcagcgactgaggaagagcgcccgcgagtggaggccctcagtcacggagtccacccgggcagtcagcgactgaggaagagcgcccgggagtggaggccctcagtcacggagtccacccgggcagtcagcgactgaggaagagcgcccgcgagtggaggccctcagtcacggagtccacccgggcagtcagcgactggggaagagcgcccgcgaggggaggccctcagtcacggagtccacccgggcagtcagcgactgaggaagagcgcccgcgagtggaggccgtcagtcacggagtccacccaggcctggcatgtggctgtgtccacctctatgcgtagggccggagtgctgacggggcacagaggtgtgtgttcttgttgctgtgtagagaagtgtggagtagattagtaccaaaaacaaagtagggaggagagaaggtggcacagcctcactctgaaagcctggggattttcctgtcaggatgatgctgctccctgctcccttcactcatcacccgcagcagcatcggagtcctcttgttcctttgcatccaccgtgctccactgtggggcctgaacacacacctgtgtccatcctggagcccctcctggggtcagtcctggctctgaagcccacccgggctgaacgggcacatccgcttcaccccaccctaggtgggcaagaacagaggccccacagcgccacgaggtgtcctgggttcttgaactctggaatcccacacttgctagcaggtcaaaagttccatgctccttgagattacgagtgattgtgtaaacccaggcctgaagttatactttattaaggtaaatcatgctgattttcagctttcactgaagatttaccttttccttgatgatctttttatggactggatgtttgtctcatcccttcacctattcatatagtgaaaccctaattcccagtgtggccgtatttgtaggtgggtccgcttaggaagaaattaaggttaaacaacttcataagtgggggtggggggtggcctgaactgataggaccagtgtccttaaaaaggagac

SEQ ID NO: 9320 - DNA, 1729 bp, Artificial sequence
  DNA replication origin
aactcctggacgggagaggtgtcgtaagggtccctcaggagggagcttgagctggaagcaggggtgagtgaaatcaggttcaagggaaattttcaccaaggtcatccgccacccccaggaccctgagagtctcacagtgggtgcagccccaggcaggtggtggtccataggggacagcccccaggaagatgcaggtgacaggggtggggtggacagcccatgggaaggtgtgggtgatggggggacagtccatgggaaggcacaggtgatggggttggggacaggtctcgggaaggcacaggtgacagtgtggggtggaggggggcagcccatgggaaggtgcaggtgttggtggggggaggggggcacgttcccatcatgcttgtccgacctccctgggtggctggaggaggaagtgatccagaggaggcctgccttggaggcacccagagcacagaggctgggcctggtgtggagctctcggccgacctcgggccgggctttacagggcatgtcagttagggctctgcagaaaaacagaaccgaccggagacagatatggggaggcttattatgagcaggtgtctcagacagctgcaagctggagacccaggagagccgaggtgtagttcagtccaagcccagaggcctgagggccaggggcgctggggtaaattcccgcctgtggccggagaatgggagatgagctgatctggctcaagccatgagtcaggaaaaaggggtgactcctcctgtctagttctctccagccccccatggactgcccagccacactggggaagaccactggcttcaccgagcccacggattcaaatgggaccgccatctggaaacacctcccaacacagcaggcacgatgtttaatcgcagcacccagtgctgcaggtggttgatgtgtgacatcggtcagcacactaggcctgtgtcctcattagttcgagggccggctgtgactgccaacagtagcttcccatctgagtcaggatttcagcccagccctgctctaggctttctgagtgagtctctggggctctgaagtgatgagcttgcaggtgacaggaatcctgcgtcccattccctgggcaggtgcagcaggggctggcaggctgcctcatgcacgggtaagcccctgtgtgtcccatagtaggactgagcatctgggcccacctgtcctagacccacctgtcctgggcccacctgtcctgggctgaccagtcctggactcacaaggtggctctgactgtccttccaggcctgtggaaccgactcccgtggtcgctgttgaagccctctatggtgaaatgctcccaggagctgcagactgccagacagctttacttaggatgattccctagagggagtcctaaaccgagtcagcttgggggccgcctgctcctctctcccttacgcccctgtctgtggagttctgtcccttccaacgaggatgcttagggtcgatgtgcctgttaagggctgagtgaaaacgatggagaagaaagggatcctgggccttcctctcatctggctgcttgcaccactcaggccccgccgagggctctgcagagaggcaggcagtcctgccaatagggaccttcatgaagcacccacattccttaccaccttctcccctcacaggaaggaagcagcagggtttctgctggttgagctcctcctccaggcttcctggataggaagcagtggtgctgct

SEQ ID NO: 9321 - DNA, 1447 bp, Artificial sequence
  DNA replication origin
ctcggggtccgcgcgggcgctccgggtgcacacggggcgggcggacccggccacggcctccccaggtccccccgccctccctgagcctgggggtcccacctgagggtccgccccgggagggagcccccatcccccacctctccagccccagtctcctcctctgtgatgtggagagagaccccccctccgcccagccaccgcagttgcccatggtgagtggatggggaggaagggagctgggagcgcggtgtccttcctgggcattggtgagaaaggtgggccatcaccgtggcccttacaaggcacagctgggccagcaggagggggccacaggcccagggcgggaggagctctgtgcctccaagaccgcagaggccaacctgtcccctgcctcccagccaccgcccggcctgctggtcccgcagggtctgcagagaggggccctgccaggaccactcccagggcccacccctcgggcaatgagaggctggaaggctgcgtgtcagatgagacccagccgggtgcagggcagggccagggccgcggggcagggctgccctctcagaggtgaacagtccccacggctgggcctgaacccggatctgtagcctgggcaacccctgtgtcctgccagcactctgccaaccgcgcagaacctcagccaccttggagagtctcagggccattaccagccgtccgcccacggctgcagagttcactgcaaccaagaaggggctcatttggaacagcgagaatgtgaagtcagcaccaaggcctcgggcgaccctgtgcccacagcaagggctggagcagagtggctcccttgggggctcaggcttcccatggggtcctgctaagggccctctgtttcttcacacagaggagactcagagcaaggtgtcaccgggaacccaaggccaccccatctggcccccaccacgagcacctgggcctgtgactcggtctgacccacagtccctggtggaggaggagccagaaggcaggtccagctgtgcgtctgggtgatgccgtgatgcccagaaacgaagccacattgctcccagtcccctgaagccaattccctggtaggggcgggggaggcggtgcagacggagggtgggaggtcagccctgccattggagatcacgcacccctgccactggagatcacgcaccccagccctgtgcagcgactgcggctgaagtttcctgctctgtgcagggctgagtaaggtccatttcaggtcttcagtgctggacagggagctgggcccagggggagctgaaaagaaggcgagatgaagaaacagaagaagcagaacaggcaaagcgagcagaagaggacgtccctttgtccttcacccaaaccgcagcctggacctggttctcaggcctcctgtgacccatcccagggtgcacagggcccaggctggatttggggcaggtga

SEQ ID NO: 9322 - DNA, 984 bp, Artificial sequence
  DNA replication origin
gctcctggggctcctggcgccctgcccgggcgggcgggggcgggagcgctgctcgcacgcgaggcctggctggccccatcgcgtgacggcgccggcggctgcgggggaagtaggggggaagtgggcgggcgcccgcggggggcacgcgatgccgggaggggcgcgcccctgccgccgcacctacgcgcttctcggggaaaaggccggggctgccgggtccgcggggcgcattgcgggtgggacggggtcggctccgctgcgggagcgacccctgcaatggggcttggctgcaccggccgcctgggtggtcggtctgtgtgcgggtgacccaggcgtgtgcccccacccgcgctgccccagcccgcggacctcggcggggagcgcccagggccagcacgggggtctcacggggcgaccccagcagcgtctgtgtggggccgctcctgcccgggtctctcctcgggctcggggtcagctgctgggacacccggggcgcctcttgccctggcttctcctgggtctgcacttgggagaaagatcttgattttcactgttaaaaaccttcagctttctgaacacgcgtattgtgtgaactgtggcgtctctggctgagcctggagggcaggaggctaggatgctggggtttccaggtgggaagaggccgcccttgcccaagggatgcccccacctcggtggactgttcatgcttcctcggaatagtcctgctttgtggcagaagaaatggggcagtttttgttacatttagtgcagtgaacaaacatccagtttttaccagctatgggagttgagggagaaatgagggctcagagaccagggagggaggggaacagagaggccgagtcccaaggccacccggtgccaccgtctccgggcttctggctgcctcacctcctcactcgggccctcgccccccacggacaccttagctcgtcagcatccctgcagctggtacctcagattctg

SEQ ID NO: 9323 - DNA, 1305 bp, Artificial sequence
  DNA replication origin
ctcaaacttgattttctgtctgggtcgggctcttgctgagcagtggggtggaggcagccaggagtctaagctcggcccagtggggagtgagggtggtggggggctgctttggaaagggctgtgtctccctaacccgcggaagtgggcagatccggtgaagcatggccgcctgggctgtgccacgccgggaccccggcacaggctgcccaccgtgaaggacggtgtgctggccttaaggtgccatgcgtgatgacagtttttatgccatctcaaggtcagaactggtggcaaggtagcatctgcctgagcggacaccacctgtgacttcagctgaggatccgggagacgcgggagcagcagatgcccccccggccttgctggggtgcgctttggtccacgcactggggccagctgcttgctgggacacccttgcccctcagtcctctcagaagctggggaggggtgtccctcccatgtctccagtgcccatgaggacactgagtgggcagtgagcacctgtgctgggtccggaactcagcccttggtcagtctggaaggtgaacgtgtcatctgtccccttctgcacccaaaaatggagaatgcaccatcctcaggagtgggagtgtccttgggggctgtgcgcagtcactgggaagggggtagcactggcgactgtcctggacctgccttttcctgccctgcggtgttctgtgcggcccctgggggcgtggggcctggcctgcttctcactagggagggggctgcgtgggttccaggagggagaggcgatgcgggtgtgcagggcacagaagacccaggtggacgcaggggaccttggcccagccctcaaaggggtgcagcccaacagtgccgtgggtctcaggggaggggccgtagggacctcctgggtggcttcagggggatctggcaggaagccagactttgtcccaagactgggtgggggccctggggggttgggcaggaggggacagagagcagtttctgcagagcagagcgggtgtgggggcgtcctcaggccaggctctgcctccatgtcctggtgtccccctgcctctcctggctgatctgaggcctgtgtctcagctcctcctgccccaccttggactctcagggctgtggaatgctgcgtggcctgcagaggggtcagtgcagcccaggccagatgtcaggtgagaaccgtggggtgaacgcggggaaacacaggaaagatgtgaatgaagaagagtggccaggccaagggttgggggtgcctaatgtgtcttttcttctctgacagtcgtgcag

SEQ ID NO: 9324 - DNA, 805 bp, Artificial sequence
  DNA replication origin
ggggacttcagtttcaaacctcaaagccactgggcagaggttccgtcccgctggctggatggaaacaggaagctggcaggaggacagtgtggctgggccagatgcctgaggacacaatgctcatgacaaaagcagcaggtgcggagggtttccgccggtgcctcgcacaggagagaagatggagccgagtgaggacccaagagcaaagggccccaagcagttgtcacctgaacgggagggctggctggggctcagggctgtcctgggggccctgctgggccagacgccccatgagccacatggtcacagtctgggcacgattctctctcctcagggagaccatctgcggcagggaccagccgccccatgagccaggtggccatgctgacgatgccctggcggaggggagcccgggggcccagtggggttgtgggggtgtcgaaggcgggggtgagggaggggggtgagctggggctggacagtgagccgaggctccagcagatgcggctgaaggaacaaactttaagggaagaggctgtgaaccaggcagcatccacagtgcgtgagtccacgtaaagccctgaaaaccagagagatcgctgggaagtggcacagtggccaccggtgcccgagcgactcggatcacattctcaaagtgaatcaacgacaccaacatcaagccacattcaacgcgagggagccacgtgctgcgtagccggaaatcccaatgcgtgatgcagctggacgtgcttcagatgctgctgaacagtcgaggagcccttagccacccaggtccccccattct

SEQ ID NO: 9325 - DNA, 1149 bp, Artificial sequence
  DNA replication origin
cagggcgaggagggcgcagggtgaggcagggccagagcgtgcacgaacacacgggtgcagggcgaggcaggcgcagggcgaggcagggccagagcgtgcacggacgcagggcgaggagggcgcagggcgaggcagggccagagcgtgcacgggcgcagggcgaggagggcgcagggcgaggcagggccagagcgtgcacgggcgcagggcgatgagggcgcagggcgaggcagggccagagcgtgcacgggcgcagggcgaggagggcgcagggcgaggcagggccagagcgtgcacgggcgcagggcgaggagggcgcagggcgaggcagggccagagcgtgcacgggcgcagggcgaggagggcgcagggtgaggcagggccagagcgtgcacgaacacacgggtgcagggcgaggcaggcgcagggcgaggcagggccagagtgtgcacgggcgcagggcgaggtgggtgcagatgtggcaggtgcagacgcggcgtccacagccaggcctaaagacggtgtctgaagctggggaaacccaacagtgactcgttatgtaagcgtgtgacttagcaagacagaggaaaatgcccaaaccgccggtgagaagggctcaaagcagtcgctcaaagcagcaggaagtgatgtggcgggaaggctggttttagggacaacggctgagtttcggtggaggcttgcatgctgtgtgactcttcagacctggctcatttcacgtcgactcttcttgcccattacgtcatttcatcaggccttaccgcgactgcctcaggccttaccgtggccgccccaggcttactttggttcttggctgcttggactgtctcccccatgccttcattttctgcgtttccttctcggtgtaggtgcctcttgcaggtgacgggtcaagggatctccccccacaccaagcgccgtctttcactggggcccacctacttcttgtgattctttaggagctgatttctgtcatcctattttgtattttccattcactgcacatcctttgggttttttcctcccctaaccctctgttagataaattgagctttcttgaactgaaggtgcacattctgcttttgttctcatggggatgcctttgaaatgagagctttcaggttgatttgc

SEQ ID NO: 9326 - DNA, 1989 bp, Artificial sequence
  DNA replication origin
gggtggggaaaatccacccagaacagacgggggcggctgctggagccagggccacacacagacccacagtttgctgagggccactcacggcctccggagcccgcaggacccaggcctggcggcagaaggccctgccagcccagcccttctcacagaagcccatcggtgacaacggcaatgcctcctcccagtgtcggcagcttaaaacggagtaacagccaaggggggtggggcacgcacggcgcctgaaacccggtttggcacaaacacactccttccaccaggggcaggcccaggaccctcacctgtgctgacactgcctgctggggagagcctgggatgcaagggtccaagcccagctgagccgagggcagagcaggggccgagtgaacaccactgaatagaactctgtgcacccggctcagtgaccacagatggtcagaggctaactggacagtcaggggcttatgtggatggtcaggggctaaggtggacagtcaggggctaaccagacagtcggggctaatgcggacaatcaggggctaaggtgtacggttggggctaacgcggaatgtcggggctaacgcggaaggtcaggggctaacacggatggtcaggggctacgtggatggtcaggagctacgtggatggtcaggggctaacatggatggtcaggagctacgtggatggtcaggagctacgtggatggtcaggagctacgtggatggtcaggggctacgtggatggtcaggggctaacatggacggtcaggagctacgtggatggtcaggagctacgtggatggtcaggggctacgtggatggtcaggagctacgtggatggtcaggggctaacatggatggtcaggagctacgtggatggtcaggggctacgtggatggtcaggggctacgtggatggtcaggagctatgtggatggtcaggggctacgtggatggtcaggggctacgtggatggtcaggggctaacatggatggtcaggagctacgtggatggtcaggggctaacagggatggtcaggggctaacatggtcaggggctaacatggacggtcaggagctacgtggacggtcaggggctacgtggatggtcaggggctacgtggacggtcaggggctaacatggacggtcaggagctacgtggacggtcaggagctacgtggacggtcaggggctacgtggatggtcaggggctacatggatggtcaggggctacgtggatggtcaggggctatgtggatggtcaggggctaacatggatggtcaggagctacgtggatggtcaggggctaacagggatggtcaggggctaacatggtcaggggctaacatggacggtcaggagctacgtggacggtcaggggctacgtggatggtcaggggctacgtggatggtcaggggctatgtggatggtcaggggctaacatggatggtcaggagctacgtggatggtcaggggctaacagggatggtcaggggctaacatggatggtcaggggctacgtggatggtcaggggctaacatggatggtcaggggctacatggatggtcaggggctaacagggatggtcaggggctaacatggtcaggggctaacatggacggtcaggagctacgtggatggtcaggggctacgtggatggtcaggggctacgtggatggtcaggggctatgtggatggtcaggggctaacatggatggtcaggagctacgtggatggtcaggggctaacatggatggtcaggggctaacatggatggtcaggggctacgtggatggtcaggggctacgtggatggtcaggggctacgtggatggtcaggggctaacatggatggtcaggggctacatggatggtcaggggctaacgtggatggtcaggggctaacatggacagtaggggtaaatggtggagagtcctggagatctaaaagtcacagagaggccggtgtgggccccagacacctg

SEQ ID NO: 9327 - DNA, 1510 bp, Artificial sequence
  DNA replication origin
ttagggttcagtctggagacagaaactgtgcagaaatttgaacagttttatagaaagacttatgacgggtttagtgtaaggcagtgttaaccagtagcaccggctcagcaacgaaggactaaagggactctgaggacacagatacagcaacagaggggcagcagtgcccacagggcccaggcgggggccgttggaaaccccagccccactgaggctgagagccagaccctcagtggcacggggtggggccatggccggggcagtggagaagttcccaagacgttcaggccagggctggtaggaaacctccctttgggacccaggtgagatgcgcacctggaggccgctaggcgctgggggaagctgtgacactgcggggtgcacaccggccccaggggaagccctacccctgcactacccagcacctctgcctacgaggaaagggtcccagagccagcattcacgctgagccagaggcagcacacggtgattaaagcaaaaatctgcctggtcgggtgggaggcctaggggccgaatctgcctggtggggcgggaggcctaggggccgagtctccctggtcgggtgggaggcctaggggccgagtctgcctggtcgggtgggaggcctaggggccgaatctgcctggtcgggcgggaggcctaggggccgagtctgcctggtcgggtgggaggcctaggggccgagtctccctggtcgggtgggaggcctaggggccgagtctgcctggtcgggtgggaggcctaggggccgaatctgcctggtctgctgggaggcctaggggccgaatctgcctggtggggcgggaggcctaggggccgaatctgcctggtggggcgggaggcctaggggccgaatctgcctggtcgggcgggaggcctaggggcggagtctgcctggtcggctgggaggcctaggggctgtgcagagcagcaggcagtggaagccacgaaccaccccgctcgcccacactagtccctgacaagtcattagaattcacgtctgcgcaggccctgaggctgcacagttttatccaatttccataagagctgggcttttgaattttttcccacagctgaaattgctgctgccttgctggtgattctgcaaaaaaactcctctagtccgcctctaagttcaatctcctgcccctgagcccaaggccagtctccctgtgaactgcaaggaccacgtgactgccgggcccattgcagtgagcttgttttctgcaccgtggctgtgtctgcacactggatgcctccttgggatggcctctcccccagcatccacgtgaaggtgcagctcgtcagcacgcctgggctggccctggtggaggacgcagggggacatggctgtgtgcagggagagggaacaccgtgcagtggacatggctgccaaggggtgtccaggccactgccctgttgggaacgcagtgcagggtggagacacagctctgctgtcccagcagcgaccttgatggctctgagcctc

SEQ ID NO: 9328 - DNA, 801 bp, Artificial sequence
  DNA replication origin
aacaagcaagatgaaaccattggtccatcgtcatgcatgcacatgtactaaaaacgatgtttttaaaggcaaaggatgatgaaggcaaaatttgagtgacatctagagggatgctgggggcgggaggatggcacagtgatagggtttacatgacctggcgcgtgagagccgtgggcgtggttgtgcgtgtgacacgtgtgttttggcttctcccaccgccacgccccttggcccctatggtctgcaggagatgatgctatcctggggaggctgctcagggcccaggagtggggcacaggcacgcccaccgagtactcggccttcctgacccgctgcttcatctgccgtgtgcgctgcctgctggacagcacctcgggcttcctggtgagtgcgtgggtccctggcagggggctcccgacatctgggatgcattctaccctggtgtggaaggaaacagagggcaagagggggtgggggcgttaaaccacatgtccctggtggagggacgggggccggtgctgagctctgtgtaccctgtgatggtgtgggggtgttaacccatgtgtctctggtgggtgggagagggctgggcactgagctctgtgcaccctgtgatggtgtgggggtgttaacccatgtgtctctggtgggggggcgagggccggtgctgagctctgtgcaccctgtgatggtgtgggggctttaacccacgtgtctctggtgggtgggagagggctgggcactgagctctgtgcaccctgtgatggtgtgggggtgttaacccatgtgtccctggtgggg

SEQ ID NO: 9329 - DNA, 1484 bp, Artificial sequence
  DNA replication origin
tgggggaagacactgttaaggggacacctgcaccaggaaggaccttgtgcctgtggggacacatgtgccaaggggacacctacgcctgggggggacacatgtgccggggaggacacctgcgccgaggacactcgcacgagcgggatactccacggggtccggaacggcctccccgccctccaggtcccggtccggcctccccctacgcgcccccgcggaagccagagacagggagagcaaggatgaaagacggcgaccacctcccaaggacccgccggccgtcaggacctgccaccgactcaccctctacggctacgccgccgccgccgccgccgccgccgccgccgccgccgccgccgccgcccccgccgccccctccgccttcgctgcctccgcctccggggtcccggccggaagtggacagcgcgcgggcacttccgcttccggcaacggcgccggaagcacgggtccgggccctcccgcggggcgggtactcgtctcccggccgagcgacttcagctcggggacctgccccatggccgctccccagcaggacagggaaaccgccgaggtggggggcttcttgtccgtcccagcccccccaactcaggccctctcgctgcccctggcgaccaccgcgtgcgcccttccccagggcgggcgcagtcctggacgcctccgccgagcgtgactgcgtgcattttctctcctttcccttcccaacctgcggagagaagacagccccagagccgctgtctccatcctctgctgatgcctgctgtctttatgttggcctcgtcgtccgcactgcagtgtggcaggggcgtccctcgtttcccgcggactgaggtgggcgccgggcattcagtaaacgaagaaaccaaagcggagaaggttgggaatcaaacgtctgtcatacctgccaccagcagacaagcggctttgggtacctcctggacccaaagacgaactcagcccctccaggagcgcagtcattggcaccctcgtgggaacaatgccagtgggatgggtggccaccggatgtttccggggcccctcagaggcccagcagcgcaggtcttggagaatgaatgtgggtcactgggccgcgctgcagagggccggtcctgagtcgcttcctggaggagaggcccatggccagcacttggcttcgcctggaggaagaagcacgtgctaaaccacgagcgttcagggtttgtctgtttgataaaagatgctggctttgacacaccaactgacaaagtctttcataggttggagctgctaggttgtgcccctgcccctcctgaaaattagccacacgaaaggaagggtctggaaggtggcagggaagccagcagagaccagggaagtggcagcagcatggggcaggggcacacaggaaggagatggagcttgcgggagcccccactgccactccgacagggagccctgccccgtgccctgctgatgttgacactgac

SEQ ID NO: 9330 - DNA, 1240 bp, Artificial sequence
  DNA replication origin
tttctttccgcttcagaccctccttcctgcaggacccaggttcctctttcctccaaagtgcctgccgcgttttccagatgctgcggtcgttatcaaaggacagcagcagccactgacacgggcctgtctgtggaccgagtgctcatgcgcggcactgcctcgcccgcgtctgtcctgctgggggccggagctggcctggtgcgggggtccaggtcaccgtcactgttcccccactgagcccccgctcctcctctgcggtgagatgccagagccgtggcggagcgaggaggagtgggctcagagcctccggggagccaccgggagccccagcctgggtttcaatgagggtgctcctggccgccagagccgtggagcctgccgctgaccgcgcgtgtctccccagaggatgacggccgaggcgcaccggcgcgtggtggtggagtacctgcgggcggtcatgcagaagcgcatttccttccggagcccggaggagcgcaaggagggtgccgagaagatggttagggaggcagagcagctgcgcttcctgttccggaagctggcgtccgtgagtgtcgcgcaggtccgggctggagaaggcctgtcgctccgcggccctgttcagcctccaccccgggactcgggccagtagatgggagtgtgtcgtgtgtttgtcaggcggggggagcctgggtccaggtcctgcctgaccttgtggttggacacgaatgtccacagaggtagacgcgccggccccgccggcttcccgaggccgcccacagctccctgacggacgcttcccagtctgtcctgcgctgcgaggtgctggctgcctcccacggtctcgccctcaccccagacccctggccctgtcactgagctttcagagtagatcctgaggagtcaggtgaagagggaggttcccagtcaggaaggggctcagccagaatccagctgctcccagcgccgcgggacagccgagggcggctcctcacattgctgctgccttccagggtttcggggaagacgtggacggatactgcgacaccatcgtggctgtggccgaagtgatcaagctgacagacccttctctgctctacctggaggtctccactctggtcagcaagtatccagacatcaggtaagggatgcacgtcttagaatcctgccttagaatcctggagtggagcggcaggtccctccttctgtctggggcgggtggggctcctggttcgcaagttca

SEQ ID NO: 9331 - DNA, 1304 bp, Artificial sequence
  DNA replication origin
gacgccgccggcgggaagggtccgcgcgccatggctggccgctcgcgccctttcccaccgctgccgggaaaccgaggctcgccccaaacggatttgcgtgaaaccagcccaaggttccgggcccccccaaccgagccccgcgcccggggactgactcggggaccgactcagggacctcccgagcgccaggactcagggcccgacctgcagcggctgcaggcccagcgcccgcaagcggcctgggccgagcgccgtttccaggccctcgccaggtctttgaactgcaggtaaagtggcaggaacgtcttccgtctgctcagcgtttggggatttagactcctaaagccagtacctgccccgtttcccccccaggttccgtcctgcccgcgcccggtctcagggtggcggccccggacacggcccgtccccacagacgaggtctccggcctgagctgtcgcacctggcgcggaggtcgcccggggtgccctggctgggtgagaggtggcctggcgggcggagcttgccaagaatcacggccagtccttaagtggatggtggggcccagcagctgctctgtcccccttaacaaaccagggggcatggaggggcccagggcaccgcccccctaccaggctcaggccctccaaggagaacctgctgagacccctgagcctgtcctagaccccggacccctgacccttcccaccccttccagcgtcccagggcgaggccttggacagagctcctggtcctctgcagggagaccatccagcccaagctctgggaggcacagtccattgagtgggcggaggccgcgggtgctgagccggggagggtgctcggagtccatccatccctcagacggcaagtcccacagggtccaacccacctgaaacctgcctgcacggtggaagtggtggaggtggacactcctaggggcttttctaaagctagactcgcagctccttgctcaggaaaattaaactattcacgtttcagatcaagtgttgacagtcaccagtcaggaggagttcttaaagagttttatgttgactgaatattgcacattgagtccccattgagtccctggtgggaaaagtccacaatttcccattgatagctttttactgttgtgaaaaagggaagcgtcagccacacaaaagcctgcatgaccgctgcttcggagaagctctcgaccctaactgcagtcactgttacttggatcagatcaagcgcagtgactttttgggattcagtggttattctccacacttcgtagccatttcaaccaactctgagcaca

SEQ ID NO: 9332 - DNA, 1639 bp, Artificial sequence
  DNA replication origin
cggtgtcacctgcgggagaggaaggcgtgagcggcgcgcggagcccgggcgctggggcgggaggggcgtccccgggggcctcagctgtccccgagcccggcggctctcgcctcccctcccgcggcgcaccccaggctcggcgtccgctggggcctcctcccaggacccgggttcgcggggcagaggcggaagcagcaacagcgaagccccagcccggccccgccacgtccccccgccgggggtcccgggacagcggcctcctcggcgcaggaaggtcccgccccaggccctgcagcgcgggaggtcaaggtccccaaggggacctgcttcctccatctcaaaccgccctggcgtcccccgggtgcctcccaggcccccagagggagctcagaaagcccagaccccacggcccgcccctctccctgctctgagctggaggcagagtccgggtctgcggggccggccctccctgtatccctgtgagagggtcggggacccggggcgtctgtctggcttcccccagccctgctctcagctccctgggagcgcaggatttggactcgcggactagctttcggagccacctaaaggaaatctcaggcggccctagtgccctcagctccgtgggagcagcagagacgccagagtatctctgtccgggctcctgagggaggtgcggccagcagggcgctagaggaggaagaggggctgctggagagagagagcgcgccaggttcaggtccagggaggagagagagcgagcgcgcgaggcggagacctggagggagaggagctgcggagaggggttaggcggggagggagagagagaaccaggttccggtccagggaggagagagacagcgcgcgcgaggcggagacctggaggagaggagctgcggagaggggttaggcggggagagagagagagcgagccaggttcaggtccagggaggagagagacagcgcgcgcgaggcggagacctggagggagaggagctgcggagaggggttaggcggggagggagagagagaaccaggttcaggtccagggaggagagagacagcgcgcgcgaggcggagacctggaggagaggagctgcggagaggggttaggcggggagagagagagagcgagccaggttcaggtccagggaggagagagacagcgcgcgcgaggcggagacctggagggagaggagctgcggagaggggttaggcggggagggagagagccaggttcaggtccagggaggagagagacagcgcgcgcgaggcggagacctggagggagaggagctgcggagaggggttaggcggggagagagagagcgagccaggttcaggtccagggaggagagagacagcgcgcgcgaggcggagacctggagggagaggagctgcggagaggggttaggcggggagggagagagacagcgcgcgcgaggcggagacctggagggagaggagctgcggagaggggttaggcggcgggaggcccgggagcgttacatgtgtgtggactcggggagggcggcggggggccgctcctcggggccgtctgcctgcaggaaggagtccacggacttgctgctgaggcggaagggcatcaggcggcagaaggtgccgggagagtagggaa

SEQ ID NO: 9333 - DNA, 917 bp, Artificial sequence
  DNA replication origin
gagccaggttcaggtccagggaggagagagacagcgcgcgcgaggcggagacctggagggagaggagctgcggagaggggttaggcggggagagagagagcgagccaggttcaggtccagggaggagagagacagcgcgcgcgaggcggagacctggagggagaggagctgcggagaggggttaggcggggagggagagagacagcgcgcgcgaggcggagacctggagggagaggagctgcggagaggggttaggcggcgggaggcccgggagcgttacatgtgtgtggactcggggagggcggcggggggccgctcctcggggccgtctgcctgcaggaaggagtccacggacttgctgctgaggcggaagggcatcaggcggcagaaggtgccgggagagtagggaatctgcgtgcgggccctctgcgaggggaccaccgtctccccgggagacagccagggcggcagcctggccaggaggctgcggtccagggcctcgtccggagaaaacacagggttgtcaattcctaggagagagggcagcggctagtcagccttcggagagccccacggcggcaggggagacctcgccggggccgtcacctgctgggtgccttggaaagttagggtcaccgggaaggttagggtcacgtgcctttcaggttgcgggcccttcccccacatccatgaccccacacgccacaggcagcacaggtaacgtctcgcttccctcaagacataccccacctgctccctgcccggcccacgtctccccggacagcagcctccgagttggttgagggggcactcagtgggtgccaagcagggcccttgagaacccacaggagaccccacccccccaggtcccagtgcccctggtccaatgaccgagctccctcctggggcggcaggag

SEQ ID NO: 9334 - DNA, 894 bp, Artificial sequence
  DNA replication origin
ggagtcagggtccccagggccggcaggggcacgggtgtggagggaacgtcagctcactgcactcagacctcgccaggtgggcacccgtgccgccttcagtgtgcaggatgctcccagggaagcccccggggtcaggtgggtgccgctgttcccactgaagatgcggcccccagttcactgcccactcgggggggatttgagggtcattggttctgagggccctccgcctgctcttttgcttctaaatccagcatcttctgtatgacctttgtcccgctcctgccaccccacgaagacagacgtgagggtcaggggagccacggtgctaactgccactctgggcgggcacaggcgagggctgtgcagcacccgggcacgtggggtcttcggaggggctgctccccacaccacttcccctgcccctgccgagccctgccgtggggtgggggggcgcagggagagaaagcagccgccctgggtgagagccaggagggacactgggcaggcagatgccaccccaggtgtggggacccccgctactgagtggccgggaggagcccacaggctccccacatgcagctgagcccagggttgtggtcgtgggtcgtgggtcaaggatggtggctggtgtggttgggggagaggctcaaggcccgcctgccaaccttgtcacctatgtgggggtgaggggagcccgccagaggccagagcccccactgtcccttcccaccctccagccaggctccaggcctcctagggccagagtatctgagctttctctcgcttgccgggcctgtggtttgggggtttgtgtggagcctggtccaggagccctccttcctgatctgcactggctggccctcctgacagccccaggcccccgtgccctctgcc

SEQ ID NO: 9335 - DNA, 852 bp, Artificial sequence
  DNA replication origin
ttcctcctctgcaaagcaggggcgcgggttgctgggtgcccggagagcagggagggcgcctgtgggccccggggcaggtggctctgtgtggtgcacctggccgggccagcgggatgtggggggctgcctggcaccagggtcacgagaccctgtcctccagggcctgaccatcaagcctctggtgcagtggctgaaggtgaagaggagcgagcaccgggaacctcggctcaacgagaagctgcacgggcgcgtaagtgcggggctggggggcggggggggggcactgcgtgttcctcggggctgggctgagaggggagaggaggctgcgttggtctggggcttggggggtggcggagggcaccgtgtgttccttggggctgggccaggaggggagaggaggccgccatacgtgcggggctggggggcgggggggggcactgcgtgttcctcggggctgggctgagaggggagaggaggctgcgttggtctggggcttggggggtggcggagggcaccgtgtgttccttggggctgggccaggaggggagaggaggctgcgtccaggccaggggcgtggtgaggggggctggtgggttcctcggggctgggccaggagtggaggggcacctcatgttccccggttggccgccccgagacgctcatgtctttcttcccttgaaaggctttcgaccacatcctctcggccatcgaggacatatccggacagatcgggcacaattatctcagagacaagtaagtggctgggacggccccggcggtgtcgcacagcccggcttctggaaacatcctccactcggaagaaccagaagccacatgcataacaactgtttg

SEQ ID NO: 9336 - DNA, 988 bp, Artificial sequence
  DNA replication origin
tcgccccgccggacccaggagggtgtggagaagctcgggttggggtccccctggctggctcgccccgccggacccaggagggtgtggagaagctcgggttggggtccccctggctggctcgccctgccggacccaggagggtgtggagaagctcgggaggagggcgtggagaagctcgcgtgtgtgggagggactcacgcgaggatggccgacagcgacagcatctcggacgtcaggtaggacaggtaggagatgatgaacacgaagccgggctcgatgatacgcacatgcttggtgaagcgcgtcaccagcgacagcaggaaggcgaagaccacccccaccagcgtgccccccaggctcaccacgaagaaggacactgggtagaggacgccctttgtggccgtgccggccttccgggcccttccttgccaggggccgcctggtgaccccgcggaagtgccgggagcccgggaaacgggggtggatccctcactctcttggagatcgggcctggtctcagcaccagccttggttcagcaagtggggaggaccctcccgtgcccctgggagcctggccccaggccctatccggccgtctgtctcaggaagacctggctgccctcatccctgttctgggaaacacccaggaacccccaggaccatgtcaaatcgtgtgtgaatcgctctggacggggacgtgacgtggacagaagggcccagtgtagcagctttgagtgcaaagctttttcctgcatgggctgcaggccagagaagacagttggccccagaggagacacggccgcccactccccctgacccacagctacacacctatgcccttcacgcagtccacgccagtcacgttgtcacctcccagcgccacgaaagattcaaacacattgtacagaacctgcagggaaaacgggcagggcgttgggtggtccttggttagtgccaccccctctccggggcccgggcctcgctggac

SEQ ID NO: 9337 - DNA, 1252 bp, Artificial sequence
  DNA replication origin
tgtgactttggacccacagttactgccacccattcctgagttcctaaaaaatacatgagtggccgggtgcggtggctcacgcctgtaatcccagcactttgggaggccgaggcaggtggatcacctgaggtcagcagttcgagaccagcctggccaacatggtgaaaccccgtctctactaaaaatacaaaaattagccaggggtggtggcacgcgcctgtaatcccagctactggggaggctgagacaggagaatcacctgaaaccaggaggcagaggttgcaatgagccgagatcgtgccatcgcactccagcctgggtgacagagtgagactccatctcaaataaaataaatacgtgaatagcaaacaacaaaatcccataggaaccacgtaatctgccagggccgccatgacaaagtaccgcaggtgcagtgccttgaacgacggtgggtgtcagtgtggtgggtgtcagtgtggtgggtgtcagtgcggtgggtgtcagtgcggtctggatcacggtgtcagtgtggtgggtgtcagtgcggtgggtgtcagtgtggtgggtgtcagtgcggtctggatcacggtgtcagtgtggtgggtgtcagtgcggtgggtgtcagtgtggtgggtgtcagtgcggtctggatcacggtgtcagtgtggtgggtgtcagtgcggtgggtgtcagtgtggtgggtgtcagtgcggtctggatcacggtgtcagtgtggtgggtgtcagtgcggtgggtgtcagtgtggtgggtgtcagtgcggtctggatcacggtgtcagtgtggtgggtgtcagtgcggtgggtgtcagtgtggtgggtgtcagtgcggtctggatcacggtgtcagtgtggtgggtgtcagtgcggtgggtgtcagtgtggtgggtgtcagtgcggtctggatcacggtgtcagtgtggtgggtgtcagtgcggtgggtgtcagtgtggtgggtgtcagtgcggtgggtgtcagtgtggtgggtgtcagtgcggtctggatcacggtgtcagtgcggtgggtgtcagtgcggtctggatcacggtgtcagtgtggtgggtgtcagtgcggtgggtgtcagtgtggtgggtgtcagtgcggtctggatcacggtgtcagtgcggtgggtgtcagtgcggtctggatcacggtgtcagtgtggtgggctcctgcgggaccccggtcctggacttgcagacggtgccttcccgtgtcctcacgtggccgtccct

SEQ ID NO: 9338 - DNA, 825 bp, Artificial sequence
  DNA replication origin
taccgtcctccaacaacgctcctcatgagaaacacgtgtcccaggtatcgctgtgccccctggggcaggccgctccccaggtgacacggatgctggaggcctgcgctcagccttggggcccagctggtcaaagctgggtgctgcctgaggttctggaacagagatgcccatggccggcaggtccatcccattcctgggagtccaagagagctgggaggctgcaactgatctctgcagaccagaggccaagccctgtggagcgtctcaaggccaaacgtgccccatgggaaagggtcgacatggcagtgctggcccgggggctgtccgggcagtgtggggacaggccctgcgagagcttcaggcatcagaggcccttgcacaggcaaagcacgtggtggagaaaggcctggaacatgcggtctggtggcatgagccctcctggcacggccgtgggcaactgtccagacgggaaggctgccggccggggagtctgaacgcggccgaccccaggacatccatgggggccatcactgccctgggggcggccgtgccaggaggccgcgtttaaagatgaccttgaaggggattcgtgtcctgaggcctgagtttggaagaggagaaggcttgtgtggttcccgttccaacatggaactttaactccctgaacgctggttcttctggcatctgtcacttcctcggggtgttgtgacactggccagaggctgctggggcttaggagctcacagcaaactcggggtttagtcaccgcagagatgaccctgatctgtcccctcccaggcgccagcacagaaacccctggccagg

SEQ ID NO: 9339 - DNA, 897 bp, Artificial sequence
  DNA replication origin
tcagtgtgaaggacgcgatgtggtcggccgcccagacgatgccgcccagcaccaggcccagcacgatgagcagggcgctctcgggaaccacgctggtgaccttgtgggacaggtggaaccctgtgggggaagggagggaggtcagggccgggctgtgagggaggggagggaggtcagggccgggctgtgagggaggggagggaggtgtggggactcgtgggggaggggagggatgtcggggcagggcctgttggggagggaggtcagcggggactcgtggaggaagggaggaaggtgtggggactcacaggggaggggagggaggtcggggtgggacccgtgcggcagaggagggaggtcagggtggggccttgggagagggcaggtaggtggggggagcccatgggggaggggagggaggtaggggggaacccacaggggaggggagggaggtcggggtgggacctgcgggggaggggagggaggtcagggcagagccctcgggggaggggagggaggtccaggtgatcaggtcccacagggctcagagctgcaggcatctaagacctcccccgacttttcagggagcccaagagggctgggaacgaggagagtgcaggggcagctgctggagcccccagaagggagtcagttggaggagggagccggtgctatggggtggaggcccgtgctggatggacggtggtcgggggggggcctctgacctgccgccccaccgcccggctggttctggtcccccggacccccaactcgctctgtgccttttgccttggtgaccaaggtctgagctcaccctgtccctgacgttgtggccagagcctgctcccacttgaggctggctgtgtttcagacccctccggaggggccccatggagg

SEQ ID NO: 9340 - DNA, 1914 bp, Artificial sequence
  DNA replication origin
ctccgtcgcccaggctggaatgtagtggtgtgatcttggctcactgcagcctcaacctcccaggctcaggtgatcctcccacctcggcctcctgagtagctgggactacagttgtgtgccaccatgcccagcagagtttttgtatttttttttgtaaagatggggtttcgccatgttgcccaggctggtctcgaactcctgggctcaagggatccacctgccttggcctcccaaactgttgtattgggattacaggtgtgaaccactaagtccagccttcaaggaaaatttaattgagtgcctttatttttcctgctaaaaaatttagcaggaaacatgagcaggaatggctttgttaagtataacacaaaactcagaagccataaaacaaaagaccaataaatttaactataaaaagaaaagacgttcgcatggagcaaaatgacagaagacaaagtggaaagatgagagcaacatttttgaaagtgaaaatctacctgccgctgaagacataagcaaaggctggattttccagcttacgaagaacctcgtgtcaataggaaaggatcagtgcccggcaggggagcaagccgacactttcacagaacggggtcgttcacgcgtcacccacaggtcgtcagaggctgttaggttgggcccctcaggagatgtggctcacgcctgcctggccggtggggatgggtgcggctcctcccccgtgggcaggtgggacggcatgtcccatgcaggaggacacaggtgagctctcaacacacacacaccctgaagactgcaggagctgccctcggacgccaccgcacatgggaaaggcgtgtccaacaccctttccaaccccggatggcagaatgttccaaaccgccgccctcccacctatgcggcgtttgtgcgtatatatgtatattttctcagtaactaccaaggtcagaggatgttttctgtggattttaagggcttacttctgagcaggagtgtttggtctgaagccagcctgtccctcacccaccagtgtcccagttaacaggcttttacagtaaccagcggcctcactggagcgtggggagggtcggcgatggcgcggggagtggagcgtggggagggtcggcgatggcgcggggagtggagcgtggggagggtcggcgatggcgcggggagtggagcgtggggagggtcggcgatggcgcggggagtggagcgtggggagggtcggcgatggcgcggggagtggagcgtggggagggtcggcgatggcgcggggagtggagcgtggggagggtcggcgatggcgcggggagtggagcgtggggagggtcggcgatggcgcggggagtggagcgtggggagggtcggcgatggcgcggggagtggagcgtggggagggtcggcgatggcgcggggagtggagcgtggggagggtcggcgatggcgcggggagtggagcgtggggagggtcggcgatggcgcggggagtggagcgtggggagggtcggcgatggcgcggggagtggagcgtggggagggtcggcgatggcgcggggagtggagcgtggggagggtcggcgatggcgcggggagtggagcgtggggagggtcggcgatggcgcggggagtggagcgtggggagggtcggcgatggcgcggggagcactgtgagtccccagggcacagagttgcgttgttgtttttaaagacaaagctggtccctgtgtccctgtgtccctgacttgctggcccgcggttgtctggggtggcttcacaacggtggtgatcgctgtgaacctaattttggaagactgtggctgaaagaccctaaccctcaacaaaaagaccccgggccaagtgtcggcagccaccaagggtgagggcgtccaggagctccgagactcccgctgcttc

SEQ ID NO: 9341 - DNA, 1177 bp, Artificial sequence
  DNA replication origin
acaggcgcagggcacagcctcctcggcccagagctgttgggcaggagctgcagggtggctgggacgcaacaggcagcgacatcttcaaccttctaccagaagagcctcaggtccaccgcactgactgcggcaaccccggccctgtgggttgaaagggcagagggtgtctgaggccttaaggaaatgaagagaatagaactcgccccatggcacacactgtgagggaaccaggcggtgtgggaccctcccgagacgcactatgcagagcctgggctcagccacacaactgcagaagccaaaccacgagaagctccacagacggaaccggcttccggcaccactgggacacgccacgaggctcccccagctaggtgcacacacggcatgcgactggcgtggatccctggcgagaatggaagggggggtggcaggagacggggacgggaccctccagggacacaggaaacacacaccaagcacggagaggccaggcgggccggtgtggacagggggccggtgtggacacggggccagtgtagatggggccagtgtggacggggctggtgtgggaggggctggtgtggatgggtcagtgtggacacagggccggtgtggacatggggtcagtgtggaaggggccggtgtggatggggcaggcgtggatggggctggtgtggacatggggctagtatggatggggctggtgtggatggggccgtgtggatggggccagtgtggatggggctggtgggtgtggacggggctggtgtggacggggtcagtgtggacacagggccagtgtggacatggggtcagtgtggaaggggctggtgtggatggggcaggcgtggatggggctggtgggtgtggacggggctggtgtggatggggccagtgtggacacagagtcagtgtggacatggggtcggtgtggacgaggctggtgtggacacgggccggtgtggacagggccaggccctgagtccgcctgccacagcccgtgtggcttccacacaaggggacaaacctggggacacgcaggccctcaggtaactgattgccgaggctggagagtcacagctaattaagcacacaatggcttggtggcctgatggttacgacaggggacagacgcttttagttctaattacaaaccctgtgcctggaggaggaaggg

SEQ ID NO: 9342 - DNA, 1206 bp, Artificial sequence
  DNA replication origin
ccctgcggcatctccatcccgggcacactatgggctgtgtctccctgcggcatctccatcccgggcacactatgggctgtgtctccctgcggcatctccatcccaggcgcgctatgggctgcgtctccctgcggcatctccatccccgggcgcgctgaggcctgagtttccctgcggcatctccatccccgggcgcgctgaggcctgcgtctccctgcggcatctctatccccggcagactgtgggctgcgtctccctgcggcatctccatcccgggcacactatgggctgcgtctctctgcggcatctccatccctggcgcgctgaggactgcgtctgcctgcggctactccatcctgaggcctgcgtctccctgcggcatctccatcccgggcgcgctctgggctgcttgtgattccatagctgggctccgcgcctgagcactggtcaccccttcccctggctccactggtgtgaggggcgggcgccaagaagccgaatgggaactggagccacatgggtgtgggtgggcatttgggtgtagcggggagattcaggcgtctgtggggtggagattcgggcgtctgtggggtggggattcgggcgtctgtggggtggagattcgggcgtctgtggggtggggattcgggcgtctgtggggtgaggattcgggcgtctgtggggtggagattcgggcgtctgtggggtggggatttgggcgtctgtggggtgaggattcgggcgtctgtggggtggggattcgggcgtctgtggggtggggattcgggcgtctgtggggtggggattcgggcgtctgtggggtggggattcgggcgtctgcggggtggagattcgggcgtctgcggggtggggattcgggcgtctgtggggattcgggtgtcgactgtggggtggggattcgggcgtctgtggggcagggattggggtgttgggggttgaggatggggtgccagtgtctttggatccccccagaatgggcgcggtggctcacacctgtaatcccagcactttgggaagccgcggctggaggatcacatgagcccaagagttttagaccagcatgggcaacatggtgaaaaaaatctctacaaaaaatagtaaaattagccaggcctggtggtgctcgcctgggcaacagagctagacactatttaagaaaaaaaaaacggtgaaaccccgtctcta

SEQ ID NO: 9343 - DNA, 1294 bp, Artificial sequence
  DNA replication origin
ggatcacttgagcctgggaggtggaggctgctgtgagctgagatcgcaccactgcattccagcctgggtgatagagccagatcctgtctcaaaaaaaaaaaaaattatctcagaagatagagaaaaaaagacacataaagaaaatgtagggccaggcacagtggccacacctgtgatcccaccactttgggaggctaatggtggagcggatcacttgaggccaggagttaaagaccagcctgggcagcatggtgaaactctgtctctactaaagtaaattacaaaaattagctgggtaccgtggcgcatgcctgtaatcccagctactcagaaggctgaggcataagaatcgcttgaagccaagaggtggaggctgcagtgagctgagctcatgccactgcactgcagcctgggcgagagagtgagatggaaggaaggaaggagggagggagggaaggagggagggagggagggaaagaaggaaggaagggagggagggagggaggaaggaagggtttgagggcagagtaggctggtcccatgtgggccgaacgtggaaccctggaactcaggcgtgggcagaagatggagaaccgcggacaggcatcaccacagccattcccaaaaccaagcttgcggttccagactcagtgaactgccagggacctggcacagcaggtgaagttagctgtaccccaaagcatgtcagggagtgagaggagaatggggtgcggggagggggaggaggcctcctgcaaagaaccaggaatgaggaaggcctccgtgtctcgcatggatgccagaagaagctggcacagggcctgatgatttggaagggaaaccagttcccgcggcgcgaatcaagcaaggcaaaggcatctcagaggggccctgcgggcagccggcgttgtccctcctgcagtcagcgctccactgccccacactcagctggcttcccagggcctgagcaaggatgggggaggcttcgggagaagaggggctccaacgatgtggaggagaatgtgttggggagacaggtgctgggctggaccggggagccgctggaggcctgggggcattggaagcaggaggatccgtgggtgcttgggcccctggcggagcgcggcagcttgttgggagctgggagcagagccacttactgtgagctcagagaggctgccaagagcagcgacagagaccatcgttccctccaggcaaagccagatgctgtgtgggaaaggaaacgtggccgtacgctgccacggagctctaaggtgttcgtgtgggacggaag

SEQ ID NO: 9344 - DNA, 1421 bp, Artificial sequence
  DNA replication origin
cagacctcggaagatgcagacacaccctgggcaggccctgacttggtgctggaactgcccaacctggcaccctcctgggacacagaatagaactcgggtcacaggcagccaatacccttagcataccaaccacttttaggagcttgaatggtctcatccgtcttatcgaggtagcccaaaatgctggactttgcagcagccagcgctctgggcaatggaggagctctctccagtttaatattcattcaataaacattcagtgcccatcacgccctgtaggcagtggggatcccacttcaaatgagacccaaatatcccatggggcagcactcctgggcaccaaggaccaaagacagtcaggaagccatccctggggcagagggggcagccagccctgtgggttagggggaagcatgtccagggaagggatagccagagcgaagtgcccgaggcaaaaagtgtggatgagggttagggggagagtgtgtgtgtgtgtgaggggcagggggagtgtgtgtgtgtgagggggcagggggagtgtgtgtgtgtgaggggcagggggagtgtgtgtgtgtgaggggcagggggagtgtgtgtgtgtgtgtgaggggcagggggagtgtgtgtgtgtgaggggcagggggagagtgtgtgtgtgtgaggggcagggggagagtgtgtgtgtgtgaggggcagggggagtgtgtgtgtgtgaggggcagggggagtgtgtgtgtgtgtgaggggcagggggagtgtgtgtgtgtgaggggcagggggagtgtgtgtgtgtgtgaggggcagggggagtgtgtgggtgtgtgagtggcaggggttgtgcatgggtttgtgagtggcaggcggtaatgtgtgggtgtttcaggagcagcgggatgtgtgtgtgtgtctgaggagcaggggaccctgtggaggataagcaggagcagcaggtggtccttgcactctggccgtgtgatgaccatgttcagctctgggttgctccctcacattggcgagtgcccttacaagcctgagctctgggctccctgttctatccgactgccagccttcccttggggctggctgtgtgtcaagtccatttccaaagtgtcgtgtcgtcagtctaggaagaattgagatggagcctggggccgtgtccaggtggagtcaggagagcagccagggtgcccaaggggttcccgtgtgtgcaccgtccacaggggcctgaaaggaaggagggaggggcgggcagagcaggaggggctgtgggaattccacaaatggggagcggcacatcctgggaatgggcctggccgtttgtgctgctgtgctgggggtggttagggctgtgacagagactccaggctgatggcatggactctggggtgggagaccgagaaatctccccatggactctgggg

SEQ ID NO: 9345 - DNA, 872 bp, Artificial sequence
  DNA replication origin
acacgcggcctgaggctggtgggccaacagcagcacctgttccttgcccaggctcctgggccacctgctgaggccccagccccagtgtttgcttgaggcagctctggccctctggccatcctctgtcccaagctgcctggagtagaaatctcctgggatcaacattgctgtgggtttcagggtacccggactcttatttccccaaccaggttacaaatggcttgaagaaggctggggctgtgagttagaaactctcaggatgtgtgagaaattcaacaaatgtttggaaaagcaacaggaatggcagctcttttctgctggaagagacatttctgttcgtgtaacttgagactgaaagagtgtggccaacccctgaccattttaaacaacaaaatgtgccaagcagcttagtaggttcagaccccagtccgggggctgtgggcatgtggaggaggctgggtgaaactggagaagttcccgctgtggtgcaggcttgggccccggtgtctgtgaaggcctggacctgagggtcctctgggaacacaggtcgtgcacctgaggctggctgcacaaggaggacggtctgggccagtggaatctgagaagtccagagttcacagggaaggggttgggggaggaagcacacagggagggctgggggctgtgttcaagaggtgtggctggcagagaggggatggagggtgggacaccctgggggccaatccgggcagacccagagcagacctcagctgtcactgccggggctgcagagtgcacagtgggttgaggggacgacagggagcgtaaagggcaggtctggagagggtctgcgcctgtgggataccgcgatgagctcccacagctgcacaggg

SEQ ID NO: 9346 - DNA, 1436 bp, Artificial sequence
  DNA replication origin
ccgggggcgtcgaggtggagcccggcggcgcgcacggcgagagcgggggcttccaggtggtcaccttcgagtgggcccacgtgcaggatccctacgtcatcgcgctctggatcctcgtggccagcttggccaagatcggtaagtggccccggggtctccggatctgcccgcggggtgtgcggccgcctctgctgggcctgggggcttcgttgtggccgcgcgcatcaggtcggagccgcgcggcggccgcccgggagagtccggctctcgggtccagcagagcgagactcgggagcgactctggccgcgctaagccgcccctgcgggtcccgaggtctcccctccccggcgggggcacagcctcggagccccggactcccggctcccgggtccctgtggggtctccgccccgcctccgctccgagccccgcagactgcaggctgctcgcgcccagggagtccccggggccgggtttccttcggggttctcaggctttttagagaaacgtccttggagtgatggcgttttttcgtgagttacaagggcagaaaagaaaagcggtgctacccgcatgaaacccagcagaatcctccctacaggcgcagcgttcccattggcgggcctccttttttttttttttttttagaaaatcccggtcggtcagatttctcttcttcttaaccggcgccaatgaaccagtaatgtgggcacggcaggtagctcctggcaaggtgacaggaaggtcagcttcctgaggagctcgtggggatcaaagtttcatgtgttggtccacagggtagggtctctccaggggtggcagggaggtggtcactcgtgtggaggggggattagggggcccgagtggggccaggagaagcaagatcagagcagcaggcgccgcggcaggtttccagagcagctttggactggggcgagaggaggtttcgatgctggggccgaggaggggcgcccacgcaggacaggggagggacaggctccggggagaacagctgagaggaccttggccttggtggaacctggtacgcccagcaggcttgattggagaaggcgccttttccttcagtgacgcctgccgcctgccctatttatgccagggtctcccctccccttcaggccccttgtgtgtttgctttctgtctcataagggctcttctgagccctcccgcctcctcccttctccgcagcctcctcctcgccctggtgtctttcagctccccgccgggctgcctgctctccaggctcaggctgtcctccctgggctttccactgggggcttgggatgctggccgggggggagtctctgaggctggctgcctcctacagttgatttccttgagaagggcccctggggcatcagggaggtccagactcaacctgggctctgcggccgcccagtcctaaagctcaccctgct

SEQ ID NO: 9347 - DNA, 1418 bp, Artificial sequence
  DNA replication origin
ctccgatgctcccacctcgcaagaccatactagtggccagtcacacacttccactcccccggtgccctgtccagaccctgcagtggcccaggccagggctgccctccctccacgccactcagcagccgagtcaccaggcgagcaccatctgaatgcaccttccctgtgctacacgggccacttccattagcatgaaactggggcccttgcagggtgaagtcattgaactcagcactgtcctcctcaggcctccgcagcccccactcagatgtcagaagacacatccatcctccatctgcacccaccccaccgcccacctgccctttgtccacctatctgtccttccatccatctatcatccatccgctcagccactatcttgcgagtgctattgtgtgcccagctatcttccaagctcctgggatgtatgcatgagccccttgctcgtggagcagacattcccagggtgagggcagacagctcaaggtcaaagccagcagcccccagggctgggaggtgagctgattcccggagccaaccgagtaagcaggggaggcgggagcttagctgccacagttgtgagctgagtgggtatcgggtgggaccagaaggtggcattggagccaagcccctggggagctgaggaagggagcacacaagagccgtccaaacagagggagcagggcgtgcaaaggccccgagaggcgccgattgctggtgtgggccgtggagtgcatgggggtgggggtcaggcagtggctggggtctgagctcccgggagacgttgagcctttcctctgagagggagggtcccaataggagggactgaaggggcaggtagagggccgagcaggagcctttgcaggtggctgcaggctcccagaagccgctggttttgtgcacattttgaaagtagagcagatatgctaagagcttggaaaccttgtgagcgaaagaagtccacctgcgtcccaggtctggggctggaaggctgcagggtgggcttggaggaaaacaggggtgtggtttgcacagtggagcctgagatgcttaagagagccagtgctgccggagcgggctgtgggcagaggccccgcatccgtgtgaagccctgggggtatcgaattgttttgggcggaggtctaaaggcaggggatggggcaggggagaccacgggggcccctgggctcccatctcagagcctggggtgggggatgctggctggcgatgggaggggcagagagacttaccagcgcaccacgcaaggcctgggcgcccccgagttctggtaagtggccggtccggctgtggaatgcaggttcctgctgaagacaatagcgaggggctgtgtgaagacacacctggggcccctgtgcacccttgggccgccctgtggggtctgcgcagccccaggccct

SEQ ID NO: 9348 - DNA, 1122 bp, Artificial sequence
  DNA replication origin
cagaggcgtccggggcgggcggggcgggcggggcgggagggacaggagcgagagggttcgtgcgctcagcgggacggaagcggttgcggatgcacatgcggatgcggagagaggcccatggcgagttcggcggcgtggccggccgggctgtccccgagggcggaagggaggacgcgcgaccccgacgggcactgacgggccggccggggacggtgctgggagggcctgccgggccttgccaggtcccccgcgccattgccctggggtggactgcggggcacagagactctcctgcggcgccgtccccagcccttcgcccctcccggcgcagcccccggcccctgagctccccacccaaccccggggcccctgagctccccacccaaccccggggcccctgaactccccacccaacccacggggggagctgccgcttcagacacaggccctgagctacccccgcaggggtgtcacagtgggggggtctgactccaacccgggctggtgccctcagggagccaggaaaggtgagtctccgcgggtgaggagaccccaggcccaacacggacaggacggaccagagcgcgggcctcaagtcctgcaggccctccagctccaggctggtcaagagtctgtccatctctgaagaagaggaaaggtcccacctgaggcctcagaggccacccgggaagggaagggctgagctctaatctgcttttgagaaagacatttgtatcccccggatccaacaaccaataagagtggcattgacgggaggtggcatgacgggggggcgcggtggtctctttcctggaagggcatctcccagaggggcctcttgcctgaagctgagatgtgcctggcacacagcaggtgtggaccaagggaaggccagcaggtgtggctcccagtggaataaaaccttccttaagaagacctggcccctgacaactttgggttgaaaaataaacttagagtgggcagtgatgcctgtctcctgcctggcttcaagcattggaagttacttaaaaacttaactttcttctcttaaatattgttaacaacagtatgaatggatgcgcctcttcatccacaagacactttcacaagccgtatgtggaa

SEQ ID NO: 9349 - DNA, 1053 bp, Artificial sequence
  DNA replication origin
gtcggggtcgcgcgtcctcccttccgccctcggggacagcccggccggccacgccgccgaactcgccatgggcctctctccgcatccgcatgtgcatccgcaaccgcttccgtcccgctgagcgcacgaaccctctcgctcctgtccctcccgccccgcccgccccgcccgccccggacgcctctgctgcggtgtcttagcggtccgcggacaggcgacctcccccgtggacgcccctctcccggccgccgccccgccccgcgccccgctcccccgcgcccctgggccgagacctccggtcgcctcgccccgtctccggccacgaaaggcgctgcggacctggcggtcacgcgcgaagccagtggcctccccccgcccggggctccgggatccgggcaccaacagacccggagggaccgcgccgccccgggcaaacccgcccaccccgttgcccaacacaactggaagcactaaaaccgaatccaaccgtgtgcagagaccagcccagcgctctgggaggcccaggcagaaggatcacttgaggctgggagctcgagaccagcctgggccacatagtgagaccctgtctctaaaaaacataataaaaaacagtagccgagtggtggcgctcgcctgtggcccccgcatttcgggaggggaaacccttgggaaacgtagaatagaagcagattcctttaagctgataggtagcatctgtaaggccggcaggagcaggtgctggcactcaggaagcctcctctgaagcaggaacgtttgccacctgcccccaccctcagcctcatctttggagcaggtgctggcactcaggaaggctcctctgaggcaggaacctcggccaccggcccccaccctcagccccatcttcaggatgcaagacagctcccgcctgtaggcagcacagaggtcttcctcgcacactctcagaaccggcaagagttagctcagcaaggctgctggctacaaagccaacaagccaccgtgaactgggtttctatgcacgaacaacacactttttagaaaatgaaagctaat

SEQ ID NO: 9350 - DNA, 1282 bp, Artificial sequence
  DNA replication origin
cagggcctttcccatgccatgtacctcagtgcgtccctgaaactgtcagagtgacctgagtgacctgtgtcaggcggtgaccgcccagcccttgcacctcagacctcctggatggagaggacactcagctcacagggcagtctgacgagaagcctctggagctgtggaatggctcaggctgccggactgggggccaggtccccttcggcctgaaaacagccgccatctcagctggccgggagccccgccttgcctggagttcagtggtatcaggccaggctcagagcaaacacggcctgaaagccgtgacaacgggctgccgtgctgggctttgtctgagctgacgctcggggacttagggaggctctcgagttcagagccagggcccctcctggcacagctcaaagtgcatcgtgctcccggaggcccccattcatgggctgagcaaagggctcgggggttggcgaatttgcccccatccgtgggggcgaacacagctctgttggcgcactcactgccgacagcatttcttctcaaaagaatccaagagatttctccaaagaacagcagctttgttcatgggaataagttcagaactcctactggtgtgctctgaaaactggtcattcatgttctcatgcatttgccgttatagccacattcttgagtgtgagcaaaggctgggcttgctgtccctccagacatttggggaattgggggccacgctgagcccaggggtgaagcagagcccagtggtgctggggacccactgcaggggcaggcccatgccttcagctgggttggatcacagcctggccccctcctgacgcagcctcaaagagcctgagaggtgggcacctgtggcggcaggaggagggccggttgctgcctccggatgtgcggggcactcagctcctctcacgtctgtggaacctccacctgttttgctttgaacgtggagccgcctagactggcagggctcggagcagccagaattggccccggtcaccctggaggcccagagccatcgggtgggggaagggctggtttgtcacagccgtctcggcctgtgtggagctctccctgcctggggaggctgcgtggcctcgctcagggttctgttcacactgctgggcgggggccaaggtcgttcacaggcagaatctctgacccgagtctcagcaccaagacccctgtggtcaccccttcaccaacgcacaaacagtggacccagggccctggggttggtgatcttgtggccagggggttctgacctcctcag

SEQ ID NO: 9351 - DNA, 1068 bp, Artificial sequence
  DNA replication origin
cggggtggggccccagcgatggcatccgggacggtgcagtctgggaggggcagcgggacctcggaagggggccttggccgcaggtgcccccggagcacatttcaggccccacagtccacacctctcacacaagccccccaagcacggcgagcgggcagcacggggctctgtgtgcacacggcagactgagcactgctgggcgctgccagggtcacgttgcccacaggggagcacagacacccacgggaccgagcgccggctgcagggcgcgtgccagcggcccgcaatgatgtccgactgcaaagggacaggaggcctcaggctcactggcctctgggttccccacaacgacccccaacggggaggcctctaggttctcaactgggaggaggggtcctgcccctggggaggcgggggcaagggtgaggtgagggtcccagaaggcaggggccgggggcaggaggcggctgaaaccagcgctctgctggggtccagcctggtggtcccagctgtccacacggccttgctggtggctggttcagggccctcccacagggagatgtggcttgaagacaagggccccgccccactgcacatctcccaagccatcctcagggcccagcttactaccatctgtggcctccgcacacctaaaatccaacacacaccccaagaagacaggggccctgccagggctggagccagggacagctgggggccggaagtgagcatgtggggtcctgctaggtcccagggggatgcggagggggctgcaccacccacagcactgctgaggaatgccattccctcagctccgcgtccaccccgggtcccccttcctatgggggtgctgacctgagtcctcacttccgctctgggttttctcgcaggagtctggacaagcagctggactcgggcaggttgggtcaactcaggatgtcctcgtgcgtgagctacagggtcacaggccagggtcagaggccaggcctgaaggggacacctggccccgctcggacagggaggagagcactggtccccagcagtgtcccagcagccagcctccctcca

SEQ ID NO: 9352 - DNA, 1496 bp, Artificial sequence
  DNA replication origin
cacagagaccttgtaggatggggcccatagccccccaacgtgctcccccaggcacaggctgtcctggggtcaatcgggctgtgagggagacttgtcttgtgatggacgtgaaccctaacttcctcccagaaaaggaagccaccaggttcatgggatgtaatacggagcaagagtcaggatgctggagtgctctgagtcaccgttgggtggccactccccacccgcagcccacctgggcagggcgagccagggacgcaggcgacagctttgggtggaagacaatatgcaaatcaggacatttttcctcgtggttcagaagtgcttccttgacagggcttcagccaagccccaggcagacgccagagccgcagatgcagaggcccaaacagcctttgcttgccaggaaatgccccctggatgtttagatttcgggaataatattttcaaaaatcaatctctcatgcgtctgttgtttcggctgtgacaacaagggtgttttccttggatgtgtgcacagggcccccagctccctgcagcagagtaagccctcggcagagacaaagtggactctgtcacagccctaacaagccgaccacctgctggctcgccacttcctagccgggcctttctccctgagtgttgtgtgttagtgattctgtgactctgcctttctccctgagcgttgtgcgttagtgattctgtgagtctggcttttctccctgtccgttgtgtattagtgattctgtgactctgcctttctccctgagcgttgtgcgttagtgattctgtgagtctggcctttctccctgaacgttgtgtgttagtgattctgtgactctgcctttctccctgagcgttgtgtgttagtgattcggtgagtctgactttctccctgaacgttgtgtgttagtgattctgtgactctttctccctgagcgttgtgcgttagtgattctgtgagtctggcctttctccctgagcgttgtgtgtcagtgattctgtgactctgactttctccctgagcgttgtgtgttggtgattcggtgagtctgactttctccctgagcgttgtgtgttagtgattctgtgagtctgactttctccctgagcgttgtgtgttagtgattctgtgactctgcctttctccctgagcattgtgacttagtgattctatgagtctggcttttctccctgagcgttgtgcattagcgattctgtgactctggcttttctccctgagcgttgtgtgttggtgattcggtgagtctgactttctccctgagcgttgtgtgttagtgattctgtgagtctgactttctccctgagcgttgtgtgttagtgattctgtgactctgcctttctccctgagcattgtgacttagtgattctatgagtctggcttttctccctgagcgttgtgcattagcgattctgtgactctggcttttctccctgagcgttgtgtgttagcgattctgtgagtctgacgctgcaca

SEQ ID NO: 9353 - DNA, 3111 bp, Artificial sequence
  DNA replication origin
catggaatattcacaggactgcagtgtgagaaggcagcaccgccccggcgcccgcgaggaagccgaactgctcataagttaagcagccccagccaggtcacggggcaaggaagccgcctgcgacctcggaaacccctggttcatcccatgacccacccccgttcatccggtgacccacccctcaccccggttcatcccgtgacccacccccccgttcatcccatgacccagccccccaccccggttcatcccatgacccagccccccaccccggttcatcccatgacccaccccccaccccggttcatcccgtgacccaccccccgttcatcccatgacccagccccccaccccggtttatcccgtgacccaccccctgttcatcccgtgacccaccccccgttcatcccgtgacccagcccccaaccccgttcatcccgtgacccacccccaaccccggtttagcccgtgacccaccccccccccgttcatcccgtgacccaccccccggttcatcccgtgacccagcccccaaccccgttcatcccgtgacccagaccccaccctggtttatcccatgacccacccacggttcatcctgtgacccgccccccgttcatcccgtgacccaccccccacccctggtttatcccgtgacccacccccgggtcatcctgtgacccagaccccaccctggtttatcccatgacccgcccacggttcatcctgtgacccgccccccgttcatcccgtgacccagccccccacccctggtttatcccgtgacccacccccgggtcatcctgtgacccagaccccacccctggtttatcccgtgacccaccctcgggtcatcccgtgacccagaccccacgcctggtttatcccgtgacccacccgcagcaccagcacctcagtgctgcttttgtatttatagtcgccttgctgtatgttgagcgtaattttacaatctgcccaaaattcctttgaagagcagataggtgtgtacaccctaaatgaataaaatacagtgcgatttggtgaaaggtaacggctcgtttattttccttgccataaaaatgctacaatcaccctgaaggtgaacctggcaagcggcataggggccagggcctcactcggctctcctgtgcaccccgccccggtgtgatgtttggagatttgcatacgaggctctcagccaggaaggaaatggccaggaatcccagaacgcggcactgattttccccatgttatctgactcctgatattccccgaactgtgtgaccactgcctgtagttcagtctgtaatcaaatactttgtaaagactgtacaagtgatcccagacccaaaaggaaacgtcagaaatgcgaggctgtaggcttgttagagatgggaggctgttaggtttgttagagaagggaggctgtaggcttgttagagatgggaggctgttaggtttgttagagaagggaggctgtaggtttgttagagatgggaggccgtaggtttgttagagatgggaggctgtaggcttgttagagatgggaggctgtaggcttgttagagatgggaggctgtaggtttgttagagatgggaggctgttaggtttgttagagatgggaggctgtaggtttgttagagatgggaggctgttaggtttgttagagatgggaggctgtaggtttgttagagatgggaggctgttaggtttgttagagaagggaggctgtaggtttgttagagatgggaggctgttaggtttgttagagatgggaggctgtaggtttgttagagatgggaggctgtaggcttgttagagatgggaggctgttaggtttgttagagatgggaggctgttaggtttattagagatgggaggctgttaggtttgttagagaagggaggctgtaggtttgttagagatgggaggctgttaggtttgttagagatgggaggctgtaggcttgttagagatgggaggctgtaggcttgttagagatgggaggctgtaggcttgttagagatgggaggctgttaggtttgttagagatgggaggctgttaggtttattagagatgggaggctgttaggtttgttagagaagggaggctgtaggtttgttagagatgggaggttgttaggtttgttagagatgggaggctgtaggtttgttagagatgggaggctgtaggcttgttagagatgggaggctgttaggtttgttagagatgggaggctgttaggtttattagagatgggaggctgttaggtttgttagagaagggaggctgtaggtttgttagagatgggaggctgttaggtttgttagagatgggaggctgttaggtttattagagatgggaggctgttaggtttgttagagaagggaggctgtaggtttgttagagatgggaggctgttaggtttgttagagatgggaggctgtaggtttgttagagatgggaggctgtaggtttgttagagatgggaggctgtaggcttgttagagatgggaggctgttaggtttgttagagatgggaggctgttaggtttattagagatgggaggctgttaggtttgttagagaagggaggctgtaggtttgttagagatgggaggctgttaggtttgttagagatgggaggctgtaggtttgttagagatgggaggctgtaggcttgttagagatgggaggctgttaggtttgttagagatgggaggctgttaggtttattagagatgggaggctgttaggtttgttagagaagggaggctgtaggtttgttagagatgggaggctgttaggtttgttagagatgggaggctgtaggcttgttagagatgggaggctgtaggtttgttagagatgggaggctgtaggcttgttagagatgggaggctgtaggtttgttagagatgggaggctgttaggtttgttagagatgggaggctgttaggtttgttagagaagggaggctgtaggtttgttagagatgggaggctgtaggcttgttagagatgggaggctgtaggcttgttagagatgggaggctgtaggcttgttagagatgggaggctgtaggcttgttagagatgggaggctgggc

SEQ ID NO: 9354 - DNA, 886 bp, Artificial sequence
  DNA replication origin
ggatgaaccggggtggggggtgggtcatgggatgaaccggggtggggggctgggtcatgggatgaaccggggtggggggctgggtcatgggatgaacgggggggtgggtcacgggatgaaccggggtgaggggtgggtcaccggatgaacgggggtgggtcatgggatgaaccaggggtttccgaggtcgcaggcggcttccttgccccgtgacctggctggggctgcttaacttatgagcagttcggcttcctcgcgggcgccggggcggtgctgccttctcacactgcagtcctgtgaatattccatgcagtcagaagctcaggcggttcagggtgtggtggggccgcccaggaccaggacccctccgcatggggaccaacccctgttccacagctggggagggctagtggctgacaccacagtgatgaggctcttaacaattgcttctgccctcaggagggtagcccagcacccccctgggggaggggcccgacccaaaaactggccagcagtgggcacatcaggcccctgggcctcgacaccaagggggtgatgggctccagagtgcccgtcgccgctgcccaactctgcccccaggtgtgagtccctcgagccctccgcataaacctctgtgccctggaacccgacggggacacaagcgggaagttgacagccatgccctctggaacctttagaaaagaaaccggcccagtgcaaggtcgttcaatgcagagcctctcctgagcacaaacaaaatccagatgagtgtccgcacggggccgtgcggaggtcacgggagctgcagtgtgggccgtggatggctccctcccgtaccaaaggccggcgtgaagacaagaacacaggcaggcagacggcagtgaaa

SEQ ID NO: 9355 - DNA, 1488 bp, Artificial sequence
  DNA replication origin
aaagcaccgctcagggccccaggcgctggagaaaacagactagaggtgaagctgcttccaggctgcccaacactcagcacctctgagggcctttgagtccttggtccctgactcacacccttaaagtggcaggaggaccagagaggcctgccctctctgggacccaggccgcagggatcgcctccatcctacccagaccgggcctcatggctcagtgtgccccggggtccagcagcaacggtgtcccaggagctgtgggaagtgcagagtctcaggcccacctggccctgctgggacggagactgcatttaaacaagatccctggggttcaaggcataccgtgtttgattatcactggatttaggggtctgcccagcccattccctgccagatggagaggaaattcttttccaaggaaggtaaaatcacccagacctctcaaaccaacccccatttactacagaaagggcccttgggactcctgcacttagcattgtgagtggcaatgcgggttgtccaagctgtgtggtggtccgggcagtgtggtggtccaggcatgatgagtggtccaggtagggtggtggtgagtggtcagggcagtgtggtggtctaagcagtgtgtggcctaggtagggtgagtgctccaggcagtgtggtggtctgggcagggtgagtagtctaggcagtgtggtgatccgggcagtgtgagtgctccaggcagtgtggtggtctgggcagggtgagtagtctaggcagtgtggtgatccgggcagtgtgagtgctccaggcagtgtggtggtccgggtagggtggtagtcttaacagggtgagtggtccgggcagtgtggtggtccgggcagtgtggtggtccgggcagggtgagtggtccggacagtgtggtggttcgggcagtgtgaatgctccaggcagtgtggtggtccgggcagggtgagtggtccggacagtgtggtggttcgggcagtgtgagtgctccaggcagtgtggtggtctgggcagggtgagtagtctaggcagtgtggtgatccgggcagtgtgagtgctccaggcagtgtggtggtccgggtagggtggtagtcttaacagggtgagtggtccgggcagtgtggtggtccgggcagtgtggtggtccgggcagggtgagtggtccggacagtgtggtggttcgggcagtgtggtggtctgggcagtgtggtggtccaggcagggtgagtggtccgggcagtgtggtggtccgggcagtgtggtggtctgcgtagggtgttggtcccagtagggtggtgagcctggcagggtgagtgatctgaacagtgtttcgtctggggcagaggtaaaggtgctggcagagacatcaagctccgtccattttcccggcagtgctgttgagtgtggctggaggatccgagggtgtggtctgagcgacctcagtggggccttgattgctgggtgttgtccagaaacccgccgctc

SEQ ID NO: 9356 - DNA, 992 bp, Artificial sequence
  DNA replication origin
cacaggcccccgcagaggggttcagctgaggggacggcgccgacacaggctccccgcagaggggcgcggctcaggggacggcgacgacacaggcccccgcagaggggctcggctgacgggacggcgacgacacaggcccccgcagaggggttcagctcaggggacggcgacgacacaggctccccgcagaggggctcggctgacgggacggcgacgacacaggcccccgcagaggggcgcggctgacgggacggcgccgacacaggcccccgcagaggggttcagctcaggggacggcgacgacacaggcccccgcagaggggttcagctcaggggacggcgacgacacaggcccccgcagaggggttcagctcaggggacggcgacgacacaggcccccgcagaggggttcagctcaggggacggcgacgacacaggcccccgcagaggggcgcggctgaggggacggcgccgacacaggcccccgcaggggggttcagctgaggggacggcgccgacacaggcccccgcagaggggcgcagccgcatttccatgtggccccagcagccccgggctgggttggaggactcgagactcttgtgtgcctgccccgtacaagaagaacaacaacagagggcgccccgtgtgcagggcttggctcccagagtgccaggtccgcttgcctgcagcatgcccggtgaagcaggtgctgctcctgcactattttacaggtgaggggacagccctgggccacctctgtgacccgagtcaccgaggtgcagtgtgtgactggagggtcctctctgtccctgataacaagacactgagctcttactctagcagagctgggccaggagcccttaggcaacaaggcgacccctcccaggatgaggctttatttcacatactttaaagattacccaatagcttataattcgctgactaaaagcatacaagtttgctaagacaataactaaatatcacccacgta

SEQ ID NO: 9357 - DNA, 961 bp, Artificial sequence
  DNA replication origin
caaaaagaattcgcccagctgggatgtccctgtggcaccggtgtctgcactcaggactggtcagcctggggccagggtgggaggaggaaggggtctgggggctgaggacctggctccagccccacctggacactgggcaccacgtggccctttctaaatgttaggaccgctgaccctcaggcagcggtgggtcgactgggaatgcgggtcagtgggaggggcgggtatggaaatggaggtgggtgctttgccattgcaaagacacccacaggtgagcctgtgccatgcctgagaggccccaacagaccaagggtctgtttgcaaaagggctgctgacatgatggagaggagaaacgggagagcagcaggcgcaggaggcaccaggagggccaggggcggtagggccagctcacggtgctgagggggcagaaggcccccccggggtgaggggggtgcgggagctgccgcgatgtgtctgggctgtgaatgtggggcaaggggccgggcaggtggaggacaggacccctggaggggctcagagatctgagaagccaagttcaaggggggctctgtgcacattttgaagttgccagtaatcgaggcacgggtcgatgtggagagctgctttgagccaggaactgaaaccctagagagaggaggggatgccctgtcacggggatgcgggggcagtgtcgcgatgacccagggtttaggaaagaggaagggagggtggcctggaagtggtgaaagagcttcgggatagggaaagggggaaaggctgtggcttccaggagggctgcagccagagacaacagcttcagggctgggtgcagataggaggccccagggctctgctgtgagtgcaggatggtggggcttgcccgagtacagctctctcgaccccgaaagacaggcggaagacccagggggaaaaggccccaggaacccctgaaccattgct

SEQ ID NO: 9358 - DNA, 795 bp, Artificial sequence
  DNA replication origin
aggactgggtcaggacagctcagccctcgcagtcctcagccaagtgctgccccgctctgcaaggggcccagagggctcccagaggcctgcggaccagtgctaggcctcacatccctgaaccactccctgacctcacatccctgaacacatgcaggggccgggcctcagctggggggcatggcactgggtgaggtcagaggtgctccaagcatgtggcctagaaggtttgtccaaaacaaattctctcctggaccctggaggggaagcagaagccggctgcttcctatagttcccaacaccagaaagcccaggacttctcagggaaatcttggtttccagctttttccgaaagtgcctgatgggcaggcattcactcctttcagacaagccccccagcccttcagccactgagccgtgaccctctccccaggaaggactggtggggctggggcactgccaccacctggagccccatcttcagccgcctggcaggagctgcacctgcacatggcacccgtgaactccggcatcttcctctgtcctcccaggcactcggcatcttccagggctgctgcctcctgagcccactcgatatggtttagatgtttgtccccacagatctcatgttgaaatgtaatcaccagtgctggaggtgggggctggtaggaggtgtttggatcacaggagtgggtccttcctgaatggcgtgggtcatcctgttggtgataagtgagttctcactctggtagatctggtagtttaaaagtgtgtggtggctgggcgcagtggctcaca

SEQ ID NO: 9359 - DNA, 1970 bp, Artificial sequence
  DNA replication origin
cgacccccccgcggggacccctccagacaccccagcacccgcccggagccttgtctgctgcacctcccgtccagccccgggcctcccagaggtgggcgggagctgagcttctccccagccagtcactccccacggccggtccttctccaccccagaacctccagagatgtcacaggcccagcactgtggctcgtggctgaccgcgccctggagggtctcgctgtgtttatccttgtgaggtccttctacagagctttcaaggaagacagagttcagcctgtttattgggaagactttaatcctgctcaagacatctactgtgtcaccgtaccactgtggcccagcgcctggtggagtgaatccagacccccaggggtgtcccctccccgcctttctcctggtgtctaggggcacccagaaaccctcaccccagattagaccagctcgttggcaacatccctggtatgtcacagcctggggggtgatagacaaggcagggtagtggtggggggtacgtatggtggtagtagacgagggtatacacagacagagggtgtacatggggaatgtgtgcaggggctgtgtgcagggagtgtgtgtggatggtgtaggggagtgtgtaggggagtgtgtagggggtgtgtgcagaggttgtacacggggtgtgcaggaggtgtactcagaatgtgttcagggagtgtgtgcagaaggtgtacatggggtgtatgcaggaggagtgtgcagagggtgtacatgtagggggtgtgtgcagacagtatacagaaggggtgtgtgcagaggatgcacacagggtctctgcagggagtatgtgcagtgctgtacataaggagtatgcagggggtatatacagggtgtatgtgcaaggggtgtgtgcaacagtgtgtgcaggaggtgtgtgcagggtctatgtgtgggggtgtgtgcaacagtgtgtgcaggaggtgtgtgcaggaggtgtgtgcaggagctatgtgtgggggtgtgtgcaacagtatgtgcagaggtgtgtgtaggggctatgtgtgggggtgtgtgcaacagtgtgtgcaggaggtgtgtgcaggaggtgtgtgcaacagtgtgcagggggtgtacacaaggtgtgtgcaggaggtgtgtgtagatgtgtgtgcaggaggtatacacagggtttgtgcagaggatgtgtgtgggaggtgtgtgcaggggatctgtgcagggagtgtacacaggctgtgtgcagaggctatgtgcagggggtgtgtgcaacagtgtgcagggagtgtacacaaggtgtgtgcaggaggtgtgtgcagaggtgtgtgcaggaggtatacatggtgtgtgaaggtatgtgtagaggtgtgtgcagggggtatacacagggtttgtgcagaggatgtgtgagggagttgtgtgcaggggatctgtgcagggagtgtacacaggctgtgtgcagggggtatgtgcaacagtgtgcagggggggtgtgtgcagaggtgtgtgcagggggtgtacacagagggtggtggcaggcggtggatgcaaggctgcatctgttcagcccaagacgttccattggtccagtggtgttagagcacatttggtcaggttgccttcatgggatatttgacaagctgcaaacccgagggcatgctggtgcccgagggcgcctccgtgctgacctcagcatgtgcagcaagagccagggcacaggggcggcctggcccatttcaggcaggtgctctgtgggagggtggctgtctccactgacaacccagggaggtcagcaaggaggagccctgaggtggactcgaaagctgtgggagctgatggccctcctggtctctgccacagcccttaggctgtgggacacacagcgtcacatttgatcactgttcatggggcctgccgaacactcagcattcctgagtgcagatcgtcacgtaactttccaaaaattgcaaacc

SEQ ID NO: 9360 - DNA, 1116 bp, Artificial sequence
  DNA replication origin
ccgcccacgcagtcccgccccctcccccagccacgcccctcgccccgccgcgcaggccccgccccgtcccgccaggctctcggttctgccgacgcaggtcccgcccctctcgtagcctcgccccgcccgccgcgcaggcgccgtccgagggctccgtttgaaacatggcgcgggctggccctcggctggtgctgagcgaggaggcggttcgggcgaagagcggcttagggcctcaccgcgacctgggtgcgccggagggcgggcgggggtgcaagcgtgaggtggcgggggggtgggtgccgagcttcccggggcggcggcggaccgtgggcaggcgggacccgtctacgcaggcgccgcgggcgtccggaacggtcgcgggcgagcggggcgcgcgtgtccaggtgagcgacccaccccccgtgcccaggtgcggcccctgcccgcgttcgggtcccggcgtcccggcccctgcctgtctatcgggtcactggttccgtgactgggggttacatccgctgagaagagggagccggccttgctgtccaggagcgcagcccgccctcccgctggggatcacctccctggttctcctgggcccactctgtggtgattgttgcgctcggccttcttgaggatgttggtggccggtttccttctttttggcttatttttgtctggttttggcgtcaaggtgaagccgagctcataaactgctgagaagtgttgccttctcttatatttagaagaggttctgtagagtgtgtgctcattgtttgaatgtttcctggaattttccagtgaaaccatatggacatgtcaatttctgtttttgaagcttttaaatgacaaattctgtatctctggttgttagagaaccgttcatattagttcaccgcgagtcttggctgtgtggggttttgtggcattggcttatttgagctaacttgtggagtgtgtgtgttgagttgtttctggtgttctgttgttagcctgttaatgtctgtgtgtggtctgcaggtgttactggaccaacaggttcagtcaggtgctgtgggggccacaggccaatacactgagacagtggggtttgcagcagagaaagagtttaaggct

SEQ ID NO: 9361 - DNA, 3622 bp, Artificial sequence
  DNA replication origin
ctgtgtggcgagattgtggaactgaagcagcacctggagcactacgacaagatccaggagctcacgcagatgctgcaggagagccacaggtgcctgcccgtgagacttgggtgggcccccgaggggaggaggcccaggtacagggagggttgggccggactgggtcacacccagaaggcacagaggagcagctcctcatgagtcttggccgatgatatccaggaccactgctgatttgaaactttcataaactttcctctctgaaaacggaggcccttcatgctgtctgtcgcatgtgtgaggcgtggatcatgaagtgtgacccatgaggtgtggatgtgaggtctgaccatgaggtgtgaccacgaggcatggactgtgagatgggactgtgaggtatgtgaccatggggtgtgggctgtgaggtatcaaccctgagtgtgagatgtgactgtgaggtgtggactgtgaggtgtgactgtgaggtatgactgtgaggcatggactgtgaggtgtgactgtgaggtgtgactgtgaggtgtgaccacgaggcatggactgtgagatgggactgtgaggtatgtgaccatggggtgtgggctgtgaggtatcaaccctgagtgtgaggtgtgactgtgaggtgtgactgtgaggtatgactgtgaggtgtgactgtgaggtgtggactgtgaggtgtgactgtgaggtgtgactgtgaggtgtgactgtgaggtgtggactgtgaggtgtgactgtgaggtgtgactgtgaggcgtggactgtgaggcgtggactgtgaggcgtggactgtgaggtgtgactgtgaggtgtgactgtgaggtgtggactgtgaggcgtgactgtgaggcgtgaatgtgaggcgtgactgtgaggcgtgactgtgaggcatgactgtgaggtgtggactgtgaggtgtggactgtgaggtgtgactgtgaggtgtgactgtgaggcgtggactgtgaggtgtgactgtgaggtgtgactgtgaggtgtggactgtgaggtgtgactgtgaggtgtgactgtgaggtgtgactgtgaggcgtggactgtgaggggtgactgtgaggtgtgactgtgaggtgtgactgtgaggtgtgaccacgaggcatggactgtgagatgggactgtgaggtatgtgaccatggggtgtgggctgtgaggtatcaaccctgagtgtgaggtgtgactgtgaggtgtgactgtgaggtgtggactgtgaggtgtgactgtgaggtgtgactgtgaggtgtggactgtgaggtgtgaatgtgaggcgtgactgtgaggcgtgactgtgaggcgtgactgtgaggtgtggactgtgaggtgtgactgtgaggtgtgactgtgaggtgtggactgtgaggtgtgactgtgaggtgtgactgtgaggtgtggactgtgaggtgtgactgtgaggtgtgactgtgaggcatggactgtgaggcgtgactgaggcgtgactgtgaggcgtgactgtgaggcgtggactgtgaggcgtggactgtgaggtgtgactgtgaggtgtgactgtgaggtgtgcctgtgaggcgtggactgtgaggcgtggactgtgaggggtgactgtgaggtgtggactgtgaggtgtgactgtgaggtgtgactgtgaggtgtggactgtgaggtgtgactgtgaggtgtgactgtgaggtgtggactgtgaggtgtgactgtgaggtgtgactgtgaggcgtggactgtgaggcgtgactgaggcgtgactgtgaggcgtggactgtgaggcgtggactgtgaggtgtgactgtgaggtgtgactgtgaggtgtgcctgtgaggcgtggactgtgaggcgtggactgtgaggcgtggactgtgaggggtgaccgtgaggcgtggactgtgaggcgtggactgtgaggtgtgactgtgaggcgtggactgtgaggtgtgactgaggtgtgactgtgaggtgtgactgtgaggtgtggactgtgaggcgtgactgtgaggcgtgactgtgaggcgtgactgaggtgtggactgtgaggtgggactgtgaggtgtgactgaggtgtgactgtgaggtgtggactgtgaggcgtgactgtgaggcgtgactgtgaggcgtggactgtgaggtgtgactgtgaggcgtggactgtgaggcgtggactgtgaggtgtgactgtgaggtgtgactgtgaggcgtggactgtgaggtgtgactgtgaggtgtgactgtgaggcgtgactgtgaggtgtggactgtgaggtgtgactgtgaggcgtggactgtgaggtgtgactgtgaggcgtggactgtgaggtgtgactgaggtgtgactgaggtgtgactgtgaggcgtggactgtgaggtgtgactgtgaggcgtggactgtgaggcgtggactgtgaggtgtgactgtgaggcgtggactgtgaggtgtgactgtgaggtgtgactgtgaggtgtgactgtgaggcgtggactgtgaggtgtgactgtgaggcgtggactgtgaggtgtgactgtgaggcgtggactgtgaggtgtgactgtgaggtgtgactgtgggtgtgaggtgtgactgtgaggcgtggactgaggtgtgactgtgaggcgtggactgtgaggtgtgactgtgaggtgtggactgtgaggtgtgactgtgaggtgtgactgtgaggcgtggactgtgaggtgtgactgtgaggcgtggactgtgaggtgtgactgtgaggtgtgactgtgggtgtgaggtgtgactgtgaggcgtggactgaggtgtgactgtgaggcgtggactgtgaggtgtgactgtgaggcgtggactgtgaggtgtgactgtgaggtgtgactgtgaggcgtggactgtgaggcgtggactgtgaggcgtggactgtgaggggtgactgtgaggcgtggactgtgaggtgtgactgtgaggtgtgactgtgaggcgtggactgtgaggtgtgactgtgaggtgtgactgtgaggcgtggactgtgaggcgtggactgtgaggcgtggactgtgaggcgtggactgtgaggcgtggactgtgaggtgtggactgtgaggtgtgactgtgaggtgtgactgtgaggcgtggactgtgaggcgtggactgtgaggcgtggactgtgaggtgtgactgtgaggcgtggactgtgaggtgtgactgtgaggcgtggactgtgaggtgtgactgtgaggtgtggactgtgaggtgtgactgtgaggcgtggactgtgaggcgtggactgtgaggtgtgactgtgaggcgtggactgtgaggtgtgactgaggcgtggactgtgaggtgtgactgtgaggtgttactgtgaggcgtggactgtgaggtgtgactgtgaggcgtggactgtgaggtgtgactgaggcgtggactgtgaggtgtgactgtgaggcgtggactgtgaggtgtgactgtgaggtgtgactgtgaggtgtgactgtgaggcgtggactgtgaggtgtgactgtgaggtgtgactgaggcatggactgtgagttgtgaatgtgaggtgtggactgagagttgtggactgtgagatatgacctgtgtgcagtgtgaccaggggagagagg

SEQ ID NO: 9362 - DNA, 1341 bp, Artificial sequence
  DNA replication origin
cagcagagtgcagacccgcacacaccctgtgtcagagcggcctgcagggccgtgtgagcatccagctttatagaggacctgcttccgccaagctttcttccaagacagtttggatttgcagtgctaccagggcggccgcctgtgggtgaagcctgtgggctgctgggccatggctgtccagctctgctcagacccacgcgtggggagggcagccctgggccggcccgcgcccagccctaagtcgcctgtgcccctgtagagggaagtcttgccggaccatcacctttgagcagttccaggaggcgctggaggagctcgccaagaagcgattcaaagacaagagcagcgaggaggccgttcgcgaggtgcacaggctcatcgagggcaaggcgcccatcatctcaggggtgacggtgagcagggcggggatggaaggcggggcctggagggggtgggggcggggcctggaaggtgggtggtgcctgggggaggggtggtcaggagggacatggattgggggcgtgacctggggggggtcctgggaggcgtggtcaggagggcgtggcctggtgtggggtctgaggaggtgtggtcagaaggggcatgaatggggcatagcctggagggtgaggcctggggaggcgtggtcaggaagggcatggactgggagttggcctgggagggggtgggtgggtcctgggaggcatggccaggtcggcgtggcctgggggggtcctggggaggcttggtctgaaggggcatggattgggggggcatagcctggagggtggggcctggctgttctgacagccccttccctctgagggtgcaggtggtggggtccccaactacataaacaccaggtggacctgggcaattgttagggttgtggcaccccgcaggcccaaggctgccccagggtcaggagaggtaaaaataagaattaaaaggggcataaatcccagggtttatgccccttgcccagtgccccaccgctgggagacctgcccagggcacagccatttcacttgctggcctcacctggctcgcaactcacctgcccccttcctcctgctcctcttgcagaaagccatctcgtcgcccacagtgtcgaggctcacggacaccaccaagttcacgggctcccacaaggagcgcttcgacccctctggcaagggcaagggcaaggctggccgcgtggatctggtggacgagtcaggctatgtgtccggctacaagcacgcaggcacctacgaccagaaggtgcaagggggcaagtagcccccgctccatgcctcgcggcactgccggtgtccccagagcagggactctgtcacctcg

SEQ ID NO: 9363 - DNA, 1825 bp, Artificial sequence
  DNA replication origin
ctcaggacaagggcactgtctgtgccagaggctctggcccctgacctcccgggcacagcccaggtcactgctgcctgcccatggctggtgacccaccagagcggccctggtcaccaggacctgccagcagctggctggggccatctacacaggcccacaccgcatggcccgctgctgcaggaggctgcaggtttccagcaggggatggcaggctggtctgtcctccaggcagaggctgcaggtttccagcaggggacagtgggctggtctgtcctccaggcagcggctgacataagccctgtggatgatgtgggagctccagcgagcctgtgggagctgccccttgccaaagagcccacaagcaaggcctgtactgcagagtcaggcgccagttgcttcagccacagtcctgagggaggtgcagccctgagagtcagtccacaaaggatctgtggccgggggagcagtgaggggggcacagtgtggccgggggagcagtgaggggggtacagtatggctgggggtgcagtgtggccaggggtgcagcatggggggttcagtgtggtcaggggtgcagcacggggggtacagtgtggccaggggtgcagtgtggccaggggtgcagtgtggctgagaatgcaacatggagggtacggtgtggccaggggttcagtgtagccgggggtgcagtgtggctgggggtgcagtgcagggggtacagtgtggccgggggtgcagcccagggggttcagtgtggccaggggtgcagcgtgggaggtacagtgtggccgggggtgcagtgtggctgggggtgcagtgtgggggtgtgcagtgtggccgggggtgcagcgcagagggtgcagtgtggccaggggtgcagtgtggccaggggtgcagcacggtgggtgcagtgtggctggggtgcagcacagggggtgcagtgtggccaggggtacattgtggccggggctgcagtgtgaccaggggtgcagtgtggccggggatgccgtgtggccgggggtgcagtgtggctgggggtgcggtgtggccaggggtgcagcatggggggtacagtgtggccgggagtgcagtgccagaggtgcaggctgttggacggaccctcgagggctgagccccagcccttgttgggcccctgctggtccccttgctctggcaggctccttgtgccttcctggtctcaaggggccccagggatgagtggtcctgggttagtgtgggctccaaccgctaaggtgttggcaaatgatggccctttccgaggccggggagcacaaggttgcatgactacctacacagaggggccagccacagcctcctctcacaccggccagtggctgagcccatgaggacactgaggctgggaagccacagaggaggttggcggggccactgggactggacagggtcaaggatgagaccagctcgcacccggggccctggatggagcctcccctccagcttctctgggactgaggctgggagctgtcaggaagacgaacaggactcgctggccctggttgcctctgccgtcccctagagctgggggagcctgcaaggcagtcagctggagagagggtccgggttcaggcatccttctgagcagtttcatggcttttctggcataactttccaaaccccaaatgccctcggatgcactcagatgcgccgtacacaacaggaagctcagcaggacacgcagtctaggaacatgcacgacccaggagacacccaagacccaggggatgtgtgacccgggagacacatgtgacatcgccacggagcacagcagagacggaacagctgc

SEQ ID NO: 9364 - DNA, 889 bp, Artificial sequence
  DNA replication origin
ccaggagtgggggcagtggctgcctggagcctggaggggcaggtggctgctggcgggcagagctcctgaccctctgtgggctggctcagcggctgagtctcagaggttggatgcttgtgtccccatgcatggagctggccattcgggtgtcccccagcccctcccaaagcctttgtgctgctgtatttctgccccaggattcccacgggcggcaaaatggcaaagggcaccaaggaggcggctccggccaccaccttgaaaccgcatcgtgccgtttgctttttctgcgtcgtgtgcacgtgtgcgcgtttctgtgtgcacgtgtgtgcgtttccgcgtcgtgtgtgcacgtgtgcgcgtttctgcgtgtgcacgtgtgcgcgtttctgcgtcgtgtgtgcgtttctgtgtgcacgtgtgcgcgtttctgcgtcgtgtgcgcgcgtgcgtttctgcgtcgtgtatgcgcgcgtgcgcgtttctgcgtcgtgtgtgcatgtttctgcgtcgtgtgtgcgcgtttctgtgtcgtgtgtgcacgtgtgcgcatgtgtgcatgtgtttctgcatgtgcacgtgcgtttctgtgtcatgtgtgcacacgtctgttgccgtgtcacgcattgtctgttttctcctggatgaatgctgggaagcacactgaggcaccctcacacgccccagcacatttcacctcatgtcccgacaccccaccatgatcgcacccgagaaaagcagcggttctccctgagccccgtcctgtccgcctgtgtggcaatggctttatttcggtggtttgcacctgcgtcctcctgtggccgatgtatttcattcctacattgccgcaaactcatcacctctttcatctcagagctcctgcaccttcccc

SEQ ID NO: 9365 - DNA, 948 bp, Artificial sequence
  DNA replication origin
cagtgtgtgactggcagcatcagagcctattccgggtcccctccccgccgcagttccactgtccctcctgtggacgcccgctctgcagctctggaggacacctcgggatcacgcactccccagggtctgtgacgtgctgccttcctctgggagggtccacagcagtcgtgcgacagccgctccctccccactgcagagcctctgaccttagatggagctttaggctggggagggtgcgtggtggccctgggggcgcctcaggatgctcttcccaggagccctgggcctggccccggccaggggaggggactgccagtgtgcagggctgaggcagtggtgggggcaccggtgtcagggcgcagggacgccctctggactttgcaaggcgcccgcccccagagtaggcggctgggccatggggttgagaagactgaggggtgccacccaggcagggcttggggacgcagggctacgccacagggcagggctgccgaggccacctccctaccatgcatgggcttcggtaagacccagtcaggccctgaaggactcaaggctgaggtgctggactcagggcatgaaagctgcttcccaaaggggcctggacaccaggtgggccgtcagcactgcactgagagctgaacatggcctctgcccacagacacaagagccggtgggagggtccgtgccgaggacacaggtaggtgtcccaaccctgggactcacgaagccctctcagatctggagttctcagcgccagtcatggccaaagtgtggctctgtaatcgtggggtcctgagtgtggccgctgctgaccctgagatcccacaaattcccccaaaacagccagaaaaaaatccaggggcactccctccactgaggaccttaagggcctcaggccccacccactcacccctttccctggaaggcaccaaaaatgcagatgcc

SEQ ID NO: 9366 - DNA, 1002 bp, Artificial sequence
  DNA replication origin
aagacccagtcaggccctgaaggactcaaggctgaggtgctggactcagggcatgaaagctgcttcccaaaggggcctggacaccaggtgggccgtcagcactgcactgagagctgaacatggcctctgcccacagacacaagagccggtgggagggtccgtgccgaggacacaggtaggtgtcccaaccctgggactcacgaagccctctcagatctggagttctcagcgccagtcatggccaaagtgtggctctgtaatcgtggggtcctgagtgtggccgctgctgaccctgagatcccacaaattcccccaaaacagccagaaaaaaatccaggggcactccctccactgaggaccttaagggcctcaggccccacccactcacccctttccctggaaggcaccaaaaatgcagatgccaacccagcggaggatgcaggggcaggatcctggtgggggctgggccgcgtgggggcaggatcctgggggtggaagggccgcctgggggcaggatcctgggggtggaagggccaggtcaggtgtcgagctgggaacagtttccagttttatcgctgacaccatttctttgtctgaaacaggagcttctcacaggcctggtctgtgtttcccctgggcctctgcagcaggggtcgctggacaggaggagcagctgagaaattaccagaagcaatggtgggttttgtgagcacccagaacagtggtgggtgtgcgggtcagagagaaagaaccttctgggatgcttcaaactcagggctgcgttctgtggtctcatctcctgtggggacgcgcctgaacagagacccttattcacacacctcagagagtcatctgagaacctgcaccccgtggggcccgcctgggagcaaagggatgagggaagcccctcagagccaccttcagggctcacgcaggacttcccagcccatcagcacgtgctttgcatgaggttttgataagcttggaggttggccttggagg

SEQ ID NO: 9367 - DNA, 1186 bp, Artificial sequence
  DNA replication origin
tttgggcagtccagtgtccagtctgaaggcgtttcccaggagattcattctgacaaatggggcccaggtgattttccgtggggcctcttgggaacagggacagcctgtggggttggggccaaggtggcctgcggtgtctgggacgaagccccgcctaggtggccgagtccttggagctggtgacacacctgggacaggcattccctggcctgcgaggaggcttcgttccctaggacagccaccctctggggtctgcctttgcctgccccactctgaggtctgtggtgccacctctgccctcatcttctgtcctttccaagccttttttgaagatgccagttggacaacacagtcttgcccacacccgtgggtgagcccgtaggtgccatcctcctgactccctggggaggcgctgggggtgggtgggagtggggtgggctcagcctccaagcaggtcctggccaggccccacttgtggtcccatagggtctggccagggaaggggcatgtgctgtgagcagacacctgggtcaggtcagggcttggcacgtccctcctaccagggaggtgccggccagtgggagagggtgcaggtgcacatctggatgcaagacacaggcctgggagtacaggcacaactgggatggcgggcacaggcctgggagtgctgggcacatgtgggatggtgggcacaggcctgggagtgcagggtgaccccctgggggctcagggcacacgcgtggagatggtgggtacacgcctgggagcttgtcctttgaccccaggtgagcagtttgtcttcctggagtctcttctgctacacaaccttcttttccctcacggtgaaagagcagagcctctgggggaaatggtgtgagggtctgcacccagggctcaggtgtgctgtgcccagaaactgggaaagtggaggacacctggcctctgcccatccaaggagaagcagctggcacagcagcatgccatgctcggtggagagcgccaagggagaggcgcccacccaggctcgttgtccgtctgacacctccatgttctctcaaaattaaatgtattcttattaccgtcattgtggaaacagcacgtgggtctaatgaagcgatccagacagtgtggctcccatctcctccactcctgctccgtgtctgtggcccgtgtcctgctcctccag

SEQ ID NO: 9368 - DNA, 927 bp, Artificial sequence
  DNA replication origin
agagggtggacgccccagatgcagccacggtggccaggtcacctgcgagatgccatgggtgggagatgcaggtggctgtgcagcggtgccctgggctcagggggaggggctgggtcaggtccccggggctggctggggcctggacatggctccctggccctgaggcaccagcagcacttctgagtggggtgggactggcctggtgtgtttctgggcggggatccagtgtgagtgggtgaacagtgagtggcagccatgggcacgctgaggtacgcacacttcacccacctctgtgggccaggaaggcatgtcacatactcctgacaaggcagagggtgctgggagctcgcctgtgtcagacatgagggcccttggaccagggcctgggtttgaagccacctccataccccatacacggtgctcactgctcctggccccattgactgatgactgatggccagagggggacagcagctgtgtgaagtcgcctggcaggtgcggctgttggtggcactccctgggcggaggccacgttggacatttgtgaacaaacgagcaggttggggttacaggttataggatctgggaaatgtggtctgtgatgccatgcgccctgggggatctcatggagcccacatgggcaggcaccttttatcatgccaagaagtcaaacgtgggatgccatgtggggaacatgccctgggtgggggaataccctgggtggagatgccatgtggggaggatgctctgggtggggaatctttgtgggggttgtcctgggtggtggagccttggtgaaggaatggcctagggggtggctctgggagggggtggctctgggatgtggatgtcctgggagggggatgtcaccttagggggaaagcctgttgcagatgccctaggagggaagccctgtgtgagagatca

SEQ ID NO: 9369 - DNA, 822 bp, Artificial sequence
  DNA replication origin
atgcgccctgggggatctcatggagcccacatgggcaggcaccttttatcatgccaagaagtcaaacgtgggatgccatgtggggaacatgccctgggtgggggaataccctgggtggagatgccatgtggggaggatgctctgggtggggaatctttgtgggggttgtcctgggtggtggagccttggtgaaggaatggcctagggggtggctctgggagggggtggctctgggatgtggatgtcctgggagggggatgtcaccttagggggaaagcctgttgcagatgccctaggagggaagccctgtgtgagagatcatctgggtgggggctgccccgggtgggggatcatctgagtgggggctgccctgggtgggggatgtccccggtgggggatcatccaggtggcagatcatctgggtgggggatcatctgggtgggggatcatctgggtggaggatcatctgggtgggggatcaactgggtgggggctgccctgggtgggggctgccctgggtggaagatcttatcagggggatgcagtgggttatggccctgtggcaaccccaaacacacacacaccaagaagaagctggtctccctaggaggaggatccacgcagggcagcttggggtttggctcgtggatgctggggacaaggcctgagccccagatgtggctgggcctgacccaggcagctccaccccttccttcccaggaaacaccttttgctcgagcagtaggaactaggcgtgtgtagattctgctgcctgatcctggctcctggctgagggtttgtgggctcagatggactagacac

SEQ ID NO: 9370 - DNA, 875 bp, Artificial sequence
  DNA replication origin
gctgctgttttgatgggggttgggggctgctgttttgatggggtttgggggctgctgttttgatgggggttgggggctattgttttgatgggggttggggggctgctgttttgatggggtgttgcgttccctctcagtgtcaccgctgatccacctggcatgtttattggctcttctgcttgcagggcccctgggggaccgatagaggactgggcccctccgcccaccccggccacccctccccgcctgacttctcagggggagaggtctccccccacgcccagccagcccctgcccctgggaggtgacccagctccctgtggcctgggactaggagatggggctggaccaaggccgggaaggggcaggaagtggaggggagtgaggcagctgcagcctgatgccgccgccttgaactgggctctcgcgcctgtcagccgctcggtgccagcgcctccccaccacgtgatcctcggagggcctgtgggggaggggcgggctcccggagcggctgcagaaggcgagctccaggagggtgtgtgcgttttcccgggaggggtctgcagctttcatggtttctaaacggatctctgattcagaaaggcgccggcatgaactcgctttgcatcttcacaaaacatgaagtcatggggattggaccgcgtgtgcgtggaggaagctccgctggtcactggctgcgttttaatcttacagctgcggttggtctatcttcccgaattccctgaagttgcaataaatgttttagcgattatacgaggttataaatgctcgttgtggaaatgagcatagaatgctcacagaaatggtcaacaggggcttccttttgaccccctaccctaatttgcaagcctcac

SEQ ID NO: 9371 - DNA, 1521 bp, Artificial sequence
  DNA replication origin
acgcccctgcagcccttccctccagaccctccccagctcgggactcgaaccgtttccctattcccaggcctagggggccgccggtgtgaggcgtgggaaattagggcgtggagggctggaatgaagtcactgcccgcagcaggttttgagagatccctggccacagaaacggcccatctcagggtcctgacaccaccgcgtcctggcaggtggggctgtcagaccgccccccgcagagcctccagctgccccgggtcttggctactgtccgcgggcctgtggcgatggagaggcgctgccgggacaccttcccgcacccctgggagcagcgcccgaagatctgaggagccctttattctgcggtttcggttacgtaaacggagccgagggaggtgagaagcctgtccctcccgggcagtggcggggctgctgttttgataagggttttgggggggctgttgtcttgatgggggtttggggggctgctgttttgataggggttgggaggctgctattttgatacggggttgggggctgctgttttgataggggtttggggggctgctgttttgatagggggttggagggctgctgttttgatagggttgggggactgctgttttgatagggggttgggagctgcagttttgataggggtttgggggctgctgttttgatagggggttgggaggctgctgttttgataggtggttgggaggctactgttttgatagggggttggggggctgctgttttgataggggttgggggctgctgttttgataggtggttgggggctgctgttttgatggggtctggggggctgctgttttgatgtggggttgggaggctgctgtcttgatgggggcttaggggggctgctgttttgatagggggttgggggctgctgttttgataggggttgggaggctgctgttttgataggggttggggggctgctgttttgatggggtctgggggctgctgttttgatgaggggttgggggctgctgttttgatacgggttgggggggctgttgtcttgatgggggtttggggggctgctgttttgatgggggtttagggggctgctgttttgatgggggttgagggctgctgttttgatgggggttgagggctgctgttttgatgagggttgggggctgttttgatgggtatttgggggctgctgttttgatgggggttgggggctgctgttttgatgggggttgggggctattgttttgatggggtttggggggctgctgttttgatgggtatttgggggctgctgttttgatgggggttgggggctgctgttttgatggggtttgggggctgctgttttgatgggggttgggggctattgttttgatgggggttggggggctgctgttttgatggggtgttgcgttccctctcagtgtcaccgctgatccacctggcatgtttattggctcttctgcttgcagggcccctgggggaccgatagaggactgggcccctccgcccaccccggcc

SEQ ID NO: 9372 - DNA, 760 bp, Artificial sequence
  DNA replication origin
caatgagcgcgcggggcgggacgctgggcgggcgccggacgctgggggccgggggcgggcccgggaccgggctgggcggggctgggcggtgctgggcgggacgggcgggcgcggggcggcggctggagagctccgctgagcaccgggtcgcgcgcggccgagtcgcggaggcgcctccgctgcagtcgctgcgtctccaaggtaagcgggcgcggggctcggtcccgcgggcgcggcgcggggggcacccgggggcggagactgggcccgtcagccccagcagccacctgcgccgcagcccctgccccccgcgctcccccgagcccccttcccggaccgccccgcgcgtccctgagcccccggattgggatgcccggagttcggcgctgcgggctcggtgcgaggacgcgacggggaggctttgcaaaggccgcgagcgggggtcaccgtcggccgcgccagggacaggtctgtcaccgtctccgggccctgtgcctggcgctttggcctttcttcgcggccacggacgcccctgcagcccttccctccagaccctccccagctcgggactcgaaccgtttccctattcccaggcctagggggccgccggtgtgaggcgtgggaaattagggcgtggagggctggaatgaagtcactgcccgcagcaggttttgagagatccctggccacagaaacggcccatctcagggtcctgacaccaccgcgtcctggcaggtggggctgtcagaccgccccccgc

SEQ ID NO: 9373 - DNA, 878 bp, Artificial sequence
  DNA replication origin
tggatgagcgcggccgcggcctcctggggtggggtgggttggcggcggggcctcgaggacggtgcggggcgagccccgaccgcgcccagttctttaaggagccgcagacggtgcagggaagcggcagggccgggctgtgagggtgctcggaccccaaggcggggcgcacccaggggactgggcttccaggtgggggcagcgcggccggggatcgacctgagcagggagacgggtccgtgccgggcgcccagcgcagctgctcgggagtgggccgcccttcacgcaggagtggaggagcggagcgcgcacccctgaccccggcctcagcttccgttctccctgcaggtcgcccgtatgcagcgccaccatcccggccgctcttccaatctcgcctttctccgggcacctgccgcccctcccccgctccccagacaggctttgcggagggggctcattccgcccggggctgcccggccctccgcaggagttggctccccacaaggttccggggccgagatgacagggcggttctgtggtgctgggtgctgggacttgaggggcataggggcacctgccctggaggaggccgaggcgcagccccccaggaggaaggggtgcctctggtgactttcagctggactcttccagctggactctagtgcagctgagctcctcccccagccccggctctgtccctgcaccaggtgtccagcaggccctggaatccgcaaaggcagaaggggaagttggggtgctgggtgctgggcagggggtgctgaggcctcacagcccggcggcttggcccccacccaccccacggtggtcccgcgccccacacttcctctcctctcctgtggtttctccttccactcagtgct

SEQ ID NO: 9374 - DNA, 1054 bp, Artificial sequence
  DNA replication origin
tggtgactttcagctggactcttccagctggactctagtgcagctgagctcctcccccagccccggctctgtccctgcaccaggtgtccagcaggccctggaatccgcaaaggcagaaggggaagttggggtgctgggtgctgggcagggggtgctgaggcctcacagcccggcggcttggcccccacccaccccacggtggtcccgcgccccacacttcctctcctctcctgtggtttctccttccactcagtgctgcccagagatgggcttctgtctagttctcctgagaaattccacactcgcagctgggaagtcgggggacccccgaagctgtgcggcggccacgctgcggctcctgcttccctcctgctcgggtgcgggctcggctgccttctcgtcccgcggagcccggagtgcctccccctcgggtagatcctactaacagcatcaaagaaataatgaaataatctctccttggtgtgttcttaccgtcctaataggcacaaggggactcttcagtgcattttccaaaacctgtacaaactctcttgacataaatgcagtgagtttacaataaaatcgcagtgggaggtaacgtcaggcttcagaggcagacatggtcctggagcctttgggaggagaggagaggagaggcagcgggcgcggggcggcgtccagggggctgagcgaggtctgggcaggaggacagagctgagccttgggctgccctggcccctgcgcaggacacacagtgaccggggctggggtgggcaccccggttctaccgtcgggagtcggcgtgttcatggagtctgtttccttgtctgtgggtgaaactttggcttggggtcacgggtgtgttatttcccagcgacagtcggttcagtcagcacttacaaaatcaccagaaacaggggcacaggatcttgctcagcagggagaggtggatcctgattcgggactccaggctcttcacctggccatggctgcccgtccggtggcccttcctggcccccagctcttgctccactgccagacctggacagcctcc

SEQ ID NO: 9375 - DNA, 874 bp, Artificial sequence
  DNA replication origin
cgcgctgggggctgctgggctgtatgaacactgggctgctgccgtcgggccaggtcagagcctgcatggggctgcctgccccggcctctccctgggacaagaggggccgaccaccccagacccgatactaccgcccggaaagacggctggaggcgaggatgaggccccttgagagcggcggccacgtaccttcatacctggggtccgtgcggagcaccctggggttcacgaggtactggacgaggacatacagcaggatggcgatcaggcagagcatgccagctgtggccgaggccacagtgctgaagaagaacctgccgggagacacacaggcaggcatgggggtggggacgtgggagcagtgggggcgcaggggcaggtgtggggggcacgggggcagggggtgtgcacagggtgggcaggggcgggcgtggggggcacagcggcagggggcacgcaagggcaggtgtgggacaggtgtgggggcggggaggcaggggcagggacacgcagggcatctgaggcaggggcgggggcatgcagggcaggtggggggtgcagaggcaggggcagggacacgcagggcatctggggcaggggtgggggcatgcagggcaggtggggggtgcagaggcagggatggggacgcgcagggcatctggagcccgcagggtggaggtgacaggtcagcgtgggcgtccacttgagagagggctcctggccactgcccgatgctggcctcaaaccctgctcccgaccatgcctggaagctcaggctcctgtctctgtgccatcctgtgacgcccccccaggtctccaggcctctcgctggagaggggtggccgtgggacattcccaccagcacaccgcctga

SEQ ID NO: 9376 - DNA, 764 bp, Artificial sequence
  DNA replication origin
cagcggcagggggcacgcaagggcaggtgtgggacaggtgtgggggcggggaggcaggggcagggacacgcagggcatctgaggcaggggcgggggcatgcagggcaggtggggggtgcagaggcaggggcagggacacgcagggcatctggggcaggggtgggggcatgcagggcaggtggggggtgcagaggcagggatggggacgcgcagggcatctggagcccgcagggtggaggtgacaggtcagcgtgggcgtccacttgagagagggctcctggccactgcccgatgctggcctcaaaccctgctcccgaccatgcctggaagctcaggctcctgtctctgtgccatcctgtgacgcccccccaggtctccaggcctctcgctggagaggggtggccgtgggacattcccaccagcacaccgcctgacaattcaggcagtgcttcttgcaaacgtgattgcctttaatccccacaaggaacaatgaggttgtgaggagggggaaccagcccttttcacgagtggggaaagtgaggtcagagatgcggtgcgactcgcccaagcctaccagcggagcatgagggtcacacggcgtctccagtgtcacagctctggggcctctgcccgcacctcccgactccacctgatgcagacaggcctccctaccagccaaggagcacgcaggctgggtcccctcagggggccctgagcatggtctgtgctggggtctccatggcaccatgctgggcaaaggcact

SEQ ID NO: 9377 - DNA, 1182 bp, Artificial sequence
  DNA replication origin
tccctccaggaacaagaaaaccaaacactgcatttcctgcaataagtgtgtgtccggcttcgaccaccactgcaaatggatcaacaactgcgtgggaagccggaattattggtgaggggcacagaggggatggccggcacgggccaggcttgggggaatttggaagggaggggtctgtgggcaggggtcctcgtgttgaaagggtggagggtcctcttggggccacgtccctgtcctgatgtggtggcgcttggtgcctgcgtgccccggcctcctgtctggctctggggctgtggtgcagccgtccctggacaagctcatccgcatagagtaagtccctggaggccccccgggggcacttgcggggccacgctggctgaggcctcctgaccacgctgtcctgggctgggctgccttctctccacccaggctgaggctcatccagcacaagggtggggccacggaagggcagtgggcacccagcgcagatggacgagaggtgtttcccctgagcatggtggaggctcacagatgagaggtgtttcccctgagcacggtggaggctcatagacgagaggtgtttcccctgagcacggtggagatgcaaggaagagagatgtttccctgagcacggtggaggctcacaggcgagaggtctttcccctgagcatggtggaggctcacaggcgagaggtgtttctcctgagcatggtggaggcacaaggatgagaggtgtttcccctgatcacggtggaggctcacagatgagaggtctttcccctgagcgtggtggaggctcataggcgagaggtgtttcccctgagcacggtggaggctcatagacgagaggtgtttcccctgagcacggtggaggctcatagatgagacgtgtttcccctgagcatggtggaggctcatagacgagagatgtttcccctgagcatggtggaggctcatagatgagaggtgtttcccctgagcacagtggagactcatagatgagacgtgtttcccctgagcacggtggaggctcaagaacgagaggttgtttcccctgagcacggtggaggctcatagatgagaggtgtttcccctgagcacagtggaggatccagggactctcaaggccccgtgtgctgagccccggctgtctgcagcactgtattgtgaagatcaccaggg

SEQ ID NO: 9378 - DNA, 1189 bp, Artificial sequence
  DNA replication origin
atccttttcccatctgtagggtctgagtgctgcgccttccttcctcactatcctggccatttgtgtcttcctacctcttcttcatcagtcttcctggggcttatcccttttattgatcttgaaaagagtcagctttttaattattaattttctctattgtttgcctgtttttattctattaaaaaaaaattctgcttttatttttactacttccttcaactgaccttgggtttactttgcttttttttctatcatcttaagacggaaacttaggtcattgattgtagacctttcttactttttaatgtgtgtttaaagctatgtattttctgtgagcacatgcacagacccgggcatgcacagacagatacacactgccagtaaggcttttggcctctcattcaaccaccccatctggcttagtgattcaagggtgtctccctggggatttggggctcagtctctgggtcttggggtgccttgtgcagctaaagttcccttgggaggtcaggccacaccctatctacaagtctgaaatgggctgggtccagctggtctcacagagagccttgccaggggtccaaggatgtgctttagtgagagacgtgggtgctgactgtggcatacactcatcctgggcgctatcttgctgcatccctcttgcaacctgcgtcttgtttgtaggtggctgtctggggctgtgagtggccgttgaggctgtgagtggccatctggagctggcatgactgtccagggctgggagtggccatctgggctgtgagtggctggccgggactgtgagtggccggctgggactgtgagtggctgtccagggctgtgagttgagtggccatctgggctgtgagtggccgtctggggctgggagtgactgtctggggccatgagtggctgtctgggctgtgagtggctgtctgggctgcaagtgggcatccagggctgtgagtggctctccagggctgtgagttgagtggccctcttggctgtgagtggccatcatggctgtgagtggccagccaggactgtgagtggctgcccagggctgtgagttgagtggctgtctggggctaggagtgtctgtccagggctgtgagtggctgtctggggctaggggtggctgtctggtctgtgagaggctgtccagggctgtgagtagaagactttgtgtccc

SEQ ID NO: 9379 - DNA, 1515 bp, Artificial sequence
  DNA replication origin
ggtcccctacccactgggagacaggagcagacacgggcttccccctctttgggagacgggagcagacccgggacccctgccgctggaagatgggagcagaaccaggtcccccacctgctgggagatgggagcagacggcctgacatggggtcagcggctgccctgtccaacctgaccctgagccatgtgggagcggtctgacatagggtcagtggctgctctgtccacccgacgatgggccacgcaggaatggcctgatgtggggtcagcagctgtcctgaccctgagcaggggctgcacagagcacgaatggccactgggcccacctgcaggctcgggggacatagtctggcccaggacaggtgactggtgccaccgggcagccatggcccagaccccacagccaggtccatcgcagggtcctccaggaacccctcccgcttagaccatgccacgatgaaaaggataccacataggcgatgtatttccacgagtgaggcaggaggggaatgaagatcctgaaggtggccaaggaaaggccaacgaagacagcccaagtcaccacccggaagtagtgcaggggtaacgaccagccgttcactctggagatgcggggcggcaagaccagctcttcattgttgcgtatggcttctggggtgacggaacactggctcccggagcgggtgtccatctgcaggacacagaaggggaggacctgcgccatcagctccggggagggccggccccacccactgtcagggagaccacggggactgggaacatggcccccaggaccagcactgacagccaatggcccagcattgcctggggccacgttccccgcagagggagcaggggttgggctggagtcggtgcagggccctgtccaggggaatgaacagacatgctgcagaatctgaccctggccagagccgagtggcaacagaaaatggctctccagggtgtggaggaccctgggcagaggacctggcctgtggcagacctgggtggatgactgaaagcaacgggaagacctgagctgccatctggacggctgcgggatggccctctccccacccacacacatgtggggctccgggtcccacaccagggcgcagctgaagctggacagcagccaagggctccccggggccaacacctgcctcggcgcacactgcacgcctgtctcatctccgtaggctgagtagagcagctccaactcgtccgacttcaagtcgccaaatgctgaattattctgcatcgaaagcgcagtagtggcactggagagaaaggtgactgggaggaagaggagaaagagagcatcactggactcactggaaggactcggtgtgcaggccccaccccgcttctccaggggctgagggaccgcctggctggcagccagcaccccagtctcacctctcttgctctccacaaaattctcactcctgagttttccatgtgtaaccagcaggggtgtaattcaccacccctcattttacttctgcaggccaa

SEQ ID NO: 9380 - DNA, 783 bp, Artificial sequence
  DNA replication origin
gggttggggccaaggtggcctgcggtgtctgggacgaagccccgcctaggtggccgagtccttggagctggtgacacacctgggacaggcattccctggccagcgaggatgcttcggacagccaccctctggggtctgcctttgcctgccccactctgaggtctgtggtgccacctctgccctcatcttctgtcctcttcaagcctgttttgaagatgccagttggacaacacagtcttgcccacacctgtgggtgagcccgtaggcaccatcctcctgactccctggggaggtgctgcaggtgtgtgggagtggggtgggctcagtctccaagcaggtcctggccctgggggttggggcgcaagtggggtgggctcagcctccaagcagttcctggccaggccccacttgggctcccgtggggtttggccagggaaggggcatgtgctgtgagcaggcacctgggtcggggcagggctgggcacgtccctcctaccagggaggtgctggccagtgggagagggtgcaggtgcacacctggatgcaagccacaggcctgggagtacagggcacagctgagatggtgggcacaggcctgggagtgcagggcacatgtgggatggtgggcacaggtctgggagtgaagagcgaccccctggaggttcagggcacacacgtggagatggtgggtacacgcctgggagcttgtccttggaccccatgtgagcagtttgtcttcctggagtctcttctgctacacaaccttcttttccctcacggtga

SEQ ID NO: 9381 - DNA, 1873 bp, Artificial sequence
  DNA replication origin
atgagccagccgggatctctattcccttttgggatgctctgttggtggaatgtcctgtgtcgtgctttagagaaatggtgttggcccgggtggtgggcactggctgggcatgtggtttaattctcacttgggccttggacagccatctcagacccgtatcagtctccgccgcagcgtcctttgcagagtctgggagcccccttgcccctctgtcctacggtggctgcggaggtgcgccgggtcccccagcactgccagcccgcctgcgccatgctcaaattctcgcggggcctcagccgcctccctgctgggcagggctcgggacccgccgaccgccatgccgaggccacgccccccctcccccgccccgggctccctcggtgctggggcctcccggaagggcgccgcccccgccgggtcccatggaccgcccaagggctgaggagtgcgggcgcgtggcgcagtactggcgggcagctccgcctgctgcggggctcaggatccgatagagaaagctagctagactcctgagtggagtgggggcttggagaacttttatgtctagctaaaggcttgtcaatgcaccaatcagcactctgtcaaaatggaccaatcaacgctctgtaaaacggaccaattagctccctgtacaatgggccaatcagcaggatgtgggtggggtcagataacggaataaaagcgggtagccggaacgccctgccgcaacctgactccattctcttctccgctgtggaaagtttgttcttttgctcttagcaataaatcttgccgctcagtctgggtgcgcgccgcttttgtgagctgtagcactcaccagggaggtctgcagcgaaggtctgcagctttgctcttgaggccagccagaccacgagcccaccggagggagcgaacagctccagacgcgctgtctctgagaggcgtaagtaacactcaccactgaggtctgaattgaagccggcgagactaggaacccacgggaaggaatgaatgactccagaggcgtcaccttgaagagctgtaacactcactgcgagagtccgcggcttcactcctaaagtcagcgagaccacgaacccaccagaaggaagaaactccagacgcatctgaacatctgaaggaagaaactccagggtcgccatctttaagaactgtgacactcactgcggggctccgcagcttcattcctgacgtcagcgagaccaataacccaccaattccagacacactgcgtcctgtgctgcagggggaaaggcacggactcaaaactgccagctttgttctgattgggagctctgcctgcctgacaggcggcctgggctgagaagagtggggcggttcacagggagagtcccgcggagcaggagggccgtgcgatgatagtgaaaaacaagaaccatctgccaaagggctgtgctgcacccaaatgggctctgaaataaggaatgggacctgagccgccttgttccttggccctgtttaatggggaagcacctcctcggcaggagggcagggctcccaggtcctagaaggccccttggtgggacaggagggctgggtgagctccacaggggctctgtccactccttccgctgtgagggtggcttttgcttctggggcttcgggtcgctgtggtctttgatgttgctgtcccattcaccagcgagggtctcgagctgagagctgtccaggctgaatgcccagtgggcagtttgaggccaggagcacactgcgtgggcccagcaggcgccttgcagtggagactttcccctcagccctgctggccaggggcctacccggtctcccttggggctgtgccattcctgtgcttcggatttactggggggttgcttct

SEQ ID NO: 9382 - DNA, 1015 bp, Artificial sequence
  DNA replication origin
gcggcagggcgttccggctacccgcttttattccgttatctgaccccacccacatcctgctgattggcccattgtacagggagctaattggtccgttttacagagcgttgattggtccattttgacagagtgctgattggtgcattgacaagcctttagctagacataaaagttctccaagcccccactccactcaggagtctagctagctttctctatcggatcctgagccccgcagcaggcggagctgcccgccagtactgcgccacgcgcccgcactcctcagcccttgggcggtccatgggacccggcgggggcggcgcccttccgggaggccccagcaccgagggagcccggggcgggggagggggggcgtggcctcggcatggcggtcggcgggtcccgagccctgcccagcagggaggcggctgaggccccgcgagaatttgagcatggcgcaggcgggctggcagtgctgggggacccggcgcacctccgcagccaccgtaggacagaggggcaagggggctcccagactctgcaaaggacgctgcggcggagactgatacgggtctgagatggctgtccaaggcccaagtgagaattaaaccacatgcccagccagtgcccaccacccgggccaacaccatttctctaaagcacgacacaggacattccaccaacagagcatcccaaaagggaatagagatcccggctggctcatcccatcaaccatgtcggagactcggcggctgcagatgcggtgggacctgcctccattaaaggcaccttctgtggggacagcaaggactctcacgcggggcacaccaggttagaggacacagccgcggctctcaagggaggcacaatgggttacaggagaaaacagccgaggctctcaagggggcagagcaggttacagaacactgcagaaccaggggctggtccctcatccagcgcagcttcactgagtgccagactcacgaggaccctgccctgccccgccccagcccac

SEQ ID NO: 9383 - DNA, 710 bp, Artificial sequence
  DNA replication origin
ccagtgtgagtgggtgaacagtgagtggcagccatgggcacgctgaggtacgcacacttcacccacctctgtgggccaggaaggcatgtcacatactcctgacaaggcagagggtgctgggagctcgcctgtgtcagacatgagggcccttggaccagggcctgggtttgaagccacctccataccccatacacggtgctcactgctcctggccccattgactgatgactgatggccagagggggacagcagctgtgtgaagtcgcctggcaggtgcggctgttggtggcactccctgggcggaggccacgttggacatttgtgaacaaacgagcaggttggggttacaggttataggatctgggaaatgtggtctgtgatgccatgcgccctgggggatctcatggagcccacatgggcaggcaccttttatcatgccaagaagtcaaacgtgggatgccatgtggggaacatgccctgggtgggggaataccctgggtggagatgccatgtggggaggatgctctgggtggggaatctttgtgggggttgtcctgggtggtggagccttggtgaaggaatggcctagggggtggctctgggagggggtggctctgggatgtggatgtcctgggagggggatgtcaccttagggggaaagcctgttgcagatgccctaggagggaagccctgtgtgagagatcatctgg

SEQ ID NO: 9384 - DNA, 810 bp, Artificial sequence
  DNA replication origin
gggggatctcatggagcccacatgggcaggcaccttttatcatgccaagaagtcaaacgtgggatgccatgtggggaacatgccctgggtgggggaataccctgggtggagatgccatgtggggaggatgctctgggtggggaatctttgtgggggttgtcctgggtggtggagccttggtgaaggaatggcctagggggtggctctgggagggggtggctctgggatgtggatgtcctgggagggggatgtcaccttagggggaaagcctgttgcagatgccctaggagggaagccctgtgtgagagatcatctgggtgggggctgccccgggtgggggatcatctgagtgggggctgccctgggtgggggatgtccccggtgggggatcatccaggtggcagatcatctgggtgggggatcatctgggtgggggatcatctgggtggaggatcatctgggtgggggatcaactgggtgggggctgccctgggtgggggctgccctgggtggaagatcttatcagggggatgcagtgggttatggccctgtggcaaccccaaacacacacacaccaagaagaagctggtctccctaggaggaggatccacgcagggcagcttggggtttggctcgtggatgctggggacaaggcctgagccccagatgtggctgggcctgacccaggcagctccaccccttccttcccaggaaacaccttttgctcgagcagtaggaactaggcgtgtgtagattctgctgcctgatcctggctcctggctgagggtttgtgggctcagatggactaga

SEQ ID NO: 9385 - DNA, 875 bp, Artificial sequence
  DNA replication origin
gggctgctgttttgatgggggtttgggcgctgctgttttgataggggtttgggggctgctgttttgatgggggttgggggctattgttttgatgggggttggggggctgctgttttgatggggtgttgcgttccctctcagtgtcaccgctgatccacctggcatgtttattggctcttctgcgtgcagggcccctgggggaccgatagaggactgggcccctccgcccaccccggccacccctccccgcctgacttctcagggggagaggtctccccccacgcccagccagcccctgcccctgggaggtgacccagctccctgtggcctgggactaggagatggggctggaccaaggccgggaaggggcaggaagtggaggggagtgaggcagctgcagcctgatgccggcgccttgaactgggctctcgcgcctgtcagccgctcggtgccagcgcctccccaccacgtgatcctcggagggcctgtgggggaggggcgggctcccggagcggctgcagaaggcgagctccaggagggtgtgtgcgttttcccgggaggggtctgcagctttcatggtttctaaagggatctctgattcagaaaggcgccggcatgaactcgctttgcatcttcacaaaacatgaagtcatggggattggaccgcgtgtgcgtggaggaagctccgctggtcactggctgcgttttaatcttacagctgcggttggtctatcttcccgaattccctgaagttgcaataaatgttttagcgattatacgaggttataaatgctcgttgtggaaatgagcatagaatgctcacagaaatggtcaacaggggcttccttttgaccccctaccctaatttgcaagcc

SEQ ID NO: 9386 - DNA, 823 bp, Artificial sequence
  DNA replication origin
ccggggctggaaccgtttccctattcccaggcgtagggggccgccggtgtgaggcgtgggaaattagggcgtggagggctggaatgaagccactgcccgcagcacgttttgagatccctggccacagaaacggcccagaatgagcgggtctcggggtcctgacaccaccgcgtcctggcaggtggggctgtcagaccgccccccgcagagcctccagctgccccgggccttggctactgtccgcgggcctgtggcgatggagaggcgctgccgggacaccttcccgcacccctgggagcagcgcccgaggatctgaggagccctttattctgcggtttcggttacgtaaacggagccgagggaggtgagaagcctgtccctcccgggcagtggcggggctgctgttttgataagcgtttaggggggctgctgtcttgatggggcttggggggctgctgttttgatggggtttgggaggctgctgttttgatggggtttagggggctgctgttttgatggggtttgggggctgctgttttgatgggtatttgggggctgctgttttgatgggggttgggggctgctgttttgatgggggtttgggcgctgctgttttgataggggtttgggggctgctgttttgatgggggttgggggctattgttttgatgggggttggggggctgctgttttgatggggtgttgcgttccctctcagtgtcaccgctgatccacctggcatgtttattggctcttctgcgtgcagggcccctgggggaccgatagaggactgggcccctccgcccaccccggccacccctcc

SEQ ID NO: 9387 - DNA, 1229 bp, Artificial sequence
  DNA replication origin
gcgaccaagtgctcagcgcagcgctccccctgccgccccgccccgcccccagccccgcccccagcgtcccgcgcccgcccctcgtgttcattggcagccccgcccccgccgccccaccaggcccggagcatgcgcgggcgcactgagacctcagccttacaagaccggctccgctgaggctccgccggccgccaggtatccgctcagcgcagggcgcggcggacctgcgggccgtgggaaccgctgggcagtggcagcgaggcccctcacctgtctctggggccccccggggacgaccggaccccgatctctgcgccccgcaggacgcgcgttgacggtgcggcgggggatggatgagcgcggccgcggcctcctggggtggggtgggttggcggcggggcctcgaggacagtgcggggcgagccccgaccgcgcccagttctttaaggagccgcagacggtgcagggaagcggcagggccgggctgtgagggtgctcggaccccaaggcggggcgcacccaggggactgggcttccaggtggggacagcgcggccggggatcgacctgagcagggagacgggtccgtgccgggcgcccagcgcagctgctcgggagtgggccgcccttcacgcaggagtggaggagcggagcgcgcacccctgaccccggcctcagcttccgttctccctgcaggtcgcccgtgtgcagcgccaccatcccggccgctcttccaatctcgcctttctccgggcacctgccgcccctcccccgctccccagacaggctttgcggagggggctcattccgcccggggctgccgggccctccgcaggagttggctccccacaaggttccggggccgagacgacagggcggttctgtggtgctgggtgctgggacttcaggggcacaggggcacctgccctggaggaggccgaggcgcagccccccaggaggaaggggtgcctctggtgactttcagcgggactcttccagccggactctagtgcagctgagctcctcccccagtcccggctctgtccctgccccaggtgtccagcaggccctggaatccgcaaaggcagaaggggaagttggggtgctgggtgctgggcagggggtgctgaggcctcacagcccggcggcttggcccccacccaccccacggtggtcccgcgccccacacttcctctcctctcctgtggtttctccttccactcagtgctg

SEQ ID NO: 9388 - DNA, 1591 bp, Artificial sequence
  DNA replication origin
ccagcgccctccccgagcctgcctcccgcgcgctgggggctgctgggctgtatgaacactgggctgctgccgtcgggccaggtcagagcctgcatggggctgcctgccccggcctctccctgggacaagaggggccgaccaccccagacccgatactaccacccggaaagacggctggaggcgaggatgaggccccttgagagcggcggccacgtaccttcatacctggggtccgtgcggagcaccccggggttcacgaggtactggacgaggacatacagcaggatggcgatcaggcagagcatgccagctgtggccgaggccacagtgctgaagaagaacctgccgggagacacacaggcaggcatgggggtggggacgtgggagcagtgggggcgcaggggcaggtgtggggggcacgggggcagggggtgtgcacggggtgggcaggggcgggcgtggggggcacagcggcaggggcatgcggggcatgtgggacaggtgtgggggcggggaggcaggggcagggacacgcagggcatctgaggcaggggcgggggcatgcagggcaggtggggggtgcagaggcaggggcagggacacgcagggcatctggggcaggggcgggggcatgcagggcaggtgtggggggcgcaggggtggggacgcgcagggcatctggagcccgcagggtggaggtgacaggtcagtgtgggcgtccacttgagggcgcctggccaccgcccaacgctggcctcaaaccctgctcccgaccgcgcctggaagctcaggctcctgtctctgtgccgtcctgtgacgcccccccaggtctccaggcctctcgctggagaggggtggccgtgggacattcccaccagcacaccgcccgacaattcaggcagcgcttcttgcaaacgtgattgcctttaatccccacaaggaacaaggaggttgtgaggagggggaaccagcccttttcacgagtggggaaagtgaggtcagagatgcggtgcgactcgcccaagcctaccagcggagcatgagggtcacacggcgtctccagtgtcacagctctggggcctctgcccgcacctcccgactccacctgatgcagacaggcctccctaccagccaaggagcacgcgggctcggtccactcggggggccctgagcatggtctgtgctggggtctccatggcaccatgctgggcaaaggcactgaagccagggaaggggagagccacgagagtgccgtggcacccaggagggcctgcaggctcagggacctggatctctgcacccaaagggaactcgggctgaggaggccctggaggagcccggccacacctcggctgcagtccccccttctccaagggtctcgtgcaaatctgagccaaaagcgatgtccatgctgtagacgtgagaccaaatccactcccagtctctcgtctttgctcaaaagatgcagagaataatccatccacaaaaaccaattctgggcagcagttcctggaacatactttgactaaaccatcttcccttggtctttctgccatgatgatatttttttaaaagtatcctttaacctcct

SEQ ID NO: 9389 - DNA, 950 bp, Artificial sequence
  DNA replication origin
gctctccagggtgtggaggacccagtgcccgcgcgaccgcccatcagttcccctgaggatttgttacgttctggggagtgctcgacagcccccacacagcgacaggtcccacaacccgttcacgaatacacaggcccacccaggactccccaggtgcaagaagaaaacccacgtcagaaagaggccacactgagcagagggctgcgcctgtgagaaactgaggcaatgcctgaagagctcgtgagccgttactcactggtgcaacactgaaacctgccagatcctccctgagaggcttctctgagcttcccagaggagcaggacccgagagctcacttcacagggtcctgtgtgtctccccttccacaggacagggaagcccgtccagccacgcggggctggggtctccgcccgggtggacagtggctgggaggttctgaacacgctgcggctgctcctggccagtcaggtggggagggcggcaggggtgggagggacgtggtgtcacagagcggcagtgaaagacactcaacggccgctacggggtggggggttgatcttgaggggctgggcggtctctacagaggagggttaggaagcttcgccacgttatgcctcgctcaaagtccttgttgtctctttgggaaaaaaccttcagaaaatgaagttgatattaaatgtatttctttgagaagagagacattgagaaatagttaacaattcttcgttcttgcagtcgtgaacgtccatgatacagtggctctgcgctgcctttggtggctcctccctggtcctctaaatgtgacaccaggcggatgcggggccacaggaccctggggcttgagtcacacaagaatgtctctgggagacccgagagactcacagttatgaaacaggaccatggttctttggccgggcgcgggggctcacgcctgtaatcccagcactgt

SEQ ID NO: 9390 - DNA, 2470 bp, Artificial sequence
  DNA replication origin
cctggtgtcgtaaagacaggatggggaccaggacagactcgggggaccacggagtcataaagataggacggggaccaggacagactctaggggcctggtgtcataaagacagggatgggaccgggacagactctgggggcctggtgtcatatacacagatggaaacaggaaagactgaggaggtcatggcatcttaaagacctgatagggtgggatgggcacctgtggtctctggggtctgtggcaggggctggttctcatgtgtggtggtgcagagaaggatggagtcccagtctgagaagggggctgtctccacatccacagatgggggcagacaggaggcgcctggggtccaccacacaggattgcgctgcaggccccggtgctgggcagccagttccccgggcatcggtccggttgtcataacacaggggggcccatccagccttagtcgtgctaaggggacctgaacccaacattacaagtcttcagtgtcatgactcacagatgctcctttcacttgaattgtgtgtgggagtgtgtgtgcattgtgtggtgtgtgtgggagtgtgagcattgtgtgttgtgtgtggtattctgtgggggttgtatgtgtgcggtatgtggtgtgtgtggtttgtgtgctgtgtgtggtatgcggtgtgtagtgcaaatgggtgtgctcggtggtgtgtggtttggtgtgtgtgtggtgtgtggtttggtgtatgtgtggtattttgggggtgtggtatgtgtgcagtatgtggtgtgatgtttggtgtgtgtggtgtgcagtgtgtagtgcaagtgtgtgtgctctgtgtgtggtttgtgtggtgtgctgtgtgtggtgtgtattctgtgtgcgtgatgtgtattgtgtgtattgtgtggtccctgtgtggtatggggagagtgatgcgtttgtggttggtgtctggtacttgtcacgtggtgcacgtgcagtgtgtggtgtgtttggtgtgtgtgttttgcttctgttgcatatgtgtggcgtgaggtgtgtgcgtgtggtttgtgtggtgtgtggtgcatgtgtggtgtgcatggagttgtgtggtgtgtgatctgttttgtgtattgtgtggtgtgtgggtggtgtgtgttgtggattgtgtggtctcgtgtgtttcgtgtggtgtggtgtgtaatctgtatgatgtgtgttgtgtggtttctgttttgtggtttgtgttgtgtgtctgtggtatgtgttgtgggtggtctgtgttgtatgatatatgtggtatgtattgtgtggtgtgtggcgtgtggtgtatggtgtgtgtggtgtcttgtgtgtgtgttgtgttttgtgtgttgtggtttctgtttggtgtgtgttgtgtgttttatgtggtatgcggtgtgtggtcagtgtggtctgtgttgtgtggtgtgtggtgtgtgtggtacgtggtctgtgtggtatatggtgtgtgatgtggattgtgtggtgtggtatatgaacgtgcttacaggccacggtggtatcgaggctgagcgtgggcctgaggggaaggagctgtcctggagtcttctctggctgatgtgacgtccgtgtcccctgctcgctgtcctccatggggtccatgccccttgcttgctgtcctccgcggggtctgtgcccctcgctcactgtctgtcctctgtggggtctgtccccccggctcgctgtcctcggtggggtctatccccactgctcactgtcctctgtggggtctgtgcccctcgctcgctgtctgtcctctgtggggtctgtgccccccggctcactgtcctctgtggggtctgtccccactgctcactgtcctctgtggtgtctgtaaccctcgctcgctgtcctctgtggggtctgtccccgctgctcactgtcctctgtggggtctgtccccccggctcactgtcctccgtggggtctgtccccccggctggctgtcctctgtggggtctgtgccccccagctcactgtcctcggtggggtctgtccccgctgctcactgtcctctgtgcggtctgtccccccggcttgctgtcctccatggggtctgtcttgccggctcgctgtcctctgtggggtctgtgaccccagcttgctgtcctctgtggggtctgtccccgctgctcactgtcctctgtggggtctgtgccccctggctcgctgtcctctatggggtctgtgccccctggctcgctgtcctctgtggggtctgtctccccggctctctgtcctctgtggggtctgtgccccctgactcgctgtcctctgtggggtctgtgccccctggctcgctgtcctctgtgggatctgtctccctggctcgctgtcctccatggtgtctctccccccggctcgctgtcctctgtggggtctgtccccgctgctcactgttctccatggggtctgtctccccggctctctgttctctgtagggtctgtgtcccc

SEQ ID NO: 9391 - DNA, 1047 bp, Artificial sequence
  DNA replication origin
tgggcagaacctgggtaggggagggggagatagctgggagcagagggcggcagtgacagggaccacttgcagattgtggggcgtgagggccagcagctgtgcatcgccggccagggccctgcaagcctgtgcttgtctgagccaggaagcaggagggtggtgggacctgctgtgtgggaggtggcatcctctgggcttggcttgggccacacttccaacctctgtccagcccctcccaccctttggtggttctggggcctgcagaatccaagatccgctcaccccgtggtgccctcagggctttgttgcaggtggggaaactgaggcagatgcccagtcgcccagaactaccctaggtcctctgagtgtggctgagcctcccccaccatctgttaaccttgggcacttgtcaacttttaggtgcctgacccctccccgagctcacagcttcctgttctgaattgggaggcagaggaggggcaaaggggtctcctccaagacctcagtctggatagggagtgcgtgcatgggctgcaggtgtgggggtgtgcaggttcggatggggtgcaggtgtgggggtgtgcaggttcggatggggtgcaggtgtgtgtgcaggtgtgtatggggtgcgggtgtgggggtgtgcaggtgtgtatgggggtgaagctatggggtctatgcaggtgcgtatgaaggtgcatgtatgggggtgtgcagatgtgtatgaggtacaggtattgggtgtgtgagtgtgtatggggtgcaggtgggtgtgtgggtgtgcgagtgcatgatgtgtttggtgtgaggggtcggggtgtgggtgtgctgtggtttttgtctccaccaaaatttaagcgtcataaccgaatggccagtgtgatggtgttaggagtggtgaggccgtgaaggggatgaaggtccttgcagaccaggcctcagtcagcagagacctctcaccctcccagcgcctccacgtgagaacacagtgtctgtcccctccgtaggatgcagcagaaaggtaccaccttggaagctgagcgcccc

SEQ ID NO: 9392 - DNA, 1398 bp, Artificial sequence
  DNA replication origin
gtcactgggtgttgacgtgaggcaccgcccttgttattccagtgggggtgctggtgttggatccgacagatggtccataataggccaccgactgtgttcacgtggctcctgccacagatggtctttgtggtggtggggcccactcagctgaccacgctctcctttctggcaggagacgttctagacccagtgtcttcagtggaaacagagcacaggctgtctgcagtctcaggcttcctagcagccctgataagagaagtagagcaatgcaggtgacattaatccttgcaggtttcatttcacctctatatccaacattttatctcaacatgtagtctgtagaaaacgttaatttgagctttatgggtttttttcatattaagtcttcaaaatgcacatgggatgggatgtaaagaacgctgaagtgggggcatttcagaggtgtctgctgctttttgcctgtgcctgctgggaagttgcagtgctctgtgtggcttgcgtgttgcgaggttgcggtctgcgtggctcacgtgttgggaggtcgtggtctgcgtggctcacgtgttgggaagttgcagtggtctgtatggcttgcgtgttgggaggttgcagtctgtgtggcccgtgtgttgggaggttgtggtctgcgtggcttgtgtgttgggaggttgtggttcacgtggcttgcatgttgggaagttgctgtggtctgcgtggcttatgtgttgggaggttgtggtttgtgtggcttgtgtgttgggaggttgcagtctgcgtggctcgtgtgttgggaagttgctgtggtctctggcttatgtgttgggaagttgctgtggtttgcgtggctcgtgtgttgggaggttgcagtttgcgtggcttgcgtgttgggaagttgctgtggtctgtgtggcttatgtgttgggaggttgtgggtttgtgtggctcaagtgttgggaggttgtggtctgcgtggctcacgtgtggggcggttgcttggctcgcctgttgggagtttgtggtttgcatggcttgtgtgttggaaagttgctgtggtctgtgtggcttatctgttgggaggttgtggtttttgtggcttgcgtgttggggggttgtggtctgtgtggctcacgtgttgggaggttgtggtctgcgtggctcacgtgttgggcagttgtctgcttggctcacgtgttgggaagttgtggtctgcgtggctcatgtgttgggaagttgtttatgtggcttgtgtgctggaggttgtggcctgcgtggctcacgtgttgggcggttgtctgcttggctcatgtgttgggaagttgtggtctgcgtggcttgtgtgttgggaagttgtttatgtggcttgtgtgctggaggttgtggtctacgtggcttgcactg

SEQ ID NO: 9393 - DNA, 1443 bp, Artificial sequence
  DNA replication origin
actcggccacacagggaagcgcctgcttcaggtcgcccacggcctcgtccatggcgcccccgagagcagtggggacccaaccagggcgcggccgccgccacctcacgcccagcgtcgccgccacagccgctgcctcagcccgcgggccccgccctagcttcgaatctgccgcgcgaggcgcaccacctcctgacccggaagcgctcgggcccggcagggccacttcctgccgcggccccgcctcgccccgtttccggcgcggcccagcgagctcggcaacctcggcgcagcgagcgcgggcggccagccagggccagggggcggtggcggccaaggtccgaccgggtgccagctgttcccagcccccgcctcgggcccgccgccggcgccgccatgggcaagaagcacaagaagcacaaggccgagtggcgctcgtcctacgagggtgaggcggcggcgctttgtgacgcgcggcgggcggggtcccgggcacgggggaggagttccgggcacgcggacgggggtcctgggcaccgggcgaggtcctggccacgagggaggggttctgggcacgcgggagggggtcctgggatttcgggcagggaaccgggcacacgtgaggggtcctgggtaggcgcttacgttcctggtagagggttctgggttcgaggctgcaagcccactcaccccggtcctggagactagggaagcatctgtgctggcttttgtgtggagctcagggagaagctgggctgccctttctcccgcctttccctccctctcccttgctcccgcagcagctccatgggtgtcagcgggcagcacgggcgcctgcaggaagtcaggcgagggtgaaccgaagtgctgggggtttctaggagggagatcgggctccggggttccaggtccctcttaatccatcttcttgaacgagtaatgtgaacaacatcccacagggcctctggtgaggacaccgtggctcgaaagggacctgaagctccctgcggaggggaagggagaacaaggaggcagtgacatgccgccactgtggtcttcccttccgtctttccctgctggttggcagccccgctgtactccttagggaggcctttccctcttagcaccttcacgtctcacctggctgcgtggcgtttgcacctgagcacgcgggtagaactcggtctgtgtctgtgcagattatgccgacaagcccctggagaagcctctaaagctagtcctgaaggtcggaggaagtgaagtgactgaactctcaggatccggccacgactccagttactatgatgacaggtcagaccatgagcgagagaggcacaaagaaaagaaaaagaagaagaagaagaagtccgagaaggagaagcatctggacgatgaggaaagaaggaagcgaaaggtaaaggagcagcggcggtggcccggacgctg

SEQ ID NO: 9394 - DNA, 1259 bp, Artificial sequence
  DNA replication origin
aggcggggccgcggcaggaagtggccctgccgggcccgagcgcttccgggtcaggaggtggtgcgcctcgcgcggcagattcgaagctagggcggggcccgcgggctgaggcagcggctgtggcggcgacgctgggcgtgaggtggcggcggccgcgccctggttgggtccccactgctctcgggggcgccatggacgaggccgtgggcgacctgaagcaggcgcttccctgtgtggccgagtcgccaacggtccacgtggaggtgcatcagcgcggcagcaggtgagccggacctgtccgacacatcctctgggcacccacccgccccgaccccagcgcgtgcaccgagccccgaccccagcgcactgattctgatgcgaccgaaccccagggtactgatccggcccgactggacccgggcgcacaggccgccgggccccgaccggatcctagcgcaatgacgcgaccccaccgcagggcactgacccggccgacccgagccctgcgcgcaggaccccagctcacagattgagccccgacccgacctcagctcacggacctggccctgaccctgcccctgccccggctgtcctccagtgcattgatgtggccctgagtcccacgttggagaataggatggctgcgcattacagagagctctagtctcagccgaaagctgggtggttattctttgagccactgcttctcagaccctttaattgttcccgttcctcacggactcgatgttaaatttttagggttcaaagcacatcccactcatttgtgaccaagtcagttcatggtatggtggggcctgtgggctgtgctgctccctggagtggggggaactcagcggcggggccagaccttcacagaccctccttatgtccacggagggtggattgaggtcaggtgagaccaccagcctcagaggggatgcagaggaagagacctttcctttaacagaatagctgttgactgggtattttctaggtgctggagttcagacacgtcagcataattgcaccagggcccagagacacctgcacaaagccccatcacagcctggcgacacctgtgtaaacaccttagcgctcagagacacctgtacacagtgccaccgcagcctagagacaccccatgtacaaccacacctgggcccagagacgctaggcataatcacaccagagcacagctgcacctagaggacagacacctacgtacaactgcaccagagttcatagacacctgcacacaa

SEQ ID NO: 9395 - DNA, 723 bp, Artificial sequence
  DNA replication origin
atgctgcacaggcctggggggcgtggctgcacatgtggcagtgctaccactgctgcctggggaaggtcaacttcacctagaccctggccaagggagggcaggccctgtgcctgcgcgccggggtgagctaagcagaggcaggacagggagcctgtgggtccccggcagaggaacaaggcacagaggttgggtgagctcacagctgctcagtccagcaccaggagggtggggctgcaggaagggccagagggaggcctaggcctgcagatcacgacccaggggctgacaatccagagatgcgggagtggacaggactggtgggggacagaaagagtcctctagagaggggctggaaccagaagcacgagggaatgaaggcaagagaggcaagcgtgtctccttgtttcttcctgagccacacccccttgtgactgacagggagaagtcacggtggcctccatcctctggtttgagtggcaggtgcacagcgaggccatcagcgtcgtgtggaatcccaggaagttagggatttggggcccagtgagcagtgtgggagtgtgcctggcatcccgggcatctaagcctgatgtctggtcacaggtggatgtgcaggtctgggattccccccacagaaccctgagctatgctgaaggggcacacgccaggagagaaggccacagacaggctgtgtagacccctccctgcggagagacgccagcagca

SEQ ID NO: 9396 - DNA, 908 bp, Artificial sequence
  DNA replication origin
gacgcagcccccaggctcgcccggtccctcctggcctcgggcacacggggctgccaggcgcgggcgccatccagccgttcctccctttccgccggttcccgccgggtgcctcgcagggccggcaagtccgcgttcccggggaaatattcggagagcgcttctccagctgatggcaggaagaaataaccctgagcaacagggaagccgagggcgcgggaacacagcgccgcgtggctccggaggctctgggtgccttccctccccaggaaacgctgccgagtaggtagaaaacactaaataaaagccacgtgtggagtgtgaagagctctgggaaggttttcatagaggacaccaagatgacagacgcagcagagtttcagtcacaaacgaagctcgggtgacagggaagggggacgcgaggggcccaggaggggcgggcggggaagaagcgcggacggcggcccccgcagggcgggaggaggaggctgcggccgcgaggacagctcggacgggggagagaaaggaggtttccagtaaaaataataacgccagagagaaaaccgtaactcgcgtgacacagacagaaatttccagtaataatcatcaggtgatagagaaggaaggcttccaaaatgaagaacaagtgaaataaaggttttagtcatgaattacagcacgtgcgatggatgagtggtgatttctcatcataaatggtaactcgggagatagagaaacgtgtccagccctaaactacaacagggtttggtttgaaagagaggtgctgtcataaagcggaactcaggggatggggaagacggcctccgtcccaaatgacaactcaatgacagagaacaaaagatccaaactaaagtgatggagaaaaagggtttccaaccaccacacaaatg

SEQ ID NO: 9397 - DNA, 1040 bp, Artificial sequence
  DNA replication origin
aaatctctgcagactcactctccgagaggagcgccttcgtggtgggttgaatcgatgccattgggacatcactaacagcaacacacagtacatcaaggtgagaggagggctggtgccccacttttggaggctgaagcctccaacagactgcccttgtggtcagcaccctgcagtctctgtgggttctctcagggtcagcgtggccaggaagcgtctgccaagccctgcgcggcaccagccagatccccaatccgagtctcagacggcaatgtagagtccacattttcctaataaccttagctcacattgatggcaattgaccctttggaacctgctttttatggggcatttatgcaaaaccacaaagaccagaggctgcacatgtgcaggtcctgggagggaccttagcaaagtgttcccacagttacatcctggtgatgagcaaaaaagagaaattttaaccagagtcagacaagaccgcactctccttccactccgattcctccctggtccacatcccctgtggcaggagaagtcagagtcagaggaggcaggaggagcatggagagtgatcatgggaacacaaggagcacggggagcatggggagcacgaggagtatgtggagcacagagagcatggagaatataaggagcactggaagcacaggacacatgaggagtacggggagcacaaagatcatgaggagcaggggagcacagagagcatggggagcacgaagagcatggggagcatggagaatataaggagcactggaagcacaggacacatgaggagtacggggagcacgaagatcatgaggagcaggggagcacagagagcatggggagcacgaagagcatggaagcatggagaatataaggagcactgaaagcacaggacacaagaggagtacggggagcacaaagatcatgagaagcaggggagcacagagagcatggggagcacgaagagcatggggagcatggagaatataaggagccctggaagcacagggcacacgaggagtatggggagcatg

SEQ ID NO: 9398 - DNA, 865 bp, Artificial sequence
  DNA replication origin
attcagttgctttaaaaataacagcatttacagggcaaaacggggtggcccaggtttaaaagaaaccacctgtctgttctgacggtcaaagcgtgagggaagccagtggtccaagcagatggaggcgtccgggtctgggcaggaacgtgtctgccacgtgcggtctgggttcaggtgaatcagggaagaggaaccccaggggcaggaagtgctggggacgcccctgtgaggctctgggtccagcctgctgagaaggggttgccaggggctggggcggctgcctggactccctgagaatcctgcagcccggctgacctgggcgctcataccaggtggggtggggtggggagggcacaccaggcgggcacacacccagtgggagggcacaccgggagggcaggcacaccgggcagggcaggcacaccgggcgggggacactcactgggaggggggccctcaccacgcagggcaggcacacgggggggacactcactgggcaggatgggcacactgggtggggcgggcacaccaggccgggtgtgcatgagacagcagccgctctggagaagcgcaaagcctttaggatcttagtgtgatctcacgtgtgggttcacgagtcctgtcccatcctggtcatggtgtccagaaaaacaggacggcgcataagtggccctgctgcttttgtgaggacgagggagcttcagggggtgagaagggaatggtgggtgtggcgcaggagatgggccagcagagggacgtccgacctgggcagcaagcaggagagccccagaggtcacctccatcggagacgcaggcacgcccttccccacctgcagccctgggctctctccgcggcatcggagtg

SEQ ID NO: 9399 - DNA, 1486 bp, Artificial sequence
  DNA replication origin
cgcagcccacatggcgccccccttccttgcgggcaggggtcccacagtgccccggccttggcgtctttgtggccctgctgcccattcaactcgagctgcaggtcctgcctctgggcctctgcctgccagcccctccctggagattccccgatggcctgctccagggctgctgagtggccacagcttctcatcctggccagcacaacacttgcagggcgggcacccagtgcgaggggcctttcccctccccgtttccagctccctctaccctccctctacctctgcgaccacctcccccaacatctctgcatcagagacaccatcccagtccgctagggggcatccccggcccctccccacaacacagccccagcccaggtccctcctccacacccgggcatcctcgccaggttactgcctctctccatggcacgggccgagggaggcctggacctcacttgcagctgggcctggagctggggaaaggccctggcacaggagtgctgggaagctgtggagaaaggaatggagaccaatgcagtgaaggggacgggtgggctgaagcaggccgggggctctggactggtagggctgatgcaggcagggatcttgggatctgtgcttggggtggggctgaggcaggctggggtctctggacaggtggactgaggcaggccgaggtcttgggatctgtgcttggggtggggctgaggcaggctggggtctctggacaggtggactgaggcaggccgaggtcttggggtctctgctcggggtggggctgaggcaggcaggagtctctggacaggtggactgaggcaggccgaggtcttggggtctctgctcgaggtggggctgaggcaggcaggggtctctggacaggtggactgaggcaggccggggtcttggggtctctgctcggggtggggctgaggcaggcaggagtctctggacaggtggactgaggcaggccgaggtcttggggtctctgctcggggtggggctgaggcaggcaggggtctctggacaggtggactgaggcaggccggggtcttggggtctctgctcggggtggggctgaggcaggcaggggtctctggacaggtggactgaggcaggccggggtcttggggtctctgctcggggtggggctgaagcaggctggggtctctgctggggggaatgcgatctggcggtggtaagtggttttgttgttgccctggcccataagctttctctgaccccaggcaaaaggctgcgctgtgtggcgcccctggctggccctgggagaaggagctccgataatgagggagatcaagagggccccagatcctggctgggccctggcgtctgttccagctgccttcttcccactctgccccctcatatggaaataatgttggacctcataaaagatccaggttcttgtttcaaattatgaaacaaacattctccttgattaataccatgtcaagccaccagtgag

SEQ ID NO: 9400 - DNA, 1490 bp, Artificial sequence
  DNA replication origin
agcactcctgtgccagggcctttccccagctccaggcccagctgcaagtgaggtccaggcctccctcggcccgtgccatggagagaggcagtaacctggcgaggatgcccgggtgtggaggagggacctgggctggggctgtgttgtggggaggggccggggatgccccctagcggactgggatggtgtctctgatgcagagatgttgggggaggtggtcgcagaggtagagggagggtagagggagctggaaacggggaggggaaaggcccctcgcactgggtgcccgccctgcaagtgttgtgctggccaggatgagaagctgtggccactcagcagccctggagcaggccatcggggaatctccagggaggggctggcaggcagaggcccagaggcaggacctgcagctcgagttgaatgggcagcagggccacaaagacgccaaggccggggcactgtgggacccctgcccgcaaggaaggggggcgccatgtgggctgcgcggggctgggttttgctgttttggcccatgctttccctgtgcctctgcctgttcagagcccctggcgccctggaggaaggtctgggggcagcagggggacctggatggctgggggtggagtgggaggggaaggtggggtccagggttttcctcctagtccagggagttggccgcgggtttggaggacagagccctgacagggacgtgaggcattggctgtgagctcgaggggacgtactcatgggcgccagggcagagacagaggaggctcagaattggagtctggggcctctgggaggggagctggctggtgaagtggtccagggtgagggcgggggcatggcagcaagcagaaggacccctttccactgacccacgccgctcgtccacagcagaggctcggaccccattccacgtgggaggtggaacatgctgggggggacagcagcccaagtggggacagaggggggtccagcagccttgccccaccccaccccccaccggatcccaggggtccagcagtccccttgcctctgaccagatcgctgggtccagcagcccatcatctgcatcacaggggcaatgtgtggtttttaggttttggtgtgtgtggtgtgtctgtgtggtgtgtgtgtgtgtgtggtgtgtgtttgtgtgtctgtgtgtgtggtgtgtgtgtagtgtgtgtttgtggtgtgtgtgtggtgtgtgtgtgtctgtggtgtgtgtgtggtgtgtctgtgtggtgtgtgtttgtgtgtctgtgtgagtgtggtgtgtgtgtggtgtgtttgtgtctgtgtggtgtgtgtgatgtgtctgtgtggtgtgtgtgtggtgtgtgtgtgtgtgtgtctgtgtggtgtgtgtgtagtgtgtgtggtgtgtgtgtgtgtggtgtgtgtttgtgtgtctatgtgtgtgtagtgtgtggtgtgtatgtgtctgtgtgtttgtctatgcacatttctttggtcctggcctt

SEQ ID NO: 9401 - DNA, 1565 bp, Artificial sequence
  DNA replication origin
cagcccgggaccggcagggtcagaagcgggcggcggcgggcgcggggctctgtcctcccggcccctccacctcagcgggcgcagccgtggggtccccaccaacagcgttcgtgggggcagcgcgggccccgtctccccccgtggctattctccccgcgaggccttggcgctcgtgcggccttgggagcaagagcgcccccgcgcgctcctcactcggcttgggacacgctcgtgaactctcggcggcgtcaccctcttccaccgcgactccgcgttctgggaggcggggctcatcctgttttgtggttgtcacggtggccacggctcctcccctcccgtttagaaagcggcgaggtcggggtccgccgtgtgagggggcgtccgccatgtgaaggggcgtcgaggcatgtccgctgtgtgagggggtgtccgcggcgtgaggggcgtccctgtgtgaggggcgtccctgtgtgagaggcgtccgcggagtgaggggcgtccctgtgtgcggaggcctccgtggcatgaggggcatccgctgtgtgaggggcgtcccctgtgtgaggggcgtccgcggtgtgacctcacggtgtggcgtgcctggaaggcatggtgtagccaactctgaccccggggtcaggggcctcttttgaagacactgtcttggccccaggctgtggctggagttgaaataggcgcatgcgcggagccggcacacacacacacacacacacacacacacacacacacacacccacgtccccttcagtgcccggctttttccccatagtgcgagcaaagccgtgagcctcgcgacccgaagtagccggcaagactgaaattcacacacgggttggtctccaccggagccctggggacgtctaagaaaagcactgcctgacatcggacaaaacgctactgtgacgcgtcacacggagcctgccgggacatttcccctccctgcccatgccgcgttggccctggcggattggccccacgagggaggatggcgactccgggtctggatgtgtgctccccttgcgtgctcttcgctttgcaaatggatccctacgtttttaagtgcacaagatcccctgggtgtcgcctgcacaccgcccccgaggccgcccttgtttgagtccacctctccttggctgtgcagcgtccgccagccatgctgacccctgaagccttggctgtgcctcccaagtgcaccgggtttccctgcagacacacgctttggcatgaacatgccttcttaggcatgaacaagaagttcacgtggctgccacacccaagtgccttgcatttcgcctgctccccgcaccccccccaaccatgttgccacacgaggcttattctgaattacaggttggttgtgatatcacctctggtacatggactgttaaaactattgaaagggaggtggatctgaagcacgcctacctgtttcctggcatacttggaacgttgccagaccactggatacttagaaggctaattctacatttatcctcagccatcattctgagcgccttcaaaagatgaatcatctgcaccgacta

SEQ ID NO: 9402 - DNA, 2252 bp, Artificial sequence
  DNA replication origin
ctgcggccgcacctcctcctccatccggagaccaggcccctgccccgcccgcggctgaggagataaggagaggctgatttgaaaagctgcgaggacgcgcattttaacctccagggacggcttgagccccgccctgcctttcgaaagtgctgggaacggattttatcagcaggcgaaactgtcctcaaagctccgtggcccagcaaaaggcagggcggggacgcccatggcccccgggccggccccctacgggctcagcctccgagtccccggactggacggcgcgggcgtcgggggtccaggctgctccggccgccccgctgtgagcccgagctgcgctgcagccgctggtcacgtatgggggtcccccgcgtcctttcctccaggccggcagtgggctggggccgcaagtgtccccgcgtacactggccgtcccccagggacaaggacagttgccctgaaaagctgcggctcccgccagaaggtcccagctcgggctgccccgggcagacgcagagcgaaaggcgaggcaggacgggcctgaggaacctggaagtccctgcagggcccctggaagaggcaggcagggggctgccccacagacgggcccaggagaggacacgccgggctggcatcacgtgaggagagcgtccagcaaaccacactggtcccgaggcctccacgaaaagtagatgggcatctcgcggcagccaccactgaggcagcaccgggaaagcatggtgggtgcccactggccccgcagagggcaaaggcatgcacacgccagaagggaacgtcaaggggagcaaagagaaccccttcctcctggaatggctgaggggaccaggccgctctgtgatgcagacatctcaaggggctctcccttgcactaccccatgtggactttaactcccaatttggaaagtaatgatgtcatcttctgtggtctcagggtcctagtgagtgtgtgaggataatagtgttacatgttatgcaaagggattgtgaactggcatgggggtcaggtttgcagggcctggagctggtgactccagctctagaacaaccccaggccggctctgccctacccaggagagatggtcataggggaaagagtccagtgggcattggaggcgtaggggccacttagggttgccctttgagctgacagtggggtacagattcagctctgcagtgcccctaacccccactgcggatccacccgggggaatgccctgaggacacgcgaggtgagggtcaggcgtgtcctgctgggtgggaactccggaccctctgggaaggaatgggtgaatcggctgctctcactctccagctcccactcagaggagccctgggggatcccattcctctacctcagaggactcccaggacactgtctgagcccagtgggaggaggacacacagccctgatctgccagtcagtggggctgagggtcaagctgtgcgccttgtgtgctggcggcgtcccgcctgggatggatggagatggtctgtactttcatgggtgaattgtagggcccctgaattgtatgtatctcaataaagctgctaaagaataaatgtaaaacctttgcctagtaactcaggttcactggagtgcatggggagtttctgctgtttggactctgcatgtgcctagttccaagtgacaaggtgggtgcgagggcacggcagccagtgcaggcccagcctcatgggctcctccagcttgggcaccctgtagggtgtggggttggtgccatggcccgcccccaccccccacctccacctgtcctcccaggacacttcctcccccagacctcctgacatctgcatttagcaaggaccagagctcagtcagcagaggagtgaaacacaatggcccttccccacctggctggggcacctcagccaacctcccccagtgggaccttctcggggtcttgggaggagggcccatgcatgtgtgaggcaaggctcccagccacacaggggacacgagcccaccagcagatcttcacccagggtggctcatcggtcctcatgtaagggcaggatttagaggcacgggaagggctgcaatcctcaggctgtgctactttgcataacatgtaacactatcatcctcacacactcactaggaccctgagaccacagaagatggcattgttaccttccaaattgggagttaaagtccacttggggtagcgcaagggagagaggaggggccgaaagagcctgggagggtggcc

SEQ ID NO: 9403 - DNA, 1244 bp, Artificial sequence
  DNA replication origin
caggtgccagagctgtctgcctgcaggaagtggcccctccactagggttcttcagaggatggtgggaatggctcgcaggcaagactactcccaggagggtccgtgtgcccttgttcatgtgctcgcccacagctcatgtatctgcggacagccagcaggggaggctgctggggtggggggcgggcctctggtttaactttccgttttgccactgagcagcctaggcctctgtaaaatcgtgtgatggcggcatctgccccgaggatggtctgagaatgggaggcagtaattggagtgaaagggcttggctggacgtcagctccagaggtgcaagtcagcactgggcagccgcggagctgcgctgctcagctgtgagacagggctccagccaggggagtgggaacagagagaccgggtgggacctgggccagcttagcggaggcctggcagggccggagctgggcaggtgaggggtcccgcaccgccagcctcggagctccaactccagggacgggagctgccctggcagaaggtggggtcacccactgaggttggagacgtgggcgtggcaacagcccgtggggaaaatgctgagctagctcttgaaaggctggggagatacaatgtatcaatgcaacagggcgtggcagggaggagagtcatgggtagggaagggagaaatgtcccagaaacaggagcaagttagggttccaggaggaagtgagggaagaaggttcctctgaaggtaaataaggaagagagccctgaggtacccagcagggtaggaggcagagagggggtccagtgaagggtactgagggacgggtctccagagccagctggaggagcttgagatgaggccagggaggtagcagctgaagccactgagttggacacgtggaggaggcagcgcaggtggccaggcttggggctcctgggaggctccaacaccctcaaggcacaggtcggaggagaccctgctcaaaccaaggacaaagtgagggggtgcagggcccttccagccggggccggggggggccaacgctggttcttcatcaatttggagcgccaggagagggcggggatctagtcctgccggataccacccccctttgggctgcccacacccccaccccctctccagcagccaagggaggcgggtcctccctttcaaagggaggtgccctcaggctcctctggaattggggatcccttgacccaggacggcctggtgaggggtcgga

SEQ ID NO: 9404 - DNA, 2000 bp, Artificial sequence
  DNA replication origin
gcgggcgtggggccgcctctcactgtcgttttcctctccccgcgtcccgccgtgccgcagccgccgccgcccgcaagcggagagagagcccggaaggtgagcgggcgagccgacgggcggggcggggggcggcgacccggcccgggaccctcagagctaggagcccgcgcgcgtcctgccctggagccagcagtggggggacggggccgcgggtctccaggagcgcgcgggacccccacgcctgcccctgcgcggtctccaggcgatggggacacagcgaaggcgcagcgcccgcggggctcacggcgcgtctctttccctcctcggtgcgggtttcccgcgcgtccgcccccggaccgcaggggacagcttcgtggcgtccgcgtacgcgagcggccgcaaaggcgcggaggaagcggagcggcgcgcgcgggacaagcaggtaggcggcggggcggaggctggggtcgcgctgcgcacccgcccgggggcggggagcggtgtcagagctgttcctggtgcccgcccgcggacaggcgagacgtgggccgccatggccgcacgagtgaccgggggccaggagagccagtctctccccagcctccacgacgtctggggctcccgtggggcgagcccttgctagtgtcccatgctgagtggcgggtaggggaatcggaattccttgtcctaggctgggagccgtgtgggggctccatgtttcgggctggaggagctgggcgagtgggaggggctggacctagacgtcccgggctgggggtcccggggagcgggaatgcagtaccccggctggatgagctggaggagttggaggaggggtgggagctacagacctggggcatcactggtcatagcctcagtgctcaatcagcaaacatggccagagtcagaggcctcggtgcctcccatctctgggaggggtgaccacaggcctgctagaggctcaggagacagagggacatctgcacagctgtggcaaggctgcagagactgcaaggctggctcaagagccaggcggccctgagggtgggtgaggaaggtgctatgtccaggagcagagaactgtccaggtctggggccctggaagggcctggggtaaattagacctgcatgtttgctgagcgtgagaaagctaacatttgatggtcatcagtgtcagtgtgaactgtatcggtgcagacagccccaccaggtggccaggcccacacttgccccttgcttcctcccccactgtccccagaggtccccagacacagaacatgccgggtcacgcaatcagtttcctttttggaaagacattgttctggcagttgattaaaaaaagttctgggtgtgtttggagacattttctgcagctctgtcttgagaaggggcttaggtctgcttggaaattaacatgcaatagagttaggattggtgcttcctgagagtgaccatctaacgcctgtgatggtgggaagcacgctgtaaggtacagtaagttgggtggtcctgtgagcctctatccgggacagggagaccagggtgaggtcatccagggagctgtccccgccccaatctggctctctctgccagttacatttgcacaggggcttgctggtgagtggatggtgccacttagcagccaggtgctcctggtatgattagtcagtgatgtgagcacctggggtgggcgggcgttcacctctctcgtggtcagggctttggccggcccctgtccattggcccactggcctggagccttctccctgggaggcgctgcaccatgaaccttaaaatccctgagccagcgccctcaccatgaagtgcagctcccagggccatggggcaaggccagtgcgctctggaaaatgcaggtgctcctcatgtgactacgatgtcagcgtgagggctgctcgtgggcgtttagacctgccactctacactgggacattttctttagagaatagcttgggaattggggcttgcttggattgttacct

SEQ ID NO: 9405 - DNA, 1076 bp, Artificial sequence
  DNA replication origin
agcagggacaacgggctgagacgcccacagagggtgggaagagcagggacaacgggctgagacgcccacagagggtgggaagagcagggacaatgggctgggacgcccacagagggtgggaagagcagggacaacgggctgggacgcccacagagggtgggaagagcagggacaacgggctgagacgcccacagcaggtgggaagagcagggacaacgggctgggacacccacagagggtgggaagagcagggacaaagggctgggacacccactagcgggtgggaagagcagggacaacgggctgagacgcccacagcgggtgggaagagcagggacaaagggctgggacacccactagcgggtgggaagagcagggacaaagggctgggacacccacagagggtgggaagagcagggacaaagggctgggacacccactagcgggtgggaagagcagggacaacgggctgagacgcccacagcgggtgggaagagcagggacaaagggctgggacgcccacagcgggtgggaagagcagggacaaagggctgggacgcccacagcgggtgggaagagcagggacaacgggctgagacgcccacagcgggtgggaagagcagggacaaagggctgggacacccactagcgggtgggaagagcagggacaaagggctgggacacccacagcgggtgggaagagcagggacaatgggctgagacgcccacagcgggtgggaagagcagggacaacgggctgggacacccacagcgggtgggaagagcagggacaatgggctgagacacccacagcgggtgggaagagcagggacaaagggctgggacacccacagcgggtgggaagagcagggacaatgggctgagacgcccacagcgggtgggaagagcagggacaaagggctgggacacccacagcgggtgggaagagcagggacaatgggttgggacacccacagcaggtgggaagagcagggacagggacagcgccactggctactggtggacaggggccagcaaggtcaagggtgcaggctctggggctgaaggacagcaag

SEQ ID NO: 9406 - DNA, 964 bp, Artificial sequence
  DNA replication origin
ctgctttccttatgggatgaggccccacggggcaggcccacggtcgggttcctgtcctcccaggggccaggagagcccccggcatcacaggaggatgccatgggcgggaggggacaacgggcatggggaggtctgcaggccagccgtggggtccctgctgacctggagggttctcagggatgcagagcagtgggacaggctagaggaggcgcctaggcaccccaaaccggaagtgcagctgggacaggaaggggggcggaacaggttgggggatcacaggagggtctcgctagggacagggccagagggattgagggggagggttgggccctcgggagggagtgagggtagggtgggtcctcaggagggcgaggccaggtgggggctgcatctcagggaggggcgcccgccctgggaagctgaggctttggtgggtgccggggcacattgggccaggcctgctgggatcctgtgtgcggacttggcctctcagaaggtcttcccagtggggaggggctgcacatctggccagcggcccgggggcaggttttataagttgcaattaaagctcttggccttctagttaaccgaggcagcgtagattaaagggcagttttatgcaaccaggacggatctgatgaaatcaccagccacagagattggagtggctttgactgtagatgctcattttttcccgtttgatcctccctgcatctcagaggtagctgttgacctgggtcttagaaaaaacactgtgcgttcgagcgctgagaattctagggaataaggggatattttttcaatgtggttttcctctgtgttaggaactcagtcatgggctggttggtgtagtattggctggttgatacagcgttggctggttggtgcagcgttggctacatggtgtagttttggttggttattacagtttttattggttattgtagcttggctggttggtgta

SEQ ID NO: 9407 - DNA, 963 bp, Artificial sequence
  DNA replication origin
gaacgagtgagttaatgaatgagtgaacaagtgagtgagttaatgaatgagtgaaccagtgagttaatgaatgaatgaatgagtgagtgagttaatgaatgagtgaatgaatgagtgaatgctgaatgaaggagggagggagtgagtaatggcaggacccccctttcagaccgggagcccacccgttgcaggatggagggtgaactggcagaggagccaagggtggctgacaggaggttgtctgcacacgtcaggtgagggctggggtgccagggtggggctgtgccttaggcgggggcaccctggccacacccctgcttcccgcaggccacaggccacaggccacacaccatcctctaggtcagacctgcagggggcacctggtccagcagctctgtggggcatgggcccttccagcatctggcaccctggctgagctgggcccccaagtctgtctgagcagagggctttgaggggcagcagccacagcggccttgacaccctcagtctggacttgctgtggctcactgtggctccctgtggctccactcagcagctttgggggcaacagggctgggggtggctggggcagtggctgagggtggctggggcagtggttgggggtggctggggcaatggctaagggtggctggggtagtggctggggatggctcaggcagtggctgaggcagtggctgggggtggctgggtggctggggtgtggctggcgcagtggctacagtggtcccagagtggtgatcaggtgccactacagcatgagccactccctagagcacctgcggctctggtgcctgggagggagttcacagggttctgggggtcggctgtgaccttgtttctctggacggcacttgactgtctgtgcccaggcgtccactctccttcctgctctgcgaggaggtgggtgctggtcaggatgcaccccggacccctgccgcctgc

SEQ ID NO: 9408 - DNA, 1147 bp, Artificial sequence
  DNA replication origin
gtccgggaaagccttcagctactacctgccggccgtcctgccgccccaggcccctcaggacggccaccacctcccgcagcccccaccgccaccctacggccacaagcggtaccgccaaaagggcagggagggccactcgccactcaaggccccacacgctcagcctgccacagtggagcacgaggtggtgcgggacctgccgcccacgccagcaggagagggctacgcggtgccagtgatccagcggcacgagcaccaccaccaccacgagcaccaccaccaccaccaccaccaccacttccacccgtcctagcgccactgccaagcacacctcgctcccagcacaccacagcccgcgacctcagggcagggagcagagcagctgccggctgtgtgcccatggggagcccagcccccaccccccacctccgacagcaaacagcaactgactgcaggtgctggcatgatggaggtggtgcaccttggacacgtggacaaggcccaggcgccctctgctcttctgccctcgatgccacatggcggtgaacacatctgaagccactatgtttcctggctctaaggctcgtctgtgtaacccataaaacctgctttgattccaaaatgaggccctggagtgcgcaaggagtgcccggatgcttggggtgggtgttcctcccggggcttcaaggggtgactgctgtaggctgtcccagtgcgaggccgggagcgaatggaaaagctgaggctttgcctggcttgtgcatcatgaagtgagaggggacagggccggtggggggaagcagcttgtgcttagcagggagcatccgcggctccccgcaggaggccaagcagcagaaggcagcagtgctagaaagagaagtgccagagtagggagtgcagaccagtgaggaggggccacagggcacagggggagcccacaccagtgaggaggggccacagggcagcatgcggcagtggaggtagcccctggtcccggagccacagcagctcaggtgcatgcaggacacagtcaaggcggggaggggcagggcaacagatgctggggagagggagaggctcgcgctgggtgcggctcagaacacggggacttgcacattcacggtcccaacactcacggggcgacttc

SEQ ID NO: 9409 - DNA, 1154 bp, Artificial sequence
  DNA replication origin
aggggccacagggcagcatgcggcagtggaggtagcccctggtcccggagccacagcagctcaggtgcatgcaggacacagtcaaggcggggaggggcagggcaacagatgctggggagagggagaggctcgcgctgggtgcggctcagaacacggggacttgcacattcacggtcccaacactcacggggcgacttctgtgacatgtcagctttggagaaaggtgtgtcctgcaagggtcaggagacggttgcaggccagaaggacgtcccagtgacgtttcggagtcttgcagcctgcaggggtccatgtggttacccggaacaggaaccgtgggggtgctttccgggacccagggggcccgtgccaatgtttctgagtcttggagcctgcaggggtccacgtgtttaccctgaacaggaacatgcgggtgttttccggaatctggcgaggccgcgcggcagttttgcatttacattccttgttttgtttttaaggataaagcggtgctgggtggggtctgtgggaggggtttgagccatggcggaagatccctggtgaatggcttggatgtttgtcgcctccgagtctcatgctgagacgtgatccgtggtgctgggtggggtctgtgggaggggtttgagccatggcggaagatccctggtgaatggcttggatgtttgtcgcctccgagtctcatgctgagacgtgatccgtggtgctgggtggggtctgtgggaggggtttgagccatggcggaagatccctggtgaatggcttggatgtttgttgcctccaagtctcatgctgagacgtgatccgcagtgctgggtggggtctgtgggaggggtttgagtcatgaggacagatccctggtgaatatggcttggcgcccttgccgtggtgatgagtgagctctcattcggtgtttgtgggagatctggttctttagagcaagggccacaacccccaggctgtggactgctactggtttgtggcctgttaggaacgggcctcacagcatggggtgggcggtggtgagtgagcatgagtgcctgagccccgcctcctgttagatcagaggcgggattagatcctgatgggtgctcgaaccctgttgtgaactgcgcatacgagggatctaggttgtgtgt

SEQ ID NO: 9410 - DNA, 8291 bp, Artificial sequence
  DNA replication origin
catatgcacaaaaagtgagccagtgctgaatggtctcgttcattaaacacccacatgtaaagatcagtgtgtcttgtcagttacgctgcagcagcttggcctggggccaagggcgaattgtgtgtgtgaagctgttgggtaccatgtccagcaggcctggcacatggtggatgggaagggacacagcacaggatggcatcaggtccctctctggctcccgggccacacctgtcgggggacatgggtgccaccaaaaggaaggccgtgctgtgctgcaggcaagatggaggcagaggctcctcggaggactcccggcacacagcctgctcctggggcagctctacctgccgtttggcccagtcttcccaccatgctggcaccagaaaggcttcactgcaggagaccgggtgacaaaggtgacacacagacagaggcctgggtcacagaaaccaagagccttgttctttcttgtgtgagtgtagactttgactaccagatgatcttgtcgctggaccagcctgtatctgaatgagtgggagtgacttggtgtaaattagtgagtgaatgggtgaaggatgagtgggtgaattagggaatgaatgagtgaacgggtgaataaatgaatggaacggtgactgagtgagtgaatgacagtggtgagtgagggctgaggggtaaatgagtacatgagtaggcgaatgaatgcatgacagtgagtgggttagtgtgtaaatgagtgtgtgaatgagtgaacgggtgaatgaacaatgagtgagtgacagtgatgagtgagggctgaggggtaaatgagtacatgagtaggcgaatgaatgggtgggtgacagtgggtgagctgtgaatgaatgggtgcttaaggagtgagtgaatgatgagtgggtgaatgggtgagtcagggaacgggtggatgagcaggtaagtgaattagtatgcagatgactgggtgaacgagttggtgagtgagggaaccagtgagtgagtgggttagtgtgtgaatgagtgggttagtgtgtgaatgagtgggtgtgtgaacgagtgggtcagtgtgtgaatgggtgtgtgaacaaatgggtttgtgtgaatgggtgtgtgaacgagtgggtgtgaatgagtgaatgggtgtgtgaaggagtgggttagtatgtgaatgggtgaacgagtgggttagtgtgtgaatgagggagtttgtgaatgagggagttagtgtgtgaatgggtgtatgaacgactgggtttgtgaatgggtgtgtgaacgaatgggttagtgtgtgaatgggtgagtttgtgaaagagggagtgtgtggatgtgtgaatgagtgggttagtgtgtgaatgagtgggtgtgtgaatgggtggtgtgtgaatgagtgggttagtgcatgaatgagtcgggttattgtgtgaatgagtttgtgaatgggttagtgcgtgaatgagtgggtgggttagtgtgaatgagtgggtgtgtgaacgagtgggtgagttagcgtgtgaatgggttagtgtgtgagggggttagtgtgtgaatgggtgtgtgaatgagtgggttagtgtgtgaacgagtgggctagtgtgtgaacgagtgggtgagtttgtgaatcagtgggcgagttagtgtgtgaatgggtgaattcgtgtgtgaatgtgtgtgaacgagtgggtgacttagtgtgtaaatgactgggtgtgtgagcgagtgggtgttagggtgtgagtgggttagtgtgtgaatgggtgagttagtgtgtgaatgagttagtgtgtgaatgaatcagtgggttagtgtgtgaatgagtgagtgaatgggtgggttagtgtgtgtgtgaaggggttagtgtgtgaacgagtgggcgagttagtgtgtcaatgagtgggtgtgaatgagtgcgtgtgtgaatgagtgggtgagttagtgtgtgaatgagtggctgtgaacgagtgggtgagtttgtgaatgaatgggtgagatcgtgtgtgaatgggttagtgtgtgaatgagtgggtgggttagtgtgtgaatgaatgggtagattagtgtgtgaatgagtgggtgggttagtgtgtgaatgagtgagttagtgaatgggtgggttagtgtgtgagtgagtgcatgaatgggtgagttagtgtgtgaacgagtgggcgagttagtatgtgaatgagtgggttagtgtgtgaaggagtggatgtgtgaacaagtgggtgagttaagtgtgtgaatgagtgggtgtgtgaacgagtgggtgtgtgaatgaatgggtgagttcgtgtgtgaatgagtgggtgtgtgaatgaggggtttgtgaatgagtgggtgagtttgtgaacgagtgggcgagttagtgggtgaatgtgtgaatgagtggatgagttagtgtgtgaacgagtgggttagtgtgaatgagtgggtgagttagtgtgcaaatgagtgggtgagtgtgaatgggtgtgtgaacgagtgggttagtgtgaatgggtgaggtagtgtgtgaatgagtgggttagtgtgaatgagtgggtgtgtaaatgagtttgtgaatgagtgggcaggttagtgtgtgaatgaataggtgagtgtatgaacgggttagtgtgtgaatgagtgtgtgaatgagtgggttagtgaaagagtgggcaagttagtgtgtgaatgagtgggcgagttagtgtgtgaatgagtaggtgagtgtgtgggtgtgtgaatgagtgggtgagtttgtgaatgaatgggtttgtgaatgggtgggttagtgtgtgaatgagtgggttagtgtgtgaataagttgggttgtgtgaatgagtgtgtgaataagtgggtgggttagtgtatgaatgagtgagtgtgtgaatgggtgagtttgtgaacgagtgggcaagttagtgtgtgaacgagtgggcaagttagtgtgtgaacgagtgggcgagttagtgtgaatgagtgggcgagttactgtatgaatgagtgggcgagttagtgtgtgaatgagtaggtgtgtgaatgagtgggtgtgtgaacgagtgggtgagtttgtgaatgaatgggttagtttgtgaatgagtgggtgggttagtgtgtgaatgagtgggttagtgtgtgaataagttgggttgtgtgaatgagttagtgtgtgaataagtgggtgggttagtgtatgaatgaatgggtgagtttgtgaacgagtgggcaagttagtgtgtgagtgggcgagttagtgtgtgaagcagtgggcaagtttgtgaatgagtgggtgagttactgtgtgaatgagtgggcatgtgaatgagtcgatgagttagtgtgtgaatgggtgtgtgaacgagtggctgagttagtgtgtgaatgggttagtgtgtgaatgagggattttgtgaatgggtgtgtgaacgagtgggtgagttagtgtgtgaatgagtgggtgtgtgaatgagtgggtgagttggtgtgtgaaagagtgggttagtgcatgaatgggtgggttagtgtgtgaatgggttgtgaacgagtgggtgagttagtgtgtgaatgagtgggtgactgtgtgaatgaatgggttagtgtgtgaatgagtgggtgagttagtgtgtgaacgagtgggcgagtttgtgaatgagtgggggagttagtgtgtgaatgagtgggtgagttagtgtgtgaatgggtgtgtgaatgagtgggctagtgtgtgaatgagtgggtgtgtgaacgagtgggtgagttagtgtgtgaatgaatgggttagtgtgtgaatgggttagtgtgagtgagtcagtgggttagtgtatgaatgaatgagtgggtgggttagtgtgtgagtgggttagtgtgaaagagtgggcgagttagtgtgtcaatgagtgggcgagtttgaatgtgtgtgaacaagtgggtgagttagtgtgtgaatgagtgggttagtgtgtgaatgagtgggtgtgtgaacgagtgggtgagttactgtgaatgaatgggtgggttagtgtgtaaatgaatgggtgagttagtgtgtgagtgggttagtgtgtgaatgagtcagtgggttagtgtgtgaatgggtgggttagtgtgtgaatgagtgagttcgtgtgtgaatgggtgagttagtgtgtgaatgagtgggtgagttagtgtgtgaatgagagggtgtgtgaacgagtgggttagtgtgtaaatgagtgggtgtgtgaacgagtgggtgagttggtgtgtgaaagagtgggttagtgcatgaatgggtgggttagtgtgtgaatgggttgtgaacgagtgggtgagttagtgtgtgaatgagtgggtgagtgtgtgaatgaatgggttagtgtgtgaatgagtaggtgagttagtgtgtgaatgagagggtgtgtgaacgagtgggtgagttggtgtgtaaatgagtgggtgtgtgaacgagtgggttagtgtgtgaatgagtgggtgagttagtgtgaatgaatgggtgtgtgtgtgaatgagtgggttagtgtgtgaatgagtcgggttagtgtgtgaatgagtgtgaatgagttagtgtgtgaatgagtgggtgagttagtgtgtgaacgtgtgggcaagttagtgtgtgagtgggcgagttagtgtgttaatgaataggtgagtttgtgaatgagtgggtgtgtgaacgagtgggtgagttagtgtgtgaatgaatgggttagtgtgtgagtgggtgggttagtgtgtgaatgggtgggttagtgtgtgaatggatgagttagtgtgtgaatgagtgggttagtgtgtgaatgagtcgggttagtgtgtgaatgactgggtgggttagtgtatgaatgagtgtgtgaatgggtgagttagtgtgtgaacgagtgggcgagttagtgtgtgaatgggtgagttagtgtgtgaatgagtggctgaacgactgtgaatgggtgtgtgaacgagtgggttagtgtgtgaatgaatgggtgagttcgtgtgtgaatgagtgggtaagtgtgtgaatgagtcgggttagtgtgtgaatgtatgaatgagtgggtgggtcaatgtgtgaatgagttagtgtgaatgagtgggtgagttagtgtgtgaacgagtgggtgagtttgtgtgaatgagtgggcgagttagtgtgtgaatgggtcagtgttttggtgtgtgaacgagtgggtgagttagtgtgtgaatgagtgggttagtgtgtgaatgagggagttagtgtgtgagtgggtttgtgaacgagtgggttagtatgtgaatgagtgggtgagttagtgcatgactgagtgggtgagttggtgtgtgaatgagtgggttagtgcatgaatgggtgggttattgtgtggatgagtgtgaatgggtgtgtgaacgagtgggttagtgtgtgaatgagtgggttagtgtgtgagagtgtgtgagggtgtgtgaatgagggggttagtgtgaacgagtgggcgagtttgtgaatgagtgggcgagttagtgtgtgaatgagtgggtgtgtgaatgagtggatgttattgtgtgaatgagtgggtgtgtgaacgagtgggttagtgtgtgaatgagtgggtgagttagcgtgtgaatgagggatttagtgtgtgggtgtgtgaacgagtgggcgagttagtgtgtgaatgagtgggttagtgtgtgaatgggtgtgtgagtgggttagtgtgtgtatgggtgtgtgaacgagtgggttagtgtgtgaatgaatgggttagtgtgtgaatgagtcagtgggttagtgtatgaatgtgtgtgagtgggtgggttagtgtgtgaatgagtgggtgagttagtgtgtcaatgagtgggtgagtttgtgaatgagtgtgtgtgaacaactgggtgagtgtgtgaatgagtgggtgagtgtgtgaatgagtgggttagtgtgtgaatgagtgggtttgtgaatgagccggtgggttagtgtgtgaatgagttagtgtgtgaatgagtgggtgggttagtgtgtgaatgagttaatgtgtgaatgagtgggtgagttactttgtgaacgagtgggcgagttagtgtgtgaatgggttagtgtgtgaatgagtgggtgtgtgaaggagtgggtgagttactatgtgaatgaatgggtgagttagcgtgtgaatgggtgggttagtttgtgaatgaatgggtgagttagtgtgtgagttggttagtgtgtgaatgagtcggtgggttagtgtgtgaatgagttcgtgtgtgaatgggtgagttagtgtgaatgaatgggcgagttagtgtgtgaatgagtgggttagtgtgtgaatgagcgggtatgtgaacgagtgggttagtgtgtaaatgagtgggtgtgtgaatgagtgggtgtttgtgtgaatgaatgggagagttagtgtgtgaatgggtgagttagtgtgtgaatgagcgggtgtgtgaacaagtgggttagtgtgtaaatgagtgggtgtgtgaatgagtgggttagtgtgtgaatgagtgggttagtgtgtgaatgagtgggttagtgtgtgaatgagtgggttagtgtgcaaatgaatgggtgagtttgtgaatgggttagtgtatgaatgagtcggtttagtgtgtgaatgagtgtgtgaatgagtaggtaagttagtgcgtgaacgagtgggtgagttagtgtgtgaatgagtcggtgagttagtgtgtgaatgaatgggttagtgtgtgaatgagtgggtgggttagtgtgtgaatggatgagttagtgtgtgaatgagtgggttagtgtgtgaatgagtcggtgggttagtgtgtgaatgagtgggtgggttagtgtatgaatgtgtgaatgggtgagtgtgtgaatgggcaagttagtgtgtgaatgggttagtgtgtgaatggtcgaacgagtgtgtgtgtgaatggttgtgtgaacgagtgggttagtgtgtgaatgggtgagttcgtgtgtgaatgtgggtgtgtgtcgggttagtgtgtgaatgtgtgaatgagtgggtgggtcaatgtgtgaatgagttagtgtgaataagtgggttagtgtgtgaacgagtaggcgagttagtgtgtgaatgggttagtgtgtgaatgggtcagtgtgtgagtggatgtgtgaacgagtgggtgagtttgtgaataggtgtgtgaatgagtgggttagtgtgtgaatggagtttgtgggtgtgtgaacgagtgggttagtgtgtgttagtgtgtgaatgggtgagttggtgtgtgaatgagtgggttagtgtgtgaatgagtgggtgggttattgtgtgaatgagtgagtgggttagtgtgtgagggagttagtgtgtgagtgggtgtgtgaacgagtgggttagtatgtgaatgagtgggttagtgtgtgactgggtgagttggtgtgtgaatgggttagtgcatgaatgggtgggttattgtgtggatgagtgtgtgaatgggtgtgtgaacgagtgggttagtgtgtgaatgggttagtgtgagtgtgttagtgtgtgaatgagggtgtgtgaatgagggggtgtgtgaacgaatgggcgagtttgtgaatgggtgtgtgaatgagtggatgagttgtgtgaatgggtgtgtgaacgagtgggtgagtgtgtgaatgagtgggttagtgtgtgaatgagggatttagtgtgagtgggtgtgtgaacgagtgggtttgtgaatgagcgggtgtgtgtgaatgagtgggtgagttggtgtgtgaatgagtgggttagtgcgtgaatgagtgggtgggttagtgtgtgaatgagtgggtgtgtgaacgagtgggcgagtttgtgaatgggtgtgtgaacgagtgggttagtgtgtgaatgggttagtgaatgggctagtgtgtgtcagtgggttaatgtgtgaatgagttggtgaatgtgtgaacgagtgggcgttagtgtgtgaatgagggtgtgtgaacgagtgggtgggttagtgaatgagtgtgcgaatgagtgggtaagtgtgtgaatgagtgggtgagttagtgtatgagtgggcaagttagtgtgtgaatgggtgggtgagttgagtgggtgtgtgaacaagtgggttagtgtgtgaatgagtgggttagtgtgtgagtggattagtgtgtgaatgagtgggtgggtttgtgaatgagtgggttagtgtgtgaacgagtgggcaagttagtgtgtgaatgagtgggcgagttagcgtgtgaatgggcgagttaagtgtgtgaatgagtgggtgactgctctagccgagttcttgctccttgggaagcaccggccaaggctagg

SEQ ID NO: 9411 - DNA, 1019 bp, Artificial sequence
  DNA replication origin
tggtcagacacagcctgcttccccggggacagggcctggatgctggtacggccccacctgccccaagcctccctgagacggggacgcctgcgtgctggtcgtgtgggcgagcaggtggtctggggtgaacacgtgtgtggagccccgtcaggtgagggggagactctgccagcacgtgtcacctcctgtcagtacggggtcatggggcctttccagttcagggccagggcgggaaggtgagggggtgagcgtttggtcgggaagcctgggaggagggaggcagtcacgggggcggcgcaggaccagtgtgggacgccaggctgggtcccgggtcaggcacacagggcccttcaggttctgtgagctgccctcacctccggcctggcatcccgggtcgctctcgcccagaggagttttgagaccggctggtctcaccaagtcccgggcccgccaggcccagctgatccacgacaggaacaccgcgtcccacaccgcggcggcagccaggacccaagcgccgcctacgccagacaaggtgcagatgacctggaccagggagaagctgatcgctgagaagtacaggagcagagacaccagcctatctggtttcaaagacctcttcagcatgaagccgtgagtgtccgtgcgtgtggcctggggggaacagatcctggcagtgctggcccggcagtgaggacagagtcccttccctgaccactgaagagcttcggggcaaccctgcaggccagtgggcccgttagagaacagggagccgcctgagtgggcactgaggggtccttttggtgccaaggccgggccctgagttcagccctgtggccgggcgctgagggatccttctagtgccaaggccgggagtccttgtaagacctgggtgccaagtgctgaggggtccttctagtgccaagcgctgaggggtccttctagtgccaagcgctgaggggtccttgtaggacctagggtgggtcctgatgttaaccccacagctgggtgacgagcag

SEQ ID NO: 9412 - DNA, 923 bp, Artificial sequence
  DNA replication origin
agacgcaggggtcccgcatggcggatgcggcaggtgcggcgggtgcggcgggtgagactcagggatcccgcacggcgggtgcggcgggtgagactcagggatcccgcacggcgggtgcggtgggtgagacgcaggggtcccgcatggcggatgcggcaggtacggcgggtgcggcgggtgagactcagggatcccgcacggcgggtgcggcgggtgagactcagggatcccgcacggcgggtgcggcgggtgagactcagggatcctgcacggcaggtgcggtgggtgagacgcaggggttccgcatggcggatgcggcaggtacggcgggtgcggtgggtgagacgcagggatcccgcacggcgggtgcggtgggtgagacgcaggggtcccgcacggcgggtgcggcgggtgagacgcaggggtcccgcacggcgggtgcggtgggtgagacgcaggggttccgcatggcggatgcggcaggtgcggcgggtgcggcgggtgagactcagggatcccgcacggcgggtgcggcgggtgagactcagggatcctgcacggcaggtgcagtgggtgagacgcagcagtcccacactgtggatgttccgggtgaggcgcaggggtcccgcacggtgggtgcaatgggtgagacccagggtcctgcatggcgggcgctgaggttgtgctgtggcttctccatgtgttctgggtgggtttcccatggtgccaagcccccctgagcatagacaatgacacctgtgagcgtggatcatgcagccccatggggcagtgcctcgccctgagccgtgtgtgccaggttggtttgtggctgtggccttgccctcacagctgcccttgtgcccggtcggagggtcccggggagggacatgagcagagcgtgtgtgcggcgtgactgcccatcg

SEQ ID NO: 9413 - DNA, 833 bp, Artificial sequence
  DNA replication origin
catggagctctggatcctggggatctggtgggccccttgtgctggatggaaccatgcctgctcgctaccagcccacccggatccacggctgtgccttcccctccggtcctgctggcggtcccgggactttgtgggttctgaccccacttggatcacgccgacaacactggtcttgaagtcagaacccgcaaagtcctggtttcttccggctcccgtgaccccagcgcatggttttgcaggtcctcaggggcctggactcctggaggtgggtgctgggaagacataaagctggatagagactgtcacgctgtcccccaggaagccacctgtgcccctgcagcagcctgggaggtgcggtctctccagccccgcagccccccagtcccccagtccctcagtcccccagccccccagccccccagccctgggtatggcagaggccccgagcacctgctcctggtttgtgtcgggctgtgagtgaggccaggcacggcttcgtgcctcaccgacaaccttctgtgtttctgtgtcagttcccgtggaactcagttgtcctgtggggttgttcttcctcttgccctgcaggacctttcctaggccgagggctgcaggcctgcgtgacgctggatggttttctgcccagttttgtacactgggcttagtttccatgtggctgtgtcttcggggacgatggctggagtttgtcttgtttggacgaggctttgcgggttcaaggttgtaggggttattattggtgctaatagtcgtatgaataacgttatttccaagtcataaaaccgcttagtaaaatagtaacaaaatgctgcctggga

SEQ ID NO: 9414 - DNA, 1458 bp, Artificial sequence
  DNA replication origin
aaaaccaggagcgcttcggcgggggccacatcgacgtgtggtggatcgtgcacgacggcggcatgctcatgctgctgcccttcctgctgcgccagcacaaggtggggcgtgcgacggggacacgccagccggagcacggccaccccacgtgctgcgggccgggacgggctcctctgaggccccacagccatgccctccctgtctgcaggtgtggaggaagtgccggatgcgtatcttcaccgtggcccaggtggacgacaacagcatccagatgaagaaggacctgcagatgttcttgtaccacttgcgcatcagcgccgaggtggaggtggtggagatggtgagtcccgagggcttgaggggaggaggccggggggaggtggggaggaggtggggggcggcccgggagggctgtgggcctcgtgaggtgggggtggagggggaagtggagatcgggagggctgtggcctcgtgaggtgggggtggagggggaagtggagatcgggagggctgtggcctcgtgaggtgggggtggagggggagatcaggaggtggaggtggaggtggggaggagaaggtggtggcgattgtggcgggggctgccaggccttgcggggtggtcaaggaggcttggttttggaatcgccaggacatcacagaaagcacagagccccgtgtgttgcttgtggacacctcgtgtaacacgggtgtgggtgttgccctagagccggcatcagcatctccgtgtcctccatggtcccgtgtcctcctcggcccgggaccccgtccaggacctcacacctcagtggtgttgccatggtgggtgcacctctgagcacctcccgttttgggtgctctccccagatgggctcaccttcccacggctggaaaccacacatcagcagtcgggacccggggagaggggcactggtcagtgaggccaggctgcagctgtcacgtgggacagacaggccctcggtcagctataggcagggcctggacagagactcgtcccgtccttcacgcctggagaggacggggttgatgggcggaggcctggcattggagcgcttgcccccggcccccaagcatggagctctggatcctggggatctggtgggccccttgtgctggatggaaccatgcctgctcgctaccagcccacccggatccacggctgtgccttcccctccggtcctgctggcggtcccgggactttgtgggttctgaccccacttggatcacgccgacaacactggtcttgaagtcagaacccgcaaagtcctggtttcttccggctcccgtgaccccagcgcatggttttgcaggtcctcaggggcctggactcctggaggtgggtgctgggaagacataaagctggatagagactgtcacgctgtcccccaggaagccacctgtgcccctgcagcagcctgggaggtgcggtctctccagccc

SEQ ID NO: 9415 - DNA, 2209 bp, Artificial sequence
  DNA replication origin
aggccacagccctcccgatctccacttccccctccacccccacctcacgaggccacagccctcccgatctccacttccccctccacccccacctcacgaggcccacagccctcccgggccgccccccacctcctccccacctccccccggcctcctcccctcaagccctcgggactcaccatctccaccacctccacctcggcgctgatgcgcaagtggtacaagaacatctgcaggtccttcttcatctggatgctgttgtcgtccacctgggccacggtgaagatacgcatccggcacttcctccacacctgcagacagggagggcatggctgtggggcctcagaggagcccgtcccggcccgcagcacgtggggtggccgtgctccggctggcgtgtccccgtcgcacgccccaccttgtgctggcgcagcaggaagggcagcagcatgagcatgccgccgtcgtgcacgatccaccacacgtcgatgtggcccccgccgaagcgctcctggttttgcggaaacgagtcgacgttcttggccaccagcagagcctggtgcgcggcggtggtgtcgcggacggtgtctgcggagagaggcggccgtccgcaggtcatctgaggccagggtgcggaaggggcctccccggggactcacagccagtgcaggggcgggcacggcgaggcgaggggggtccccacaaagcccccaccctcactccgtcagctcctccaaggaccagccagagactcacagcagagttcagctgctggtcatgtgtccagggaatcccccagcccctgcggggctctgggagaaggggagggagtgcctggacactttcagatggccgctcccagggccagggccttcgacagcctcagagcacacaccctcgggtcggtggcctcaaggcccatcgggacctgacagcgcacaggcctggggacgttgaggggacagcgaggagacagaggggacggcgaggagacagtgaagggatagcgaggagacggtgaagggacagtgaggggacggtgaggggacagcgaggagacggtgaagggacagcgaggggacggcgaggagacggtgaagggacagcaaggggacggtgaggggacagcgaggagacggcgaggggacagtgagggaacggcgaggggacggcgaagcgacggcgaggagacggcgaggggacagcgaggggacggcgaggagatggtgaggggaccgcgaggggacggcgaggagatggtgaggggacagtgaggggacggcgaagagatggtgaggggacggttaggggacagcgaggggatggcaaagggatgcagaggagactgaggggacacgggacagtgaggggacagcgaggggaggcagagggggacagtgaggggacagcaaggggacactgaggagacacacaggggacagtgaggggacggcgaggggatgcagaggggacaccaaggggacagtggggacgaaaaggggacagtgagaggacagcgaggggacactgaggagacacacaggggacagcgaggggacactgagaggacacagaggggacggtgaggggatgccgaagggccgccagccatgcctacccacaaagttcttccaggagaaggggttgtcctcctgcttccaggatgcgggccaggccatgagcaccgtgttgtgcttcaggccgcccaggccggccgactggatcaggtgggacatgccatcccgcaggctggacgagaccaccagctggcagaagcccttggtcttctctgtgctcattagggaccgtatgttctgcgggagacaggacaggttggtgctacagcaggaatggggtgcacagacccacgcccaccacccacggtggccagggcacccgcaccacctcccctgtggacccagcaggagggaaggcccgaaggctcaacggtgtgctgcggtgctcccggccgctgtgtgtgtatgtgtgtatgtgcgtgctcacacactggggagagagacacagagcaggtgtgactgatgccacgtgcaggggatgtggagggctgctctggggacacaacgccaggcagttctctgaggcgatccacaacatcccagacccacccccagttcactcggacgctctgggccaggttcatccacctggtgcatcagaaacacccgaaaatgggccaaattagcagctc

SEQ ID NO: 9416 - DNA, 957 bp, Artificial sequence
  DNA replication origin
accacccacggtggccagggcacccgcaccacctcccctgtggacccagcaggagggaaggcccgaaggctcaacggtgtgctgcggtgctcccggccgctgtgtgtgtatgtgtgtatgtgcgtgctcacacactggggagagagacacagagcaggtgtgactgatgccacgtgcaggggatgtggagggctgctctggggacacaacgccaggcagttctctgaggcgatccacaacatcccagacccacccccagttcactcggacgctctgggccaggttcatccacctggtgcatcagaaacacccgaaaatgggccaaattagcagctcttcaaagggaggccgtggggtccaggatgcagcaccctaacagcaacggcggggggcgggggtgggggactgccgtgtggtctcctcccggggttggagggggtcactgctgtgtgcagtctcttcccaggggtgtctgatgaggctgcaccacggaacggcttgactccatggggtttgcacgtgcgtggccgaggacctgccacgcactaaagccatgcatgtgtggacgcaggcctcccaccctctgaccttcaggccctggaaccccagggcctgccctgctgggtctcagccttgtgtggtaccagtggccccttcccacctgattctcccttttggagcaaacatgcctctcctggcttgtcccctgctgcgttctgggataaccacctcctcacttgcacatctacagacacagcagttttgtccaggatggaccagaccccacatttcactggcttctggtttggatgcttagaggatgagatttgggagctccgagcaatgagatttacatgagagttgggactcagagctggtctgtgcaggcctgagacttcaggagacactgagatggggtgaacatactgtacatgtgtggcagatatgaattttagg

SEQ ID NO: 9417 - DNA, 831 bp, Artificial sequence
  DNA replication origin
cggctctggacggggctcacccatggcgggaggaggcggtcccagggttcgcccttggaaagctaatggccctcacacctcccaagcttcccggggtgcggctggtgctcccaggccttagcgcgctgctctgagctcaaagccaccgccacggctaaaacacagcagcgccacgcacagcaccgtgttgacacgctgcgatgaggacatgccagggcacgtttcctgtgcagctggggtgggaaagaggcctggcccccagaccccgcccggcccacctcctcggcccgctgagcctccatgtgcttgtccaggtacgtcccctccagcaccgagcccacgatggtcaggcccttgccggccttcagctgcgacgtgaaggacagcaggcgggggtgcttcacggcctgctccgcgtccaggttcagcatcaccagcacctggggcctgcagccagggtggggcggctgttaccacggcaacgcttaccagggcacggcccatcaacaggcagggcagatgggacgggcggggcacacgacacaggtgggacgggagatacatgacaggcgggacaggggacaaaaggggcaggtgacagatgggatggggaaacgtgacacacgtggggtaagttgaacaggtgacaggtgagacaggccacagaagccaggtgggacaggcagggccgatggacaggtgggcactagccaggcaggacaggagaacaggtaggttagacaggtgggacaggtgacatgctagacaggtgagacaatggcccaggacacacacctgaagcccccaccgaggccctgaggggacaatggc

SEQ ID NO: 9418 - DNA, 1171 bp, Artificial sequence
  DNA replication origin
gggacctgcaggcaggagggctagaattgcctctgcccaccacccacctcccaccactcccatgctctgtgcagtggccaggggcagaatgaccaccatggggtccaagccgcgggcatgcgtcccacacacggcactgtgaggatcccgcaggggaggagagcccccgaccctgaccttccagggtccccccgacgagggtgcgggactcacctgcaggaaggggacgatgccgtcacgggcaatggcctgcagtaggcgcggtgcccccgtgaggctctgcaggccggcaccgcaggtggagaagaaggagccgatgacgatgacccagggggagggccaggccagcatgccgatgaccaggttcccctgcagggcctccccgaacctgcaggcaggcgggcaggcgggcgggcggctttcagaagtgagcctgagtcagacaaaatgtcttctcccacccagagcgaggggcccagtgcagtgggggcgactccttggaaagctgaggcccggcctccagtccccgttggctgaaacctccaccaggctctgcccagcatggccagaatgctctggagggtcttcagcgggggagggggtcctgctcacctcagggtcgctcttgggagcagggaagacccagcctggcatcagcttcagtcagggaccacccaggacccccggggccttggggctgccagacacgcacaccccatgaggatgcagggtcagtgatgacctgcctgggaccccactacttctccacttgccagcagggctgagggatctcccagggccaagcctcacccgtccacacccctgtggcctccccaggaagggcctgcgcccccagccgcatcagggcttggagttggctctgaacggttccccaggccctaggctccagcggaagagacgacacatcagaccaagggatcccaaccctgggaccaggacgccttcagctctgcacgcggacatgaagtcctagggcgatgtaatttcaaagccgaattcatcctcaggaaaacccttgaagactacaggctttgcacgaaaactgcaggtggaaacgtacttatctcgtaagaccacgccttcaatgcaggccccaaacagcacaatgcaggagagatccacagccctcgtcaaggaaaggcaggtccgt

SEQ ID NO: 9419 - DNA, 1774 bp, Artificial sequence
  DNA replication origin
agggatctcccagggccaagcctcacccgtccacacccctgtggcctccccaggaagggcctgcgcccccagccgcatcagggcttggagttggctctgaacggttccccaggccctaggctccagcggaagagacgacacatcagaccaagggatcccaaccctgggaccaggacgccttcagctctgcacgcggacatgaagtcctagggcgatgtaatttcaaagccgaattcatcctcaggaaaacccttgaagactacaggctttgcacgaaaactgcaggtggaaacgtacttatctcgtaagaccacgccttcaatgcaggccccaaacagcacaatgcaggagagatccacagccctcgtcaaggaaaggcaggtccgtgggtgcagggtcctcaggtacggggggtggggtggggtggggtggggtgggtggggagatgcactggccagcgggccgcaggatccaggtgggcggggaccgttctgcatcccatcccatcccgggcacgtcctgtcccccgtgtcctcagcgcaccctcctggggctctgtccagcgccacagaacggggccctggggtggtggacacacacctggcctggtgcttgaccgccagggattggcaggggaccatgctgaggggacaatgctcggctggaaagaggcagccttgggattgagaagccagaggccccgcgggcccagcctgccggcggcacaccccacacaccgctgcgcatcactgtccacacgcggcagggtgactgcttctgttttctctacgatcgcatcacacagtggtgaagaagccagggtcctgacagcagcccttgccccgtctcccagggaggatgacgtggtgagagcacagcctaacctgggaagtcacatgctggtggccgagggtatgatgctgagccggggagggcatgggggcctccccccaggcagaggctggaaccctcgcctgcacccctccaaggatacagatgaaagacgtcgtcactatggccaggatggtccccgtggggatggacttctgtgcatccttgaggtccccggaccggtttgaacccgccatgatacctgtgaacatggaaaatgctgcaaagacccatctgaggagtcagtgccatgtgatggcagcccctgcccagaaagctggaaaggcggtctctggggagaccccgagcgtgagctgcagccgaggctgcagtccaagctccgccagcccacgctgcaatactgcggctgaggggatgcgggcccaggcacgcggatgagcacccacgtctactgctcccctggatccgaggacgagaaccgaccccgtcactgacccccacgccccccacacccagggcttctctggagcctgtgttaatcccatggccaagggtcagcccagagacggtgctgagcaatggctcacaggcccccaggacctaaggactttgggaatgagatcctagaacgactcagcccagccagccaggccagcagacgctgcgacccctcccgctgtggcaccaccttgctctagggagccacggccggggatgtttccacacaatcggctcctacaaagctctgggaagccgggtcggtgggggccacttcacgcctggctcggtcccatccaaggcgcagcctgaagcacccattgctcggggtggcctgggaggcagcagagcccacaatccagtgccgcggagacacccggagccacgcagaggctctgcccccacgccctccacccgcggctca

SEQ ID NO: 9420 - DNA, 1384 bp, Artificial sequence
  DNA replication origin
gcccagccagccaggccagcagacgctgcgacccctcccgctgtggcaccaccttgctctagggagccacggccggggatgtttccacacaatcggctcctacaaagctctgggaagccgggtcggtgggggccacttcacgcctggctcggtcccatccaaggcgcagcctgaagcacccattgctcggggtggcctgggaggcagcagagcccacaatccagtgccgcggagacacccggagccacgcagaggctctgcccccacgccctccacccgcggctcagagacacccggagccacgcagaggctctacccccacgccctccacccgcggcgcggagacaccaggagccacgcagaggctctgcccccacgccctccacccacggcgcggagacaccaggagccacgcagaggctctgcccccacgccctccacccacggcgcggagcgcactcagacggacgggggaggctggagcggaggtacagggagaggacccccggcagatcaccccctccatagcaagacgggcccaccttcagtggaggcaagggaaacacgagaagccagcgctgtggccaggccctgcagctgaccctgggctccagggctttcggatgtgctgagatgaagtccgggagcagacgtgggagggaccagaagggaccagaagggcagctgcaggctgcacaagcagccagcgcctgtcaggggcgtcccgacaagaaggccgagtggagacagccgggggcgtgtgtgtgcgactcgaagagcacggggcctggccccaccccctggggaacaaccaagggccccacccaccgccggaacaaggcccactgtttgaggaggacacagagggccgaggtccccggcctctgagctcacactgaggccactcctaggtgtctcctaacagcctgccaggtgttcccagcaaccctacaacagcttctcctgacacagggctgcctgggagagcagcagacaggcttctcacaaatccatcaggacgcagggcagagacctcagccacttcccctgagccaaacaggcaagataagcaggggcaggaaggaacacactacagagagagagacagagagagagacagacagacagacagagagagagagagggagggagggaagaagagggagacagagagagagagagagacagacagagagagagggaaaagggtagggggagagagaaagagtgccggaggagagaatgacagagacagagaaatggacaaagacaaaggaagagaaagaaggaagccaggcgtggtggctcaagacgtctgtaatcccagcactttgggaggctgaggatggcttgagctcaggagtttgagaccagcctgagcaac

SEQ ID NO: 9421 - DNA, 1450 bp, Artificial sequence
  DNA replication origin
ccagaaagggccagcagccaagccccttgaggctcccgcggttttgccgtctctgcgtggagggagcccctgaaggaacagcctcatagaggcctcaaaacagagggaggcagaacagctgcaaccccacaagcccgttttagggaagcacagctgccctccccctcggggacccgtcctgagaccccctgccgatgcttgacgctacggccctgtgtagactgttttccacgtacaggcctggcttatacgtcgggggcggcactcctgtgctcttggccgttggcacgtggcacgagggtggcttgaactcagacactgagattgtgacagctgacccggccaggacgccgccgagggcctcggggagggagcggctgcagcgtggctgtgctggcgcggggggaggttgctgggttccacctcactactcggcaccgcgcggtggaaaacgtgtgaattgtttacgtctagaacgcttcatttagcacgtttggaccacgggtggccgaaccatggatgaggggacggctgtacagtacagcgttcctgctgcagcctggcctggtccccggtccctggtccccagtccccggtccccagtgtgatccctggcccttgcattcctgctgcagcctggcctgggcccggtccctggcgtgatctgtggccttcctgtcttgggaggtgcagggtgccaggagccactcgcgggcgacaccatgggtgcccgttgggggagctgggtggggcagtaaaagccacttcggtggcagcacacgtgccgtgcctccctgtcccgcccagggtctgcctcctggggaaccgcacgctgtcacggcgcagcttcgatgcctgcgtcaaggcctacggcatccacaacaactcagccacctccgcgctctggggcctcttctgcaacggctcccagcccagcgccgcctgtgacgagtacttcatccagaacaacgtcaccgaaatccagggcatcccgggcgcggccagtggtgtcttcctgggtgaggctcacagggctgcagctggagctggggggtggcgggggcagcaggcgctggccctggtggctgctctcgccttagagtcactctcagggccccaattcctcctgcctggccgagccccttcccagctgctgctgatgagcctgggggtccctgtacacacccctggcagagccatagaagccaaacacggtgtggcagggagacagcctccgtcatggtcagcaagctggtcttaatgctatggatttattttcatgacctcctggcagcatgtatggggaacttgctgtgttaagaagggagtggtagctgggcggtaacttccccctctgtgtatccttctctgatgagaggctgcctcggacctgccccagggggttgagggaaaaggacccctggcagggtacacgagacctgctccagaa

SEQ ID NO: 9422 - DNA, 1595 bp, Artificial sequence
  DNA replication origin
atgcctgctgcaccccagtcctgtcctggtcttgagggagctgagcagcactgtctcacgtctccgtcccttcccttgaatctgggcagaacagaggttgccccccgccggcgtggtcagaccctgtgtgtgtccaggacgtccagccggggtgggccgagctctctgggcagcagtcacattcctcttagcagaaggtgtttcttttgagtgcggacatgcggatgccccgggtcctgaagttgctttactctaaggctcccgggtggttcctgggaaacgttcaggcccctggctgtccatggcctgtgcgctgacccccgcgggctccgtccctcgcctgtgcgctgacccccgcgggctccgtccctcgcctgtgcgctgacccccgcgggctccgtcccttgcctgtgcgctgacccccgcgggctccgtccagcacggatgcgtcccgatggccccggcacctgttgggaggaggcccctgtgtggcgctgggggcttgcgggagggacgggcactggggagttgtgtccggggacggcctcccgaccggccttgttcccacagacgtacatctccccgggtgcggccatcttccaggcggaggctgcaggtggcgaggcggccgccatgctgcacaacatgcgtgtgtacggcacgtgcacgctcgtgctcatggccctggtggtcttcgtgggcgtcaagtatgtcaacaagctggcgctggtcttcctggcctgcgtcgtgctgtccatcctggccatctatgccggcgtcatcaagtctgccttcgaccccccggacatcccgtgagtctcggggcctctgagccgtgggtgggtgtggggctggggccaggtcccatgggctctgcccgcctctcgtccatcatccttgacgccgagctccccgcaaggggtgggctgggtgtgaccgtggcgggaacccccgtgggctcgttctggggattacaggaaacccaacggtgaggtgggccgaggtaccctcgtggccgggtctgagcatgaagaccctcctcagtggcaggagggctggtgaggggtctggcaggtttcaggggtggccggtggccctgagcacggtcaggtgcagtgagcgtcatgggtgtggccctggctgctgctggggcctgggtgtcttctccctcccagaggtgcttggaggggctcttttcttgtccttttggaggagcagctgggaggcggcccagggtcctggaacatgggagtggccaccagagcccgcagggagcaggtccagaaagggccagcagccaagccccttgaggctcccgcggttttgccgtctctgcgtggagggagcccctgaaggaacagcctcatagaggcctcaaaacagagggaggcagaacagctgcaaccccacaagcccgttttagggaagcacagctgccctccccctcggggacccgtcctgagaccccctgccgatgcttgacgctacggccctgtgtagactgttttccacgtacaggcctggcttatacgtcgggggcggcactcctgtgctcttggccgttggcacgtggcacgagggtggcttgaactcag

SEQ ID NO: 9423 - DNA, 2255 bp, Artificial sequence
  DNA replication origin
cccagccccacacccacccacggctcagaggccccgagactcacgggatgtccggggggtcgaaggcagacttgatgacgccggcatagatggccaggatggacagcacgacgcaggccaggaagaccagcgccagcttgttgacatacttgacgcccacgaagaccaccagggccatgagcacgagcgtgcacgtgccgtacacacgcatgttgtgcagcatggcggccgcctcgccacctgcagcctccgcctggaagatggccgcacccggggagatgtacgtctgtgggaacaaggccggtcgggaggccgtccccggacacaactccccagtgcccgtccctcccgcaagcccccagcgccacacaggggcctcctcccaacaggtgccggggccatcgggacgcatccgtgctggacggagcccgcgggggtcagcgcacaggcaagggacggagcccgcgggggtcagcgcacaggcgagggacggagcccgcgggggtcagcgcacaggcgagggacggagcccgcgggggtcagcgcacaggccatggacagccaggggcctgaacgtttcccaggaaccacccgggagccttagagtaaagcaacttcaggacccggggcatccgcatgtccgcactcaaaagaaacaccttctgctaagaggaatgtgactgctgcccagagagctcggcccaccccggctggacgtcctggacacacacagggtctgaccacgccggcggggggcaacctctgttctgcccagattcaagggaagggacggagacgtgagacagtgctgctcagctccctcaagaccaggacaggactggggtgcagcaggcatggagggcatggcacccacccccaccaaaggggatcctgggagtgcggcagccacggcacccggggcaggtggaaagatggagggacatggccaggggactcgggttgggacgggtgtgggtgcgaccccactgaaaggtttcagaaccttcttggccatgtggctctcttcaggaacccaggaggccaggaaccaggtctggcagcagagggaggggcagaaagactggggacaggggctcaggtgagcgtctctgaagccctgcagggacagcgggtttcagaacctcagcaggaaggacagcacccgtcggccagagaagggcggttcccgtccccacgaggaccaaggaactcaggccacagctctcagctgtgctcaggtgatgtgggacatgctttgagcatgcctgttttgagaaggtgatgacatcacctggttgtacattgctgggctctgggaccctcggccaagtgcccagatcaggcagagaagaggctgggatcctggcaaaaggttcttctaagccgagttccagccctgctcctaaaacagctccgactgcaggactgcacctacgcggggctcagatctacagtccagatgtctacccagctcatgccaggcacgcctcacggagggcagcaatggtgctcaagggggacacaggtcgctgctgagtggacgctgcccagtggcttccgccatggccagagcccaggagagcccaggggcagccagggcagtggggtcaggatggctcagtgtgctgtgtgtgccacagagtgggtcaggcagggccccttggcatcctgccacagactgtggggtgggaacccttccaaagcagcacacttaccagaaaaatctcgatggtccccaaaatatacatggcccctgcaaacgtcgtgcccaggtagaagcagaggccgacagcgcctccaaactcgggtcccagcgagcgcgatatcatgtagtaggacccgccagctgcggagacaaaggcggcagccgcgggtcaggggcgcacttggactcggacccgaggtgcggtctgcgctgccattcacgggcaaaggagggcctgtctctgcgaaggcagcgtgtagaccctcgtccacccgcaaagcagcacatggagacgcttccacggtgaactctcccctcccgaggctcggcacacgttccacaccaagagcacgcgctctcatggacatgaggaccaggtgagatcagggataaggctctctggggagcaggaggccccagcaggtcccagaaaaagtcccgcgtacatcagtggcagccccagcccccacttccactaagttttgcttatgaaaaaggcaaaagagaaactaggatgttcaggagtcgtctcgtgtactgtgaaccacgc

SEQ ID NO: 9424 - DNA, 1855 bp, Artificial sequence
  DNA replication origin
tggtggttgtgaaggggccgttcctatcgctggttttaaggtgtcccgagttttgctgcacttggttttggggagaccatgagcttggcgcaaactgagattcccgagtcagcctttctaagctgtggtgggcaggccacggctgtgatgtacaatgtgaaaggagccggcctttacagggcttctgtgaggtgagttcagcatttcagcccttaaatgtggagataagtcagaaacgggttcgtcttcgggaggagggaggggaggcgagttttgtggaggtcggtaccatggctcattctgtgtcctggccggaactgggatcaatcctctgacccgctgaggatgcctgccgtcccccggaggaggtggactgggtcgggccctgccgtcccccggaggaggtggactgggtcggggctgggttgatgtccgtgccccagaggaggtggaccgggtcgggccctgctgtcccccggaggaggtggactgggtcggggctgggttgatgtctgtgccccagaggaggtggaccgggttgggttctgccgtccaccggaggaggtggaccgggtccgggttaggttgatgtctgtaccctgctcctgcctcagggcacgtggtatctgggtgctgctctttggcccatggggtggggtttggctggggagacctgatctgggttgttgggccatccctcgcccccgcttcaccctgcttggcagaggccactggtgcatggcgcctgggcaggggcaccaccgggacctgccctgagggttagacactgtgggccacctggcaaggaccctgcccatctcaccttcctgcaccgcacgcccaggctttcccctgtgtccgtttgtcctctcagccttccggtcatcatgaatgtgcagaatgacaagggaggaggtgctatcccaggcgagtggctctatccccaaaacacaggcagggctcggccagaggaaaactcactgcccttcacagcagccaggactgccgatgtccaagtccaggccagggagcgcaagggacgcggctgggtgagcagagggttagagggtggctgggtgagcagagggttagaggggggctgggtgtgcagagggttagaggggggctgggtgagcagagggttagaggggggctgggtgtgcagagggttagaggggggcctgggtgtgcagagggttagaagggggctgggtgagcagagggttagaagggggctgggtgagcagagggttagaggggggctgggtgtgcagagggttagaagggggcttggtgagcagagggttagaggggggctgggtgtgcagagggttagaggggggcctgggtgtgcagagggttagaagggggctgggtgagcagagggttagaagggggctgggtgtgcagagggttagaggggggcctgggcatgcagagggttagaagggggctgggtgagcagagggttagaagggggctgggtgagcagagggttagaagggggctgggtgtgcagagggttagaggggggctgggtgagcagagggttagaggggggctgggcttgcagagggttgtgggggcctgggcgtgcagagggttagaggggggctgggtgtgcagagggttagaggggggctgggtgtgcagagggttagaggggggctgggcgtgcagagggttagaggggggctgggcttgcagagggttgtgggggctgggcttgcagagggttagaggggggctgggtgtgcagagggttggagggggcggctgggtgtgcagaaggttagagagggcattggatttttaacgaagggtctcttgactgggatggcattgagcccatgac

SEQ ID NO: 9425 - DNA, 1392 bp, Artificial sequence
  DNA replication origin
agcgcggccgcacctggccggacaaaggccgagcgccccgagcgcgggtctgggcccggcatccgggagcggaggcgggcggcggggccgggggtacaggaggcgccccttcccgcgcccccaccgcctgttctcggtcccccacgagggcccccaccccacgttagtggcagcgctagggggcgaggggccctgccagggctcccggtacggtcagctcgggtgggaccgggggcagaggtgtggacgccgctgctggtagccatggaaacggggaggggctggagcgcgcctccggagggagcccgggcccctgggtggtccctagtgggacaggggtggcggtggagacccgggcggttcgggagccggggcgtcctgcgtcccccgcgctctcccttcccctgcgccgcggccgtccggtaacactagcccgggccggcccgtcctgcccccgcctgaccctggaggagccgcccaccccccagaggcggaacaggaaggactgcgccctggctggggagggggcagccaccggggccttgctcaggccgcgtcctccgtgttcccgtcccccgttccgggaatctggaggtttctagcactttcactttctctagggggtggggacggggctggggagagaatcccccagccctgttccctccatcctggctccaaatcccagttactccccggatctcagccccctctagaaaccggaggctcttaggcccttccatccggagtctctgagaaggtgtccggactcagtccagcccccaccccgcgtgctggcagtgcccgcatgtgcccgggtctcatgcagtgggtggcagcctccctgctccctggcagtggaaggaaggtgaggtctgtccagggacaagtccggtgccagaccccagatccttcctaacccaccatcccgggcaggaaaggccagacatcccctccaggcagtttaggaacccggagacacgggtggggacccaccgtgaaggcagtggcctggtggcctggggtgcgtcatcagggtccccgtggcgggcgaagagtggtctcagcttcctctgcacagaggccagcccagatcttggaagtggtcaggcggggcgccaggctcaacaccaggtgaagtgctaactaagcagggtccgtgagtccaagccccttctctccagtcaccaccgtggaggcaggaagcaccaaggagtgtgggccctggcgtggtctttctgtgtgagctttgtagcaacgcccccggaacgcactcagaaggagcctcttcttgtctggccggccccttctcaaggctgatcaggttcacttttgtctttagactgtaagtgtcatttgcttttaagccagagagaattttgtgcttgttcg

SEQ ID NO: 9426 - DNA, 2034 bp, Artificial sequence
  DNA replication origin
agacccctagggatgggctactgatgggatgggaggggcctgcagcggcttctgggctccggcaagggtctctgtcttgacccgcaggtgcttacagggtgctgatccctgtcgtgactcacctgattagaatgcaaaaggcagcagacctcaccccccacccgaggtctcccacaagtaagatctaagatttaaacaagagaagccacctgccttctgcctggcagggctgggcacccacccaggtgcttcagccatggcccctggtcctagtcaagattttgtaatcacagagaagaccaccctcggagctgccacaggaccctaaactcctgggcctcagtttcctcctctgtaaaatgaagctgatgagtcctgagtccgggagctggccctggccacagaccctccaaaccagctcctctgaaggtccacagccagcacatggcgggcagccggccctggggtcctggggtgtgaagcagagcttggatgtgcgacgggagccctgcacatctgttgctcctgctggcatcacttgggaaggcctcgtgcccaccctgagctctgtccaaccctcgggaatagcgctgggtggcaaccagggttgaatgtacagaagcccctgctggggtgactgaggagagggtttacccagcaccctaagtgtgaaccctataattgaccccattgggcacttctgttcccaccccctggatctttttagcaaagccagccctcctcataaggatgcctgggaactattttatcttctggggaggtgatggtttcctaccttccaacccactgacccagggaggcagctgacctagcaccatccacagccctgagctccctttggtgggaggtggggtgagagtgtggagcaggcacagctccagacacccaggccagaggaacccccacctctgcaagggctggtgctggatgggcgacgttccaggagggtcccaggcctacagcttctgcccagaagagtccatggggcaaaggggtagaaccctaggccaccccagggcatgactggctttactggaaatggctggagaggttgggcttgcgttccttgaacccacagagcccggtgatcccacagcccggaggccatcactcccctccagctgccttttaggattagacaggcaagcggctaaaacatggccaggccatacccattttccacgtgacaagaggctgtggccgtgtttgcccacaccacctgtgtttctgctttgttgtcgtacagcagttgtgggtgattaggaataaaggctgactcattgcacctgtgtgccatagcattttagcccaattccccattgacggacatctgattgttccgtttttcatgagtcatttgttgagaaatgtgccaggtgctggccggtggtatcctggtgtctgcctggtgggttctggaactccaccttccctgcatcaccctgtgagcttctggaacatttcccaaggagggaagggagggttctagggcaggggccgcggggcactcctggggcaggtgtggaggagactggggtcttcgtgggtggtatttgtcatgggtggggggggggactccctctactgggttaggtccctaaactggagctggaccaagctccggagtaccccacccccaggctatccaaggctccttccactggagttgcctttgcagccaggttgggctagccaggagccaggctaggagcccagggtctgagcgggtgttgacagcctggagtgggtgggcggactgtgtgggaggtgggtgctggaggatggcaggggggaacaggagggggaagaaggaggggtagggggctggagcaggaaatggggggcaaacaggagggggtgcgggagggggcgcagaaggaggaggggcccagcaggagggggtgcagaaagggcaggggttccagcaggagggggttcataggggcaggggggcccagcaggagggggtgcaggaagggtgggggggtgcaggaggggtgaggggttccagca

SEQ ID NO: 9427 - DNA, 1077 bp, Artificial sequence
  DNA replication origin
aaagacctggccttcccagagcttgagctgtgggaggaagagaggctgaatgaaagccccgcccccaccccaccccaggagaggccacctggggcctcccacagccctgcccacggctgcacacgcgtgtcccctcacctccttagccagggcggctgcccgcgcaggtcccctcacctccttagccagggcggctgcccgcgcaggtcccctcacctccttagccagggtgggggcagcagggagggagggcgtgctgcattcttccctgggcctgcaggtgcacctgtgcctgcccagagggagcagcgggagcttccagcagacacacctggacaggtgcacagagctcctgccagggaaacccagcacagacgcaggtgggcgggtggtgggagggtggcagaagcggaaagaggaggaggctgagctcagcacagcccatgcagtctccttccggccaaggggagcggctgggccagtctgagccgggaggcagctcagggagtaagccctggggacaacattggagtagcacagggttccctgacagaacctcacgtcggagggtggtctgagggctgctgggggcccacctaggagatggggtcccaggacacagaacagggagggggtggtgtttccagggtgaggcctgggggagggtagcaaggcctggactaggagatggaggcctaatcaaagcaaaacagagactcagagctcagcgcctgtattcgcagggacacacagggactcacagggacgtcccggatcgctaggggactcacggggacacgtggggacacgctcggactcacggggacttgcaggggcccatggggatgtgcagggacaccgtccctcccggccgtcctgctccttgccaagagtcacccagaggctggggcctggcaccacttgcagacaggggcattcctgggcccctccttttggcacctcagcctcagcagctgctgaagggtgtgggggagggagccggtattggtgcaacaggcagatggttccagaaactcaggattctacacaatcctagcacctgaggcacagtcctgc

SEQ ID NO: 9428 - DNA, 941 bp, Artificial sequence
  DNA replication origin
ggggtctggacgtccaggcaggttgaggaggagggggaaggtgtggacaacgggaagggaaggtgtagctggagctgaaggtggtcttctagcagtggggaccccctggggctgggtgcggtgtatttgacgtccctggcaggtgctgagctgtaaggaaacaaggtggggaggcaggcagtcagggatggagtcctggctctctgggccaaggttctttgtcattcgtggtctgatccttgtccttcggagtccttggtttctcggggcacagatggagggggctacgcaggaagtggctccggatcgtgcctggcctcgagtgctctgggaagagggcacaggtggccccgcctgtgatgggggcatgaatccttggagtaggggcagggtgagcttgagggggtgaaaacccgggactgcagcggcctcactgtggctgggtgtggctctgtgcagccagctctgggctgggaaacactggctgtagacacacgtgtgtctgcatgtgtgtcctggtgttggagtgtgtgagcacgtgtgtgtgtcctgctgttggtgtgtgtgcacatgtgtgtcctggtggtgtgtgagtacatgtgtgtgtgtcctggtggtatgtgtgcacgtctgtgtgtcctggtgttggtgtctgagcacatgtgtgcctgcgtgtcctgctgtttgagcatatgtgtgcctgcgtgtcctgctgtttgagcatatgtgtgcctgcgtgtcctggtgttggtgtctgagcacgtgtgtgcctgcgtgtcctggtgttggtgtctgagcacacgtgtgcctgcgtgtcctggtgttggtgtctgagcacacgtgtgcctgcgtgtcctggtgttggtgtctgagcacgtgtgtgcctgcgtgtcctggtgttggtgtctgagcacatgtgtgcctgcgtgtcctggtgttgg

SEQ ID NO: 9429 - DNA, 1136 bp, Artificial sequence
  DNA replication origin
tcctctcccgccacccggcgctgcgccggccaacttcccctccctgaggttggcgggtgcgtccaggtcccctccctgaggttggtgggtgcgtccacgtcctctccctgagggtggtgggtgcgtccaggtcccctctctgaggttggcgggtgtgcccctccctgcagggctgttcgccccctccctatttcttggttctgggctgcagtcttagaacacactggtgacagccgcccgagccagccaggggtaggagggcagggtgcccaagaggccaggtttcccagcgccagggtgcccaggaggccaggtttcccagcgccagggtgcccaggaggccaggtttcccagcgccagggtgcccaggaggccagggtgccaagcgccagggtgcccaggaggccagggtgcccagcactctgcccgagagtgtctgctggccccggtgcagccacgggtttgctggttggtactgaggaaggtgcagggcttgcagaggggactgggcaggtcacatgtctgaagctcagcagtgggtggcagcgctctgggtgaagaagcagcaccaggacacagggagaaccctgggaaggtcagtggaggcgcatgcaggacacagacagctgccgactgagtcgtgcccccagattcgcagctgaggcccagccccaacgggactgtatctggagctaggaccttgagggagggacttaaggttaaatgaggttgtgaggaaggccctgacccaataggacgtgtccttgtaagaagagaaagcgacaccagggatgcgtgtgtgcagaggagcggccgtgggaggacacaggagaagccaccgtctgcgggccatgaataggccttgggagaaaccgcccagcagccccttggtctgggacttccagcccccaggctgcgagggaacaatttctagtgttgaagcccccgcccatggcgctttgttacaattgctggagctgatgaggccggtcttacacttgccccttatccgacaggactggcaccagcgctgcgggaggtggcgggatgtcgggaagctccggtcttgggaaatgccaccttccgcaggtgatccttgagctgcggcttctgaccctgcggatggaggggcatgt

SEQ ID NO: 9430 - DNA, 1511 bp, Artificial sequence
  DNA replication origin
ctgacctcgctgttcccgcggctgcagagtccagacggggtcacttcgcggggagggcggggaccaggcagaaaaggggccctgttctcgtccagggctgcctctctcgggaccacggcgggtccctgaggccttgggcggggctgtgatctgatgatttatagcgcgggagggtggcaggggtctggcccggcagatctgggaagcagtgggggttcgtccctgcggggagcagaaccgtgtcctcctgaccactcgctgctcacacgggggtcccgaagcctgaggtgggcgaggggcctgggagggcggggcgggggcggggggaggcagaggacccagagccaagcccgcttccagtgggctgaggagggccctgcctgggaccatggagtgccccccgccagccttggccacacagaggccaccaggcctggaccctggcttgggcttaaagctcgtgggccccgaggacagatgtccctgagctgtcactctctcgtgggacctgggtgccccgagggtccatctgctgttcccgcctggcatggccagggtaggctgctctgaagacctgcggttactgcgatgtcttgccctgtgaggggccggggatgaggcaggtcccaggcagaagggctccgacgggccctgggggacccagctcacgtgtgtgggggccgtgcgtgtccgtttcgcctgttcatgtatgtcacacatgtgagagtccacagcgagggcagcctttacacgcgatggcccagaggagcgagcatctcaggctcctcagcacgtctctgtgctgacctcctgcagcactgccgggagccatgtgagtgtccacgcctgtgtgtgtccgtgtgtgtgtctatgtgtgtgctgtgtggtatgtgtatatgtctatagtgtgatgtgtgtatatgtgtgtgtatggcatatgaggtgtgtgtgtctatattatgtgtagtgtgtgtctgtgtctagatgtgtgtggtgcattgtatgtgtctctgtgtgtgtgtgtgtgtgtgtgtgtgtgtgtgtgtgttgcggacaccagttgtccaggactgcatggattggtacaggggtgtggtgggagctgtggtctgtgtctcagttggattcggctcagtgccctagataggttgtggacacacacgctttggagacaaggttagggttagggttgggattaggggttaggggttagggttagggttagggacacaagcctgtggagatgaggtggacgggacacttgttcctgtgggttagggttagcgtcaggaacacatgcgtgtggagatgaaaaggatgggacacttgttattctcggttagggttagggttgggaacacatgcgtgtggagatgagatggacgagacacctgcccttctaggtggcagctgtggctctcgggtccagccctgtccttctcctgagcctggagtcatttcttggactccagggtcatgccctgcaatgtctgatacaggatgctgtggtc

SEQ ID NO: 9431 - DNA, 1707 bp, Artificial sequence
  DNA replication origin
gttcgcacctgtaatctcagctactcgggaggctgaggcagcagaattgcttgaacctgggagttggaggttgcagtgagccaaaatcgcaccactgcactccagcctgggtgactgagcaagactcagtctccaaaacaaaacaaaacagaacaaaaattccttgcaaaatgcgagaggttgaactggaaatgtatttgaataataggatttagagttctgcaaggtagaagattacaaaagaaacacacaacagccaaaggtgtttcatcctgtttttacatgtcagtccagtagtgacaagaatgtgaatacacacacataaattaatggaaaaaatgtgcaggacctgggtgaaaatatttgacaccataaagatgtcagttctcagcaaatttatttatacatttagtgacttttcaaccaaatcagaaatgtatttggggggaacgtccaaaaatgattcaaaagttcatcttggaaaaaggtgtggggaggtgggaacaggtgtgagaaggttgagcaggtgggaagaggtgtggacagatgtcagcaggtgtgagccagtgtgggcaggtgtgggcaggtgggaacaggtgtgagtagatgtgagcaggctggaacaggtgtggacagatgtgtgcaggtgtgagccagtgtgggcaggtgtgagcagatgagaacaggtgtgagcaggtgtgggcaggtggcacaggagtgagtaggtgtgggcaggctggaacaggtgtggacagatgtgtgaaggtgtgagccagtgtgggcaggtgtgagcagatgggaacaggtgtgggcaggtgggaacaggtgtgagtagatgtgagcaggctggaacaggtgtggacagatgtgtgcaggtgtgagccagcgtgggcaggtggcacaggggtgagtaggtgtgagcaggctggaacaggtgtggacagatgtgagcaggtgtgagccagtgtgggcaggtgggaacaggtgtgagtagatgtgagcaggctggaacaggtgtggacatatgtgtgcaggtatgagccagtgtgggcaggtgtgagcagatgggaacaggtgtgggcaggtggcacaggggtgagtaggtgtgagtgggctggaacagctgtggacagatgtcagcaggtgtgagccagtgtgggcaggtgtgagcaggcatgcctgccggtgccacatgagtggaggtggggcgatggtgagaggatgtgctgaagaaaggagttctcatcctccctggtctttccactggtgttagctgtgcccttgagacccagcctctggtgatttcttatccatagcaccacagacatgggtgaggcgtgtttctcagccttctgcacacgaaggtgtggccacaggactaagttctggctaacaggataagcgaaggtgctatgtgcactcctaggcttcctaggctgtgctctgcgaaggagtggctagctacctttcccgtttcctcactctactgctgggattcagatgtgatggctggaccagcagcagccaccgtggacgacgagggcagagtatgactggaggcagcacagctgaccacttgctccctgtaagtcactgtctagatgtcacctgaggccctccccacacctcagagctcttacccttgcctccctctagaacctacacttcacggaggcaggggttcccttctgtcacctgcagggcccg

SEQ ID NO: 9432 - DNA, 910 bp, Artificial sequence
  DNA replication origin
ggatggatggatggatggatggggagatgggtgggtggattactggatggatgggttcatgagtgaatgaaagaatgagtgaatgaatgagtaggtgatttgttcctcaggccctggagctggatctaccctactgtccctgagtggcctgtgtcccatgcaccagtctctgtgaactatgctccacacagaggcaggagcctgactcctgagagatatgggtgtaacctctcagggcgttactcactgggaccacccaggagctccttgcaaaggtaaaggctcctggtctcccagtaggcgcagcctcagtctccaggatgtggcctggggccagcatttttccagctctgggcggggccctttacatccacctctacgcgcccccttagaaggggctggtctttccactcagctctttgtgtccttagaggccaaaacacctccttgcaccctagggggatgaccctgctctggtgcgccagggcccttattttgtgtcccgataagagagggctgaacctggtttttcttcatcagaaggatggtgcggccagcctgggaggaggggctgcctgggtggaggcttctgcatggctgttcaaagtgcggctgtgctggctgcccagtgcctcctgtctcaaggcacaactctcaggtggacggaggacagaggccctggaaaccatgggcccggcttgtccccaccctggtgctacagcttcaactcatggacaagagctcctgccagtccccgggcccgcagagtctcagcttccttcctccttgctcagtgtctgcgcttgtgtctggaaagggcgtgaagcagaggttgtgacattggccccagacactccctccgagagccctgtgccctccctgaccttcatgggcctctcgtctgggagac

SEQ ID NO: 9433 - DNA, 1337 bp, Artificial sequence
  DNA replication origin
gtagagacggggtttcaccttgttagccaggatggtctcgatctcctgacctcgtgatccgcccgcctcggcctcccaaagtgctgggattacaggcgtgagccaccgcgcccggccctggctcttcttaactgctctgaacccctggcatcaacctgatgggcaggtgcttcccccatgcttcttctccctgcactgcccaccccacgactgaccttccctgggttccctacacaccccttcagtgcctctcacttccctcctgatggcagacgtctcaggactgctaccttgggaggtttccctttgtgtccccagccacataaggtatctcattctctgcacatccccgtaccatgaatggatggattggtggatgggtagatggatgaatgggtggatggatgaatagatggataggtgggtagatggatgggtggatggatgagtagataggtgggtggttgggtgggtggatggatggatggatggatggatggatagatgggtgggtaggtggatagatttctatctgaagagtgggtggatggatggatggatggatggacagatgagtgggtggatggatggatttatgggtgaatggaatgatggatagatggatggatggatagatgggtgggtgggtggataggtggatggatggatggatgaatggtgggtggatggatggatggatgaatggatggataggtgggtgagtggatgggcagatggatggatgggtggatggatggatggatggatagatgggtgggtaagtggatagatagaagggtgggtgaaaggatgggtgggtgggtggatggatgaatggatagatgagtgggtgggtgagtaggtggatagatggatggatgggtagatgagtgggtgcaaggatggatagatggttaggtggatggatggatggatggatagatgggtgggttggtgggtagataaaagggtgggtgaaaggatgggtggatggaaggatggatgtatgattggatggatggatggatggatggatggatggacagatgagtgggtgggtgagtgggtggatggatggatggatggatggacagatgggtgggtgagtgggtggatggatggatggatagatgggtgggtggatggatggatggatggatggatggggagatgggtgggtggattactggatggatgggttcatgagtgaatgaaagaatgagtgaatgaatgagtaggtgatttgttcctcaggccctggagctggatctaccctactgtccctgagtggcctgtgtcccatgcaccagtctctgtgaactatgctccacacagag

SEQ ID NO: 9434 - DNA, 3251 bp, Artificial sequence
  DNA replication origin
gtgggccgatgtccgcgaagaagcattttgtgcaaggttgtgggtttgcagtcttttttgtggttcttcttgtcaggcattcaggcgggagacccctcccttcagagccttcccaggctccggtttcagtgggttcaatccatgggaccctgtttcaaatctgacagctctcacatgacgtccaccaggcaggcaggttaggagacggacatttaaaaacaacaccatttacaacagagtcaaaagataaataactgggaataaatctaatgaaagatcttcaggacttctacacaaaactatgaaacgttaacaaagaaagcctaaattaatggagagatacacggtgttcatggtttgaaaaccttaacactgtaaagatttccacttcaactgatttacagatctacagagtcaattaaatgcatttccattaaaatcccagctgccttttttctgcagaaagtgacaaggttgctataaaatgtatgttgctaagaaaaacaaagtggaaggactttaccaccagacaccaaggattattggaaggcaacagggaatacgatggtgtattattggtgcaaagtagacaagaagaccaatgaacaaaagaggaagtgcagaagtcgatcgaacaggcctggacatgggtgggaggcaggggcagcctgcagaggcaggaggtggaagaggaagctccagggcctgaaggcgggcagaggtgcacataaacagcagacgattggtcgacttacacttgacagcttctgtacatcaaaacatgtcatgaggggaggaaaggctgaggagcaggggagatgtcatggggggaggaaaggctgaggagtaggggagatgtcatggggggaggaaaggctgaggagtaggggagatgtcatggggggaggaaaggctgaggagtaggggagatgtcatggggggaggaaaggctgaggagtaggggagatgtcatgaggggaggaaaggctgaggagcaggggagatgtcatggggggaggaaaggctgaggagtaggggagacgtcatggggggaggaaaggccgaggagtgggggagacgtcatgaggggaggaaaggctgaggagtgggggagacgtcatgagggggaaaggctgaggagtgggggagacgtcatgaggggaggaaaggctgaggtggggggagacgtcatgaggggaggaaaggccgaggagttggggagacgtcatgaagggaggaaaggccgaggagttggggagacgtcatgaggggaggaaaggccgaggagtgggggagatgtcatgaagggaggaaaggccgaggagtggggaagatgtcatgaggggaggaaaggccgaggagtgggggagacgtcatggggggaggaaaggctgaggagtgggggagacgtcatggggggaggaaaggccgaggagttggggagacgtcatgaggggaggaaaggccgaggagtggggaagatgtcatgaggggaggaaaggccgaggagtgggggagacgtcatgaggggaggaaaggctgaggagtaggggtagacgtcatgaggggaggaaaggctgaggagtaggggcggatgtcatgaggggaggaaaggctgaggagtgggggagatgtcatgaggggaggaaaggctgaggagtagggggagatgtcatgaggggaggaaaggctgaggagtaggggaagatgtcatgaagggaggaaaggctgaggagtgggggagatgtcatgaggggaggaaaggctgaggagtagaggagatgttatgaggggaggaaaggctgaggaatgggggagatgtcatggggggagatgtcatggggggaggaaaggctgaggagtgggggagatgtcatgaggggaggaaaggctgaggagtgggggagatgtcatggggggagatgtcatggggggaggaaaggctgaggagtagaggagatgttatgaggggaggaaaggctgaggaatgggggagatgtcatggggggagatgtcatggggggaggaaaggctgaggagtgggggagatgtcatggaaaaggaggaaaggctgaggagtcggggagatgtcatcgggggaggaaaggctgaggagtgggggagatgtcatggaaagggaggaaaggctgaggagtcggggagatgccatgaggggaagaaaggctgaggagtgggtgagatgtcatggggggaggaaaggctgaggagtgggggagatgtcatgagggctggatcggctctgagtgggggagatgtcatggggggaaaggctgaggagtgggggagatgtcgtgaggggagaaaaggctgaggagtgggggagatatcatgagaggtggaacggctctgagtgggggagatgtcgtgggggaaaggctgaggagtgggggagatgtcgtggggggaggaaaggctgtgagtagggggagacgtcatggggggggaaggctgaggagtcggggagatgtcatagggggaggaaagtctgaggagtgggggagatgtcatgaggggaggaaaggctgaggagtgggtgagatgtcgtggggggagaaaaggctgtgagcagggggagatgtcgtggagggaaggagaggcagtgagtagggggagatgtcgtggaggggagggacaggccgtgagcagggggcgatatcatggaggggaaggacaggccatgagttgtgggagatgtcgtggaggggaaggacaggccgtgagtcagagatgtcgtggaggggaaggacaggctttgagtcgggggagatgtcacggagaggagggacaggccgtgagttgagggagatgtcacggtgggggaggaaaggctgtgagtaggggcagatgtttcaggaacaggacattttggaatatgttgagagtcccgaaatccccatgaagaagtcagcatcagtagcgtacggcatgtggacaggcattccttggggcagccgatggcccgtgaaagccatagatgatgtccagcatccctggccaccaggaaaaccagaattcaaagcatggagatcctgtggctgaatggtggaaaggctggacgccagggctgggtgtgggtggaggggcagggccagggtgaccagctggactgttcatggaaatcacctgcctgcacctttccggccggacacactcgccccaggaggcagcatctcccctcgtgggcgcttacctcggagaactccgggcatgaatgtgcgaaaggcaggaac

SEQ ID NO: 9435 - DNA, 1834 bp, Artificial sequence
  DNA replication origin
cctcccgggcacgcagtcgacggccatcacagtcacctcccacctcccaggcacgcagtcgatggcctctgagaccacagcagcatcacagaggcctcatgctggtgacccggcctcaggctctgcagcaggaaatgaggtccatggtccttggcttgcctggtccctcctcccagccggcaatgggcagggctggccagggctgtgagggttttgggaagctcaggcggtggtggcgctgagaccctcccaagggctccccattcctcagaggcagggacagatgagatgctctcttctgcaggaagaaagctccagtgcaggatcagaaccaaagtggcccctcgaggccctgttgtgggagctgctgcaggcgtcaggcactggtcttccatcagtcatagctatttctagatattttctcagggaacaagcatggagtacttacctaggtacgaggcagttgagtactctgggggttgagtactgtggcagttagatacattgggagttaggtattttgggagttgggtactatgagaattgagtactatgggagttaggtacatgggagttaggcattatgagggttaggtactgtgggagttgggtactgtgggagttgggtactgtgggtgtttggtactattgtagttgagtactgtaggagttgggtgctgtgggggttgggtactgtgggagttggctactattgtatttggctactgtgggatttgggtactgcaggagttgggtactgtgggagttgggtactattgtatttgggtgctgcaggatttgggtactgtgggagttgagtactatagtagtttggtactgtgggaattgggtactgtgggagttggggactgtaggagttgggtactgtggcagttgggtactgcgggagttgggtactgcaggagttgggtactgtaggggttgggtactattgtagttgggtcctgtgggagttgggttctgtgggagttgggtactgtgggagttggggactgtgggagttgggtactgtgggagttgggtactgcaggggttgggtactgtggaggttgggtattgtgggagttgggtcctgcgggagttgggtactgcgggagttgggtacggcaagggttgggtactgtgggggttggatactgtgggagttgggtactgtgggagttgggtactgcaggggttaggtactgtggggattggatactatgggagttgggtactgtggcagttgggtactgcaggggttgggtactgtgggggttggatactgtgggagttgtgttctgtggcagttgagtagttgggagttgggtattgtggcatttgtgtactgtgggagttgtgcactgtgagagttgggtactgtgggagtggggtactatggcagttgggtactgcaggggttgggtactgtgggggttggatactgtgggagttgtgttctgtggcagttgagtagttgggagttgggtattgtggcatttgtgtactgtgggagttgtgcactgtgagagttgggtactgtgggagtggggtactatgggagttgggtactgcaggggttgggtactgcgggggttgggtactgagggggttgggtactgcggggattgggtactgagggggttgggtactgtgggagttgggtaccgtgggggttggatactgtgggagttgggttctgtgggagttgtgtactgcaggagttcggtactgtgagagttgggtactacgctttgttttacatatacgaatgctgggcctgagggcactaagaactatggggccagtggcccagcaaatgtggtccaagttg

SEQ ID NO: 9436 - DNA, 1451 bp, Artificial sequence
  DNA replication origin
agtgggattctctcctggttttccgcacagggagttggaggccatcctctgtcgggcgctgcccgtttgggcccccacttgggcctcccctcacgtctctcccatctaggagacctcaagctctggaatcccggaccagccttcctgaggccagggacggtgccacaccctgcgcctccccaggccttcctcccgttgcctccttcagcctctgggctcacctccctgggggccctcgctggccccctgcccccactgcccacatggctccttccatagccggggccttcccggcaggcatgggactttctccctagcctcctggttcctttatctcagtctgcaccgctgggcgataaggacccagagccgcccccgcccccacctccaccctgcacagggctcatcgacattcgctgagtaatggagatgaaggcgctgggggcgtcactcagagatgagcgagtttaggcgcctgacctttgcccctaggacacaggaactcagaaagggaggccagaaggaagagatcacgtttgcatttaaggactcctggcttccgagcacagcgcagattggagggaagggtggggacttgggaagacagagagagaaagacagagacagagaaagagagacagggagagacagaaacaaggagagacagagaaagagagacaggcacaaagacagaaacagagacagggacaaagacagagagaggtagagacagagacgaggagagacagagacagagaaagagaaacaggaacagagacagagagagggaaagacagagagagaaaggcagagacagagacagggagagacagacaaagagagacagggagagagagagagacagagaaaaaagagagagacagagagaaagacagacagagaaagacagggacagagagagggagagacagagacagagagagagacaaagacagagacagagagacagagagagatggagacagagagagaaagacacagagacagaaacagggaaaaagagagatggggagacagagacagagagaaagagaaagacagagaaagagagagggagagacagagacacagagacagggagagacagagataaagagagagacagacatagacagagacagagagaaacagagagatagagacagagaaagagacaaagaaagagacagggagagccagagagagagaaagacagagacagacagaggaagagagacaaggagagacagagatagagagaaagggagagacagagagagagaaagtacagagaaagagaaacagagagatagaggcagagaaggagagagggagagacagagacagagagagggagagacagagagagagagaaagacagagaaagagagccaaggagagacacagagagaaagacagagagagacagagagatagagaaagacagagac

SEQ ID NO: 9437 - DNA, 1230 bp, Artificial sequence
  DNA replication origin
tctttgtccctgtctctgtttctgtctttgtgcctgtctctctttctctgtctctccttgtttctgtctctccctgtctctctttctctgtctctgtctttctctctctgtcttcccaagtccccacccttccctccaatctgcgctgtgctcggaagccaggagtccttaaatgcaaacgtgatctcttccttctggcctccctttctgagttcctgtgtcctaggggcaaaggtcaggcgcctaaactcgctcatctctgagtgacgcccccagcgccttcatctccattactcagcgaatgtcgatgagccctgtgcagggtggaggtgggggcgggggcggctctgggtccttatcgcccagcggtgcagactgagataaaggaaccaggaggctagggagaaagtcccatgcctgccgggaaggccccggctatggaaggagccatgtgggcagtgggggcagggggccagcgagggcccccagggaggtgagcccagaggctgaaggaggcaacgggaggaaggcctggggaggcgcagggtgtggcaccgtccctggcctcaggaaggctggtccgggattccagagcttgaggtctcctagatgggagagacgtgaggggaggcccaagtgggggcccaaacgggcagcgcccgacagaggatggcctccaactccctgtgcggaaaaccaggagagaatcccactctggctttggagacacaacccccaggatcctctcctgaactccccgcaacgttcctcctgcccctcctggaccccgtggtcagccctgtggcttccctgcacggcctctttgctggggagcaggaacaccatctccttcgctgtcccatgcccggcacaggactgccccccacaaagtgctccacagaaggacagaaaccgtgcagtcaccgggaaggtggggatctggggtggctgcaggttccatgacacaggaccctccatcccccgtgaccccagagggcccttggggacgaggctgccctagagggtggctctgggtcctgaacctatggccgggagctgaactcctcctgctcgatgttctccagctcagccagggatgggatccgggcatccaggctggggttgggcagcgtgagctgttcattatgaagttcattacgaaccccagaatgaaactgtggcccagggggcacagccacgggaaccccactctcaggttgattcaggcca

SEQ ID NO: 9438 - DNA, 835 bp, Artificial sequence
  DNA replication origin
ccctccactggccacccatccccactctgagcaggaggtcccagggctggcacagggtgtggctgggatgggctactccagaatctgaggggccgacccagtgcaggccgggatcatgcagctgatgccgtggtgcagcctgtacacgccttccaggctcacaccttcctggcacacgcctgccctgcacacgccttcccggctcacaccttcctggcacatgcctgcctggcttgccccaggcatgggtctcacctgcccagtgcagcctccagcaggtgcatccaggccaccgccttcgcagagaacttttgatgtaccagtagcctggttgctgcctacgggctgggggactgcccacttggccctgacccaaaccgggaagcccccgtggcccaggacaggtgggtgggcttcaggaaagccttccctgtggaggactcatgagaggggagacaacagaaactgcagaggggaatgttctcaattatttggggacagctaggcaggatggaaagtgtgctatgtagtacatgctttactgaagtttcaaactcaaaaccaaatgtgtgttgtgaatatgtgagtgtgagatggggaagagagacagggggagagacggagataggggaagagagagaagagggaagagacagagagaataggagggggaaagaaaaaaagacagagactgagagggagagagagagaggaggaggatgagagagaggggggaagggagagaataggaggggaaagagagaatgacagagacagagagagaggaagagagagggagagacagagagaggaagagagagggaggagggaggtc

SEQ ID NO: 9439 - DNA, 1158 bp, Artificial sequence
  DNA replication origin
gcacagcggggccagcggggcttccctgcatgctgctgctctgtcggggccggcaagatggcccctggggttggaataagacaggtcctcccacgatacgtgcaaccctcactgctcgctgggactgtcggggccctttcctgcctccggggctgtggggtcctctggaattagaccacttcccctttagaaaggtctcaggatggttccacaagcccagagaggcccacagtggtgacagtgtgtggagtgggcagttgcaggcaagggccccagcccgggagcgcaaacactctgaggctgccagacttgcacagggaagagggagcagcgtgaggcccagggtgcacctgactgttggggctggagccttctaaccagtgcacctgtgtaggaatgtgtgctcgtgtgctcacaaaggtgtgtgcatgcatggggtgtgcagatgtgtgtaccagatgtgtatgcaagggtacagctgtgcatgtgtgctatgtgtgtgctgtgtgtgcatgcatgtgtgtgcacgtgagcatgtgtgctgtgtgcatgtgcatgtgtggggtgtagaggtacagtatcggatatgcacgtgagagtacagtcacgcttgtgtgctgtgtgtgtacatgcatgtgcgtgcatgtgagcatgtgtgcctgtgtgcatgtgtgtactgtgtgtgtgtgcatgtgcatgtgtggggtgtgcaggtgcatggaccagatgtgcacgcgagagtacagtcacacttgtgtgctgtgtgtgtacatgcatgtgtgtgcatgtgagcatgtgtgtgcatgtgagcatgtgtgcctgtgtgcatgtgtgtgtgttgtgtgtccgtgcatgtgcgtgcatgtgagcatgtgtgcctctgtgcatgtgtgtgctgtgtgtgtgtgtgcatgtgcatgtgtggggtgtgcaggtgcatggaccagatgtgcacacgagggtgtagctgtgcatgtgtgctgtgtgcgtgcatgcatgtgcgtgcacgtgagcatgtgtgcctgtgttcatgtgcacgtgtgggcgtgtcactggtgtcaaggcctctggaacgtggctggcatttcttccagctcagggccttccattctcctcccttgggggacccgtaccctgaggtgtgtgaatggccctctc

SEQ ID NO: 9440 - DNA, 879 bp, Artificial sequence
  DNA replication origin
gacttacgttgggcgtgaagaggaagacgatgccattggtggcgcccttcagcgtcaggcctcggatgaggaagatggtcaggacgacatagggcagcgtggaggtgatgtacacggcctgcggagggcgggacatgtgggatgggcgggaagttggggggccaggcatgcggtgggggcggcacgtgggggcggggcatatgggggcggggcatgtggggaatgggggccaggcctacggggggcgaggcatgctggaagggtggggagggggccaggcctgttggggggacagggcatgtgggaggggtggggatgggggcaggggctgtggggggcggggcctgcggagggcagagcatgtggaatggatggggatggggggccaggcctgtggagtccgggtatgtgggatggtgcggaggggggccaggcctacaggggttggggcatctggggaagggggcccagggcgacggggggccgagcatgtgggacgggtggggacgggaggcagggcctgcgggcggctgggtatgtggaatgggtggggatggggggcagggcctgcgggagcctgggtatttgggatggtgcggaggggggccgtgcttgtggtggggggcatgtgggacgagtgggaacggggacagggcctcacaggctgccggcccaccagaagaaagggatggccgctctggacctcgtaccaaagattcccatgtaggggaagatcaagccttactcttccatttccactttcctgttttatcatcaccatcatcaccatcatcatcatcatcgtctatctctttctggtagtttgtattactcctacataacgctaagtgtcgtgtgggccaacgtcaagttcctgga

SEQ ID NO: 9441 - DNA, 1028 bp, Artificial sequence
  DNA replication origin
atgtggcgcccccgacgccctccacgtccccgaccaaggtctgatccttccactgccccttccccacgtacccactgcgcttcccaatgcccctgggaaggatgcataccctggagtccccagcagcgtctgggaggagcacagctggtgtcagttaatttccactagcatttatgaagcacctactatgtgcccgacctggtgcatcaggacctgccctcagtgacctgtggctctgcaggttgacaagcaagtgcagaagttgtcctctgtgtggtgaccagaatttcagagcagaaggggctgggggtgagggaggactcctaggggtcagggtggccctccaggctgtgaaggtgcgattggagtcagacacaggggaccctcagtgcaagggggcagggcctgggtagggagggtggggcctagactggacgggggcctgggtagggagggtgggccctgggtgtgaggggcggggctgggcagggagggcatagctgaggcggggctggggcttggcaggtgcagagcccaggcagggagggctggggtgcagagggagatgtgcttggaggcacctgcagatgggcttgtgggcagagagggtgttggagggacagaaaggaccctggagtcattgtgcgagcactgggtggagcagtgaagccccacccaggcctcaggagctcccctgggtgctgagggcaggtgctaggaggacccctgggcactgcaggcagctggggcagggccaaggcaggattgaggactctgactttttcgtggagtggctgaggtggaactgagggtgaattatttttataacagctttattcagatcatttgaataccacacaactcccccatttggaatgcccagttcaatggtcttaagtacattcacagagttgtgaagccagccatcagcactgtccagttctagaaggttccaatcagcaaaagctccacatatgtgagcagccgctccccagtgccctgtcctcctgccccgggtgagcactgat

SEQ ID NO: 9442 - DNA, 1037 bp, Artificial sequence
  DNA replication origin
gtgggatggcagcccccggctgtgtgaacagctctgtccccggccgtgcgtgcagcccccgggcgtgtgaacagctctgtccccggccgtgcgtgcagcccccaggcgtgtgaacagctctgtccccggccgtgtgtgcagcccccgggcgtgtgaacagctctgtccccggccgtgcgtgcagccgccgggcatgtgagcagctctgtccccggcagtgtgtgcagcccccgggtgtgtgaacagctctgtccctggccatatgtgcagcccccagttgtgtgaacagctctgtccctggccgtgcgtgcagcccctgggcgtgtgagcagctctgtcccccggcctgcaggcctcatctgcctggggacattcctcattggcttcatcttcacgctgaactccggccagtactggctctccctgctggacagctatgccggctccattcccctgctcatcatcgccttctgcgagatgttctctgtggtctacgtgtacggtgtggacaggtaggggccacggtggggacaggtgcctctaatgcagaaaagccaggtcacagggcgttcctgtgagggaggacccgggctgtgttcagggtacggagggagagtctatgactcggggcctcggccggccacagaggctggtgtagacctgtcctggcgggagcagagggcatcagcagggccctggcatgccgataatgggagctttgtgttgctgggagccgggaagcccagtggagcccagaccttggcggtgcccacgcagagagccagagctcgaggccactgcagggcccacggccggggatgctccttgtgtgtgtgtgtgtgcaggggggtggggagtgccttatttccctgatgctccaggcctttttagggcagagagactccagcagtgtggtagagcctcagacagggactcttggttggagccaccacaactttagaaataatcagacaaggccgggcacggtggctcatgactgtcatcccagcactttgggaggccaaggtgggcaaatc

SEQ ID NO: 9443 - DNA, 1179 bp, Artificial sequence
  DNA replication origin
acagaaaccctcaattcacagaaaaccctctcatctcctctcccctaaatacagcagattcagcttccccaaatcagtcacagagagctcacttctccccaaatctttcccttcgatgatcttgtcagggtggtctctgacaaactgacctcagcctggtcacctgaggccccagcccaggctcaatggccctcaccacagagcaagggtcaatggggcccagggcacctgctggcctggagtctgcagtgctccctggacagtggatcccatatctggaacccggagcccctgcccaccgcgacgtggtgcccacgccacccacatctgtcctccacccggccactgtgcacctgaggcctgagtgtggccacgaagccactactgcgggatgggtggctggtcacacaccagccttgagacctcaggtgcaggctggaggtcggggggaagaaggcctccacggtgcaggctgggggtggggggaagtgatgttttcacagtgcaggctgaacaggggaaaggtaagaggggctctcacggtacaggctggagatgggggaggggagaggggctctcacagcgcaggctaaagggaagggaagggaagaagggctctcaggtgcaggctggaggggagggaagaagggctgtcacggtgcaggctggaggggagggaagaagggctatcatggtgcaggctggaggtgggggaagaagagctctcaggtgcaggctggaggtgggggagggaaaaggggctctcacagcacaggctggaggggagcgaagaagggctctaacggtacaggctggaggggagggaagaggggctttcacagtgcaggctggtcgtgggggagggaagaggggctctcatagcacaggctggaggtgggggaagaggggctctcacggtacaggctggaggtgggggaagagaggctggcttgggggtgtccccccattcacatgggagcctggccctgagaaaggcaggtatgctgactccctgccatgagctccctggggtgccctgggttttgttcccttttgctccaggccctggccacagctgttcccaccctcccaggaggcatcttggggtgtcaggtgcctccacctgaggctgaccccgtagacctcagcttcccctcttcaatgcttgtctttctgccg

SEQ ID NO: 9444 - DNA, 989 bp, Artificial sequence
  DNA replication origin
tgaagggcgcagctgaaagccaggcctccctcacacctcacatgtgaatggcaacaccagcttccaggtccttccgggatgtcctggcacacatgttctccatctctaattctccccgagtcaccgctgcttctcacacacacccaagggctccctgccaccccacccgccggcctggcctggccgcttccgtaccacaggcatggacccgcccccgccccacctctcatccaggagggccctgtccctggcagcctcagtcagggcaagcgaggacggtggcctacctactccactgaggtacggggagatggccgtccacacgccgacgctgcccttccgcagccgctggccgatggcgagctcgacgtggaaaatggggatcccctcgaagaccagcgcgatgacgtaggggatgaggaaggcccctgtgaggagggggtggtcagcacctgcccagggtcgggggctgggggggactgtggcgtgggccagggggagccacctgtggtcttcaaggggcagacgggacctgaatgttgggggcaccacttgggtggtggagacacccttggggcactgttgggttgccaaaccctgcctctgattttggctcggttgctgagacctctcatcaagagggcagggccctggaggggagcagggggcccaaaaggaggcagccggccctggactaggacttggggtctaagcgtgacccctgtgttgcgtttgctgagggaccagcattgtttgaggcacctgccttttcctgggggctgctgtggccggcagtggggactcagcctctgtgggaaggaggcctgcaggggcctggcggaatcacactgaaaacctctgccatcagcctccccatgggaaaacagctcctttcattaacgtgatgtttctgaaaattcatgagtctgcagaaataaagtgctgactgagcatgttttttaaacaccccagtcaccggaggaggtctg

SEQ ID NO: 9445 - DNA, 1734 bp, Artificial sequence
  DNA replication origin
cacgtgagcgagctcctgcctgtcgcccctctgccccgggacagcaggagccttttggtacctccttaatacagtttgacagtttgggaaaataaaagtggcaacctacagtgtttctcagaaatttcaggaagggtcagccagaccgcagactccagaccccaggcccccgctcccaggcgggaggaagcatctgtcctgggtacccctgccgcctgcgagctgtagggggacagcccgcctgggacctggagccggggtgcaggcggccccctgagccacccgggcggccgctcttccccagagaccagccaggctaggttcagagtctgtgagaccgggagccccgcacctgcgaagatccctgagccagcccggccaagcgcagggacctcagccgctgcaggacgcccaggccgcgggctcagcagggatgccggggccctgcgagacctccctaggggcgggccccaagcagcagcgctgcccgggcgtcaggaaagcagtaaccacacgtacacagcggcatcaaggttgagtcgctggtgtattggggtcggccctgtgggcggggccccgcccaccatcaggccaagcccccccacagacccgcccatgcaggccccgctccggccggcttcagcgcatgtccgtgtccgggcgcatgtccgtgtctgggcgcgtgtccgtgtccgggcgcatgtccgtgtctgggcgcgcgtccctgtccctccacgtccgcctccgccgggtgagcagctgagcaagcgcggccaccgggacccacagcacgggcagcaaggacagcagcacacaggcggcgcgcgcccagcccgggtagagcttctcctgacgcgaggggaacagctcctgcgggaccacagcctcattagctggcgccggccaccctgggccgtgaggctgacccccgtgctcctcaatccaaggggcaagagccacctgcccacccggacttggatgggaatggaaaaggcacggccagagcagtggccaggccgtgtggccgctcaccaccgcccctccgggccaggagtttggggacctgggctgagcttctcctggggctggggcctccccgaggtaggcctaggtgttgtgttctggaaccagaggggctacatggcctcaacccattgggcgtcgttggaggccgtgtccccagctttctcccctatacactgggtggcaccacccacccggctgcaggtaccgtggaaattcttcaaaaatacatggtcactcctccttcacctgcccttggtgttctgctacggagggactttccaagacacatttggagaggagtggcgtccacattcccgagaaggggtggcatggtgaggttttgagcggccaccagtggggactcagatggtatgtcaggggctggcgctgcttggagcccctgaggcgttttcggagtgtggctggcactctgatctctcctcgggaggcttttgtgtggaaacggcctccagccaaactgacccactgggtggcagtaggggtctgtgcacaacctctcttgtcacagaccaggaatgggccgttgtccggctgcccgtccccatgccacatgggcaggacacaggcagggaggatgaagccacatccccaaggaggagctccagggccctgtggggtccctgggctctgggcactgctcaggtcctcactccactgaccaggcgcttgcccatggtcacccccatg

SEQ ID NO: 9446 - DNA, 1869 bp, Artificial sequence
  DNA replication origin
agctgctcacccggcggaggcggacgtggagggacagggacgcgcgcccagacacggacatgcgcccggacacggacacgcgcccagacacggacatgcgcccggacacggacatgcgctgaagccggccggagcggggcctgcatgggcgggtctgtgggggggcttggcctgatggtgggcggggccccgcccacagggccgaccccaatacaccagcgactcaaccttgatgccgctgtgtacgtgtggttactgctttcctgacgcccgggcagcgctgctgcttggggcccgcccctagggaggtctcgcagggccccggcatccctgctgagcccgcggcctgggcgtcctgcagcggctgaggtccctgcgcttggccgggctggctcagggatcttcgcaggtgcggggctcccggtctcacagactctgaacctagcctggctggtctctggggaagagcggccgcccgggtggctcagggggccgcctgcaccccggctccaggtcccaggcgggctgtccccctacagctcgcaggcggcaggggtacccaggacagatgcttcctcccgcctgggagcgggggcctggggtctggagtctgcggtctggctgacccttcctgaaatttctgagaaacactgtaggttgccacttttattttcccaaactgtcaaactgtattaaggaggtaccaaaaggctcctgctgtcccggggcagaggggcgacaggcaggagctcgctcacgtggggcagtcacccgcgccccgggcgccaagcgcactgtgcagcccccgtccagcccgccctgctccagagtaccccggctccaggcgccacgcgcgtgcttccctcctccctctccctctgttccctccgccctcctcctccctctttcctccccatccttttccctctcctccttcccctgcaacagcaccacggagccagggatcaggtctctgactcgccacacggagggaggccccgcaggtcctggcttcctgccgccgggaggggccctgtgaagacccaaggcacctgctcccgctttggaaaagggcgcctggccaggcagcactgtccgtggtgctgaaaaatcccagcatcaaggcgcggccgcggtgccaagcgtccattacacgcattcttgttgggaacccgtccttgaccaaggccagcccagagtaaacaaaagcacgtgcaccgctacccacctgcagataagctgagtgctaaacatgcagttaacgccagtgcaccccacccaagcgcatcctgagcccacagtgggggaagctgcccacctaaacgtgtcctgagcccacggcaggggaagctgcccacctaagcgtgtcccgagcccacggcagggggggagctgcccacctaagcgtgtcctgagcccacggcaggggaagctgcccacctaagagtgtcccgagcccacggcaggggaagctgcccacctaagcgtgtcccaagcccacagcagaggggtgctgcacttcgtccctccgtcctgcagttgtgatgccccccacaccggtggtaaggcagggggacttgaggatgaacatgtcacaaagcgagtcagtccactgtgagataaggctgctgcagaggacagtctggcatcccccagttcagcctcacaatcttgccacaactccatgccttgggcctaatagccagcctcttccattgtaactgacacaaacaaactcaaaccaaatggccttcaccagctctcagaactggccaagttcagggtgggcttcaggccctactggacccaggagttcacaggatccatgggactctctccccacactgttcagcttttttaagtagggcg

SEQ ID NO: 9447 - DNA, 1952 bp, Artificial sequence
  DNA replication origin
tgtgatgctttccgccgacctcagacccatgggctatttgtgggcgtgttgcctgctcctgggttgggaagggtgcaggccccatgtaccttcctgttactgccttccaggttggttctcagggttgaatcgtactcgatgtggttttagcccacggccctgccgccagctcctgggggctggggaacatgctgaagcacagagtcaccgtgcgcgtcttttgatgcctcacaagctcgaggcctcctgtgtccgtgttagtgtgtgtcacgtgcctgctcacatcctgtcttggggacgcaggggcttagcaggtcccgtagtaaatgacaagcgtcctgggggagtctgcagaataggaggtgggggtgccggtctctctcccgcgtcttcagactcttctcctgcctgtgctgtggctgcacctgcatccctgcaatccctccagcactgggctggagaggcccgggagctcgagtgccacttgtgccacgtgactgtggatggcagtcggtcacgggggtctgatgtgtggtgactgtggatggcggttggtcacaggggtctgatgtgtggtgactgtggatggcggtcgtggggtctgatgtggtgactgtggatggcggtcgtggggtctgatgtggtgactgtggatggcggtcgtggggtctgatgtgtggtgactgtggatggcggttggtcccgggggtctgatgtgtggtgactgtggatggcggtcgtggggtctgatgtggtgactgtggatggcggtcgtggggtctgatgtggtgactgtggatggcggtcgtggggtctgatgtgtggtgactgtggatggcggttggtcccgggggtctgatgtgtggtgactgtggatggcgatcggtcacaggggtctgatgtgtggtgactgtggatggcggtcgtggggtctgatgtgtggtgactgtggatggcggtcgtggggtctgatgtggtgactgtggatggcggtcgtggggtctgatgtgtggtgactgtggatggcggtcgtggggtctgatgtggtgactgtggatggcggtcgtggggtctgatgtgtggtgactgtggatggcggtcgtggggtctgatgtgtggtgactgtggatggcggtcgtggggtctgatgtgtggtgactgtggatggcggtcgtggggtctgatgtggtgactgtggatggcggtcgtggggtctgatgtgtggtgactgtggatggcggttgtggggtctgatgtgtggtgactgtggatggtgatcggtcacaggggtctgatgtgtggtgactgtggatggcggtcgtggggtctgatgtgtggtgactgtggatggcggttggtcccgggggtctgatgtgtggtgactggatggcgatcggtcacaggggtctgatgtgtggtgactgtggatggcggtcgtggggtctgatgtgtggtgactgtggatggcggtcgtggggtctgatgtggtgactgtggatggcggtcgtggggtctgatgtgtggtgactgtggatggcggtcgtggggtctgatgtggtgactgtggatggcggtcgtggggtctgatgtgtggtgactgtggatggcggtcgtggggtctgatgtgtggtgactgtggatggcggtcgtggggtctgatgtgtggtgactgtggatggcggtcgtggggtctgatgtgtggtgactgtggatggcggtcgtggggtctgatgtggtgactgtggatggcggtcgtagggtctgatgtggtgactgtggatggcggtcgtggggtctgatgtggtgactgtggatggtgatcggtcacaggggtctgatgtgtggtagctgcaggtggagtcccaggtgtgtctgtagctactttgcgtcctcggccccccggcccccgtttcccaaacagaagcttcccaggcgctctctgggcttcatcc

SEQ ID NO: 9448 - DNA, 1996 bp, Artificial sequence
  DNA replication origin
caggggggtgacagtgacaccccggctggctgcttgtgagggcgatgcctccggtggccgctggcctgaaggtgtcgaagccgcctcgtgggattgtgcagggggctctcttgatgcccacgtgcccacagtgttcccgtgctggccgccccggggctcttgcgggaggtggctgtccgtcctgccccgctctgtatggggcgcctgcctgccatcatcggcttgcaggagctctttgtgtgttctgctgcaagtgtggcatcacatgcgtgcactgtgaatctctgtgccgtgtgtgtcttgcttttgtgctctcaagtcaagccttttgaggactggaagattgtacttctatcgcagtccactaacacagtccagtaacgcagtccactttatcagctgtttgtggctaaagctgtttgtgttctctgcaggaactcaaggtattgaggttgtggtgacgttgcttctgcgcctccttttagaacagtctttactgtgtcagcttgcaaacctgggtggggattggtggaattggttttcatgtgtggggtaggtggggatctgtgggattggttttcatgtgtggtgtaggtggagatctgtgaattggttttcatccgtggggtaggtggggatctgtgggattggtttttatgtgtggggtaggtgggattggttttcatgtgcggggtaggtggggatctgtgggattggttttcttgtgtggggtaggtggggatctgtgggattggtttttatgtgtggggtaggtggggatatgtgaattggttttcatccgtggggtaggtggggatctgtgggattggtttttatgcgtggggtaggtggggatctgtgaattggttttcatccgtggggtaggtggggatctgtgggattggttttcatgtgtgggataggtggggatctgtggagttggttttcatgtgtggtgtaggtggagatctgtgaattggttttcatccgtggggtaggtggggatctgtgggattggtttctatgtgtggggtaggtggggacctgtgggattggtttttatgtgtggggtaggtggggatctgtgaattggttttcatccgtggggtaggtggggatctgtgggattggttttcatgtgtggggtaggtggggatctgtgggattggttttcatgtgtggggtaggtggggatctgtgggattggttttcatgtgtggggtaggtggggatctgtggagttggtttttatgtgtgggggtaggtggggatctgtggagttggttttcatgtgtagggtaggtggagatctgtgggattggttttcatgtgtggggtaggtggggatctgtgggattggttttcatgtgtggggtaggtggggatctgtgggattggttttcatgtgtggggtaggtggggatctgtggagttggttttcatgtgtggggtaggtggagatctgtgggattggttttcatgtgtgggataggtggggatctgtgggattggtttttatgagtggggtaacacagagttcaaggcgagctttcttcctgtagtgggtctgcaggtgctccaacagctttattgaggagaccatatcttcctttgaactatggtcgggtttatagtaagtcaggggtgtggaggcctcccctgggctccctgttctgtttcttccactctggggtcgtgtggtgcctgctgtggtgtgtggccggtgggcagggcttccaggcctccttgtgttcattggcctggatgtggccctggctacgctccgtccttggaattcccctgcgagttggaggcttgctttctttctttttttctttctttttttttttttttgataacagagtctcgctcttttttgcccaggctggagtggtttggcgtgatcttggctcactgcaacctgtgcttcctgagttcaagcaattctcttgcctcagcctcccaagtagctggaattataggcgcccaccaccat

SEQ ID NO: 9449 - DNA, 877 bp, Artificial sequence
  DNA replication origin
gcacatggggccgactgtgcaccctgactgcccgggctcctattcccaaggagggtcccactggattccagtttccgtcagagaaggaaccgcaacggctcagccaccaggccccggtgccttgcaccccagtcctgagccaggggtctcctgtcctgaggctcagagaggggacacagcccgccctgcccttggggtctggagtggtgggggtcagagagagagtgggggacaccgccaggccaggccctgagggcagaggtgatgtctgagtttctgcgtggccactgtcagtctcctcgcctccactcacacaggtggatgtgacgggcgcgtacgacaccatcccccaggacaggctcacggaggtcatcgccagcatcatcaaaccccagaacacgtactgcgtgcgtcggtatgccgtggtccagaaggccgcccatgggcacgtccgcaaggccttcaagagccacgtaaggttcacgtgtgatagtcgtgtccaggatgtgtgtctctgggatatgaatgtgtctagaatgcagtcgtgtctgtgatgcgtttctgtggtggaggtacttccatgatttacacatctgtgatatgcgtgtgtggcacgtgtgtgtcgtggtgcatgtatctgtggcgtgcatatttgtggtgtgtgtgtgtgtggcacgtgtgtgtccatggtgtgtgtgcctgtggtgtgcatgtgtgtgtgtctgtgacacgtgcatgttcatgctgtgtgctgcatgtctgtgatgtgcctatttgtggtgtgtgtgtgtgcatgtgtccgtgacatatgcgtgtctatggcatgggtgtgtgtggccccttggccttactccttcctcctccaggcatggtccgc

SEQ ID NO: 9450 - DNA, 2376 bp, Artificial sequence
  DNA replication origin
catcctggccaacatgatgaaaccccatctgtactaaaaacacaaaaattagctgggcgtggtggcgggtgcctgtaatcccagctactcgggaggctgaggcaggagaattgcttgaacctgggagttggaagttgcagtgagccgacattgcaccactgcactccagcctggcaacacagcgagactctgtctcaaaaaaaaaaaaaaaaaaaaaaattctagtagccacattaaaaaagtaaaaaagaaaaggtgaaattaatgtaataatagattttactgaagcccagcatgtccacacctcatcattttagggtgttattggtgggagcatcactcacaggacatttgacattttttgagctttgtctgcgggatcccgtgtgtaggtcccgtgcgtggccatctcggcctggacctgctgggcttcccatggccatggctgttgtaccagatggtgcaggtccgggatgaggtcgccaggccctcagtgagctggatgtgcagtgtccggatggtgcacgtctgggatgaggtcgccaggccctgctgtgagctggatgtgtggtgtctggatggtgcaggtcaggggtgaggtctccaggccctcggtgagctggaggtatggagtccggatgatgcaggtccggggtgaggtcgccaggccctgctgtgagctggatgtgtggtgtctggatggtgcaggtcaggggtgaggtctccaggccctcggtgagctggaggtatggagtccggatgatgcaggtccggggtgaggtcgccaggccctgctgtgagctggatgtgtggtgtctggatggtgcaggtctggggtgaggtcaccaggccctgcggtgagctgggtgtgcggtgtctggatggtgcaggtctggagtgaggtcgccagacggtgccagaccgtgcggtgagctggatatgcggtgtccggatggtgcaggtctggggtgaggttgccaggccctgctgtgagttggatgtggggtgtccggatgctgcaggtccggtgtgaggtcaccaggccctgctgtgagctggatgtgtggtgtctggatggtgcaggtctggggtgaggtcgccaggccctgctgtgagctggatgtgtggtgtctggatggtgcaggtctggagtgaggtcgccaggccctcggtgagctggatgtgcagtgtccagatggtgcaggtccggggtgaggtcgccagaccctgcggtgagctggatgtgcggtgtctggatggtgcaggtctggagtgaggtcgccaggccctcggtgagctggatgtatggagtccggatggtgccggtccggggtgaggtcgccagaccctgctgtgagctggatatgcggtgtccggatggtgcaggtcaggggtgaggtctccaggccctcggtgagctggaggtatggagtccggatgatgcaggtccggggtgaggtcgccaggccctgctgtgagctggatgtgcggcgtctggatggtgcaggtctggggtgtggtcgccaggccctcggtgagctggaggtatggagtccggatgatgcaggtccggggtgaggtcgccaggccctgctgtgagctggatgtgcggcgtctggatggtgcaggtctggggtgtggtcgccaggccctcggtgagctggaggtatggagtccggatgatgcaggtccggggtgaggttgccaggccctgctgtgagctggatgtgctgtatccggatggtgcaggtccggggtgaggtcgccaggccctgctgtgagctggatgtgctgtatccggatggtgcaggtctggggtgaggtcaccaggccctgcggtgagctggttgtgcagtgtccggttgctgcaggtccggggtgagttcgccaggccctcggtgagctggatgtgcggtgtccccgtgtccggatggtgcaggtccagggtgaggtcgctaggcccttggtgggctggatgtgccgtgtccggatggtgcaggtctggggtgaggtcgccaggcctttggtgagctggatgtgcggtgtctgcatggtgcatgtctggggtgaggtcgccaggcccttggtgggctggatgtgtggtgtccggatggtgcaggtccggcgtgaggtcgccaggccctgctgtgagctggatgtgcggtgtctggatggtgcaggtccggggtgaggtagccaaggccttcggtgagctggatgtggggtgtccggatggtgcaggtccggggtgaggtcgccaggccctgcggttagctggatatgcggtgtccggatggtgcaggtccggggtgaggtcaccaggccctgcggttagctggatgtgcggtgtctggatggtgcaggtccggggtgagg

SEQ ID NO: 9451 - DNA, 998 bp, Artificial sequence
  DNA replication origin
tccctgtcacgttcagggtgagtgaggcgcggtccccgggtgtccctgtcacgtgtagggtgaatgaggcactgtccccgggtgtccctgtcacgtgcagggtgagtgaggcgccgtccccgggtgtccctgtcacgtgcagggtgattgacgcgaggcccccgggtgtccctgtcacgtgcagggtgagtgaggcgccgtccccgcgtgtccctgtcacgtgcagggtgagtgaggcgccgtccccgggtgtccctgtcacgtgtagggtgagtgaggcgccgtccccgggtgtccctgtcacgtgtagggtgagtgaggcgccgtccccgggtgtccctgtcacgtgtagggtgagtgaggcgccgtccccgggtgtccctgtcacgtgtagggtgagtgaggcgccgtccccgggtgtccctgtcacgtgcagggtgagtgaggccccgtccccgggtgtccctgtcacgtgtagggtgagtgaggcactgtccccgggtgtctctgtcacgtgtagggtgagtgaggcgccgtccctgggtgtccctctcaggtgtagggtgagtgaggcgccatccccgggtgtccctgtcacgtgtagggtgagtgaggcgccgtccccgggtgtccctgtcacgtgtagggtgagtgagttgcggcccccgggtgtccctctcaggtgcagggtgagtgaggcgctgtccctgggtgtccctgtctcgtgtagggtgagtgaggctctgtccccaggtgtccttggcgtttgctcacttgagcttgctcctgaatgtttgctctttctatagccacagctgcgccggttgcccattgcctgggtagatggtgcaggcgcagtgctggtccccaagcctatcttttctgatgctcggctcttcttggtcacctctccgttccattttgctacggggacacgggactgcaggctctcgcctcccgcgtgccaggcactgcagccacagcttcaggtccgcttg

SEQ ID NO: 9452 - DNA, 2773 bp, Artificial sequence
  DNA replication origin
gggacacccggggacggcgcctcactcaccctacacgtgacagggacacccggggacggcgcctcactcaccctacacgtgacagggacacccggggacggcgcctcactcaccctacacgtgacagggacacccggggacggcgcctcactcaccctacacgtgacagggacacccggggacggcgcctcactcaccctgcacgtgacagggacacgcggggacggcgcctcactcaccctgcacgtgacagggacacccgggggcctcgcgtcaatcaccctgcacgtgacagggacacccggggacggcgcctcactcaccctgcacgtgacagggacacccggggacagtgcctcattcaccctacacgtgacagggacacccggggaccgcgcctcactcaccctgaacgtgacagggacacccggggacagtgcctcactcaccctgcaagtgacagggacacccgggggccgcgcctcactcaccctgcacgtgacagggacacccgggggccgtgcctcactcaccctgcacgtgacagggacacccgggggccgcgcctcactcaccctgcacgtgacagggacacccgggggccgcgcctcactcaccctgcacgtgacagggacacccgggggccgcgcctcactcaccctacacgtgacagggacacccgggggccgcgcctcactcaccctgcacgtgacagggacacccgggggccgcgcctcactcaccctacacgtgacagggacacccggggacagtgcctcactcaccctacacgtgacagtgacacccggggaccgcgcctcactcaccctacacgtgacagggacacccgggggccgtgcctcactcaccctgaacgtgacagggacacccggggacggcgcctcactcaccctacacgtgacagggacacccggggacggcacctcactcaccctacacgtgacagggacacccggggacggcgcctcactcaccctgcacgtgacagggacacgcggggacggcgcctcactcaccctgcacgtgacagggacacccgggggcctcgcgtcaatcaccctgcacgtgacagggacacccggggacagcgcctcactcaccctgcacgtgacagggacacccggggacggtgcctcactcaccctacacgtgacagggacacccggggaccgcgcctcactcaccctgaacgtgacagggacacccggggacagtgcctcactcaccctacacgggacagggacacccggggaccgtgcctcactcaccctgcacgtgacagggacacccggggaccgcgcctcactcaccctgcacgtgacagggacacccggggaccgcgcctcactcaccctgcacgtgacagggacacccggggaccgcgcctcactcaccctgcacgtgacagggacacccgggggccgcgcctcactcaccctgcacgtgacagggacacccgggggccgcgcctcactcaccctgcacgtgacagggacacccgggggccgtgcctcactcaccctgcacgtgacagggacacccggggacggcgcctcactcaccctgcacgggacagggacacctggggaccgcgcctcactcaccctgcacgggacagggacacccggggacagtgcctcactcaccctacacgtgacagggacacctggggaccgcgcctcactcaccctgcacgtgacagggacacccggggacagtgcctcactcaccctatacctgggagggacacccagggacggtgcctcactcaccctacacgtgacagggacacctggggccgcgcctcactcaccctacacctgagagggacacccggggacagcgcctcactcaccctacacctgggagggacacccagggacggtgcctcactcaccctacacgtgacagggacacccggggaccgcgcctcactcaccctgcacgtgacagggacacccggggacagcgcctcactcaccctgcacgggacagggacacccggggaccacgcctcactcaccctacacgtgacagggacacccggggacggcgcctcactcaccctacacctgagagggacacccggggacagtgcctcactcaccctacacgtgacagggacacccggggaccgcgcctcactcaccctgcacgtgacagggacacccggggacagtgcctcactcaccctgcacgggacagggacacccgggggccacacctcaatcacgctgcacgggacagggacacccgggggccgcgcctcactcaccctacacgtgacagggacacctgggggcaacgcctcactcaccctgcacgtgacagggacacccggggaccacgcctcactccctgcataagccaggggcagattgtgacctcatctgaagtcagagaacagcaatgacaggcagagtcctgatcagagaactcaaactctcctcaacgaaggaagctggagcacaaaaagcaaaactgggttgcatgacgcttatctgactcggcgtggtccacctgagccgcagcaggtgtgaggcagctgccgttcgatgggtagggacttccagtcacgcaagacgcagcatttcaagcaacctgctgtaaacaccgccgagttagcaattctgcactgtacacagaaaacggtgttaggagtgccaatctcatgttatatgacttttgccaccataaaaagaaaaaaagaaaaaaaagagccccaagaaggtcaccctccttgtctgcatgg

SEQ ID NO: 9453 - DNA, 871 bp, Artificial sequence
  DNA replication origin
ccagagcagtgaacagaggaggctgggcgcggcagtggagccgggttgccggcaatggggagaagtgtctggaagcacagacgctctggcgagggtgcctgcaggttacctataatcctcttcgcaatttcaagggtgggaatgagaggtggggacgagaaccccctcttcctgggggtgggaggtaagggttttgcaggtgcacgtggtcagccaatatgcaggtttgtgtttaagatttaattgtgtgttgacggccaggtgcggtggctcacgccggtaatcccagcactttgggaagctgaggcaggtggatcacctgaggtcaggagtttgagaccagcctgaccaacatggtgaaaccctatctgtactaaaaatacaaaaattagctgggcatggtggtgtgtgcctgtaatcccagctacttgggaggctgaggcaggagaatcacttgaacccaggaggcggaggctgcagtgagctgagattgtgccattgtactccagcctgggcgacaagagtgaaactctgtctttaaaaaaaaaaagtgttcgttgattgtgccaggacagggtagagggagggagataagactgttctccagcacagatcctggtcccatctttaggtatgaagagggccacatgggagcagaggacagcagatggctccacctgctgaggaagggacagtgtttgtgggtgttcaggggatggtgctgctgggccctgccgtgtccccaccctgtttttctggatttgatgttgaggaacctccgctccagcccccttttggctcccagtgctcccaggccctaccgtggcagctagaagaagtcccgatttcaccccctccccacaaactccca

SEQ ID NO: 9454 - DNA, 1130 bp, Artificial sequence
  DNA replication origin
cctctactcctcaggcgacaaggagcagctgcggccctccttcctactcagctctctgaggcccagcctgactggcgctcggaggctcgtggagaccatctttctgggttccaggccctggatgccagggactccccgcaggttgccccgcctgccccagcgctactggcaaatgcggcccctgtttctggagctgcttgggaaccacgcgcagtgcccctacggggtgctcctcaagacgcactgcccgctgcgagctgcggtcaccccagcagccggtgtctgtgcccgggagaagccccagggctctgtggcggcccccgaggaggaggacacagacccccgtcgcctggtgcagctgctccgccagcacagcagcccctggcaggtgtacggcttcgtgcgggcctgcctgcgccggctggtgcccccaggcctctggggctccaggcacaacgaacgccgcttcctcaggaacaccaagaagttcatctccctggggaagcatgccaagctctcgctgcaggagctgacgtggaagatgagcgtgcgggactgcgcttggctgcgcaggagcccaggtgaggaggtggtggccgtcgagggcccaggccccagagctgaatgcagtaggggctcagaaaagggggcaggcagagccctggtcctcctgtctccatcgtcacgtgggcacacgtggcttttcgctcaggacgtcgagtggacacggtgatctctgcctctgctctccctcctgtccagtttgcataaacttacgaggttcaccttcacgttttgatggacacgcggtttccaggcgccgaggccagagcagtgaacagaggaggctgggcgcggcagtggagccgggttgccggcaatggggagaagtgtctggaagcacagacgctctggcgagggtgcctgcaggttacctataatcctcttcgcaatttcaagggtgggaatgagaggtggggacgagaaccccctcttcctgggggtgggaggtaagggttttgcaggtgcacgtggtcagccaatatgcaggtttgtgtttaagatttaattgtgtgttgacggccaggtgcggtggctcacgccggtaatcccagcactttgggaagctg

SEQ ID NO: 9455 - DNA, 972 bp, Artificial sequence
  DNA replication origin
agaggcagagatcaccgtgtccactcgacgtcctgagcgaaaagccacgtgtgcccacgtgacgatggagacaggaggaccagggctctgcctgcccccttttctgagcccctactgcattcagctctggggcctgggccctcgacggccaccacctcctcacctgggctcctgcgcagccaagcgcagtcccgcacgctcatcttccacgtcagctcctgcagcgagagcttggcatgcttccccagggagatgaacttcttggtgttcctgaggaagcggcgttcgttgtgcctggagccccagaggcctgggggcaccagccggcgcaggcaggcccgcacgaagccgtacacctgccaggggctgctgtgctggcggagcagctgcaccaggcgacgggggtctgtgtcctcctcctcgggggccgccacagagccctggggcttctcccgggcacagacaccggctgctggggtgaccgcagctcgcagcgggcagtgcgtcttgaggagcaccccgtaggggcactgcgcgtggttcccaagcagctccagaaacaggggccgcatttgccagtagcgctggggcaggcggggcaacctgcggggagtccctggcatccagggcctggaacccagaaagatggtctccacgagcctccgagcgccagtcaggctgggcctcagagagctgagtaggaaggagggccgcagctgctccttgtcgcctgaggagtagaggaagtgcttggtctcggcgtacaccgggggacaaggcgtgtcccagggacgtggtggccgcgatgtggatggggggcccgcgtggtgctggcggcccacggatgggtgggagtggcgcgtgccagagagcgcaccctccaaagaggtggcttcttcggcgggtctggcaggtgacaccacacagaaaccacggtcactcggtccacgcgtcctgcccgggtgggcccag

SEQ ID NO: 9456 - DNA, 1541 bp, Artificial sequence
  DNA replication origin
ggggccccaggcgccgcacgaacgtggccagcggcagcacctcgcggtagtggctgcgcagcagggagcgcacggctcggcagcggggagcgcgcggcatcgcgggggtggccggggccagggcttcccacgtgcgcagcaggacgcagcgctgcctgaaactcgcgccgcgaggagagggcggggccgcggaaaggaaggggaggggctgggagggcccggagggggctgggccggggacccgggaggggtcgggacggggcggggtccgcgcggaggaggcggagctggaaggtgaaggggcaggacgggtgcccgggtccccagtccctccgccacgtgggaagcgcggtcctgggcgtctgtgcccgcgaatccactgggagcccggcctggccccgacagcgcagctgctccgggcggacccgggggtctgggccgcgcttccccgcccgcgcgccgctcgcgctcccagggtgcagggacgccagcgagggccccagcggagagaggtcgaatcggcctaggctgtggggtaacccgagggaggggccatgatgtggaggccctgggaacaggtgcgtgcggcgaccctttggccgctggcctgatccggagacccagggctgcctccaggtccggacgcggggcgtcgggctccgggcaccacgaatgccggacgtgaaggggaggacggaggcgcgtagacgcggctggggacgaacccgaggacgcattgctccctggacgggcacgcgggacctcccggagtgcctccctgcaacacttccccgcgacttgggctccttgacacaggcccgtcatttctctttgcaggttctcaggcggcgaggggtccccaccatgagcaaaccaccccaaatctgttaatcacccaccggggcggtcccgtcgagaaagggtgggaaatggagccaggcgctcctgctggccgcgcaccgggcgcctcacaccagccacaacggccttgaccctgggccccggcactctgtctggcagatgaggccaacatctggtcacatcccgcccgcacagggtggagggcaacctcggggtccaggcacctggctccaagcctcggactgcagagctaggaggcccgacttccagcccagcagtagaagccacacggccactggtcccctccagacctggggccccggcacaaccgcaggacagctgaggacttcccaggaatccagactccgggttgctcaagtttggatctaaggggcgagaaacttctgggtctcccgaggccttgcagggatgctgtagctgaggtcggcaaacactgaaatgctaacaaacgcaaccttaaatgtaacctttcctactttcagaaactgccggaggaaattgctttatttatggagctagcatttgaacaggcctcgcaccctccctgggctgtcacgctcgctggaggttagcctcgtcttgtaaatacttaggattacaggtcgctcttctagaaatccccttagtgatccctaagcctttttaaagggctgtgtttg

SEQ ID NO: 9457 - DNA, 2802 bp, Artificial sequence
  DNA replication origin
caggcttaagcctagctcctcactgagctctgtgccacaccggcaggagccggagtctgaggtctctgcagttggtggcccacctgtgggtgggggcctctgcggccgtcatgcctgtagaggaggagctggatgcaatgtctctgtagaggaggagctgtatgaaatgtgtctgtagaggaggagctggatggaatgtccctgtagaggaggagctggatgaaatgtgtctgtagaggaggagctggatggaatgtgtctgtagaggaggagctggatgaaatgtgtctgtagaggaggagctggatgcaatgtgtctgtagagcaggagctggatgaaatgtgtctgtagaggaggatctggatggagtgtccctgtagaggaggagctggatgaaatgtgtctgtagaggaggagctggatggaatgtgtctatagaggaggagctggatgaaatgtgtctgtagacaaggagctggaagaaaactgtctgtagaggaggagctggatgaagtgtgtctgtagaggaggagctggatgaaatctgtctgtagaggaggagctggatgaaatgtgtccgtagaggaggagctggatgaaatgtgtctgcagaggaggagctggatgaaatgtgtctgtagaggaggagctggatggaatgtgtctgcagaggaggagctggatgaaatgtgtctgtagaggaggagctggatggaatgtgtctgtagaggaggagctggaagaaatgtccctgtagaggaggagctggatgaaatgtgtccgtagaggaggagctggatgaaatgtgtccgtagaggagtagctggatgaaatgtatcctgtagaggaggagctggatggaatgtatcctgtagaggaggagctggatggaatgtgtctgcagaggaggagctggatgaaatgtgtctgtagaggaggagctggatggaatgtgtctgtagaggaggagctggatggaatgtgtctgtagaggaggagctggatggaatgtgtctgtagaggaggagctggatggaatgtgtctgtagaggaggagctggatggaatgtgtctgtagaggaggagctggatggaatgtgtctgtagaggaggagctggatggaatgtgtccgtagaggaggagctggatggaatgtgtctgtagaggaggagctggatggaatgtgtctgtcgaggaggagctggatggaatgtgtctgtagaggaggagctggatggaatgtccctgtagaggaggagctggatgaaatgtgtctgtagaggaggagctggatggaatgtgtctgtagaggaggagctggatggaatgtgtctgtagaggaggagctgggtggaatgtccctgtagaggaggagctgggtggaatgtccctgtagaggaggagctggatgaaatgtccctgtagaggaggagcaggatgaaatgtgtctgtagaggaggagctggatgaaatgtgtctgtagaggaggagctgggtggaatgtgtctgtagaggaggagctggatgaaatgtgtctgtagaggaggagctggatggaatgtccctgtagagcaggagctggatggaatgtccctgtagaggaggagctggatggaatgtccctgtagaggaggagctggatgaaatgtccctgtagaggaggagctggatggaatgtccctgtagaggaggagctggatgaaatatgtctgtagaggaggagctggatggaatgtgcctgtagaggaggagctggatggaatgtgcctgtagaggaggagctggatggaatgtgtctgtagaggaggagctggatggaatgtgtctgtagaggaggagctggatgaaatgtccctgtagaggaggagctggatggaatgtgtctgtcgaggaggagctggatgaaatgtgtctgtagaggaggagctggatggaatgtgtctgtagaggaggagctggatggaatgtgcctgtagaggaggagctggatgaaatgtgtctgtagaggaggagctggatggaatgtgtctgtcgaggaggagctgggtggaatgtccctgtcgaggaggagctgggtggaatgtccctgtagaggaggagctgggtggaatgtccctgtagaggaggagctggatgaaatgtccctgtggaggaggagctggatggaatgtgtccgtagaggaggagctggatgaaatgtgtccgtagaggaggagctggatgaaatgtgtccgtagaggaggagctggatgaaatgtgtctgtcgaggaggagctggatgaaatgtgtctgtcgaggaggagctggatgaaatgtccctgtaggggaggagctggatgaaatgtccctgtagaggaggagctggatggattgtccctgtagaggaggagctggatgaaatgtccccgtagaggaggagctggatggaatgtccccgtagaggaggagctggatggaatgtccccgtagaggaggagctggatgaaatgtgtctgtagaggaggagctggatgaaatgtgtctgtagaggaggagctggatgaaatgtgtctgtagaggaggagctggatggaatgtgtctagaggaggagctggatgaaatgtgtcggtagaggaggagctggatggaatgtccctgtagaggaggagctggatgaaatgtgtctgtggaggaggagctggatgaaatgaaatgtgtctgtcgaggaggagctggatgaaatgtgtctgtagaggaggagctggatgaaatgtgtctgtagaggaggagctgcatggaatgtgtctgtagaggaggagc

SEQ ID NO: 9458 - DNA, 1176 bp, Artificial sequence
  DNA replication origin
ccagaccactgaagaacctctcatctgctcagctggagaggcccttcctgtctctgtgatctttcccaagatggccaatgtcctgtaccaccggccaccccttccgttggtcactgtggatgacactaggggtggacactgaccaaggaggcaccaacctgattccagctcctagagctggccaggtgcctgacaggaaaatgaggcatctgaagaacacggagagatgggggtagggtggtagggagggagggagatgaagccacaccccagagctcctgggtttgcagctccttcccgaggcctggctaggtccctgcctcggtccctgcctctggatgccgtgagacaatccaccctggagagcctaccagtccccttatgtttgacagctggagttggaatttgcctcccgcagaccacaggtctacagccttcattcacgtgtcgcacagactgtggcaggaccagcacccgctgctggtgtgggacgcctggccctgtaggggaccccaagagtggctggagagcagggcgtgatgcctcttgggccaccctgcaaagggctcacgagcctcctgaggaggatgcatttgatcagggtaacaggagtcagcagagggctttccaaggacaggtttgccaagaagcgagaacagactgaggggggaacgatagaggcactgggtgtagtcagacaccactgcaatggtagccgaaaaccgcgccgtgagaagactctgtggggagggtaactaggtgcatgagagtgagaggagcgaaaaaagcctcggatggctccgaagctcctggcccagcttccaggggttggtggcccaggaccgcccctgcacgcggcctcgggtgcctgctccaggcagacctgcttctctggcccattctcggcaccaatcactgtcccatccgcccgtcagccaagtcctctgagttcttcccggagcccagcaccctgatgcaattgtccctgctctgaaaaccctcagcaatctattgggtcttcagtagcatctactctttctagaaatgtcgaacaaggtttttcgattgtgctgcacgtgtggcagacacagaaacggaaacgaccttccagagaactggccaaaggacgggagctgctccagtaactgaagggcacagactgagcgcttctgatgg

SEQ ID NO: 9459 - DNA, 908 bp, Artificial sequence
  DNA replication origin
gatggagggacccttcttctggggtctcaccctcatgtggctgctggtccacacgggccctgacagtggctctcggggtgatcacagcctgaggctcctcctttctcaggccctggtcactcaaaggattcccggcggggtccctccagtgaacacccagctcctgcttcagagcatgaggggtgtgagttttccaaaggtaccagctttggacagatggggtgagatggtggccaaggggtccctgcaggggcccctcatggtcctggggacaccctgactcttctggccgggtggagcacagccccagctacctttgcactctccaaggtcccaggggcacccaggctactgagtgtcccagacatccacacgcagggattgggggaccagaagctggggagccctaggggttttgagggcagagggcaggaggagggtgtggttaatggtgtccaatgcaggtgctaagccacaggaggagtgggctgtggcgtggacgatgcaggtagctgtcagcatcaatgagatgtgcagtgggctcattggggggtggggttttttaagaaaaaagcctcggggtgtggctgctggtgggtcgccctgtcagagaagagaaagctggagaggacacagggctggggtggagggcaggtctgcgggttccagggggcacactggaggggacactcaggggctggaggctgtcttgggttgggactgaggctggtgtggggtcttctgcaggctgggactcatggtggggctgggttcaggggtgggaagttggagggggatgctgggaatatctgctgtgacagtagaaaatgtacattcaggattagcctagtggctcacgcctgtaatcccagcactttgggaggccgagatgggtggatcacttgagg

SEQ ID NO: 9460 - DNA, 1441 bp, Artificial sequence
  DNA replication origin
ccataaacttctgttgtttcaagtgccccgtttgtggtgggcgtccccagggcattagagaaagcaggtccatcctgcctgggcctttgggtacctgagacattcccggcccttgggatgccttcccaggcttcactctccttcccatcctgtacttcctcttgttccctcatctggaactaccttctttctgttctcaccatgaactttccaaccttaacccactagctcctatgccatgtcagcttcccatagacatcaccactgaaagtctgttcccactccagcttctgggttctggcccttggccagtgttccttgaaacccccattctccccaggtcttccctagcaggtgttctgttgaaggcagatggcccattgtctcttgtcccagcaggaactgagttagtctcactcgcttctgccagtgttttgaacaggcctggtacatggaaggcagtggcatttaatatgtttacagatggatgaatgaatgggtgggtgaaggggcgggtggatggataaatgggtggatagataagggatgaatggatagatggaaggctggatggatggacagaagaagggagggatggatgaaaggagagagagaaaagggtgagagagagagaaagggataaatagattgatgaatgcacaggtgggttaatggatgagtggtggatggttggatgaataaatggatgagtggatagttggatagatggatgagtaaatgaatggatgtattgatggacaaaagaaagaagaaagggagatagggagggagggtgagagggaaagggggtgtgtagatggctgggtggatggatggttgattacggttgggtggatggatatatggatagttagatggatgggcaggcagatgatggctggatgaatagatgcatggatgggtggatagatgaatgggtaggtgagtggatgggttgatgatggatggatggatagacgggtgggtgggtatgtgatggatggatgaatgaataggtggtgtgtgggtggatgggttgatgtggggagtgagtaggttatggatggatggatggatggacaagtggatttgtggatggatgaatggatggatggatggatgggtagatgggtgaatggatgtgtgggtaggttatggacggttggagggatggatagatagatggatgaacggatgaatggatggatagatggatgcatggatggatggatgcttgggtggatggacagatggatgtgtggatggatggatgcatggaagcatgggtggatggatagatggatggaggaatggatgagtggatgggtaggtggagggatagatagatgtgcagatggatgggtggaaggtcctggatgacatgtacaagtctgccattctggtccaatctcaaattcccctacagggctgactgtgtgga

SEQ ID NO: 9461 - DNA, 1246 bp, Artificial sequence
  DNA replication origin
ccccacgggctgacctgccaggacccagcacaggggaagagcaggcagccgggcagtctctgcagggagagagctcctctgggaggctggatggacgtgggaggcggggcccaggtcagcgcagagctggaggatgcctacagcccggcggacctgaacagccagcgcccttacccctcgcatggccaaactctgaacgtaagccaagtaaaacctcagcagctgagccaggtacaagtggaattgtggtgatgacgtggggtggggccacgcacaggggtccctgtgagaggtcacctggcctcagagatccagatacaggcatccaggcccgagagggtgagctcctgaagatgctgcctgctctgggaggacttggtgctgtccaggccccaggagctgccgcagcgggcagtggaaggaaggcacgttcagcgttcactctcccaagagctgcaggtgacaaaaagcaagtgctcccggaatatgtcagctgcaggtggccccgaggcagcccacctgggtgtgggcactttcttactcagagcccagcacacgtggtagcttagactcaagagccatctccaggaccacgttttattttcaagcgagtgctcaaatgctgatgttctgctctgcgctagactttaaggggaccgtcaggatgttggcttcgggcctgactggctgtctggtcggcatgggcactggcagtgtaagtcagtggtgggcgctggtgatatggatgccagcgggtgggcattggcaggtgaggagggctggtggtgagggtgctggtaggtgagggtcctggcagtgtgagtcagtggtgggtgctggcagtgggtactggtctgcactgacccctgcactctctttctctttcagaaactggcctacgccattgcacccgagaaggaccgtgagctggtggacagaggggaggtgcgccagttcacggtgaggtcgaggtccctgctgggcctctctcgggggaattcagaatgatcccaagctcagtgttcttagcccccagggggctccgaggctggtgtagatggtgctcatttactcagccagcatgtgctctatgaggacaggcagccagtggtggcaggtgacagtggagacgtgtgcccgggacggggggcacatgacgcaggggccctgggaggtgcggctgcacagacgcctgaggaaagcatggtccctgcaaagacctgggcatgtcccagaccacgggagc

SEQ ID NO: 9462 - DNA, 1526 bp, Artificial sequence
  DNA replication origin
agctggttcctgagacggcgtgtcttgttcttacagggacgcgattgtcaccacctccatcaactccctgacgagcttctcctccggcttcgtcgtcttctccttcctggggtacatggcacagaagcacagtgtgcccatcggggacgtggccaaggacggtgagcccctcctgctgcacctgggcctgctccgtgtagcaccagcgccgagctctcagcaaagcctttttccttgtgaaagaggaaggagacgcatgggccctgagcgacttcagtgagagttgctgcctcactcttgaaggatggtggtacacatcccagtacagacctgcccccacccagcgccttccccgccctgaccctccaggccccccacccagcgccttccccgccctgcccctcccggccccccacccagtgccttctccgccctgcccctccaggcccccccacccagtgcctttcctgccttgtgcctctcggggcctccaccctgggctggggaacctcaagcccaaatgcagctgagcagcatagttggtgcctcagtccctcgactgctccctgcagatgccacatgaggctgccccaccagggtctggcgtagatgctgtcactgagggccctctagatgtttgcttgccacgcggtgtgggaacatgcagctcagggaaggggaggaatgagctgttccagcaacacctggaggcaggctgggatgccgcaaacatcagcttggccacagagcagccgggagatccctggggcctccagcacagggtgtccctgcccgctccccaggccgacgcatgacgctgagtgtccctgcacgcctggagttgtctccgagagggtggggaggggtccaggtctcgggcaggcacaggtgagtggtggggggaggccttggccacagcaagaagtgtgccaggcaggatggagccggcaggacgggcacagatgcaggggctgagagtgggcccaggcacttggggccacgtgcctggctccggtgcttgcagtggaaagctgtggcgttggcagccctaacttgggccaaccgagagctccagggagtcccaaggcttctcggtctctgtcagccagcagagcccccgcctgcctcccggcctgctctgccacatggatgtggaggaggccctttcgctccagacacgggcctgggttgggtgggctcccatgctgcgtccccatccttgcttcctctggactgtcttctccgggggtggggtgggggcactacatttgtgaggaatgattgtgctcagaaaagcccctgtcccgtgtgggtgttgttgctgactgatctctgcctgggtgttgaggctcagtgaaggcggggagcgacaagcaccaagcgggggcagccttgaccgcacctgagtctcacagagtggggcactaggaccctcgcaccgcaggtaggaacacgctcagagacctgaaagggcccactccatgcttgcaacagaaagccagggtcggggctggagccacagctca

SEQ ID NO: 9463 - DNA, 820 bp, Artificial sequence
  DNA replication origin
caccgcgtggcaagcaaacatctagagggccctcagtgacagcatctacgccagaccctggtggggcagcctcatgtggcatctgcagggagcagtcgagggactgaggcaccaactatgctgctcagctgcatttgggcttgaggttccccagcccagggtggaggccccgagaggcacaaggcaggaaaggcactgggtgggggggcctggaggggcagggcggagaaggcactgggtggggggccgggaggggcagggcggggaaggcgctgggtggggggcctggagggtcagggcggggaaggcgctgggtgggggcaggtctgtactgggatgtgtaccaccatccttcaagagtgaggcagcaactctcactgaagtcgctcagggcccatgcgtctccttcctctttcacaaggaaaaaggctttgctgagagctcggcgctggtgctacacggagcaggcccaggtgcagcaggaggggctcaccgtccttggccacgtccccgatgggcacactgtgcttctgtgccatgtaccccaggaaggagaagacgacgaagccggaggagaagctcgtcagggagttgatggaggtggtgacaatcgcgtccctgtaagaacaagacacgccgtctcaggaaccagctgagctgcagcagctgcaattttccagtcattattcttaatttactgtgtctggggaagggggcgggaggtcttcggaggggctacttttcccagtgagcacggccagctccttagcagcctggcagagctgtccttgggccaccttggtcccctagctgagctgct

SEQ ID NO: 9464 - DNA, 1317 bp, Artificial sequence
  DNA replication origin
cactgtgcacctgtactgctcatgttttgggaaggatacaaagcaggcattgctggtgtgcgtccaatcaggacaccatcatcatgtagcatgtggatgggtccatgcctttctgagggttatcagggtgctgccatcatgcagcatgtggatgatccatgctgttctgagggttgtcagggcgccaccatcatgtagcctcaggatgagtttatgttgttctgagggttatcagggtgccgccatcatgcagcttgtggatgatccatgatgttctgagggttatcaggaagccgccatcatgtagcctgtggttgagtctgtgctgttctgagggtttcagggcactgccatcatgcagcagggcgcacatgggatggggggacacactcagggggttgtgaagctggaccctgatcaagggaggatggagaccccgctagggctggtgtgagtgtggataagtccatgctgttctgagggttatcagggcgccgcggtcatgttgtgtgtggatgagttcatgactttctgagggttatcagggtgccaccattatgcagcatgtggatgaatctgtgctgttccgagggttgttaggacgctgcggtcatgtcatgtgtggatgaggccgtgctgttccgagggctattaggacgctgcggtcatgttgtgtgtggatgagtccgtgctcttctgagggctattaggacgctgcggtcatgttgtgtgtggatgagtccgtgctgttccgagggctattaggacgctgcggtcatgccgtgtgtggatgagtccgtgctgttctgagggctattaggacgctgaggtcatgctgtgtgtgggtgagtccgtgctgttctaagggttattaggacactgtggtcatgttttgtgtagatgaggccgtgctgttccgagggttattaggatgctgtggtcatgccgtgtgtggatgagtccatgctgttctgagggctatggagcagggcacctctggttctgtggaatcgctgccttgatactccatggggaatcccagatcaatgaacacagacagccccctgcttctcaggctcttccaggccgctggcccgggagggttcacttcctgaggctgcatcttccaccagtcgtctgctgccatttacttcttgaggatggtgttgagtttagaggcctcagtgtggggctgggacaggaagggtgctcaggtcctttgcctgtggcctgcgttctcctgggacagcctctcaccgccctctggctctgcaggtttggattgacgcggccacccaggtgtgcttctccctgggc

SEQ ID NO: 9465 - DNA, 985 bp, Artificial sequence
  DNA replication origin
caggtctgggggtcatgaggcaagtgtaaacccaaggcagaagtgggaaggaaggggagaagggatgggcgggcatggctgcaagcctcccaggaagccccagggaggcagcagctgacaggtgcagtgagagagggcacctggacatggcacctatgaggctgcaaagcagttgggtgggggtgggggtggaagtgtgcctgcagcactgaaggggaagccctgtggagacaggagccatgggtgcagcaggcgtgtggcccacgggagccaaggaagagagaggaggacaaccagggcagcaaaatcagctgtggccgggggcccacaagtgcagagctggagccagacaaaccatgaagtcagcagggcgtctggaccccagaaaggccaaaatgaagccaaggggtgtgtttgcaggaccatggcatgttacagaatcaaagaaaaataccacaaggacaacgtagagcctagtgctccagctaggaagaataggcagccccaggaggaggcaaaacaaacaccagtgcatgtgaaaagatgctcactggagaacaaattacaaagatgagatgtcagaaattaggtggagacagtgaatagattggatggatggatggatggatggatggatggatggatggatggatgaatgctaggtaagtaggtggataggatggatggatgataggtgggtagatagaatggatagataggatgggtggatggaaggctggctggctggatgtatggataatggatgggtggatggaggaatggatgataggtaggtagctggatagtatggatggatggatgatggatggatggatggatggatgaatggatgatgcatgggtgaatgggtggatgaatgataggtagctagataggatggacagatggataatggatggatgatggatgggatggatgggtggatggatgatgggtggattgctggatgatggatggctgggtg

SEQ ID NO: 9466 - DNA, 1276 bp, Artificial sequence
  DNA replication origin
gggcagcggtgggtacccagcaccatgggcagcactgtgggcagcggtgggcacccagcaccatgggcagcactgggcagcagtgggcacccagcagcgtgggcagcactgtgggcagcggtgggtacccagcaccgtgggcagcactgtgggcagcggtgggcacccagcaccttgggcagcactgggcagcggtgggcacccagcaccgtgggcagcactgtgggcagtggtgggcacccagcaccatgggcagcactgggcagcggtgggtacccagcaccatgggcagcactgggcagcggtgggcacccagcaccatgggcagcactgggcagcggtgggtacccagcagcgtgggcagcactgtgggcagcggtgggcacccagcagcgtgggcagcactgtgggcagcggtgggcacccagcagcgtgggcagcactgtgggcagcggtgggcacccagcagcgtgggcagcactgtgggcagcggtgggtacccagcagcgtgggcagcaccgtgggcagcggtgggcacccagcaccttgggcagcactgggcagtggtgggcacccagcattgctcagcaacttccttttggtttctgtggctccttttcttcaaagacccaaggtgccctccgcctccgcagctccagtgagcaggggtgccaagggcagatggtgaggcagggcttcctgggcctcccacgtgctccacgggtttcaagggcggccctgacacctctgccagggcctgtgggccagacctccctggaaggcatctcttgtccatcagactggatgctttctgccctgctgagatggggagggcaggtccccggacaagctcagccgtccagttccaggtgggttgacagccacccacagagtcccccgctgactcccctctgcagacgtggcgtgctgcacctccaccagagccatggcatcgacgacctggggcctccgcggtggcagctcacagcctgcctggtgctggtcatcgtgctgctctacttcagcctctggaagggcgtgaagacctcagggaaggtgaggctcgggggtcaccaattgggcctgtagacatggggccaccaagtggacatgtggccgtggctggacaggaggtgcacgtgtggcctcagttgggttttgtgctaccaatgtggccatggccaggttggggtggacacatggccatggttgagtttgggagactcatatggccataatcaggttgggagtgtacacgtggccatgattgagggta

SEQ ID NO: 9467 - DNA, 859 bp, Artificial sequence
  DNA replication origin
cctgtcagaacggcgacccggcacgaggccccaggcccggctggcgagggcaggaagatgtggatggcacccgccagatccagattccgggaggggtccaggggaaacagggaacccctgggtgtcagtaacgacccttccaggctgggccaggccattggtgacgagggagggccagcaggagctggcacggggcccaaaaggacttcatcggagacatcggggtccaggaaagcaggtgctgcaggtggatggtgaggggcgggcctggcctgggtggacagtgagggacgggcctggatggggtggactgtgcgggttggggctggtcggggtggactgtatgggttgggcctggctgggatggacagtgaggatcaggcctggccggggtggatagtgagggatgggcctgaccagggtagacagtgtgggttgggtctggccggggtggacggtgaggggtgggcctggccggggtggaccatgaggggcgggcctggccggggtggacggtgtggggtgggcctggccgaggtggacagtgagcgaggggcctggctggggtggactttgtggtttgtgcctggctggggtggacagtgagggttgggcctggctggggtgggcagtgaggaactggcctggctggggaggactgtgcaggtcaggcctggccagggcaaagggagaaggagacagagacccaggaggctgctggacatgggatacgctggcatgggaggtggaaagaggcccagagacagaaataaagccatgcaggtaaacaacaaaacaaagtcttgtgaaaagcggacggctgggtcaccctggagacaggggctgcctactgaagcca

SEQ ID NO: 9468 - DNA, 874 bp, Artificial sequence
  DNA replication origin
taggggacgcgtgggtgtctatggctgtgactcgggggtcctggtttcttctcgtggaacttaaccctactaggggtgcggcgcatcccagatccgatcggagtgggttttgtacaccgccgctccatctcgcgggggctttgtctgtgttgggggtggtggcgggcgcgggctgcgcgctggtgctctgggcagggcggggaggccgggcgaggactcgccaggcagcgccgcttcttgttctgggcgcggtgaggaaggacgctttctaacgggccacattttgctgtgtagacccaaaactcgcctctgaggccccgcgttcaggagcggggtcaggtggccccagggcggcggcggcttgccggagactcgcgagctccgcacccgacgccctctcccaacgcggcctcctgctcgcgccgcggaaccccttcgtcgggtgttttacccaccggaggggtcgtgccggttgaggttgtcaccgggtgcgtggcatagctcgtgatagctcatgggtgaggttttgtgcaaacttggatgcagggaaagttgcctgttagagcctccacctgcgacctgcttcagtcgttgtgtgtgtgtgcgcacctgtgtgagtgtgagtgtgtatgtgtgtaagtgtatgtgctcgcctgtgtgtgtgtgagtgtgtatgtgtgtttgtgagtctgtgtgtgtctgtgtgtctgtgtgtgcgtgcgctcgactgaaacacgctgctgctggatccaaatgacagaagtcgccctggctggggcggtgtagacgctcctgctctcctgctcagcgttgcaggggggtttatgtagccgtttggacaggatttcccgggttaccctgctggcccaggagc

SEQ ID NO: 9469 - DNA, 696 bp, Artificial sequence
  DNA replication origin
tgctcccagccatctgcgtccgggaggcgggggcgggggcgcggcccggggaggtgaggaggaggagccaggacgcgagggcgaccccgtcggcgggagggcggggcggggcggaccctgtctactggataagagcccgaggccgaggctgagaccgcccagcgctgcggagcgggaggggaggcttcgcggaacgctctcggcgccaggactcgcgtgcaaagcccaggcccgggcggccaggtgaggccagcgtcgctcgcggcatcggggcgccccgctccttccgcagaccccgaagtggggcgcaggggcgggggccggggaccgggcacagtctggggtccccgcgtcccgcagaccgcgccgtctccaaagtcgccaacagtcgcgggtgccgagcgccccccgatagcgccacatgggaccctgaggccgtccgaggcgcgaggagggtgcagggctgcccctggccccgctccaggctcagaaccgggtgggcacctggtgcagtcaccggcttaggggacgcgtgggtgtctatggctgtgactcgggggtcctggtttcttctcgtggaacttaaccctactaggggtgcggcgcatcccagatccgatcggagtgggttttgtacaccgccgctccatctcgcgggggctttgtctgtgttgggggtggtggcgggcgcgggct

SEQ ID NO: 9470 - DNA, 1647 bp, Artificial sequence
  DNA replication origin
gggacgggcctggaaagccctggcggttggtatccggctccagggccgaatggactccgaggctttccttccgagatgcccgggcgggatttcttccattcagcgcgcggaggaatggagcccccaggccgccaaggcccaggatgtccaggtccttagaaggcaccgaggtgagtggccgcgcccagctctgtgcgtcgcccctagggtcgcccgaaccccggcgttcctccccgtgtaccctcgatgctcccgtgagcaccctgccctgggcgtccaggcgagccctggggctctccagccattccagcctgcagcccgcgctcagcagtgagggaggcagggacccttggtgcctgactccgcagtacccgcccgcagcgcggtgccccaccccctgcgcccgccccgcactccccgcacaccaccactcccctccccgccccccgctcccccgctccccggctccggggctggcacccaggcagaaggcactcagggctgtgacttcacgctgagttggaatcaagtgggagcctagtgaccccctggggctgccatgacaaaaaactccacagcctgggggctcacacagaagccttcagttctaacggttccggtgtcccgaggccaaggcctggccgactctgtgtctggtgagggccgcttcggggttgcagacagttctctccctgtatctccccacgctaggggctggggagagctctccggggtctgttttatgagggcactggtcccattcctcagggtggagccctcctggcctgaccacctgaaggcctcctgacaccacctcccatcaggggtgggacttcatcgccagggaggtgaggggacttcaggagagggggatgtgccacctcgaagctgtagtgtgtcagtggctgccacagaagggatctctctacccctattatctccatggcacaggtttcaataaaaaggagtgagccagggcttggccccagagcagcagggttgaggaaacagtctcccaaggaaaagactttgcaggtgactaagggaggctgttaaataaaacacacagagagaatggatgttcaggtatattaaaaatacacaggccaggagtgagggctcacgcttgtaatcccagcactctgggaggccgaggaaggaggatctcttgaggccaggagtttgagaccagcctgggccacatggcaaaaccctgactttgaaaaaaaaaattagccaggcatggtggcccacacctgtagtcccagctactggggaggcagaggtgggagaatagcttgaagctgggaggtggaggttgtagtgagctgagattgcgccatgggccacaggatgagaccctgtctcgaaacaaaacaacacacaggcaaacagcgtttgggaagggattgcaagcgctgcaggagcgcagaattgtgacccaaagctaacagggtacaggcaggaaggtgcagggactagaggtcacacagatccaggcagccacatccttactgaccagtagcacacagagaatgcacctgccacactcaggaggggccactgagtgatcacacgcatgtaacctgcactctgccaagacaaagagcattcctccacccctgcctcaaccccgacttccaacca

SEQ ID NO: 9471 - DNA, 834 bp, Artificial sequence
  DNA replication origin
gtttgccagctcagtaattacgatcgtccacctggtggcccctggtaaggaaagtggagatttaggggtgtctggggggaccccgtctgcacaggcacagagactgagtagtgctgggtgggaggccagcccctgctgtgagtcagtgtccctgtccccccagcagagacaccgaaggtcagttatgcaacaatgaacaaccccacggaaacgggaacgagccccagaggagaagcccggggccacaggctggtcagggcctcctgggtgctgacgtctgagctgacgtcgggagggcagagggagcgggaaagtccaagagagagcagctccattccaggcgtttgggaggatgtgggtccgctggtgctttcaggtgaaggtgttgaggtcagcgcttcccaggctggcgtgtggaggctcccagctgggagcagagctgggagggggctctggggggtataggggttctggggtcccgggggcctagggctggggctggcatgacagggcagaaagagggttggggcactgggctgtcggaggcgtgagtgtggccctgggagcagctccaaatgtctcccatgtcaactcctgcggcaaaggcatggtgatcctggttctgaggttgggaactctggatccaggctggaggggtggcatgactcagggcctgtgctgcctggggacagcgaggagggacaggtgtggagggacaggtgtgggctgtacgaggtctcctgagctggagaacaagcaggagatggtgtcttgctagacgaaccaaggacataagcaggtgttgaatcggaaaagcagcatttccacccacgg

SEQ ID NO: 9472 - DNA, 1132 bp, Artificial sequence
  DNA replication origin
ggggagggccgatggaaccggaagtattctgagcatccaagagcacctggaggaaggtgcagcagccaccttacaggtgtggaaactgaggcaggacatgggcaggggcggggccagggggtggggctgcggccaggggcagggatggagcagggcctgggtcagggtggggtggggcggggcagagccagggcaggctggggtggggtggggtgggctggggtggggtggggtggggcagagccagggcagggtggggtggggtagggtggggcagagccagggcagggtggggtggggtagggtggggcagagccagggcaggctggggtgggctggggtggggcagagccggggtgggctgggatggggggagtagggtggggcaggggggtggggtgtgatgggccagggcaggctggggtggggtggggtggggtgtggtgtggtgggctggggcagagccagggcaggctaagcctcctccagaggtggcaaggccccatggggaactgctctgaggcctcgtccagactttctcccaaaggtggggtctaccaccttcgccccaggagctctggaccccaaacaccttcttaattctcttaaaccaaacaaaacctgggcactaaatgataaaaccacagaaatgacaaagtcacctcctttctctccagctgcctccgccttccagaacttaaatgttcttaatttttaaacttcctggagcatgaactgggtactgaaagctgctgggggccctggccggtgatgtggggtggaggggttccctctccaaaatgtcaggtttggcacacagaggaaagggcagctttgtcaggagctatggaagcagggctctggaacactggggaccactgtggaatcatggggttgatcagggacacgtgcatagaacaggccgcactcaggaacgtgccgagcccagggcccgggcctgtcctgccctctccagcgctgaggccggatggactcagcatggccaagtgtgggctgtggcgcagataaagggtgtggagagacagagacacaggtgcacagaggcagctcgcagttcccgtttcccggagaattcccctggaagctgaccccaaaaaaacacaactcacca

SEQ ID NO: 9473 - DNA, 1023 bp, Artificial sequence
  DNA replication origin
cactcgctggcagcctgggaggaacgcgctgcctggggattcactcgcctggcctcaggtcgccaggcaggggagcccttctcagaccgcctgtcctgttctaaaacttgagtacttctgatgcctgagttttccagttaaaaaaaaactctttcaatagagatttaaatagaatttaaaatagaaacaatcatccacagagtccatggtgccttgctccagcccgcaagggcacaactccggccagtgagaaggcggagcggctgctgggtacagccacaattccagtgggaacggggaagttcctgagcctctgcggcctgtggctctagctgggcctcgctggggctcctcctgattccttgggagcccatcaggtggcagccactcagagagagaggcagatcccgggcaagtcctgctgcagctgtgaccaaatccgcccgtccttggagctgagccccaggggcaggtgagggcggcgggtggggccccgaggcaggtgtatgtgcttggtgagggcagaccctaaccccgtcaggtgggtgagcattggccggtgatgaggacccccacttcccaccaacgccttccagctggtgcgcgatgttacagcagaaagtgtccctccacggatgtcttccagctcgtgcgcaatgttataatagcaagtgtccctccacagacgccttccagctggtgcgcgatgttacagcagaaagtgtccctccacggatgtcttccagctcgtgcgcaatgttataatagcaagtgtccctccacagacgccttccagctcgtgcgcgatgttaaaacagaaagtgttccttggccggggagcgcccctggccgatgttcctgcccatccgtgctgtggcgctgggtgtttacggtcaggacagatgttgagatagtccaggcatggagtgcccttgctgaccaggaaggcctagacagaaaagctcacttttatcccaagggcagcatgagaaacgcagcagacgctgtcctgcgtgggctgcc

SEQ ID NO: 9474 - DNA, 1829 bp, Artificial sequence
  DNA replication origin
ggaccagtcattgggtgatccaggatgctctcatcttgagatccttaacgagttacctctgtaaaaacctttttccaaataaggcctcattcacaggttccagggtcagcatgtggacccatctttgggggccgcatcccatggacccactgctctgggaggactgtagggagccctgcgtggcccctcacccacctgtgcgcagccctgacccaccagagctctgtcctcggtgctcttcagggcatctgggcccgttctgtcctcgtgcttccttcacagccgccatcagcacagcacagcacgttctggggcacagcgggtcctgggttggcagtgggcggtgctgagggaaggagctgctgggacgaggggcgtcgcctatggccggggccctcacctggccactcctgccggctctgtttccatgcagcacctaacgttagcattcatatgacagttttctagaaaatatctggggggacacattcagtatggactgggtggggacacattctgtggtgctgaccactgagggtggtggccacagctgggataggaaggctggaagtggggtgaggaaccctggcatggcccatgggggattgggcctgcagcagccggaaggtgtccagactgtgcctgcagctgggcagttgtgggtggcctgagtctgcctgggtcaggcttggaaatcggggatggtccttggtgggactggagggctcactgcactcggctggctggggaagcctggaggaggctggacaggccggcactggaggcgagactggactgcaggcaccatccgagtgatggccttggctctcacacgcaggtttccccgctctgcaagctccacaggctcatggggcagccccagctccactcagcaccctttgcatcctgtggttctggcatacccaggaaaccacatttgcccccccactgtggcaaaggcccatggtcgttcgtcatctgctcagggagggggattgtggagctgtgtgcccaggcaccctcgcagctgcaggggtccttggacaggggggctggcccacccagagtgaatctgagcgttggccgggctctccctgtgcccttggtgcctccctgtggagatcaccaacacgaaggagtgtttggtgcggtgatgctggacgttgtagtcctatctttctagaggcccgggattccacctcttccagatcaacccaggtgacccagcactgaccttcatctcggcgcagcaggaagaatggccacagccatgctgctgtgtgcagggccctcgtggagccctgcgtgtttcttgtcatttcagagataatccacggacctgcgagggagaggatagtgacaagcttatcagaaattttcgttagaattcagacttagcaggaaccacattttgctccctgctgtcctggcctgaaagggccattgtcctggggcgtggctgatgactcctctactgcgcacctggagcaccctctgattcgggagctcagaaccatctccccaggctccagctcaaaaccatctccccaggtcccagctcagagacgtctccccaggccccagctcagagacgtctccccaggccccagctcagagacatctccccaggccccagctcagagacatctccccaggctccagctcagagacatctccccttgtcccagctcagagataatcttcccccatcccagctcagagacatctcccaggtttccagctcagagacatctcccgtggtcccagctcagagataatctcccctggtcccagctcagagacatctccctggtttccagctcagagac

SEQ ID NO: 9475 - DNA, 1636 bp, Artificial sequence
  DNA replication origin
ccatgcatccatcaagctcagcacatcccaggctagacctgtcctgtccctgtgccaggctgtctgcccagtcagtggccccaggaccacgtggcgcctgtgccattggggaagtctctgtaaagagtgggctctcctctccctcaccttagagcgatcaggtcatttctgcctcccccacaactgccactgggcagtggcctccagcccccagcagccctccctctgtgtccacagctgcacgtcaggctggtcacctctgtacctccctgcactcagaggagtggacatacttgccagggcccacagcccctgcccactcccattctacccactggctgagcaggggtcagccttgcctcacagacgttactggtggtccaggggctccctgcagctgggggaagcaggatgtcctgggtggagggtctcccatagccagggacagggccaggatgtgcttggtgggctccctggagatggtggcgcagacccagaattgtggggacagaggcactcctgcagctcgggggagtgggggtgagccaggatgttccggggggccccctgtatttgcccgtagtgtggagcagggtgtacagggcaggccaggggctcctgcagctaagtgggtgggacttaggccaggatgttgtgtgtgggcggcagtgggaggtgggggagggtcccagtatctgtagatagtgcagggcagggtatacagggcaggccagggggttgggccaagatgttctggggggcccctgtatctgcgggtagtgtggggcagggtgtacagggcaggctgggggtgggacttgggccaggatgttctgggctggcgggggaggtgggggaccttgtatttgcgggtagtgtggcgcagggtgtacagggcaggctgtgggctcctgcagcttttgagggtttgggccaggatgtgctggggggctccctgtatctgcagccagttcggagtaggaagggccgggcaggctggggactcttgtagcaggatcccctgatgcaggatgtgctggggggctccctgtatctgcggccagttcggagtaggaagggccggcaggctggggactctttcttgtagcaggatcccctgatgcaggatgtgctggggggctccctgtatctgcggccagttcggagtaggaagggccagcaggctggggactctttcttgtagcaggatcccctgatgcaggatgtgctgggggtggggctcccaccacagggggcttgggaggtgctctccaccagggccccactggctttctgcagatgtttgttaaacaaatgcaagcagctagaaatgccacggatcctgaatttcaggattctttttactcagaccaggcgggaggtccggggagattggcgtttccctgggccacagctccggagggcctgtctcagggcctgggctgaatgggaagcgtgctggtatgtgtgaaggtcctgttttggctggaggtggaaggtggggtcctggcggagcacgcagggggacctttttgttggaatgatcccaggagcctgcttctcctgagccccccacgatgtatcactgtctgcagcgcctgcatggtccacagcccctgaggtcctcggacaccaa

SEQ ID NO: 9476 - DNA, 1153 bp, Artificial sequence
  DNA replication origin
actatgacagggatgacgaagtggcctccggggacctccagggaggggcttgatgtttccccccagggagccaggagggagtaggaaaggcaggaagagagagcatgcctgaggcagccatagctggggcaggagcagggctggggaagccctggaaaccacagcaggggttcgaatttcatccgggggcgtccccgctgagggcttccgagcagcagagtgcaggaggaagaaagcctgctgggagtgactcagggagagtgaccagggagagagcctggtggctgggtgggggtgaggattgaagaggaggaatggttgaggggcacagaatgagcgaccgtgtcccaagtcctcctttgaggggcacagcacacggcagctgacagcgtgtggcagacagagggccaggcagagcggcggcagaggggccggcaccgccccagccccagagtccagctcccgacacacagggagacgggggccagggcctgggagccaggctggggacgacctcaccctgtgtgtcaccaggaggggcggcaccatcgggctctcctgctccccgtccccttccataccctgaggaccagccgcatcaaggggctttgagcaaaagcaggcgtcctgggaaaatgacaagctcaaactggcctcaagaacttttcacttcagggttctttcagataaagtactttatgcattaacaaatctccatcttcccggaaatctattctcacaattggaagcgtgctccctacaaaccggacagccccataggccccgaaacagtgcttgcttctaggaattattctagagtcaaaagtaaggtcctcttgagagtggatctcaggtaactgtaagcccagctggcagccaggtagccggaaaagccaggctgagccagcacatccccggtgcagcttcctgcagcgagcggccccctccccacgacgcccccgggtctcccctcaccactgtcccatcgcaggatctcagcaaaccgttccctcccacgtggcagcccaggttgcataaagttgattcgggtcagaccagccccgagaaagcatcccttacaacaggagcgaagcatgcaccccagaaggcaacgtgcggccgcagagcagggagacccgtgcgcctacagggg

SEQ ID NO: 9477 - DNA, 1957 bp, Artificial sequence
  DNA replication origin
ctgaccccggagctgggcctctgcgcctcctccacatggtgcctgtgacccaaggatccactgagcttctacaccaaggccacgctgcccacagtggctccacctaagacccctctgggagagggactcctctttccaccgaccttggctcaaggacaacctgctgaccctgcttagattgccgggcagtatgaggttcttcccccagcctccccacctccttccctgggttccaactcactttgcactctgcaggttaaagcagaaggaatttattctctcccagtctggaggccagaagcctgcgatcatggcaccctaggcctaggctccctctgagagcactagagaggacctgctccaggcctctccagctcctgggaactgcttgcctgtagcagcagaaccctggccttcccatggagctctctctgtgtctgtctctgagaccgaatctccctctctatagggacacaagccatttcagactagggcccaccctaatgacttcctcttaacctgatcatctgcaaagaccctgtttccaaataaggtcgcggccacaggtgctgtgggttaggacttttgcatcttctggggacacagccatgactctctggcagctctccccattgaatctggctctgcaccatctccagcaggtttcccctccgccacacaccgcttcctggcctgtgcttctgggaggaccccactttcatggctctccaagtccagtcctgaggctgctctcatcccaggactgggacaccctagggcccctcctctccagagcactcaggcagcaggtggggccgcctggatcgctggggtgcaggtgctgccctgtggctggcaggctttgtgtcctgggctttcttgatgatcagttcggtgaggagccttgggtggcctcgggtgctgggctctggttttggggatcagagcaagtggccactaaaagcccaggaggtgggtgcaacgctggtggctgggccacagagccaccaatgcccaccagcacacagggctcaccccatccccgtgggtgtggcacttgggacaggtgctgctgctaggcatgggctgggactcttatggggcaggaatatgggctgggactcttatggggcaggaataaggccatgcagcgggtctggcctgccggggccttctctgtgcatgatatgtggatggcacagacccctggccctcaccccggtctcagacacagaagggtctctgccagcccgctgcactatgaggtccacaagggcgcaggcagggtcattggaggggtcggggcactccctggcgtctgctgaggatggggcccagctggggccaacacagcagtgacatccccaggagccaggaccctggggggttggccaggtggcccaaaccggctctgtctgggtgaggtccgttggccatgaaggaaccaacagggccagccggggtgaggaagccgtgagcactgtgaccgaaggcctgcgtgagttctgaaatccaagcgtgttcacccggaggcaggagcccatcctactctcgctccggctaattatgggccccaccctggggctcctcacacggctcctgagcaccacaagggcaatgcccgagccaaagcagctacgggtgagaaagcgctgggatctcatcgcagcccctgcacaaccagcacggacagtcagggcccctatgtgcgcctcctgcctgggccatccctgcggggcctgaggcctgagaggtcctgagatcggaggggtcctgaggtctgagggggtcctgaggcttgaggggtcctgagatctgaggggatcccgaggtctggggggtcctaaggtcgagtggacctcaggcgggagtcgcctgggctgaggcgcggctggaagaagctccctcagcccggggcagcttccagggtcgccggtgcgagctaggagcccaacga

SEQ ID NO: 9478 - DNA, 1701 bp, Artificial sequence
  DNA replication origin
cctgcaccccagcgatccaggcggccccacctgctgcctgagtgctctggagaggaggggccctagggtgtcccagtcctgggatgagagcagcctcaggactggacttggagagccatgaaagtggggtcctcccagaagcacaggccaggaagcggtgtgtggcggaggggaaacctgctggagatggtgcagagccagattcaatggggagagctgccagagagtcatggctgtgtccccagaagatgcaaaagtcctaacccacagcacctgtggccgcgaccttatttggaaacagggtctttgcagatgatcaggttaagaggaagtcattagggtgggccctagtctgaaatggcttgtgtccctatagagagggagattcggtctcagagacagacacagagagagctccatgggaaggccagggttctgctgctacaggcaagcagttcccaggagctggagaggcctggagcaggtcctctctagtgctctcagagggagcctaggcctagggtgccatgatcgcaggcttctggcctccagactgggagagaataaattccttctgctttaacctgcagagtgcaaagtgagttggaacccagggaaggaggtggggaggctgggggaagaacctcatactgcccggcaatctaagcagggtcagcaggttgtccttgagccaaggtcggtggaaagaggagtccctctcccagaggggtcttaggtggagccactgtgggcagcgtggccttggtgtagaagctcagtggatccttgggtcacaggcaccatgtggaggaggcgcagaggcccagctccggggtcagtacacaagggggcacagctgggagggtgggtgtgacagggccaagggctgtgcagagcagggggcaggactggggcacactcgtcctcaccaagcagaacccaagaaggccccagagagcggccaaggagcggaggtccccagaggggctgagtccacggaactgccccatccaggaggactggccaggagagaactgggaaggccagccagtggtagtagcaagggtggagaccaccaccctgcagggtgctgtggagtgggcaggagttacagaggttctttcccagctacctgagaaaggaggaagcgtgatgggcaggaggaggaaaatggatgcttggcgggaggctgggatccagggcagcagctcaaggaaggggcccaggacatgttcctgggtggaaggcaacaggccagcctcacaggagacgttgaaaacccctgtgagagggggtgtcatgggcccatctcagtctggaaggattctgcgctcagaggaaggaaaggcctggggcccggagcggggactccttctctgctgcagctggaaggggttggatggtccacagggcacgtgcccagggggtggggagctggggcactcttgtgtgtgggagtcagttttctcctggggactgcgaggggtgggggagaggggctgcttatggggaaatcagcgcaagcgtggaggagcagcaaggaaattcctccacccacactgggccttcacacttaggctttggttctgctatgtaatggaacgttcttaagacctggagggtctggaagcttgactaagagaagttggtcttgggtggggaggtataagcagttttctctgtctagcaggggaaacatga

SEQ ID NO: 9479 - DNA, 1241 bp, Artificial sequence
  DNA replication origin
taatggtttaaagaggtccacgtggctgaggaggcctcacacacggtggaaggcgaacgaggagcaaaatcctatcttacatggcggcaggcaagagagtttgtacaggcgaactcccattcataaaaccatcagatctcgtgagacttattcactaccatgagaacagtatgggggaggctgtccccatgactcagtatctccacctggccccacccttgacatgtggggattattacaattcaaggtgggatttgggtggggacacagacaaaccacatcactttccatgtggaaaccaaacaggccagggtgctcttgcctcccgctctccacctgccctgcccaccccagggccaggtattggacagcagggggcagcttctacatgtgccctggagcccatggaaccacagactaatccagtgagccaaccctaagcctgcttgccctgtccagctgaaatgcctcctgacgggttcttcccacatggccccgtgaagccctgtgtggccctgtgtggctctgtgtggccctgtgtggccctgtgtggctctgtgtggccctgtgtggctctgtgtggccctgtgtgaccctgtgtggctctgtgtggccctgtgtggctctgtgtgaccccgtgtggctctgtgtgaccctgtgtggccccgtgtggctctgtgtggccctgtgtggccctgtgtggccctgtgtgaccctgtgtggccctgtgtggccctgtgtgaccctgtgtggctctgtgtgaccctgtgtggctctgtgtggccctgtgtgaccctgtgtggctctgtgtggccctgtgtggccccgtgtggctctgtgtggctctgtgtgaccctgtgtggccctgtgtgaccctgtgtggctctgtgtgaccctgtgtggctctgtgtggccctgtgtgaccctgtgtggccctgtgtggccctgtgtggctctgtgtggccctgtgtggccctgtgtggctctgtgtgaccctgtgtggctctgtgtggcctgtgtaaccctgtgtggccctgtgtgaccccgtgtggccctgtgtgaccccatgtgtgaccctgtgtgaccctgtgtggccctgtgtgaccccgtgtggccctgtgtgaccctgtgtgaccctgtgtgaccctgtgtggccccctatggccctgtgtggccctgtgtagcttgtgtggccctgtgtggcctgtgtgactctgtgaccccgtgtgaccctgtgtgac

SEQ ID NO: 9480 - DNA, 1052 bp, Artificial sequence
  DNA replication origin
caacttcaggaagggaaattaggccagcagcaactggggagaaggagtctgggtcctggacctttggaagggccctctcagttctggactggctacctctggccttatgaatgggagggaggaatgaatggtgggggaatgaataggagtggggagtgaatgggaggggggaatgaatgggggggaatgaattggagggggaaatgaatgggagggggaatgaatggggggaatgaatgggggggaatgaatggggggggaaatgaatgggagggggaatgaatgggagggggaatgaatgggagggggaatgaatgggaaggggaatgaatgggaggggagaatgaatgggaggggggaatgaatgggagcagggaatgaatggggggaaatgaatgggatgggggaatgaatgggaggcgggaatgaatgggagggggaatgaatgggaggggggagtgaatgggaggggggagtgaatgggagggggaatgaagttctatctcatttaggtgattattgttttggacatttctgctacttggaggtacagctgattctaatggacctgcaggctcctggagacacttggactggaaaagcaaaaccaaggcccatgacatctatctttgcatattgaagtagatttagaaaaccctttcgaatccctctgagtacttttatttgctgctccctctcaacctcaactttgttcctcatcccactttctactggacattttgacctggccctttgccctcccttccctttgccctcccttcctgcacgctgctgagctgtagctctctcgggggtgcccaaagactccagccctcccagccccatctccccaccctcgcctcagcccttcctcctcactgagcccccgtgcctagctgtctgctgaccgtgggtgctgcctcacactccaaagcccatctcctcctcaggtcaccccttggcatccgacacccccagaaccttattcaccttctctgcaggtccagagcccagcagagctctatgccatggcaggagagtgggaggcattt

SEQ ID NO: 9481 - DNA, 1749 bp, Artificial sequence
  DNA replication origin
atgactctgaaaacatactgataaagttaaatacatgccgtttcaatcccaactgacacaaacactccaaggagtcaaggactgcaaaccaattatgtttgcaaaatcctggctcaaatgtcctccctcaaacacaaatgttaatgtcttactcagtatactaagaaatatgtcctctctgttgagtctttaaaatcaagtggcttatgaaataaacctcccatccaataagagctcttggcctcatcaactcatattgaaaatatgcacaagggttctgttctgacaatcatctcactgtcgaagggtcaaatcaggtgattctcagcgtctgttaccagagaccaggtgcttccactcaagatgacttcccggtttgctcaagcaagaaccacttaatgagcaaatgagcaaaccctctgggctgctccagcttaggtgagagtgcacatgtggggtgacatagctgtgtgcagaggaacaggtgtgcgtgcaggtgtgagtgcaggtgcaggtgtgtgtatagatgcaggtgtgtgtaggtatgtgtgcaggtgtgtgcagaggtacaggtgtgcgtgcaggtgtgagtgcaggtgtgggtgtgtgtacacaggggaaagtgtatagatgcaggtgtgtgtgtaggtatgtgtgcaggtgtgtgcagaggtacagatgtgcatgcaggtggtgtgcagaggtacaggtgtgcatgcaggtgtgagtgcaggtgcaggtgtgtgtacacacgggaaagtgtgtatagatgcaggtgtgtgtaggtatgtgtgcaggtgtgtgcacaggtacaggtgtgtgtgcaggtgtgagtgcacaggggcaagtatgtatatagctctaggtgtgtgtgcacagggacgtgtatgtataggtgcaggtgtgtgcaggtgtgtgcagaagtttgtgtgcagatgtgtgtgcaagtgcagttgtgtgctcactggggcaaatttgtatataggtgcaggtgcatgtaggtgcatgtgcaggtgtgtgtgccaatgcaggtgtgtgttcacagggccaagcatgtgtagaggttcacatgtgtgtgcaggtgtgtttggaggtgtgtgtgcagatgcaggtatgtgcacacagggacaagtgtgtgtataggtgcccgtgtgtgcaggtgtgtgtgcaggtgcaggtgtgtgttcacagggccaagtgtgtgtagaggtgcaggtgtgtttggaggtgtgtgtgcaggtgcaggtatgtgcacacagggacaagtgtgtgtataggtgcaggtgtgtgcgcaggtgcaggtgtgtgttcacaggccaagtgtgtagaggtgcaggtgtgtttggaggtgtgtgtgcaggtgtaggtatgtgcacacagggacaagtgtgtgtataggtgcccgtgtgtgcaggtgtgtgtgcaggtgcaggccgcacgcaggaacactcatggttccactggcaactcatccacagtggctgcgcccgcttacttccaggcatgagtggggaatgcatcaccatccaactgagtgagaggcccttctgaggagccaatgcctgctcacagagaaggggggagatagaaggggacagggaaggagggaaggagggagagggcaccttctcacgcattcaagcctcttccacgtggtccgacttggtacacatccggcctggccctggccctggggtcttacaagacaggcctcggccagagctgatgatgggtttccctcctccctcc

SEQ ID NO: 9482 - DNA, 1395 bp, Artificial sequence
  DNA replication origin
cgggcggggggctgacccccccacctccctcccggacggggcggctggccgggcggggggctgacccccccacctccctcccggacggggcggctggccgggcagaggggctcgtcacttcccagtaggggtggccgggcagaggcgcccctcacctcccggatggggcggctggctgggcagggggctgacccccccctccctcccggatggggcggctggccaggcggggggctgaccccccctacctccctcccggacggggcggctggccgggcagaggggctcctcacttcccagtaggggcagctgggcagaggcgcccctcacctcccagacagggcggctggccgggcggggggctgaccccccccacctccctcctggacggggtggctggccaggcagggggctgaccctcccacctccctcccggacggggtggctgcctggcggagacgctcctcacttcccagacggggtggctgccgggcggaggggctcctcacttctcagacagggcggctgctgggcggaggggctcctcacttctcagacagggcggttgccaggcagagggtctcctcacttctccgacggggcagccgggccaagatgctcctcacatcccggacggggcgacagggcagaggcgctccccacatctcagacaatgggcggccgggcagagacgctcctcacttcctagatgggatggcggccgggaagaggcgctcctcacttcctagatgggatggcggctgggcagagacgctcctcactttccagactgggcagccaggcagaggggctcctcacatcccagacgatgggcggccaggcagagacgctcctcacttcccagacggggtggcggccgggcagaggctgcaatctcggcactttgggaggccaaggcaggccgctgggaggtggatgttgcagcgagccgagatcacgccactgcactccagcctgggcaccattgagcaccgagtgaaggagactccatctgcaatcccggcacctcgggaggccaaggctggcggatcactcgcggctaggagctggagaccagcccggccaacacagcgaaaccccgtctccacccaaaaaacacgaaaaccagtcaggcgtggcggcgtgtgcccgccatcgcaggcactcggcaggctgaggcaggagaatcaggcagggaggctgcagtgagccgagatggcagcagtacagtccagctttggctcggcatcagagggagaccgtggaaagaggggagaggggagagctgtttgtttgttttagagagggtctcttaaggcattcttaaaccacaaacaatagcatgagcgatctgtgccttaaggacatgctcttgctgcagataactagccagag

SEQ ID NO: 9483 - DNA, 872 bp, Artificial sequence
  DNA replication origin
gtccaggagggaggtggggggggtcagccccccgcccggccagccgccctgtctgggaggtgaggggcgcctctgcccagctgcccctactgggaagtgaggagcccctctgcccggccagccgccccgtccgggagggaggtagggggggtcagccccccgcctggccagccgccccatccgggagggaggggggggtcagccccctgcccagccagccgccccatccgggaggtgaggggcgcctctgcccggccacccctactgggaagtgacgagcccctctgcccggccagccgccccgtccgggagggaggtgggggggtcagccccccgcccggccagccgccccgtccgggagggaggtgggggggtcagccccccgcccggccagccaccccgtccgggaggtgaggggcgcctctgcccggccgcccctactgggaagtgaggagcccctctgcccggccaccaccccgtctgggaggtgtacccaacagctcattgagaacgggccatgatgacaatggcggttttgtggaatagaaaggggggaaaggtggggaaaagattgagaaatcggatggttgctgtgtctgtgtagaaagaggtagacatgggagacttttcattttgttctgtactaagaaaaattcttctgccttgggatcctgttgatctgtgacgttatccccaaccctgtgctctctgaaacatgtgctgtgtccactcagggttaaatggattaagggcggtgcaagatgtgcttttttaaacagacgcttgaaggcagcatgctcattaagagtcatcaccactccctaatctcaagtacccagggacacaaacactgcggaaggccacagggtcct

SEQ ID NO: 9484 - DNA, 1801 bp, Artificial sequence
  DNA replication origin
ctacatcggtcagggagcgcgggacctccctatccccacagcgccaccgtccgcaggtgcgctttgtgcaggcgaggcgcctccactatggccccgcttgaccccgtgcgcaggcgcggcatcccacccgccgcggttcctgccccccaaagctcgaccccggtgtggtgcgcaggcgtagtctgcgcggggactggcgggactgcgcggaggcgactacaggcatggcggtctgggtcctgtcgcgcctgctgagcgctccgcgcctggcgctggccaaggcggtgagtccgtgccgcggaccggggcggggcaggcgggggccgaggcggcggtaggagcgggacggtccccagcgggcccgagcagagcgggcgccaggtccttgcgccccctgtcccgggatctggaaggggctgggagagccctgcgccagtgcaagggggagccgtggggcggactcgggggtccggggagctcggtccttagcaggtagtccggtgaaggtcacgaccccgcgggcttgctgggcgtcccctccgccgccttggtccgggcctggggtccagagacctcccgggctgaggtagcccctcgcctcagtgcctggcgggtggacttggggaggagtcgtgtctgcccaaggtcaccagagctccttgttgggcgaggtgggtggaagctgttactttccctgtgtagatgaagaggtgaacagcgagtggaagagtctggaatatcagtctcccctgctgatgttcctccacctgccgtgctcctgggtctgagccggagcacaggtggtgagggccccgggaacatgggacacgggggacagtcgcagatgctgacattggaggtcctctgacctgcttgtaacagcaggtgctcaggggcagaggggaaactgggggataccttcggaagcttccctctgaagaagagtagctatggtccttacttccctcttagatacggtctttacttccccttttttttttttcttggaggtggggtctcactctgtcgcttcgggtggagagcagtggcgcgatctcagctcactgcaacctctgcctcccaagttcaagtgatttttctgtctcagcctccctagtagctgggattacaggcacccgccattatgccccgctaatttttgtatttttagtagagatggggtttcaccatgttagccagacaggtcttgaacccctgacctcaggtgatcaccagcctcagcctcccaaagtgctgagattacaggtgtgagccaccacgccgggcctacttccctctctctctgacctgcagcacagacaccctattggggaaggtgggctggtggaggcatgagcaccttgacatttcacctgaaatcttcctttccacaggtcctgaggcacgtgaatggccaggatcagattgtgcccggcctgtacgcctgtggggaggccgcctgtgcctcggtacatggtgccaatcggctcggggcaaactcgctcttggacttggttgtctttggtcaggcatgtgccctgagcatcgaagagtcatgcaggcctggtaagtgttttcttcaggagccagactatttgagaaggcgcaggaagttagaaagtcttttttcttttttttgagaaagggtcagcccaggctggagtgcagtggcacagtcatagcagcctcaacctcccgggctcaagcagtcctcaacacctcaaccttcagagtcccaagtagctgggactacagatgtgcaccaccacacccggctaatttaacaaaaatttattttgta

SEQ ID NO: 9485 - DNA, 1081 bp, Artificial sequence
  DNA replication origin
caagatggtctcgccatggaggtgacagggtgagtgctgcagtgcaggactggggatgccacaggaacgggtgccccaggtagggcgtcatccaggaaggatgagaaacctgagaacagctgggtgggagcagctgggggggagcagctgggggagaacagctggggggagcagctgggtgggagcagctgggtgggaacagctgggtgggagcagctgggtgggagcagctggggggagtagctgggggggagcagctgagggggagcagctggggggagcagctgggtgggagcagctaggggggagcagctgggtgggagcagctgggtgggagcagctaggggggagcagctggggggagtagctgggtgggagcagctgagggggagcagctgggtgtgagcagctgagttggagcagctggggggagcagctgggggggagcagctaggggggagcagctgggtggggggcagggtccgctggctgcacgggggtggggagaggagcccatgagggcctgagagcagcgaggccgggcggaaccctaatccctcatctgcacatgacatggggcctgccggagccccacagagcttggaacggagctggggaagagcgtttgccaggcctcccgtcccctccttcttcccactgggattgctctgaaggaagaagaacccatcaagtccttgtaaatgtgctggggagagaacccctgacagtgcctggtgctcactcctggggagccactgtctcgggtggtcctggtaccgtgaagtttctgggctcaggtccacggcacctggaaaatgtcgtgtttaagtgaaatgatattcaaagcccaagaggaaatgttccaggcacttctcagagaccccatgaggcaggaaggacagtggggctatgggggcccccagcttctccagctggacccgtgcctgggaattactccctgaaatcatgagcagagctggatgctgggtcagttctgtgtgcctggaaattactccctgatatcgatagcagagctggacgctgtgatctgtgggactctacccttaatggcttcatttat

SEQ ID NO: 9486 - DNA, 2657 bp, Artificial sequence
  DNA replication origin
tccagcttcacagccctcaaactggaacttcagctccccaccgggtatccagctgcacagccctcagactggaacatcagctccccaccgggtcttcagctgcacggccctcaaactggaacaatttgaacctggcggggagctgatgttccaatttgagggccatgcagctgcagacccggcagggagctgatgttccagttgtagggctgtgcagctggagacccgggggggaagctgatgttccagttgtagggccatgctgctggagacccaggggtggagctgatgttccagtttgagggccgtgcagttgatgacccggcagggagctgatgttcaagtttgaggtctgtgcagctggagacccgcgggggagctgatgttccagtttgatggccgtgcagctggagactctgctgggagctgatgttgcaatttgagggccatgcagctggagacccggcgggaagctgatgttccagtttgagggccgtgcagctggtgacctggcggggagctgatgttccagtttgagggccgtgcacctggagacccggcggggagctgatgttccagtttgagggccgtgcagctggagacccagcggggagctgatgttccagtttgagggccgtgcatctggagacctggtggggagctgatgttccagtttgagggccgtgcagctggatacccggggtggagctgatgttccagtttgagggccgtgcatctggaggaccggtggggagccagtgttgccggttgagggccgtggagctggagacccgggtgggtgggagctgatgttccaggttgagggccatgctgctggagacctagcagggagctgatgttgcagtttgaggtggtgcagctggagacccagtaggggaactgatgttgcaatttgagggccgtgcagctggagaccctgtggggagctgatgttcctgtttgagggcctaggagctgatgttccagtttaaggccatgcagctggagacccgggggggagccagtgttccagtttgagggctgtgcatctggagacccggtggagatctgatgttgcaggttgagggccgtggagctggagacctgggcggggagctgatgttccagtttgagggccatgcagctggatacctggctgggagctgatgttgcagtttgagggctgtgcagctggagacctgacgggagctgatgttccagtttgcaggccgtgcatctggagacacgacggggagttgatgttccagtttgagggctgtgcatctggagacccggtggggagctgatgttgcaggttgagggccgtggagctggagacctgggtggggagttgatgttccagtttgagggccgtgcatctggagacccggtggggagctgatgttgcaggttgagggccgtggagctggagacctgggtggggagctgatgttccagttcgagggccatgaagctggacacccggggggaaactgatgttgcagtttgagggccatgcagctggatacctggctgggagctgatgttccagtttgagggccgtgcatctggagacctggcggggagctgatgttccagtttgagggccgtgcagctggagacccggctgggagctgatgtttgagggccgtgcatctggagaaccggtggggagccagtgttgccggttgagggtcgtggagctggagacccgggtgggtaggagctaatgttccaggttgaggtccgtgctgctggagacccagcagggagctgatgttgcagtttgaggtggtgcagctggagacccaggggggaactgatgttgcaatttgagggccgtgcagctggagaccctgtggggagctgatgttcctgtttgagggcctaggagctgatgttccagtttaaggccatgcagctggagacccggtggggagccagtgttccagtttgagggctgtgcatctggagacccagtggggagctaatgttgcaggttgagggccgtggagctggagacctgggcggggagctgatgttccagtttgaaggccgtgaagctggagacctggcggggagctaatgttgcagtttgagggccgtggagctggagacccgggggggagctgatgttgcagtttgagggccatgcagctggatacctggctgggagctgatattgcagtttgagggccatgcagctggatacctggctgggagctaatgttgcagtttgagggctgtgcacctggagccccggggtggagctgatattccagtttgagggctgtgcagctggagatctgatgggagctgatgttccagtttgcaggccgtgcatctggagacctggtggggagttgatgttccagtttgagggccatgcatctggagacccggtggggagctgatgttgcaggttgagggccgtggagctggagacctgggcggggagctgatgttccagtttgagggccgtgaagctggagacccggcggggaactgatgttgcagtttgagggccatgcagctggatacccggctgggagctgatgttgcagtttgagggctgtgcacctggagccccagggtggagctgatattccagtttgagggccgtgcagctggagatctggtggggagctgatgttcca

SEQ ID NO: 9487 - DNA, 1004 bp, Artificial sequence
  DNA replication origin
ggctgcctactcctaccgccccagccccgggcggccctgggcctgctgcgggcgcggcgctgcccgaccagagcttcctgtggaacgtcttccagaggtgcgggctggcaccgccccggcatctcccgcctcccgcgcagccgccccggacccctgtcccgacccccgcggccaaccccgttccctgccggttgccccgcggcctcccccgtcacctgccgtgtccccagcggcctcccccgtcccctgccccgaccgccgccgcctcccccgacccctgccccagccgacgcggccgcccccgtcccctggcgggtcccccgcggtctcccccgtccgctgcccggtctcctggggccgcccctgcctcctgcccggtccctgtcctgtgcgtcggcccttcccaagatgcagagtgcgccactgcagacccgaggtcgcggccaccggctcctgggctaggccctttttctcgcctcaagagccgccaggtggagggtctccagggtgcttgtttggggaaagcggaaacagactgtctgggccgctgttaaaatgtcagcagccaaggaagaagcagcgacctggcgtctgctcgggccaggtgacctttatggtggcgccttctgtccctggtcgcttttccaccgaatgtccgaaactgtagtgactgatggccagggaatggcttagttatctgagggaatcttttcttgtctgtgaaaaagggaaactggtgcaaatgggaattcagacaggccaggagaggaaggaagggaaggattgaggtgaagatgattgtcctcttaggggaagaccacactggacgtcggctcctggggcacttccttgattccgctgtactcctcagcgggacgggagaggcggaggttccaggagggagccttccagagtcggtgcagggttgacaggagacgtttgttttgcttttcctgaactttcgatcgccagcttatttggtcttcttgatgttatagggtcga

SEQ ID NO: 9488 - DNA, 1283 bp, Artificial sequence
  DNA replication origin
cgcgttgtccgggatgcacaggccgcctgcgcgcgggccgggaaggcgcttggagacaatgtcccgtgctgcgacccgggacaggcagtgatggagcagggacttagtttgccttttagttcttgtatgaaaagaagttttgaggtgaatgtgattcacgctaacagtcggaaactctgggcggggcgcggtagctcacacttgtgatccctgcgctttgggaagcggaggcggccggagctcttgagcccagcagtgcggaccagcctgggcagcgtggaccagcctgggcagcgtggaccagcttgggcagcgtggctagaccccatccctacaaaaattacaaaaagtagtccggcgtggtgggctcctgtgggcccatctactccgtgggctgaggcgggaggatggcctgagcccgggaggtcgaggccgcagggagtcgagatcactgccctccagcccggtggatagcgagacaatgaaaaaaaaaaaaaaaaaaaaaaaaaaagcaggccgggtgcggtggctgacgcgtgtaatcccagcactttgggaggccgaggccggtggatcacctgaagtcgggagttcaagaccaacctggccaatatggagaaacccagtatctactaaaaatacaaaattagccgggcgtggtggcgcacgcctgtaatcccagctacttgggaccctgaggcaggagaattgcttgaacccgggagggagaggttgcagtgagccgagatcaggccattgcactccagtcccgggcaacaagagcaaaactccgtctcaaaaaaaaaaaaaaaaaaaaaaaggcaaagcacaattcgcgtgggaagggcagtgtgcagcattctccgttgtctgttccgcccccaaaagcttccctcctttagatttaacctgcggccccgcgctctgcatcagcgcggtccccgacccgtgcagctggaaacactgggcgcctccctgccgcgccccttcccgccccggtggtggtgcagccctgcctccctcaagacagcactgccttcgtgctggacacagttctgtggtggagcctggagtgcctgtagcacaaatcccggagttgggaagtgcccacctttgggccagtgtgatccctgggtctttcccgcacgggtggtctcatgcggccttccactccagtcctgtgtcctgtgccccggttcagaatactacaattattctcgttatttcatggggttattccagcttttcagtttcttcagtgcctcattccatgaatgcttttt

SEQ ID NO: 9489 - DNA, 844 bp, Artificial sequence
  DNA replication origin
tgggtcttggtagcaaaggcggctcgtgggggcagcccacgcgaatgcttccccggcgccctgagcccctgaccgcggctgagcctgctgtactctggcccctctcatggaaagatgacctgggtctaccatgctcagtatcacccaaaaattcctacagaagtctcttgggacaagaaaaggccttcttccctccctcctcctttcctcttcctttctttcatcagggaacagcttccggccacctgcactgtttgggcgccatcataaggagccgtgacggccttcacagagctccggggctcacgggtgtggctgacctgccacaaatggggcgacagaggagagggagggtcaggcaccgatggctcaggagggaagagatcccttctgtatggggagatgggggcttcctggagggagccggggcgaggggctcaccagggtgagacatccaagggacctgggggaccggccatgggacactgtggtcccacgtggctcctggatgcgctgtgtgtttgctgagctggaggggacagggagcccacgtgtgggagagggagaggccatgcacgccctgagtcgggctttacaaaaaccttctggcggcagcaggagaggagccacgcagaggcagagccagggagaggcggtggggtagtgagggggatgtcggggtgcacgggttaggagacccccaagccctgggacctgcatgctgatggtcaaggttgcagaggcggctgctgtggtgaccacagggcagggagaggcagtggggtagtgagggaatgtcggggtgcacagcaccagaccctcctagatcttccgattcagtcct

SEQ ID NO: 9490 - DNA, 943 bp, Artificial sequence
  DNA replication origin
aggcctggggaggggtgaggcctggggagggtagggcctgggaagagtgggggatggggaggggtgaggcctggggagggtagggcctgggaagagtgggggatggggaggggtgaggcctggggaaggtggggctggaagaaggtagggctggggaggggtggggctgggggagggatgaggcctggggaggggtgaggcctggggaaggtggggctggggaggggggggccacagagggcagggcaggggtagggcaaggctggggagggatgatgcctggggaggggtggcctggagatgtcagggctggggagggtaaggctggggagggatgaggtctggggaggggtggggctgggggaggaccggcctgtggggcagggcctatgggggcatggggcctgggtcctcggggcctgggacagtgtcactcttcccttccttggctcatcctgtgacccgaagagcctctgccaggccctgggctcctgctgagctcctgctgagaacaaggcagcctggtttttctttgatctcctgccccgaaggttgatgaggggatggagggtctggagcaatggcccagacagggtggaagttccctggggaagaagggggtgcctggagtgggtgggtggtcagggacctttcgagaggaggggtctcaaggtgagggctcctcaggcccccgaatgtggggcagggtgggtgcacaagcagaggctgtgggggaggtgctgggcaagggaagggcagggcccattcttaggaggagcctgagagtgggacaagaacagataaattctcagggagaatggggtccctcgccatggggggtcctggaacaatccatggcggcctgtccctctgcctgctcccaccacagttccgtgcttctccagagggccaggctggccatgctgtccctaacccactccag

SEQ ID NO: 9491 - DNA, 1332 bp, Artificial sequence
  DNA replication origin
gcacctggaacagggtggtcctggggcggccacatccactccttccaggtcagttcctggtgaccctcggcctgcagtcggccttgctgaattcttttaggccacccggataccccctgctacgcgtccagctgttgatcgcccactgacctgtagaagacctggtcagcccctctgtcttccgtcacccacggaggcgtccgcagatgctcagcgcagcccgcccggccctgcacagacccgaggcggcaccagggggcgctgccggcccgaggacgcgggcgcggggcggaggctgcggggcaggagccgctgtgcgcgttcaggcagctgcccgggacccctggcaccgaccgcagcccccagaggcccccggggggtttccgcctgagcctaaaccgaagacagggcctgttttcagtcatcccgaccccacagactcagcccgttagttcccgcgctgcccggcgccctagtacccagagctggtggggactccaggccaccaaaggcaggggcggggcgggcggttgaaggaagattgggacacggagaagagggacaaggcctggggcccgaggggtcaggacgctctgccagcctcaccacccgcaacacccaggcacggacgcacgcacacactccacacgtgtgaacacgcacgcatggctgcacacacgtgcacagagaggcacagcctgcaggaacacagttgcacgcacacaggcacaggcacgctccctccctcatcctctcacacacaccccaggtgcagacacccccacccagaggacgcagctcagatgcagaaacaggctgggtcacaagagctacgggaggcggcccctgctgtccggtgtcttctctggggaaagcttttccggagcctgatggaggaagacagaggaaagagacctgtgttccctgatgcactggccagccgcttcccggggacggggaggcagcagccaggtccatccgtctggggagtcaggcgcgatgtgtggcccccacaaggtccccccaaaaaaaaagaacctgagaacgctggagcacggagggcccagaggcgtgagaagctcagacccctggacaggggaccccaccccacacgtaaggccacacgccatcggctgacctggcactccgagaggacccagctcccagtctccccagctagctctcaaaacacgaacgtcaagttttcatcgggaaaccggcgctgtcagtggcttccaccaccaagctagctctgcctggctgtcacccaaatgccaagggcctgttttggaaagcatcaaccacaagttccttgtgaggcctcggcgtggc

SEQ ID NO: 9492 - DNA, 959 bp, Artificial sequence
  DNA replication origin
tgctgctcctcacagccacgggtggaaactactcaatgcattgcagagctgacaccctctctctggcctggctccgagctgtgcctggtgtggtggaggggtggaggccaccctcacccggccctgtgtgctgctctgatgcggctgaggggaccagggcctgggtgtgccctcagcgcgtccactccagaggggagcctgcgtccacattttggccctgtgggtaaaggtggcttccccctgagcttgtaggggtgtgggacactgcctgatgccacctgccatgattttacatgaaaagccgggaagaggcactgaggagccacctgaccccatggaatgccatttcctggggtcgcttggccagaagtcattgacacagccctgccagccagaagctggggcagggacggggtcctgccttctggaacaggctctgtgtggaggtgaccatgtcccagaggtctctgctcagcccagggggcgggtgggggtggagttgcagggtggatggtgggggtggggccaagctggcccgagaggtctgtgaggtgagaagagctggggtctctcctcctctgccacccctgccccaccttgctctgaatctctccctctgtctgtctctgtcggtctctttctctctctactccccactctagtgtctttagagctctggataaggtgtgtgctgagtccggtctggtttggggtagatgttctttgatctgttaccactcctggagggaaagcccctggtcccccattcctgtagagccaggccccgcccaccaattgcccccatctggcccagggggacctttcctctgctctccagggaccactgcaggtggtgtggcccctgaggggagcataagggtgcagtgcctgactcaggggacacagaagccccgcccatacggcctttcacacagcacagcacccagccctcggcagcc

SEQ ID NO: 9493 - DNA, 1647 bp, Artificial sequence
  DNA replication origin
tggaccccacagcaggtgagttgcaaaaggtggcctcttgcgttccatctagtcaagctgtgttcctgctgaactgggtctgcagaggaagaggcagcttccagtgaagggagctggttttctcagtgggtggtggccccaatgatgcaaacgtgagctgctttgccttgagacatcctctggccttgttgcctgaagatgctctattccttctgctgacaggagaaggaagcatgctgaggctggtgtttgggagcccccggggatggaggaatgccacaggctcctctgtacacccgccataccctgtcccgcctggccctgcagctgtagggagtgctcaccatcaccatggcagccctccaggagcaggctgtctggcctctgtgctgagggctggagagccaagggaaaggccaggtgagagcgtggaggtcctggtgagaacactcaagtccaggtgagaaagtggaggtccaagtgagtacgtggaggtccaagtgagaaagtggaggtccaagtgagtacgtggagttccaagtgagaaagtggaggtccaggtagaacatggggaagtccaggtgaggatgtagatgtccaggtgaggatgtggaggtccaggtgagaacatggggaagtccaagtgaggatgtggggaggtccaggcaggatgcagaggtccaggtgaggacatagaggtgcaggtgggaatatggggaggtctaggtgagaacatgtggaggtccaggtgagaatgtagaggtcctggtgagaacgtaggggaagtccaggtgaggacatggaagtccaggtgataatgtagaggtctaagagaggatgcggaggaccaggtgaggatgcagaggtccaggtgaggatgtggaggtccagatgaggatgcagaagtccaagtgaggatgcaaaaggacgggtgaggatgtggaggtccaggtgaggatgcggaggtccaggtgaggatgcagaggtccaggtgaggatgcagaggtccaggtgaggatgcagaggtccaggtgagaacatggggaagtgcaggtgagaaagtggaggttcgggtgaggatgtgggggtccaggtgaggacatagaggtccaggtgagaacatgaaggtcctggtgagaacgtgaaggtccaggtgagaaagtggagatccaggtgagaatacagggaggtccaagtgagaacgtggggcagtccaggcgagaatgtgaaggttcaggtgaggatgtggaggtccaggtgaggatatggagctcctggtgaggatgtggaggtccaggtgagaacgtgggaatcctgtgtcaggtgtctctcacaaagcggctggccctgggctgcccctgggctgcccctggagggtccctggtcttcttgtgagatgggggtgtccaatcttttggcttccctgggccacactggaaggagaattgtcttgggccatccactccaacatctattattttttgattttttggattatggcaattttagcaggagtgaggcagtatcacattgtggttttgatttgcatgtccctgatcattagtgacgttgagcatttttccatatgctttttggccatgtgtatatcttcttttgaaaattgtccattcatgtccttaccccact

SEQ ID NO: 9494 - DNA, 1441 bp, Artificial sequence
  DNA replication origin
cgttctccctccgggcagcctcgtgggcggtagatgcagccaacgcgtccgtcaaagcggttcaggggcgctgggaagaggcggcggtgaccccgggacggcagtgggcccgaccgagcctcagtgggggtcccgcgtgtacgctggcctcgccctcccgcctcgcttctgggcttttgctccaactctcagccgccgtggagatcgcagggggcgtagggccaagccagggattccgctgtgccccgggctcgggagaggtgtcccgggagtctatggcagaatttccccctcatcctgcgctgggagaggggtctcgccccggatggaactccgcgttcccacctccaggttctcccctgacctccacttctgtaccctggacaggcgggtattctccccggccctggaggctcctgtcccccagcatttgcgcggccaggcctggcgctgggctccccacccccagccctcaagggcacgagcttgcagagaaatctctgggtttggaggcctgaagtcccccttggggcctgggttcccttttgccctgtctgcagggcgctctgcaggtttctcgcggccgtgggtgatccggggggttgtggcccagcctggggttgtggtgaaaatgggcttttcagtaggggttggggcagtgcctggaataacccgcagtgctcacatctgcctgcggggaccttctgcagtctttctggccaccctgggggcgagggcaggacagggctaggtgtgtcctccccagcctggcctctgcctaccttgcaggtgcagtgagctctcctgcctgagagagagcaggtgtgcagggaggcgtgggggctggcaggtgtgggggctgcgtgctgcggctgtgttgggggagggggtgagagtgtgactcacggagccccgcccgcaggagagggtggccttgacagggaagagagtgtgggggtgtctagccagtgaagacagcagagcggcaacaagctccgaaagctggaaggtcgctgttggcctcgggagaggagggccagcgctggggaccgtgggacacaggaatcccgcagcgtgttctgcgggttagagctgtgtgcagagacccaagcttgtcgagggcagtgagcagctgtggaggaaatgtcgaggctcccacgtccccaccagtgtccccagctccacgttgaacccctctctatgatgaggtgtcttcctggatgggtgctgtgggcattgtgaaaggaaaataagtctggggtccccacatcactaagctaaagggaagagtcaagttgggaactgcttagagcaaacctgcctccctttctattcaaagtctccccctgctcactgagatgaatgcagatctgattgcctcctttggagaggctcatcacaagctcaaaagaacgcagccatctgtctcttacctaccttt

SEQ ID NO: 9495 - DNA, 1395 bp, Artificial sequence
  DNA replication origin
ggtgaaatcctgtctctactaaaatacaaaaaattaaccaggtgtggcagtgtgtgcctgtagtccgagctactcgggaggctgaggcaggaggatcgcttgaacccaggaggcagaggttgcagtgagctgagatcgcgccactgcactccagcctggcaacagagcaagactccatctcaaaaaaaaaaaaaaaaaaatcatctctcaggaacgcatggcttggtgagagctccatgtctcagccatgcccccaacacagggtcaaatcctgctaatccaccccacacgccacaccctctgcagtaacaccctggtcctcaggaagccccattcatggagggcacatctgtggaattccccaaccaggtcctagtgggaggaggaagatgagggagctcagtcccaggagagcctgaggctcccccagcagtgatgcctgaggcttggaagtggtggagagtggggaggggtcactccaggggcgcaggggccctctgcagagagtgccttgggtgagacttcctgagcagaagggatggtggctatgctgggcggaccgggcaggctgctgaggggcccctgagggcagggaggagatggctaagagggcggcagtgagggtaagggaggtgagggcgagagggtgggatccagggccctgggggtcagggaggagagggcaagcgggtgggggtcagggacctgggaggtgggaaggagagggtggccccaccatgggtcaaggccgtgagggtggagaagggagggcagagtgggagtcaaggccatggggggtggggaggggagggtggtgaggccaggggtcagggccatgggaccagtgcccgaggcaaggaacctggatttgtcctgagagccatgggtgcccctgcagagcccagcgagggagtggtgagtcctgcctgggtttcccaccatccctccggctgctgcaggatgagatgggcaggtagcggcaggaggtgaggggcagtggactctctgggaatgaaggctgggaggggtgctcagctggttaagggagagggtcccatggcagctggctgggggtggggggctgtgatagattatctgtggtccagactgcagctgctctcctgaacctcatctgcctccttccctgtacaatccagttttagcactcggtcagtgtagcaagaaccccccacccttggtacctggccacggtcagtgtctggaaaattcctctctctgaccctcagtacctgacccccagcctccagtcagcaggaattctgtgaggttggttctgccagaaaaaggggggctccatgtctcctggtggtccctccccacccaccaactcccgctccctggccacaagtctcttactgtcctgccatgtttgcc

SEQ ID NO: 9496 - DNA, 1002 bp, Artificial sequence
  DNA replication origin
cacaccctgtagagcaaccccatgtgccagcgagcggcctcagagcagcctgcccaggcccggggctcgtggcttgcctgtttcccgggtgggggagggcagaaaggagagtgtgagggagcggctggctgagagattaggatctcagctcctctacaagatgcatgagcctcgccgctcctgtgcgggccccattcctcttctgatccattagcggggtctccatcacggctgtatctccctcggaggtcgggtagcatccatcctggctggccgcacccgcatttccgtgtcgcatgatccatccggtgcctctgcagacagcaggcactaggacagatgggctggagctggcatatcgtgcggataaactgtttatcactccattgacgccgctccatctccccgcagctgaccccacgctcactaatgcctagatagtgggcaggagaacggccgtccctgggggtcatggtgcgcgtctcctcgttctttggtgctgaggaaggaggtggcagaggccttggagcaacagagccagggttgtgggagaggaaggtggctgagtgtggtgagggccctgccaggtgctttgggagtcctgtgggactgcagaatgagcacgttcgctccatcgtttgacgacaaaggcacccggtgtccctgagccgagcacgccccgtccacttggtgggggcattagcctgtcggaaagctgcctggtccaggggggctttcagcccgcaggacgccgagagctgtctgtaaacctctccatggttgtgtgggcctcgggccgaggcagcctgcagtgaaggaagatgttttggagaagttgttggggggctgaatccctaaacgcaggggacacttcacgcccgtggaatttggaaaaccgaggcagggagcagggaagggtgtgggactcgggaaggggagcagctggtgctcctttaactcgcccggtggcagttcagggtgtttccatctgagatcctacac

SEQ ID NO: 9497 - DNA, 840 bp, Artificial sequence
  DNA replication origin
tttactctgacatagttgctcgaatgatctcttgtgttatcttttattgaacacaaaatgagggctgctcatccaagttatgtgtggctggatgtcctcgaactggagtccgaacttgagcaagcagaggttgagagaactccgggtgtgtctgtggggatgcaagagggcagcagtgggggcccctgtgagcctgagtcactcttgagatggacacacagtgcctggggtcctggggccccttggtgcctggcggccctgggtggctgcaggtggcgattgggctcctccaggtgccccaggcccaggccctcaagtccccactccccacaagggttcacagctgccagcccttagcaactctacttcttcacacacaaggcaagggcaaggttgtagcggggcagggggcggggggggtccctccggatcagtcacttgagctgagattccggtagacaccaggaggggctgaccagtggtgggaagaacatacatccatgggaaggaggctgacaaccagaggcgatgacccctcggcatggttagggaggaagaggacatggtgccagtggccccagaacaggtggatgggaaggactgacaggcgaggctgggtcaaggtgggggctgcagcgaggggtgggggcctgaacgaacagcctcggtactcgctcgcacctgcttcactttcctaggtggtaaatctgtcatttcaaatactcaaaaataccaggatggccgtggcaagtctacaagccccacatccaactttagaagcagtggccaccctgaggccctgtcaggggcggaatggagtccccccaaaaacacacccag

SEQ ID NO: 9498 - DNA, 1051 bp, Artificial sequence
  DNA replication origin
gtatctcagctaagaggggaaaggtctcagctgcacaggctgtggggaggtttcagctgcctgggggtcgggggtccccaccagtcacagctcccgggggttgttctcagcacctggaaggcatgcgtgagcttttgcccccaggcctcgccagggccagttctaggtgctatgacgcgtcgagagccaaacaaagcccgtggccctcacaggactgcacatccagcagcaggagacaggaggaggcaagggacctgcgagaagcgggaagacccaggactcagcagggtgagcagagcagacttgctacgacagcagggcagccagcagggagctgtcagcacagcaacgcaaagcccaaggcctgagtgtgagggaggggagggcgaggggcccaggtggggtggcagagggaggggagggcggagttccccatggaggaaggagagggaccgggggcggaggtccctgtggaggaaggagagggatgagggggtggaggtccctgtggaggaaggagagggacaagggggtggaggtccccatggagggagatgacaaaggcgcacctttctcagcaaatccgggaaaggctcctggccaggccacctgtgcaatgggtgtgtaagctcccgtgcagggcagtctctggggggctgggaaacggtgtgcacactctcagcttggggtcagtcaaggctggaggtggtagggtgagtgtggaaactgtccccacagggctcgtaggaatgcaggaaggcagtgcccatgaacactgggtgtcccgaggccatgggaggcgcccatatccggcagctgtcaccaggtggccgggcaacagggagagccagagtgacgattcaggtgtcggtaggcaggaaggcagattgctaactgtggtcgcccaaaatcctggcaggatttgtttacttgcaataggtaagaggctggaatcatggagaatgtgtcaagcatggtatctgattgcctcggatgcttttaattttggagaagcagctgctgccgaatgctcggggaacaccccactggc

SEQ ID NO: 9499 - DNA, 1131 bp, Artificial sequence
  DNA replication origin
ccctcggtgtgagctgcttcgtggccaagggagagcccagacagctgctcctcggactcaggacctggccccaggccactccgtctctcctacgactcggttgctgagcccagaacagagcgtacatgtgactttacccgcaggggcgctcctggaagtctgaccagggtcgtcgccagggagcgccaggctccacgctcacctgccaggacggtggtgcggtccagcggtgcggtcctgcggtgcggcccagcggtgaggtcctgtggtgaggtcctgtggtgaggtccagcggtacggtcctgccgtgcggtccagcggtgcggtccagcggtgcggtccagcggtgcggtcctgtggtgaggtccagcggtgaggtccagcggtgcggtcctgtggtgaggtccagcggtgaggtccagcggtgcggtcctgtggtgaggtccagcggtgcggtccagcggtgaggtccagcggtgcggtcctgtggtgaggtccagcggtgaggtccagcggtgcggtcctgtggtgaggtccagcggtgaggtccagcggtgcggtccagcggtgcggtccagcggtgcggcccagcggtgaggtccagtggtgtggtgggttctgccaagtgatcgcgtgggacatcactggcgtctcgccaggcaccaatttcttatgaccaccggggctgggcctcatcagcgggttgttcagaaatggtggaaggcacgtggtgcgatctctaggaagtcagctcccctcccctcatcaaggcctggctagcagcaaagggatggcaggagcccctcaaccccacccacacaccccacagcctccatgacaacgagggtgtctgtgagctcatccccccgccagcatctgtgggctccactccgcctggacgccacgctggctgcaggtgggcgggtattgtctgctcctgaattcctttccctggacagaagtgaccctgtgtgaccttcagctgcagagcagccccctccacacatctgagttgaccctgaacgccccgtgggcagggctcggattcagccttgatgcccaaagcaacaatgccagtgcagcgcccctgcagccgggcacccccctcgtcttccctcgttcctgatcctg

SEQ ID NO: 9500 - DNA, 1173 bp, Artificial sequence
  DNA replication origin
tggaccgcaccgctggaccgcaccgctggaccgcacggcaggaccgtaccgctggacctcaccacaggacctcaccacaggacctcaccgctgggccgcaccgcaggaccgcaccgctggaccgcaccaccgtcctggcaggtgagcgtggagcctggcgctccctggcgacgaccctggtcagacttccaggagcgcccctgcgggtaaagtcacatgtacgctctgttctgggctcagcaaccgagtcgtaggagagacggagtggcctggggccaggtcctgagtccgaggagcagctgtctgggctctcccttggccacgaagcagctcacaccgagggcaggagcagaggcctcccggccccgggcggaaccccgcaggagggcctccctgaggccaacgtctctggcgccacctcccgcagtgttcgctggagcccgcggccatgcagggccacacggacccgggggctgcgcagaactggggccctcgtgcaccgtgggtgggaatggaacgtggcgccgctgctgtggaaaaccaaagggcaactcctcagaaagttaacacagaatctctatagggcccagcaatcccacctccaggcctatccacaaaagaatcgaaaacaggggctccaagaagtacgagtacacacatgcgcatagaaaccgcatgcgcagcagccgagaggcagaagcagcccagacgtccccttgacggctgagtgcataatggggcctccatagaagggaatatgtttccgccacagcaagggacgccgcactgacacggggaaccgcacgggtgaacctcgagacaccgtgctcagtggggttcgccagacacagaaggccacagagcgcacaattccttttacatgtaatatccagaaccggtaattccgcagtgacagggggctgcctggggctgggagaaaggaacgggaatgactgctcatgggtgcggggcttccttttggggtgatgaagctgccctgaagtgtccagaggtggcagctgcccactgcgagtgtgataaatgccatcgagttgctcactctaaaagggttaattttgtgttgtgtgaatttcacctcagttttaaaaagaagaggactctgcccggtctcccgaggccaccatgacccctggaggtataaaatgtgcgtgc

SEQ ID NO: 9501 - DNA, 1365 bp, Artificial sequence
  DNA replication origin
acctgtgcttcacacatgaggaggggacagctggatcaggaaccgccacacacagcccaggagattggggaacttggcctcaggggtctcacaccagctcagcagccccctcagctaaatggccccagtgagaggccaccttggcggggaaccaggtgagcaaccaagccctggagtttccctcctggtctgggcagctgcagccctgcttccctcagaggtgccttctcaggtgtgagtccagaaagttttggggaccaaaaagtcacccaagcatttgcagcctttgctgtttgagatcgtggggaagtggtggcttggcagtgctgtctgcagcctggcccaggagagagtgagcacagctcagagctgtcctggggcttggtggagttgcgggggggagcgggtgaggctgaggctgaggctgagggtgaggctgagggtgagggtgagggtgaggctgagggtgaggctgaggctgaggctgagggtgaggctgagggtgagggtgaggctgagggtgaggctgagggtgagggtgaggctgagggtgaggctgagggtgagggtgaggctgaggctgagggtgaggctgaggctgaggctgagggtgaggctgagggtgaggctgaggctgagggtgaggctgagggtgaggctgagggtgaggctgaggctgagggtgagggtgaggctgagggtgagggtgaggctgagggtgaggctgaggctgaggctaagggtgaggctgagggtgaggctgaggctaagggtgaggctgagggtgaggctgagggtgaggctgaggatgaggctgaggcagctacaccgtcctccagcatctggggtctgtcccaaggctgctctgccaggtccttgtgaaaccaggtcccagggtgtaggccagggtgagatggcggtgggagagcagatacagaagaaccttccagaaacagtgtctctgcccttcccacctctgacagagggaagggctgagctgagaacgaggatgcattatccattcagtcgcctgcttgatgttcctagagaaagatcctgaagtgcagcgaggcactgtcggaagacccaagaagacatcttggggaaagtgaataaaagagattcctgccaatgtgagtttcaaaatgcacggtgctaaatcaactttagcctaaagctgcctccttacatattttaagttcggcctaaaggtttttctgcatattgtcaactataacaagtggaggtgtaaacaggccagagcctacacttgtgcctatcactgagatttggccgatcacatgtagccagctgtttgaactgtgttcaaataaggcaaacaccaacctgtaacaatccggctgt

SEQ ID NO: 9502 - DNA, 1015 bp, Artificial sequence
  DNA replication origin
gtgacccccccccccgccgccatcttccttcctggcagcagcgtccgcgtgccagtgcgcagacgcaggggtcggcgccgggtgagagcgtgcggccgggtaagggagccgtcttctcaggtcaggggtcccgggtgtcttgagagtgggggctgcgagagggtggggccggccaccttgggaccctcgggcgtgtctccccgagtgggctgcggtcagaggagcgtgggccggggcctggcggtctcagagggccagggttggggggtgcgggtccgaccgtgggcgcccgacctggcgacaggagggggtgtccagcgaccccggggcgggagaactggcggctcccgaacgcgacctcacagcccgcgcgcagggccggctccggtgccgcagtgtcctccgggccctgcaggcccagctcttcccagccggggccgctgaaccctaagggccggggcgcgtggggaagcaggggcgggcgaccggggtgccagagttccgtgctcttccggagcgggggcctgtcccgaaactggcccgagggagggcccctgggtctgggaagagttggagggaggagctcatcagttgaaccgtccttgacctggtgtctgtttggaaagggatgcggcctaagtttaagctccctcccagccaagtgagcggctcctcaacatcgcagggctttgcacactcacctacacttgcagcaggcgggaaagggaaggaagccaccgtccactgccccttattctcctggcacacttggctgattaaggcagtgttcaagctcaggtcgaggctgcagctggtatgggaacaccctcagtccccgaggtccctgccttcccaagcctcagtgaaacagagaaaaggaagccttaaagagcaggtggaagtgcaggagaagctataactcctttttttctctctcccatagattcaccacaacatggcaaatctttttataaggaaaatggtgaaccctctgctctatctcagtcgtcacacg

SEQ ID NO: 9503 - DNA, 789 bp, Artificial sequence
  DNA replication origin
gcagaggaaacgtatattggggatttctgcaacaaagcctagtacaccgactgattttacagcatgcaaatacagcctctaaaaaggcccgttttgcttagagttgacttgggtataaatcccagcttaagctccagcatccagcttttcttttgctgtggtcagagcctgaggaccacgtgactccaagaacaaaacactagagatggatgagtggcggggaagatgataaagaggaggaaaggcatgagaaacaagaatgcacatgaaaacctccggtcccaaagatgtcccagcaaacgtggtggtcagaggcagatttgtcctggagctgataaactccagcggcccgcccggtgttcgccgggtcaggtggaaaaagtgggcgctgcgatgaagcgttggggcctgcagggagcgcggagtggacgcagccacgtctgcaactcacccggacacacacaaaaaggaaggcgaatggagttacgggtagatacctgaaaaggcagggataagcgagctaagggtagaatctaggtggcaagtatatgggtgttcaccgtacagttctttccctttttctctatgtccgaagtttttcataatgttggggaaaacagccgtaaccagttgaaactactgcccgtctccactcgtttcccggagcctgtttacatttctcctgtccacttaaaaacatgtcctctttctcagtttgttttgacattggtatttgccagttttttctaaggcctaagtggttgtaatttctttttcgttgcggatatc

SEQ ID NO: 9504 - DNA, 1150 bp, Artificial sequence
  DNA replication origin
atggtgagagggaaggtgaggcagaaacagcagaaacacatttcccaagccaaagaaaaacccacagatcacagggctcaccaagttcctagcagtattggtgagaaaagacaactaggcatattctggtttaagaaaagaattaagctgtaaactttagagtctagaaaaaagaaaaccttttaagcgcatggatgaaaacaaattgtagtggaaaagtgatcagcgatcaggtatccacctctttgtctttgatgctggaggctggaagagtgaaacattgtccacaatcttcatgcataaccaaagttaaattccttatcctgagaggaagacattcttggatgtgggagagttcagaggtcatcatcctggaccccactggggaagataccttgaggagaaggccttacccagcagacatgatcacagccctcggtgtggggagggaggctgaggcaggagcggctgctagtgggaaccagttcattccagtggcacgctacccagacatgcgtgtgaggccatgctcccgggctgcagggacagtccaatcatgttgcccttggtgctgagttgggaggtctgggagggggagagggaagaaggggatgcaggcatccaggaggtctctgggttgggtgggtggaggtggaaggaggctgaagctccctcttggagtggcgtgaaaacaaaatggagacagatgtgatggagtacattgatgccacctggattcgaaataactgtggcgacatctgtgagctgtccccgtgagggcccagagagggaagagcagcaggccaggaaactgaaaatgtggatgcagaataaccagggatggggagaggtgaaggggtggggccaggggaagggggagagaagggaggagcgaggactcagagccaggagccaggccagcccctgggggagccactggtggagatgaggccccaaagctccaccctgggctacggatgcacccccaccgtctctaatataccacatgcttgtccttcatctgttgggctaccatgctgcttttctttacacgtgttgacatggtgagtgacgttagtcagtcctgcacgttccaaggtggacctgagtgtaggggcaagtcttgcttttaattcccctttaaacactg

SEQ ID NO: 9505 - DNA, 1258 bp, Artificial sequence
  DNA replication origin
aggatgactttctgaaggcgcagcagcgcgagtccccacgtattaatgtttacatgaaaagcactcagggagctacagggtgggtgggaaagactttgcctcatctgaatttcaggcagtttggaagcacactaaaatgcactctattttattaagcaacccacacttgaggggcataattcatccttgaatttcactccacaatacgagtgacttaatgttactgattagaattacaacagggttttatatcaccataaatgcactttgacaatatttgtataaggcacattttattgctcatatctacacgtgttgccaaagtgaaataatttttcggggtagaaaatgcaagccaccacgcccggcccgtgatttataatcttttaatgagaagttttctagcttctaaattccattctagtttaaacacttaccaaaataacagaaaacatgatgccctgataggcaacaagggggaaaaggtgtttctcaccaatacaaacctgtgcatcaccttcagaaatctccactcaggaaaaggcggcaattccagtgaatcaagaaacgtgtttgctatttgcacgtcaaagagcagctgagtcagcccctgtaataatacgaaaatcactgtgcaaatacttcacggccataggaagagcaagatattttaaaactaaaaaccctcctgtctgttgcggtgtgtgctgggggtgagtgggtcgtgaactcaggaccctcctgtctgttgcggtgtgtgctgggggtgagtgggtcgtgaactcaggaccctcctgtctgttgcggtgtgtgttgggggtgggtgggtcgtgaactgaactcaggaccctcctgtctgttgcggtgtgtgctgggggttagtgggtcgtgaactgaactcaggaccctcctgtctgttgcggtgtgtgttgggggtgggtgggtcgtgaactcaggaccctcctgtctgttgcggtgtgtgctgggggtgggtgggtcgtgaactcaggaccctcctgtctgttgcggtgtgtgctgggggtgagtgggtcgtgaactcaggaccctcctgtctgttgcggtgtgtgctgggggtgagtgggtcgtgaactcaggaccctcctgtctgttgcggtgtgtgctgggggtgagtgggtcgtgaactcaggaccctcgtgtctgttgtgatatgtgctgggggtgggtgggtcgtaaacaagtgggaaaaacaggaacaagaaccccagaaaaccaagtg

SEQ ID NO: 9506 - DNA, 956 bp, Artificial sequence
  DNA replication origin
aataagggaaaatgtgctaccctgcccaggaccttgaggctccattgaggcagatgcccacctggccactgtgggtggaaaataaagacctctgctcactcatgtccctttcctgagagcagaaagaagcctgcttctctggagggtgcagaagagatctctgcaggcgaggcgtgtgggatgctctgctgtagacccacggcacaacaggcggctttgtgggctgagccctggcctggatagagggtcaaatcgcagcaggcgccatgtgctggtggctgctcttttcaggacgtgtccccggtggcaggaggaggctgggtgtggagcactctcatgttcactttgctggtaggagcaggctgggtgtggagcactctcgtgttcactttggtggcaggagaagactgggtggggagcacacttgtgagcactttggtgttgggaggaggctgggtgtggagcactctcgttttcactttgctggtaggagaggctgggtggggagtacacttcactttggtggtagaaggaggctgggtggggagcactcttgtgttcactttggtggcaggaggagactgggtggggagtagactcgtgtgcactttggtggtaggaggaggctagatggggagcactcttgtgttcactttggtggtagaagaaggctgcgtggggagcactttcgtgtgcactttggtagtaggaggctgggtggggagcacacttatgttctctttggtggtaggaggaggtgggtggggagcagacttcactttgatggcaggaggaggttggatggggaacactcttgtgttcactttggtgataggaggaagctgcgtggggaacactctcatattcactttggtggtgggaagaggctgggtggggagcactctcctgttcaccctggaggtgggaggaggctgggtggggagcacgctcgtgtt

SEQ ID NO: 9507 - DNA, 959 bp, Artificial sequence
  DNA replication origin
gcagggtccgctgggcccgaatcaaccaggccggccgcagagggatcgggctcttccgcccgccccacgccgccccagcctgtgcggggagccagcggcccgggtttgaggcggagaggccacgtcaagcctgggctcctgttgtctcctcacgcgggaaggtccggagcccactccgaccagcattccccgtggaagtggcggcccctctgggtgggggtccctgagctggtccccaccgtctctcacccggccctgggagcgggggcgtttcccctctgtccttgccccctgcctggcaggcactttggttttcctcctcccttggaaatgctccctctggaacccgcctgcccctggccctgtgctcagcccgggggtgccggcctgggagccaaggtggagccggggtgggctccggaggacggaccgcagaggtgggccgggaggcgctggcgagcacgcagctccctcaggctcgtcccagcctcacgtccggagtcaccgcagcagaatagagtcacacctgggtgtgggctcctggaccttcccgcgtgaggagacaacgggagcccatgttcatcattttgaagaaccacagattttgagtcatgccaggggctccggtgaaaatgtcatgggaagccagccctccgcgtctaacatttcagcttgagggtgaccgggagctctggggtggccctagacctgggaatggactcccaggcgcagtggcaggcatttctcttgctttttctttatgagtaagtggcctggctatccagtgagcagttttcacgattcattttatataagaaaaaaagtaactttctctttatccgtcccctacttttctccatctctccccagttgacctgggctggccatgtccccgtcaatgcagctggttctcaaaggccccactcttccccgcggctccgtttaccaccaacgcgctt

SEQ ID NO: 9508 - DNA, 1511 bp, Artificial sequence
  DNA replication origin
gcctctccgcctcaaacccgggccgctggctccccgcacaggctggggcggcgtggggcgggcggaagagcccgatccctctgcggccggcctggttgattcgggcccagcggaccctgcctggccctggccctggaggccgctgcggcccccacccagctcctcagcagccacatggcgccggccctcacaccccggggcggcgcacagggcctgggcctgacgacgtccttagggtccctgagcagccgggtccccacggccctcggcgacccggggtccccgggatggagcgaggctctgggccttcagcagacgccggggccccagacgcccctgaaccgagctccagagacatccgagcccaggctcctagagaaccgccccccgccgggtgcgtccgagtcagggctcccccgaaggcggggacgtcgggcgagaagcaactgcaaggactcgcgtgaagaagccaccgggaatcatggcggccgcgctcagagggacggctttgcacgcaagctgtatttttcttcaactcctctgtgtttttcagatcttctgtagaagtgtctgtagtgaccatcagaaaaacaatctgaaagaaagacaggaattgccaccgaccccagggctgcatttattgctggacatttgtcacggtctgagccgtgtggaccggccccgctcagccagagccaggagggctacgaggggaggcggggcagggtttggggacgatttctctccgaccgaaggagtaatggggccatcacgtaggcaaggtcaaaggacgatgtggcggttgcagggtgacccgaggtcacgtaggcaaggtcaaaggacgatgtggcggttgcagggtgacccgaggtcacgtagggaaggtcaaaggacgatgtggtggttgcagggtgacccgaggtcacgtaggcaaggtcaaaggacgatgtgggggttgcagggtgacccgaggtcacgtagggaaggtcaaaggacgatgtggcggttgcagggtgacccgaggtcacgtaggcaaggtcaaaggacgatgtggcggttgcagggtgacccgaggtcacgtagggaaggtcaaaggacgatgtggcggttgcagggtgacccgaggtcacgtagggaaggtcaaaggacgatgtgggggttgcagggtgacccgaggtcacgtaggcaaggtcaaaggacgatgtggcggttgcagggtgacccgaggtcacgtagggaaggtcaaaggacgatgtgggggttgcagggtgacccgaggtcacgtagggaaggtcaaaggacgatgtgggggttgcagggtgacccgaggtcatgtaggcaaggtcaaaggacgatgtggcggttgcagggtgacccgaggtcatgtaggcaaggtcaaaggacgatgtgagggttgcagggtgacccgaggccagcagtcctttgcagagtggatgagctttcagtgaggggtgaagtgtggaatgggactcgctgacgaaagcccactc

SEQ ID NO: 9509 - DNA, 936 bp, Artificial sequence
  DNA replication origin
gtgggcaggacctggtctgactcacagcacttgtcaatgatggataaggatgcagtgaagaaacgcatcaaacgatggataaggatgcagtgaagaaacgcatcaaacgatggataaggatgcagtgaagaaacgcatcaaacgatggataaggatgcagtgaagaaacgcatcaaacgatggataaggatgcagtgaagaaacgcatcaaacgatggataaggttgtggtgaagaaacgcagacacaccctcgctctctggaagtttccgtgactgaggttttgggaccaacattgattttaaatacaaggacagcagttttaaggactcagtgtggtgaggactcattggaaataagaaaacgtttgcctactttacagatttttatgttctctaaaataggtctgtttttaaaaaagacattttaaaagggacatgttacattcaatgagggaagaaaatggtaaatgtcagggataattattttgtgcttgaaagcagaagaaaatgaatgatccctgatttcctgaagcatttaaactaaaacagaacagcaccctgctctgtgtaggtgtggagagaagggcatgtgtggacagtgtgtgtgtgtggggagagggtgtgtgggagagggtgtgtggggagagggtgtgtggggagagggtgtgtggggagagggtgtgtgggaagaaggtgtgtggggagagggtttctgtgtgggagagggtgtgtggggagagggtgtgtgggaagaaggtgtgtggggagagggtttctgtgtgggagaggttgtgtgtggagaagggtgtgtggagacggatatgtagtgtggagagagggtgtgtgaggtgccctctcctctagatcaatcctagtgtgtccgatgcttccttccacaggctcccgacacaggtggctaatccggaatcctggtc

SEQ ID NO: 9510 - DNA, 730 bp, Artificial sequence
  DNA replication origin
tggaccatgtccttccttctcggggctccatccagggcctgcaggtgctggtccagcccctgagcagggctgagctgtctctgtccccggcccagcaggcagcagggcagggtgtgccgaggacacaacctccaggctggcaggagcaccagagcatccctgcaggattctggaagcatttccaggaaacccgagccagtcaagcacaccacacaggccctgcctttgtccgcacaccctgccaccccccctaccactacacacacacacacacacacacacacacacacacacacactagtccttgctgaaaccatgccccaggctgtggtgagcggggtggcactgcagatggccccaggcttgagtcttgggggtcaggtaagattttgaccaacagagcaagaggagggaggtcgtccaagggtggggtgtgggcagagcccagagcaggggccaggccacggggggcgggggggtggggggacaaggcttactttaactggagcacagggatgaggggagacaggggccccaagggagtcatgtgggctggagttggggagagcctgtaggtggggttagcatcgacttgcttgcctgtgaaaccgactctgtagtgtagacaattgccatccagtgacagggctggagggagccttaaggagaccctagagcaaaggaaaggcgtctaaggaatgggcagacttggaagggggcctgggccggc

SEQ ID NO: 9511 - DNA, 993 bp, Artificial sequence
  DNA replication origin
gaagtgaaattttcattttgacagtaaacccctcaatttctaaaggctccgcgctccgagagctcgctggcagggggaggctttgcagaaagcccacgtcttagactgaaaagggcaaaagaactcgaattagttgtaatagataaaagggcaaaaataaagagtcaagggtacttgacagtaatagcgaaagtggcgtctcgggggacagcgttgaggcccgaggctggggcgccaggaattttaatgtggccgagggtggctgcccagacgcccccaccccagccctagacaaagccaggcattttccgcaaaaacaaggtttcgccttgcgtcgcagataggcggggtaggggctgcggacactgaaaatcgaggcgtggaccccggccttacgctcccggccgcgggcagcctggcggggctctgcagcccccagtgcgcgcatgggtggcgcaggttggcgggttggacttggtctgggctctgggtccctctcctggggaggacccagggctcctgccgccagccaagcttgctgccctcgggaccccagcccctccccgtggccctggccataggaattccatctcgctggagcccccggatcttggtggaactggctgacaaagctggcttatttgaataagctgcgagattgtgttaaataaagacgtcgggtggggaggcggattcagccacattctaaggggacgcgcaggaaatggcatcccctcgctgggcgcttcccccacacccttcccttggggcacagtccagccggtttgccttaggcgcccccaaacaccctctggctgatcttgtggggtggggaggtgtcaggcaggacaattccgaagtcggagcggggtggggagggggcgtttgcaaagaggtgacacggagggggtgaattttaggtgtctgagtggacgcgccagggaggtcgatgtcagtggggcgggggcgtgacggggaagggtcggggcgggc

SEQ ID NO: 9512 - DNA, 1316 bp, Artificial sequence
  DNA replication origin
cccgtctgtggcccttccccactctggcgccctggacaggcaccaggactccccggtaaccagtctcagaaactgggtggacggggtcttccacgaccccatcctcaggcacagcactttgaaccaggcctgggccaccgccaagggcgccctcctggaccccgggcctctgggacgctcgctgggggcgggcgcgaacgtgctgactgcacccctggcccgcgcctttccgcctgccgtgccccaggacgccccagctgcaggcgccgccagggagctgctcgccctgcccaaggccggcggcaaacccttctgcgcctgaggcgggcgggtcccgagcccaggagggaacccgcgctcaggcggacggcgccgactcttttcactgagtttccagaggaagactagcgcggccaccgcgaagccgccaacccaccggagagggggcttctgaacttggactcctgggaacatggacaagcccggcgctgccacgccggggcctccaccgcctgggcctgagcctgaccgggccattcccaaatttgggacgcggaaggagaggctctcggagcagaagaggccagataccctgaagcataaagtttacgtcaaaagtttacatggagaaggcggttccgttctgaagcgtggtctgctgtcccctgggcgtgaggcctcctgggcctgtcgggcctccgatttcatcctcagcacgtaatgctcaccaacagcacttgcactgagttgactcttgcacactcttgactccataatatgatgctttttaagatgtatgttcacaccaataattgcctgcttcagaggctaatataacaaaaccaataaaaccgagtgatggtgtttgtattgcaaaatgaacacatttaaaaccaggggatttgagaattcccaagggaaagcggtgctaatccgggagggaaggagtggggagcaggaactgacccagactccactccccaaaagcagctggttcaacccaagactttaagccacttttaaaagaactgtcgctgtagagtttgagggttctgctgagctccctaatagaagtgggtgtgagacccagaactcgtacttcccatcacccaactctagaagtttgaaaaaatagggatttctttgattagattttaaactttctaaattcccagagccgtgtcccgggggggggcgtgggagcccatcgttgcttttctctgttagcggcctctgcccatcctaggcaggagttagggcggcctcgacgcctctgccgtctcagccacctcctaacctcggctctcctatttccg

SEQ ID NO: 9513 - DNA, 1383 bp, Artificial sequence
  DNA replication origin
ggtcgtggaagaccccgtccacccagtttctgagactggttaccggggagtcctggtgcctgtccagggcgccagagtggggaagggccacagacggggacgtggcgggcgcggaggacacagccgcaggggccgcgggaccttggcgcttgagcatgcacgacggaaactcagtctggctcagggaggtggcggcggcggcggcggcggtggctgtgtgggccagggaccagatgcgcggcttagcctccaggcctgccgacgcccccgccggcacaaaccccagcttggcctcgcagacctgagggccgccctctgcgcccggcagtggctccggcccggccgccgcgctgcggagacagctccgggccctctccaggtcctcgtccagagcagctccgccacccgcggccagagacatccggagcgcgcctgaggcctccttgaccgggccgtcgggcgcggcggggacgcgctccagaccgccgtccagggagtggaagggcggcttcagctcgcacgccggcggctctgcttccagcgggtcgaagtcgtccaagtcactaagctccagctccttctcctctttgcccacgggctctgcgggagagaatgcgtggccagtggagggagagggttggtaggtgaatcagaccccctgtccccgtccaccattatgaggcctgttcccgacgctacgaaaagcactcggggcctctcttcgcgtctcccatttcctccagaggccaccaggtcacaaactggcaacacaggggcctccaatgggggaggggggtgtctaattttttttttttttgagacggagtctcgctctgtcgcccaggctggagtgcagtggcgcgatctcagctcactgcaaactccgcctccagggttcagggcattctcctgcctcagcctcccgagtagctgggactacaggcgcccgccaccacgcccggctaattttttgtatttttagtagaaacgaggtttcaccgtgttagccaggatggtctcaatctcctgacctcgtgatccgcccgcctctgccttccaaagcgctgggattacaggcgtgagccaccgcgcccggcctactatttttatacgtgatttgagttcctttaaatgctcaggggtcaccaccacagtccccacattggtagcctgaggcagaaccggtttgcacggtgaccgcctaggcatggggctcggcgtttgggacccccaagacgtcctagaaccgcagagaaggcactgtgcctgcactccagggcctcagcccccagtgacaacctcccaacccacctgcgttcttggagctcttgaggggctcctcccgcgcctcctcctcgcccccctcctcctcctcgccctccg

SEQ ID NO: 9514 - DNA, 2736 bp, Artificial sequence
  DNA replication origin
tttttgtatttttagtagaaacgaggtttcaccgtgttagccaggatggtctcaatctcctgacctcgtgatccgcccgcctctgccttccaaagcgctgggattacaggcgtgagccaccgcgcccggcctactatttttatacgtgatttgagttcctttaaatgctcaggggtcaccaccacagtccccacattggtagcctgaggcagaaccggtttgcacggtgaccgcctaggcatggggctcggcgtttgggacccccaagacgtcctagaaccgcagagaaggcactgtgcctgcactccagggcctcagcccccagtgacaacctcccaacccacctgcgttcttggagctcttgaggggctcctcccgcgcctcctcctcgcccccctcctcctcctcgccctccgcgtagggccgcttctcgtctgcgcacttgttccgcggcggccacgtcatcttgttctccttcttgaggcgccggcgcgcgttggcgaaccaggtggagacctgtgtgagggtcatcttggtgatgatggccagcatgatcttctcgcccttggtggggtaggggttcttgcggtgctcctgcagccaggccttgagcgtgctggtggtctcgcgcgtggcgttcttgcgccgcgtgccgctgtccatggttccatacctggagacaggctctgcaatgggctcaggctgggccctctgggccccaggcatcatgggcataggggtgggggtcggccaggggcatgccaggatgggctttgcttccccgtcgtggggttgtggtcatggtcataaggcccaggtaggacccgagccccaaccaggtgccgctgcctgctggcacttgtcttctgtggccaaagggcaaagattatatttgactaaacttacagggagcctgggctccttcccaagccagagaggtccaggccaattcctttatggggatgaccgcctagccgtttgatcctcaaaccataaaaaggtatagacaggtaagcccacaccctgagatgtaacacgtgtggcaggaagggtcattactgcccaggaggagaaagcacccaaggggcctaagtgtaccgtctttggataaatttgtagtggttgcattgaggaaagtggggcatcctgtccaaaagtgggacaggagagaaaggagggccaccaggggttccccactgttcccactgtaggggcagtgtggacactcggaaggaggtgcccagagtctgcagagcgggctgccccgtgaactgggccttccagattcgacttccctgaaagctgccgcacatttaggacttctggggcccaacaacgtgggggacggggagactggggagcattttaaccatggctgtgcaggagcaggtgggacaggaggctggaccccacagaccacagactcaggtcatgcctgacctaagagtgtctctcttcctgcctcccgccttccagaaagggggcatgatggtggaggggagttggtggctgacagtgcagagggcccgtggggctagtgctggttaggaggggtgggtcctcacctgtcataggggtactggcccagagctggctcgtaagggtagtaggcggcagcggctggtgccaggcccccatgcgcagatcccgaaccatccttggaatcaaagctgttctgtgggagccaagagtctggggtcgcagtttccagggaggcaaccccactccagcctctctcctaggagccccccactcccaaaggcttggcaaggattcctgggcagccctacgccccggcaggaaggagctgatttcccgcttgctttaaaacctggtctcgcaaacctgaagtggggatgttctgagttgcagaagcagtgtgtggtggagcgcgggccggtgggggggggcgggggggaggaggtgcagtgtggggagcggggatgtggagtaggaggaagttggagggaagccagaaagaactgggggccggcaatagggggcagctgggagaaggagtggggattgttagggctggggatgccctgggatgcactcaagtggggaggaaaaaggggtggagaaaggggaggggctgctgagcgaggggatggaagccaggaggggagaagggaggagagaaatggggaggcgcaaggcggggggaggagcaagggtgggggaggagcaaggagggggaggaacaaggagggggcgaaagcaggggagagggaggaagagggagataggaaggatgagtcagagaggggctgggaggacaggaagagggaggccaggagcctgaaggaggcggggagaggagaatggggtcagggaatgagggagggaaatctaccaggagggaagaagcgggaaacacacgcagaccgaatctgccagctgatgaggatttagtagggaaccaaaaacaagaaacgcagtggccacctgccgggtcatctgtcccagggggtgggggtggggttctgagggtctcggctgggaggcgcaaagttgaaggcagccaaggtgagcgcctcccctctgtgacagtccggggacccggactggcgcgcctactggggcaaaagtgggcttggcaaatcgagggccaggggcagggcaagggctagggatgccccacttaccagcgagtagaaggcggacgcctccgagccgtaggtcacgtagttgccatagccctgcgatccgccatagggacccccatagacgccc

SEQ ID NO: 9515 - DNA, 1099 bp, Artificial sequence
  DNA replication origin
ccacctcgcctccccgactttcctccccgatcccctttccgccggccgtgctccgccggcttccccctgcccctcgcggctaagccggggactgccgggcggccctgcgcgctcggaagagcaggttcctcaacccaggccccggcccctcccgctaagctcgtccctcccggcgccccgcagggctggctgcgagggagggggcgttgggtgcctggcggaggcgccctcccctgtccattttgcccagctttctgtctggggcgcacggagcaatcggaagaggggaccgagcgcccaccccaggactccctcggccagtaccctccctgggaccttgcccaagttcaaagcggaggccagtgagcaggcggcaagggggcggcaagggggcgcccgggccatcccgaacccgttccccgccttctgcgccatcgccctccgggaccgggactcgccccggttgccctcgccccctgggccggcctcccgtggtaagttgggaaggaagccgtgcaaggcagcgttgtgcagacttgctcagaaagattcctgggttcagacctgtgaatcgccccagggtcaccctctaattaatgatgacgtcctcgccctctccccagctgcaagcctgcctcccagaaacgaaatctgcctgctcttttgacagctcggttgaaggtgattgatgactatctggagaccacagtacacatcatataatatctgctgcgtaattgctttaatttacagatgaaaatacgagttctccgatcgcgttggaccggagcgggccacgtccgagctgcttgcagagggaaaccatcggaaataatgaatagccgctccatgcaaattattcagacagtttagcgtcggtagccgcgagaaatatataaagaacacgagtcaaatgacattaataattgtttctgaattctgtattgatttcgcggcaggccgcgtttctttctttctcacctgaatcgctaatatcaccttcctgtaaataataagaaactagccaccggggtttctcgctagaaatgaatctctcaacccctttccctctcctcctgctcctcccctcccccaccct

SEQ ID NO: 9516 - DNA, 907 bp, Artificial sequence
  DNA replication origin
ccctgcggcctgctccggccctggtcctccgctcttcggagcgctccaggccagcgggagcacctcatctccccgaagctgagccggtgctgtgtactccgggagccggctgacttctggcccacctgctcacgggtgtatttagtaccgggggtccctagagggaggaaggctcagcactccgagtctatgcagacgcgttcagctgatacctgagatgctgagcgtcctatcgttggtgaaagggacactgggtgcctccgctccaggcttggccttttggtgaaggcacttggaaaatattccagtattatctatgggagaagggtggcccagtgagaatccccggtttgggcaggcgggcctaggccaggctacagggtttcagtgagatgtcccggtggtcgccaatccacaggctggattgaccctgtgtcctggaatgagtagtggggcctgggtgaggccgggcgggtcaggaggcctcctgggcagttgcgagcttcccgaggcagggtgactgtgactgggcccggaccccaggcgctggggcctgctggcgggcaggaagtggagcgtgtgtgtgcggcggcctgggaaagccgattcagaggccaggtttctgggtcacggagaaagggtcgcccgctggtggggactggagcgtcgatttatgcacacaggctggaaaggcaaaagagaacaggagaaggtggcggtggtggtcaaaggaagcccccgaaagggcccccacgtactggctgccctgggaagtggaggctgcttctcccagactctgctcagaagatgaatggccgcctgttctggggcttcggctccagttaagccccgccgggtctggaaggaaggaaatgcaccagcctcaggtctgggtgggctgagctgt

SEQ ID NO: 9517 - DNA, 1099 bp, Artificial sequence
  DNA replication origin
gatgcaaataactttttcagagattgtccaagtcaacaaatctcaaatgtcattgcatgaccacagatgacaagaaacaagttcatggttctttgaagtaaaaatgatggaggaggagggtagaataaaggaaggaagcaaatatatgtgaggattgccccaaataccccatggcactgcccaaaaggacatcctccaggtaggagtgaggctgccctgccccgcacatcgccactaatgggggcagcatgggaaccagggggcgcgtctgcagccccagccaggccagtgcctgggagagtggccctctcagggccctagttccttcatcccccaggagccctggggctgcatcatcctccagtcccttctggctctgacctgggcagccggtcacctgctgctccagcttcccttcggggcctgtcttgacctctgcagagcagcggctctgtggatgacaaacagacctgtgcccggctgcgggggcgaggtggcgggggcagggtaggggccccccagctccctgagggaggggcagggcaagctgcacgcaggcgcaccttccctgactgggtcctggcctcaggctgcagaagcggaagaccctccagccctagtctgaccccaggccagaggtccagcccccatgccctcccctaaccctggcggctgggaccaggctccccaccagggcatgccccccttagcccgggcaggtcacagactcattggtcctcgggcggcttatcaccgtggtccattcgcgcccacttgcccgggtcctggtgcccggacctaggctttgcccctgccacagcctgctgttttgagagtgagccggctagggactagcgtgggcaccaggagagaacccagaactgggccgcttagcacggaggggcttgggagaggggcaggggaagaaaggcaggacctgagcgccctgcagccaattccgagggttggctggagcagcagcctcgccctccacaggccttggggggtgggggaggggggaaatactaagacctcggagggaaaccgggccgacgacaagggtggctatttccgggctcttcgcgcccggcccaagcgt

SEQ ID NO: 9518 - DNA, 1139 bp, Artificial sequence
  DNA replication origin
cttggcactctggagggccaggatgtcacccttcagagaccatcttgggggaagttctgggccaagtcttggggcacctccctcccggggcagctctgaggcttctgtggaccccgccccccaccccactctgcccccactgaatgaatcaagggcggagaccgaagctcttactccgaggcaactcagctttacatctggggctccggagccatcacgctccttgctgaggactttgtgcggtggggaagctccatgcagtgaggaccctcgaaaccttccagcctaaagagcccgagctagaagaggcctcagcacatgggggcaggagggctgctccccagacgcagggcggcccccatgcagctcctgctcctgtgtggcctgtcccacccatcccctgctgtcctgactacttgggggcagcagtgggagtgggggtggattctgtcaggcattcagcctgcaggggccagggagggtggaccaaaggcttcacacaccacatgtcagaatagaggttccaggcacagcagagcgtggccacaactctacttccaggccagctctggaaatagaagaacatatggcaggattgcaggacctctgggggtgaggagaatgatgggggacccagaggtgggggtgagagtgatgcggggacccggggggaggtgagagtgatgtggggacccagaatagggaaacccctattctgacatgtggtgtgtgaagcctctggtccacccctccccagtgagagcaatgcggggactcagggggaggtgagggtgatgcggggaccccagggggaggtgacagtgatgtagggacatcaggcagaaaattcagtgactcgcactatgggccactcagccataaatgtgtgccacagagtccaacagggacacagccacagagatccatggaaagaaatgctggcatcttgctctgtggctatacctgcccatccctgacttctaaaggttttgggaggattcacttgtttggagatttgaggcctgcttcactcacctattgctgtgtcctctccacttccactgagtgtcctctcctcaggcccattgggcttcctcacagcatggtggtgtcgggaacccaaacaaggtctgtgacat

SEQ ID NO: 9519 - DNA, 2164 bp, Artificial sequence
  DNA replication origin
aaaagaaaaacctccatgatcgagacttaagcctcagttgctcatttcactcgtcaaacccatagtcgcatcttctgatttatgacaaacttatgtcctagggaccaggggctcctgcagatgcagcatctcaaggaacctggccaatgcggatgtggtgtttgtagaggcgcaggttccattccaacacacgctcaagccctgctgtgcaacgtgagctctcccggcggcacactggctatcccggcccttgactcgtctctgctgtccttcctcttctcaacatgtgtctcccaaaaggatgaaaacactgcttctttttgagagctctcatgtgagacggaaagtgctattgaaagggggacggatccgtgacctgcatgaccagcgttcacccagcacaggacatcacccagtgcatcgctgcgagcggtggcgtggaggggcccatgctcctctgggagaactgggggagaaccgggacccccggaggcagccagagctcggacccctggccatgggggaggagggaaggagggccacacccagaacgccctgaggctgcaagagaggcaggcctggggcattgaaccaggggctgcagtgaagaaaggggagaagtctgagatccaaaatgcaaaaaccacagggaagcagcgggcaggtgctggggccggggctggggcaggcgcaggggcaggggcaggtgcaggggctgggcaggcgcaggggcaagtgcagggacaggctcaggggcggggcaggggcaggtgcaggggctgggcaggcgcaggggcaagtgcagggacaggctcaggggcggggcaggggcaggtgcaggggctgggacaagagcaggggaaggggcaggcgtaggggttggggcaggggctagggcaggggcaggtgcagagacggggacaggagcaggggaaggggaaggcgcaggggttggggcaggggctggggcaggggcaggtgcaggggctgggacaggagcaagggaaggggcaagagcaggggaaggggcaggcacaggggctggggctgtggcaggggcaggggctgtggcattggcaggggctggggcaggcgcacgggctggggcaggcacaggtgcaggctgcctcaccatgcacagctcagggacagaagagaagctgggggttagcagggctggagggcagggctggctgcaggtggttgagagtgggtgggtttagcaggctgtcagcgccaaggcctctgggtccctggtgtccagggctgctcagtccctaggccctaagggcaacaaatgcaccttagaaattactcacttgctggggaaggggaccaggccatgcagccacagaccccaacttacgagtcaccagaaggcacagagctccagggggacccaatgcacaagtcactgagaggccggagcctcagggagaccctgggtcagcgttgcttagtgtcttgtgattccacacagagatgaccccgcactctgtagagaggatcctgacttccagggactctgctcgttgaagtcttaggccccctgacctggaaaaccacccccaggtcttgggaacaacaggagaggaggagccccctgtgctgtgcgactttggaagcaaccccagggtccatccgtcagcctctctaacattcagcccaccaggagctctgggcgtctcacgacggggttagggggactggagagacaactcccactgtccaaaagatggcaactcagagcccccaaggagcagggtctctgccttctgagaggcgccaccccccaatggtgcaatgtgttccctcctgatcccagaatgccactgaggccatggaaggagctgcgtgaatactccgtcagtgtgactaagttgcacgcacaaagtccctagaaatgcggtggccgcagtcccagcaaggccattctgggaagccccggaggagcctaacgctggaattttagggccgggctgcacaggacactcctctgagaccacctggaaatcacagctggagcatggtgggacccgaccccgggggtcagagcccccgcctcccgcagtggaaggcaagatccgatcacaccgtggtgcacactcctgataaaggaaagccattacagggtgctggatttgggactggatattcctgggtt

SEQ ID NO: 9520 - DNA, 2149 bp, Artificial sequence
  DNA replication origin
tgacattttctggtgcagagaatactttgagaagcattgctttaggcctagggagatacacagatatgatacagatattaatacgtaccaaactatgtaaatacatactatgcatgtgtgtgtatgtcatatatacatacatatgtgcacacatgttgtaatgtgtattgacataacttgttaaataaaaaattatcttgtctctggtgaaacatactaaatatccacgtaagttgtgacgggtttaatttcatcagtagatgagcggccgcacatggaagaactttaaaactgtcgtgacttgggtgcattgctatcactcagtaccttctagagactggaagcacgtccttcctggagcactgggccttttcgtgttggagatcttggtgattgactgtatttgcctctctgcctgtggagcccaaaacctgggttttaggctataagtttagtgtttctcaacctgactctgaagaggaagaggcagctgccatctgagttcttccttatgggcttagaagagaatgtttcaggattactatctgtccttgtgagtatgagtgtgagtgtggtgtgtgtatgtgtgtcatgtgtgtcatatgtgttgtgttttgtgcgttgtgtatggtgtgtgtggcatgtgtgttgtatgtgtggtgtgtgtatgtgtggcatgtatgttctgtgttgtgtgcctgtgtggcatgtgtgttgtgtgtgcagcatgtgtgttgtgtgtggtgtgcatgtgtggcatgtgttgtgtgcatgttgtgtgtgacgtgtgttgtgtgtgttgcatgtggcatgtttgttgtgttttgtgtgtgtggtgtgtgttgtgtgtgtctggcatgtgtatgtgttgtgtggggcaagtgtgttgtgtgtgttgtgtgcatggtatgtgtgttctgtgtgtggcatgtgtattgtgtgtggtgtgtgtgacatgtgtggtgtgtgtgtggcatctatgttgagtgtgcatgtggcatgcgtgtgtcattcacattgtgtagcatatgtgttgtgtggcatgggggttgtgatgtgtgtggcgtgtgttgtgcgcctgtgtgtggtgtgtgacatgtgtggtgtgtgctttgtgtcatgtgtgttgtgtgtgatacgtatttggtgtgtggcatgtgtggtgtgtgtggcatgtgtttggtgtgtgacgtggtgtgtgtggtgtgtgctctgtggcatgtgtgttgtgtatgtggcatgtgtggtgtgtcgtgtgttgtgtggcatgtgtggtctctggcatgtgtgttgtgcatgtgtgtggtgtgtgtggcatgtgtgtggcatgtgtagtgtgtgtgcatttggcatgtgtgtcatgtgtgttgtgtgatgtgttggctgtgtgtctggcatgtgtgttgtgtgtagtgtgtgtgtatgtgtgtgacgtgtgctgtgtggcatgtgtgttgtgtgttgtgcactgtgtggcatatgtatttgtgtggtgtgtgcggcatgtgtgtgttgtgtgcgatgtgtgctgtgtggtgtgtatgtggcatgtgtgttgtgtgtgtgacatgtgtgtgctgtgtggcatgtgtgttgtgtgtggtatgtgctgtgtggcatgtgtgttgtgtgtgtcgtgtgtgacgtgtgttgtgtcatatgtgcgtgatgtgtgtgctgtgtgggatgtatgttgtgtatgtgttgtgtgtgtggtgtgtgtttattggtgtgtgtggtgttgctgtgtggtatgttgtgtgtgttgtgtgtggtctgtgctgtgtggcatttgtgttgtgtgtgtgttgtgtgtgtgtgcagcatgtgtgttgtgcgtgtgttgtgctgtgtgctgtgtggcatgtgtgttgtgcgttgtgtgtgttgtgtgctgtgtcgcatgcgtgttgtgtgtgttgtgtgctgtgtggcatgcgtgttgtgtgtgttgtgtgctgtgtggcatgtgtgttgtgtatgtcccagttctctgtcttcaggcggttgggatcccctgtgctggccccgctgtgcaggtgcaggtgtgcagggcggggctgggagctcctggggacatggggacgcccttgaagtccgccctgtgccccgtgaggagtggggttttggggttttgggtttcgcgctg

SEQ ID NO: 9521 - DNA, 1093 bp, Artificial sequence
  DNA replication origin
tccgctgtgtgtgcatcatctgctgtgcgtgtgtcatctgctgtgcatgcctgcgtcatctgctgtgtatgtgtcatctgttgtgcatgcgtgtgtcgtctgctgtgggcgcgtgagtcatctgctctgtgtgcttgtgccgtctgctgtgcctgcgtcatcgtctgctgtgcgtgtgtcatctgtgcgtgtgtcatctgctgtgcgtgagtcatctgctgtgcgtgtgtcatctgtgcgtgtgtcatctgctgtgcgtgcgtgtgccctctactgtgggtgtgttcatcatctgctgtgcgtgcgttgtctgctgtgcgtgcgccgtctgctgtgcgtgcgccgtctgctgtgcgtgcgtcgcctgctgtgcgagtcgtctgctgtgcgtgcgtcgtctgctgtgcgtgagtcgtctgctgtgcgtgcgccgtctgctgtgcgtgcgccgtctgctgtgcgtgcgccgtctgctgtgcgtgcgccgtctgctgtgcgtgagtcgtctgctgtgcgtgtgccgtctgctgtgcgtgagtcgtctgctgtgcgtgtgtcgtttgctgtgcgtgtgccgtctgctgtgcgtgtgtcatcttctgtgtgtgcgtgccgtctgctgtgcatgtgtgcattgtccattgtctgctgtgcatgcatcgtctgctctgcgtgcgtgcgtcatctgctgtgcgtgtgtcatctgctgtgcgtgtgccatctgctgcgggtgcatcatctgctgtgcgtgcgtgtgccatctgtgcctgtgtgcatcgtctgctgtgtgtgtgttgtctgctgtgcatgcatgcgccgtctgctgtgcgtgcatgtgttgtctgttgtgcatgtgtcatctgctgtgcatgcatgcattgtcttctatgggcacaggcgtcatctgctatgggtgtgtgcgtcgtctgctgtgggccgtgcgtcgtctgctgtgcatgcttgtgctgtctgctgtgtgtgtgtgtgcattgtctgcttacgtgcatcgtctgctatgcatttgagcacccttccctccaaggactccagaacgttccacctccacccattcctcatctcctgtgtggcctgt

SEQ ID NO: 9522 - DNA, 1788 bp, Artificial sequence
  DNA replication origin
aatattcaacattcttaaagaaaagaattttcaacccagaatttcatatcctgacaaactaagtttcaaaagtgaaagagaaaaaaaatcctttacagacaagcaaatgctgagagattttgtcaccaccaggcctgccttacaagagctgaaggaagcactaaacatggaaagaaacaaccagtaccagccactgcaaaaacatgccaaattgtaaagaccatcgatgctaggaagaaattgcatcttcctaggaataggattatgtatcatgtattattttccatctggcttctttaactcaaaatgatacgaatgaaattcacccttgcttctgtgcagctccttcctcatgactgttgtggaggtgttgccttgcacaaatgcttcctactgctgatggacatttgacttgtttccagggtggggatactgtgaacactccacccaggagcattctcacacatgtcctctggtaaacacatgcatgaacctctgtggggtgtgcactgagatggggagctgtggggtcatttggtgcgtggatgtctgtggggtgtgcactgagatggggactgtggggtcatttggtggatggatctctgtggggtgtgcactgagatgggagctgcggggtcatttggtgcgtggatctctgtgaggcgtgcactgagatgggggactgcggggtcatttggtgcatggatctctgtggggtgtgcactgagatgggggactgtggggtcatttggtgcgtggatctctgtggggtgtttactgagatggggactgtggggtcgtttggtgcgtggatctctgtggggtgtgcaccgagatggggagctgtggggtcatttggtgcgtggatctctgtggggtgtgcaccaagatggggactgtggggtcatttggtgcgtggatctctgtggggtgtgcactgagatgggggtctgtggggtcatttggtgcatagatctctgtggggtgtgcaccgagacgggggactgtggggtcatttggtacgtggatgtctgtggggtgtgcactgagatggggactgtggggtcatttggtggatggatctctgtggggtgtgcactgagatgggagctgcggggtcatttggtgcgtggatctctgtggggcgtgcactgagatgggggactgtggggtcatttggtgcgtggatctctgtggggtgtgcactgagatggggactgtggggttgtttggtgcgtggatctctgtggggtgtgcaccgagatggggagctgtggggtcatttggtgcgtggatctctgtggggtgtgcaccaagatggggactgtggggtcatttggtgcgtggatctctgtggggtgtgcactgagatgggggtctgtggggtcatttggtgcatagatctctgtggggtgtgcaccgagacgggggactgtggggtcatttggtgagtggatctctgtggggtgtgcaccgacatggggagctgcagagtcatttggtgcatgcacattcaggttcacttttctaaggtggttatgagaatttatctctcaccggtcgtgggttctggtcccagttaatacctccccagtcctcgataggggaatctttttttgtttgtgtttttcttgagcctcgctggtgggcatgcagcaagtcctatttgtatgtttggtttttttttagcacactcacaaagactaatgagactgcacaccttttcacctatttattggccctcttggggagcatcttttattaagagcctgctcagtcatttgccgg

SEQ ID NO: 9523 - DNA, 865 bp, Artificial sequence
  DNA replication origin
caacagggacgacaggacactggcctctctcacatgccaagaggaggcgtcactgccccaagggtgctgaagaggtgcaggctgctgaccaggtcccgaatccgagtgaccaggacgtggctccacctggaggtccccagaggctctgggctgtggcctgaaggaggctctcagcttcctcccctgaagaatcacccacattggtgcttttggttcctgtcatctgccagggcccctcgaggccaggtgtcacttttggtgactctggaaccgtccacgccagcccagagtgggcagctcagccccaccagcccccgcatcgccttctctgcctcccacagctgcttctgcttccagtgagcacttctcagtggagtctccaagcaccaagagcttctcccaccagggaagagaaatactctggacatgccggagggtgtgtgcgagtgtggtgtgtgtgtgcgcatgtgtgtgttcaggtaagtgtatgtgtttgcatgtgtgagagtgtagcatgtgtgtgcatgtgtgtgatcaggtgcgttgtgtgtgcttgtgtgtgtggcatgtgtgtgcatgtgttctggtgtgtgtgcgtgtgtttcagtgtgcctgtgtgtgtggtgtgtgcatgtgtgtgttccagtatatgtgtgtgtgagcatggagcatgtgcctgtgttctggtgtgcgtggcatgtgtgtatccatatgtgtgttccggtgtgtgtgtgtgcacttgtgtgtgagtgtggtgtgtgtgttctggtgtgtgtgcacttgtgtacgtgtgagtgtggcatgtgtgttcaggtgtgtgtgtgtgtggcatgcgtatgcatgtctgtgttctggtgtgtgtgtg

SEQ ID NO: 9524 - DNA, 1818 bp, Artificial sequence
  DNA replication origin
cctcgccgagcggttcctctgctctcggctggactctcctgcgctatgggcagactcgggttggctggggctggctgacctcagtggagctggcctgtctgctgtgtcagatcgctcatccccctgctcttctggtcttgctcatgggaccgcagagcacagggactctcggctgcattctgctggccaaagcaggttgcaagcccgccctggtagaagggctggggagaaagaattcacctctccctgggcggcaatgggacgtcacagggcccagggtgtgagcacagcatggagggaaggcttgttggccattccacagtgaccctaacacacgttccatggcgacacaggagtttcccttcccaggttgacttgagcagagcatcaaaacggtactgacggttgaggtccccaaagcggagagaacatgccaaggtccacattccaaagcaggcactagagcccttgtgtggggcaggaaaggggcatttcaggtgccgaagccctgtgtggggcaggaaagtggcatttcaggtgccggagccctgtgtggggcaggaaaggggcatttcaggtgctggagcccttgtgtggggcaggaaagggacatttcaggggctggagcccttgtgtggggcaagaaaggggcgtttcaggcactagagcccttgtgtggggcaggaaaggggcatttcaggtgccggagcccttgtgtggggcaggaaaggggcatttcaggggctggagcccttgtgtggggcaagaaaggggcgtttcaggcactagagcccttgtgtggggcaggaaaggggcatttcaggtgccagagcccttgtgtggggcaggaaaggggcatttcaggtgccagagcccttgtgtggggcaggaaaggggcatttcaggtgctagagcccttgtgtgggggcaggaaaggggcgtttcaggcactagagcccttgtgtgggacaggaaaggggtatttcaggcaccagagcccttgtgtggggcaggaaagggacatttcaggtgctggagccctatatggggcaggaaaggggcgtttcaggcactagagcccttgtgtggggcaggaaaggggcatttcaggtgccggagcccttgtgcggggcaggaaaggggcatttcaggtgccggagcccttgtgtggggcaggaaaggggcgtttcaggtgctggagccctgtgtggggcaggaaaggggcatttcaggtgccggagccctatgttgggcaggaaaggggtgtttcaggtgccggagccctgtgtggggcaggaaaggggcatttcaggtgctagagccctgtgtggggcaggaaaggggcatttcccagccctctctagggcacagcgggatgcggtgtgaaggagtgcggaagagaattgagaggtggtttcctagaggatcggagggctgctggcatttctgccacactctctccatggggtgggggctttaccctcagctgaagccgagtgagaagacgcaagggccccctgggtagccgtttgggtctggagcacgacgcacagctgggtcgagtacctctcgctggcagactgctagtggcactggaacttccttgaggtgaggctcagaggctgctccctagggggccagggacactcttggggagctgggctgcggctgtctgggagcggccacgggctgccatcctgggagaagacgggtgtgagacgcgttccagaacctgggagtgaggttcaaatgggggaatcggcaggaagccgcccagctgaagatcagtagcgtgaccgctggctcacctctgtgcct

SEQ ID NO: 9525 - DNA, 1534 bp, Artificial sequence
  DNA replication origin
catgggtggaaaagcgtcactctcattaatgcctatgagttcctaattgtgctaaaacaatcacaaccatcagcatcaaccttcagaggttgctagggaaccagctcattattcaaaaatctgctgcataaaaggtaagaaaactgagcatttatcttgccttccctaagggacaaagcccttcagagcatccatgtaatcgatgcatgtataatattgggcaaagggaagaggctattgccagatccgggaggctgtgggttctagcagcagacttccaagacaccccaaggaatggggcagaaaatggctctggacatgcccatgccccttcatgccacgtttcttgaggagctctgatatgaagtggaagagggtggggattcccaggaccgtgcctgaagagccctgcattttaagggggtggagcagagggagcagcccaggggagcagcaggaggacacgccaggtaggatgggtggtgaaggcagggacaggcagggcttgcaggaggaaggcaggctggctggctgggagacccaggaagcccacaggatgagatgaagctgtagcagcagctggagtattgggggctgtcctgatggaaggtgggtgggatacaggttgcagtggcctgggggtaaggggaagggaagagcatctgtgatgtggggaagcagctgggatggtggaatgtggctccagggagagtagctttaaatcttgattcaatgcgagagaccacagtgcactttgtaaggtggaccctgtgagggagtgttgggaggagggcccaggaggggcaggccaaggggagggcagtcagctgctgctcctcagcaggaaggaggggggtcaactcccacgggtgtagacttgggtgttgggggtggatctgtgctctggtggattctacttcgtctgtgctgtagagacaattttccaacatcggtctcgttcctgagagttataagagagttggaaaagtcagaggctgacaatggaggggacatttctgagtaacttttgctaaaggtgagagagcgagatgcccagacagacagtaagcttgcagggtgatggatacaggtggggagactgggcgggggacctttctatcttcagagctttgctgcttaaggcacaggctcagaagaggaagaagacggcctgccctgctggcactttcccaggatggggggaaaggcatggaggcgtgtgtgaaggtgctcgcagggatggaccatggactccaagcccagtgtgaggctgtgggatgggacatggctggagactgtgtcccatgaacggggagcctgctgcagctcagtgtggagcaaatgcactgaggagctgagggtggggaacctttccacgggtgacagattcgccccaatagcgggaggtaaatagggcggtgggcgccaggaggctgaaggatgtgctgaccgtgctattctctctgtcacctctgttggtgcttattaactgaaaaacacatttgtgtgggcagggaaaatgttaatggatctg

SEQ ID NO: 9526 - DNA, 2321 bp, Artificial sequence
  DNA replication origin
tgtaatcccagctacttgggaggctaagacaggaaaatcactggaacctgggaggcagaggtagcagggagcctagattgcactccattctgggtgacagagcaagagtccatctcaaaaaaaaaaaaaaaagtcattgagaagattctaggagctgagccttggtggcactggggctgagaaacaggtgcagtggtgatgtggggacccaggtgagagttgagaaggtggcgtttggagggatggttcagcgggagtgggctgagcctcatcagggaagagacatagaaggatgtggttctgcggacatggcgtgtggaataggagacacagtcaaggccaactccagctgacttggggcacgcacatgctctgcaggggtagttcctctcatcctctcaccaagaaaactcagcaccagaaagagaagaggtttgtggaaaagacaacaagtttactctgggatgtgttaatgcaatgggctgcatgtgttcacccctccccaaatccatgtgttgaaatccgaatccccaacatgatggtgaggaggtggaggctctgggaagtgattaggtcatgatggtgaggaggtggaggatctggaagtgatcaggtcctgatggtgaggaggtggaggatctggaagtgattaggtggtgatggtgaggaggtggaggatctggaagtgattaggtcgtgatggtgaggaggtggaggatctgggaagtgattaggtcgtgatggtgaggaggtggaggatctggaagtgattaggtcgtgatggcgaggaggtggaggatctgggaagtgattaggtcgtgatggtgaggaggtggaggatctgggaagtgattaggtcgtgatggtgaggaggtggaggctctgggaagtgattaggtagtgatggtgaggagatggaggatctggaagtgattagctcatgatggtgaggaagtagaggatctggaagtgattaggtcgtgatggtgaggaggtggaggatctggaagtgattaggtcgtgatggtgaggaggtggaggctctgggaagtgattaggtcgtgacggtgaggaggtggaggatctggaagtgattaggtcgtgatggtgaggaggtggaggctctgggaagtgattaggtcgtgatggtgaggaggtggaggatctggaagtgattaggtggtgatggtgaggaggtggaggatctggaagtgattaggtcgtgatggtgaggaggttgaggatctggaagtgattaggtcgtgatggtgaggaggtggaggatctggaagtgattaggtcgtgatggtgaggaggtggaggatctggaagtgattaggtcgtgatggtgaggaggtggaggatctggaagtgattaggtcgtgatggtgaggaggtggaggatctggaagtgattatgtcgtgatggtgaggaggtggaggatctggaagtgattatgtcgtgatggtgacgaggtggaggatctggaagtgattaggtcgtgatggtcaggaggtggaggatctgggaagtgattaggtcgtgatcgtgagtaggtggaggatccgggaagtgcttaggtcgtgatggtgaggaggtggaggacctgggaagtgattaggtcgtgatggtgaggaggtggaggatctgggaagtgattaggtcgtgatggtgaggaggtggaggatctggaagtgattaggtcgtgatggtgaggaggtggaggatctggaagtgattaggtcgtgatggtgaggaggtggaggatctggaagtgattaggtcgtgatggtgagtaggtggaggatccgggaagtgattaggtcgtgacggtgaggaggtggaggatccgggaagtgattaggtcgtgatggtgaggaggtggaggatccgggaagtgattaggtcgtgatggtgaggaggtggaggatctggaagtgattaggtcgtgatggtgaggaggtggaggatctggaagtgattaggtcgtgatggtgaggaggtggaggatctggaagtgattaggtcgtgatggtgaggaggtggaggatctggaaatgattaggtcatgatggtgaggaggtggaggctctggacgtgattaggtcgtgatggtgaggaggtggaggatctggaagtgattaggtcgtgatggtgaggaggtggaggatctggaattgattaggtcgttttggtgacaaggtggaggatctggaagtgattaggtcgtgatggtgaggaggtggaggatctggaagtgattaggtcgtgacggtgaggaggtggaggatctggaagtgattaggtcgtcagggtgcag

SEQ ID NO: 9527 - DNA, 1503 bp, Artificial sequence
  DNA replication origin
aggaatggatggaaaaggggaaaaaatattctaaacttttttctgtctctgagaattgggcaactattaaaaactcctggtgtgggctggtccggaggtcatgggttctctcagccggctgctatccgtcagctacagatccaactccttgttctattccccgctctcctcactactgtacttggctggtctataaaacaaccaacgcaccaaacaaaactctagtttccacatcgtctttttgcttgagtttgggacattcaggaaggctgacaggtgggtgttgaacctctcactcacacgggctgggtggactttgtggcaggcctccatgtcccctctcccctttgccctggcagttccctggtgggcccacatctgtcccgggttagggttagggcttgggttagggttaggggttaggggttagggttggggttagggcttgggttagggttaggggttaggggtttggggttagggttggggttaagggttaggggtttggggtagggttggggttaagggttaggggtttggggttagggttggggttaagggtcaggggttagggttaggggagcacaggaacagctccactccaggacaccaggaacaatcccccaactcttcacaacccatgaatcaccgcctcctattccagtactgaatttctccacccactttgttccctaaatcaccttgatgagctcgttagagcaggaggaacatcgggtgatggtttgacagaaggcaagaaaaaagcctcatctctaccctttacttagggtgaaaccagcagggagtgtgatgagaaaggatgagggggtatggagagggggcagtagaagctggcggagggggtactccagcttgcagcagagcccacaacaggctgtcactatgggggacatctagggcagggccagcccctcttatgggttgctgagggtccaggaggtgtgagcctctagcccggggcagaggaaggaaagtccagaggccagcaggggccttagcctggcttatgcagggagggacacctcggctagatgggcaccccaacggagcctgaagctaagggcactgctggtcatctctggacgccacttgccgtggtcccacctggggcttcaggctgaagggctggccttggtgcaccctgaaaagatggaggtggggttgggccaccaacaggcagtgagagcaggcggccctgggacctgggggcttccaggggcagccctagcgagctgacccacactcctctgtggtttgcagcttgcgtttccgtgctggaaggtgctggaaggtgctggaaggtgctggaaggaaggatgccatcctgagatgcaagacaggccccgcagggccactggggagaaatgggcacggggttcgcctcgcccaccctgggtcacaggatgggttccagccccatttcagcaacccgggtgcttgttttgaatcagcctcctggactttcgccatgaaatcagcggg

SEQ ID NO: 9528 - DNA, 1131 bp, Artificial sequence
  DNA replication origin
ggtaacttggaggaaagggcatggcgagacagatgaaatgtttgttttgctcatcaatgtatcctcagtcctggaacagggtggttgagagcaggtactccatgaatactcattggatgactagatggatgaataggtgggtagatgaatggatgggtggatagacagatgggtggatggatggatgaatagatgaatggatgggtgggcaagtgggtgggtgaatggatgggtggttggtgtgtgaattaatggatggatggatggtgggtggatggatgggtggatgtgtgggtggatgaatggataaatggatggatgggtgggtggaaggatggacggtggataggtagataggtgaatggatggatggatgggtggatagatggatagatgtgtgaataagtggatgggtggatggtgaatggatgagtgtatggatagagggatgaatgggtataatgatgggtgaatggatgggtgggtgggtggatgaatggatggatgttgaatggatcagtgggtggatgaatggatgggtggatgaatggatggattatgaatggatcagtgggtggatgaatggatggatggatggtagatggatgggtggataggtgaacggatggataggtggacggatgagtggatggatggatgaatgggtagatgtgtgggtgaatggatatatggatggatgtgtggatggatggatggtgaatgcatagatgggtggaggtgtgggtagatgggtgagtgaatggatgggtggatgaatgtgtggatggatatgtggatgcatggatggacagatagatgggttggtggatgagtgggtgaatggatgggtgaatggatggatggatggatggatggatggatggatggatggatgggtagacgaatagatcaaccaatcaatggataaatattacacaccctaaactcaaatttgccagaaaaattgcatacaagagctattccatctctcacttctcatctgaagtccttgtgtcctcctgactagacttcatatgcacaacacaagcaccactctcagaccttgactaatcattaggtatgatttaaaaatccatgcaatcagccatgaccacagagtccttcatataa

SEQ ID NO: 9529 - DNA, 1915 bp, Artificial sequence
  DNA replication origin
ttcttgtatgcatctaattagacacaaagaccgccaggtctattacaaacctggggactctgagtgttcatcaagggtcaggaggcagacccctgtggccttcaatgcccatttgcaccactcctaatttctttgtgttataaatagatacacccttcctgattctgattataattcctgtgcatgagaggaatgggcacctccagctcctgaaagaactgatccttccgcattcctcaaggggtgagctgggagggcacctctctctttcctcctgtcctcttcacattgcagacagaattttttaactacctattcccctggaaagaggacatgtgtgggtgtgttacaggtaaaccaaagattctatggcttggtagaagtttctgcataggtgggtgattgagtaggtggtaaatggatagatgaatgaatggacagatgggtggtggatgaatagatgggtggatgggtgggggagtgagtgggtgggtgagtgagtggttgggtgggtaggtgggtggatgggtgggttattgaatagatgggtggatgtgtgggtgagtggatggatgggcagatggatgggtggataaacagcaggtgaatgagaagacgagtggatgtgtggatgagtgggatgggtgaatgtgtgggtggatggatggatagatggacaggtaggtggagtgtgggtggatgtttaaatggattgatgtgtgggaggatgaatgggtaagtagatggatagaagggtgggtagatgactgaataagtgagtgtgtggatggatagatgggtagatgagcagatgggtgggtaggtggtggatgggcaggggatgggtgggcggatggacgagtgggcagggaggcaggtggttgggtggatgagtggatgagtagatgagtggacaggtggatgggtgggtgagtggatgagtgggtggctgagcaggtggatggatgggcaggtggatgggtggatgggtggagaagaggatgggtgggtggtgaatgagtgggtgggtgggcaggtggatgggtgggtgagtggatgagtgggcaggtggatgagtgggtgagtggatgagtgagagagtagatgaatgggcaggtggatgggtgggtgggtgagtggacaggtagatgggtgggtaggtggatgagtggacaggtgggcaggtggatgggtgggtgaatgggtgggtgggtggacgattgatgggtgggtgggtagatgagtgggtgagtgggtaagtggatgcgtgggtaggtggatgagtggattagtgggtgggtggacaagtggatgggtgggtgagcggaagagcaggtaggtgggcaaatggatgggtgggtgagtggatgagtgagagagtagatgagtgggcaggtggatgggtgggtgagtggacaggtggatgggtgggtaggtggatgagtggacaggtgggcaggtgaatgggtgggtggacaagtggatgggtaggtgggtggatggacaagtggataggtgggtgggtgggtggatgagtgggtggatgggtgggtaagtggatgagcaggtaggtgggcaagtggatgggtgggtgagtggatgagcaggtaggtgggcaggtgggtgggtggacaagtggataagtgggtgggtggataagtgagtggttggacaaatggatgggtgggtgggtggatgactgggtgggtgggtgagtggatgagtggatgggtggatgagtgggtgggtagacaagtggatgggtgggtgagtggatgagtgggcaggtgggcaggtggatgggctgggtggatgagtggatgaatgggagagtggagctgctggttctgtgacttccttcagcatccttgcacaaaggagcatcagccatggagccctgcctctgctacgatga

SEQ ID NO: 9530 - DNA, 1337 bp, Artificial sequence
  DNA replication origin
aaataaacaatgagcagagagaaatctgcaagtggaaaatcacgtgaatgtcccaacagtgaacgtctagaactctataaaatgcaattaaattacacaaactataattaacttgccatctcctgcagccttatttaaaagagcattgctataaaaagcttccgatacctgcactaaaggaaggtgaggcacggcttgcccactgcttttctctcctattctgcagaactttctagttcctaaggttaacgaatctacttagcccacagaggcctgaggggcaagaactaggtcctgacactgcccgtgtcacagggaaatgacctccagtgaaacaaggtccccacgactgctccttggctctgagattactggccgaggagggttttttctatgatgggggctgaagtccaccatgaggcatgccttccagccgggcgtctattccagcatgttgtgtggggtgcccgttatcctatgagtcgggtcttgtttagggaactgggtccacacagggaaggagcataaaggcctctgtccttctatcgcttacggaagcagcagcgggatcctcggagggagagaaggcagagctggggtgggaaggcagggcaggggggtggcatggagacgggggtcaagggcagaaggtcattggaggtgacatttgagtgaagggtggaaggaggtgagaaaataagtcatggtgacacctgtagagtgaggtcctggggaggcagggagggcaggtgcaaaggtcctgctgtgggcatgtgcctgggccaccccaggagcaaacctgggcactgcggctgggccaaggagaacaaggccaaggatgaggggagcacccagagcgaggggaggctcaggcagggccagaagttgtcagtctcctagtaaggtagagaccatgggacgtgtcagcagaaggagggggccagagggcatcgtgttgagcctgtttgccttctgattgaagagcaagagctttgccgctgtgttgagaatggctgtgaactggaaggaggggaccagggcggaggccacaggaggttgtccaggtgagagggggtgtggcttgggccagggcgatggtgtggagaaggagctggtctggggtaatttgaagggagagacggcagggccttccatgtcctcagtgccagtgggtacaagaaagatgagacaaggatgacacccaggcttgacctgagtacctggaagagccggtgaccgccatctctccggatggaatgaaggaggaacaggtcctggaggagtcggtaaccctcatgtctctctggagggactgaagaagaagcaggtcctggaag

SEQ ID NO: 9531 - DNA, 1147 bp, Artificial sequence
  DNA replication origin
acctggtgtaggataaagcaagtgagaatttatgttgatgtcactccagctgggatttgcagcataaaaggaagaaaaacaaagataatacaaacaaggttaaaaaatgatttcgccaaatttgaatcggaaatgagaataaactcatgataatatcttttgaagatttacatcatgccttagttctgaagaggtagcaaggagctgccctggccctgaattgagctgtgtgagagccagaggcccccaaaaaggacaagtcggggggttgcttcccagcaggtgcagggaaggctcctctgtgctaagagagtgactgccaagaagacagggcaagcatgggtggcctcggagcaggtggacagtctctgcagaggttccaccttctcgggagtacaggaagcaaggccatcagctgagagcaggaggggtaggcaggcgtgggaggagaaggtatgaaaccatcctctaggccctgcggcttggggtaggggagaaggggttgggttgatggagtgaggtgcaggctgcattgccaagagaaccccaggctcagagaagatggtcctcctggaagctggagctatcagcacgattgtgtccagggtctagtacacagacttggagcaggcattttgggtgtgtgctgggagggagctcacatcgagaacagcatcaatgaggtgatgggggctggggcaaggggcagtgagccgacgggagtgtccatgaattgaagaacccagtggggctgcagctttggagctgagggtcctgagggcatgaacagagaaaggacgagcaggtggttggtgagtggagaccacgagtggttcccgatttcttaggaccacaggggtgagtgctgagtggggtgggagggtctcgggaggagagaagggtcatgggccccattgttggaatcacaggaccaggctggagagatgggcagtccgggcctcttgtgtcagtgcaggccaagcctgtcatgacatagatgctaacgggagcaaagcctgagtgtggtaaagtggaggcagacagatgggaatgaaagcataggatggaaatcctcagaaaaagagaaagaattataaaaatccaggactctcaagtcccaggctatgccagcctccatcccatgaat

SEQ ID NO: 9532 - DNA, 1184 bp, Artificial sequence
  DNA replication origin
cggacttggagcacacagaaatcagcattcaccttgcaaggcccgattctctgggcagcacaaagcccgtgtgccttggcccacactgggaaaaggttggcctcctaattgaaggcattagaaacaaccacatcttcattgaatgccaatgtgcaaagtgactctagggactgaacaaggcgtggcgcattgtctccttgcaggaggagctatactggcctaagggactaggctgacagggatcagggctggagggggagcctctgagtgggccttcagggagccctcagcaagtggcgatgggtgctggatgttcctgtagaaggagccacgtgggagccacgggttctgtgccttggctgctgtccagagttgtgcatggccaggtcctgggaagaaccccagtggcctggggacccgggctggcattggatgtcaggggtgagggtgcatggggaggccatgggagaggagcactctgcagtgaacctgaacctggggcaggtggtgcatgctcactgggctggactggcactgagaacaggaaacagatgccaccttgagctgcctgggagtggagtggcagcctgaggacaggtctggagacatctaggctttccacagtcaagggtggaagccctaggtgcgagggcaggggcagtgctgcagaacagcagaggtcccagctgcctctcaaacccactcagtccctacacccagggcacagcccccacgggaacctatgactccctggagccccacagtgaggacgtgcgggcagctcggccacactcacctgggcatctggctgggaccccaaacgtgcagatggttgtgaagatggcagaaaaatgtgctgtccaaacatgtagggcagtgatggcccttgtggcgaagactccctctggatagaacagggcagtccttaccttttcgggtgatttgaggagacgatgcaggagaatgatccaatgcttgaggacaaggaggaatgccaggcaagccttccacctttgtttgcttcctcctgccgcctggggaagaagtctaagcactcggcccaaggggaacgaagggacgtgttgggtctttggtgggtaggtttgtccccaggtgactgtaggggctcggccgggggcagtggtcatcggggagtgggttccagccagcattggggtcggatg

SEQ ID NO: 9533 - DNA, 973 bp, Artificial sequence
  DNA replication origin
ccagcaggggcgacggatgccaaggtggctcctcctggacatacagggttctcccgagtgaggctcctgcgcagaggcctcaaagcccaactacctctttagaacaggcattgggcaactccattccaaaatcaaggcctgggctcccctgggctctgcagggctcccctgggccaggctggggagaggcaagcagagggagagtgtggtctgcagggtctgcggccttcacttccaggagagaggggcagggctcagaggccctgtctgctgtggagctgctcccctcctagcgtggggagttgcacatgcggaggagcatcccctcggcaggtggatgtggaattagcacccaaggcctgcagctaacatgcagtgggcagccctgcagccggaaagctggcccagcacagcacgcttctgtgcagggatctgagacgtcctgggaaggggtgagcaggggatgctggaacagccaaaccaggcgctcctggaacatctcgggcaagagtgcaacaataggaatgtgacccagagatgaggatgcggctcattatgggtttctggggaggtgggagctctgacgggtgtgagggaatgggatgcagggttactgttggtgtctggtgaggtgtgagctgtgctgggagtgaggggagggtggtgcagggtcattgtgggtatctggggaggtgtgagttgttgggtcttaggggaaggtggtacaggctcagtgtgtgtgtctagagaggtgtaagctgggataagagtgaggggatggtggtgcaggttcactgtgtgtctaaagaggtgtgagctggaatgagagtgaggggatatggtggtgcaggctcactgtgggtgtctagagaagtgtgagctgtgacgggagggaggggatggtggtgcaggctcactgtgggtgcctggggaggtgtgagcttggaatgggaacgtggaaaccaggagcaag

SEQ ID NO: 9534 - DNA, 2421 bp, Artificial sequence
  DNA replication origin
cgcgcgcagggtgaacaaagcagcgccgcagagcgccgggaaaccgaaagcgcccggcccgggttcaggacgatcgcggggtccggcggcgacggcggcgggggttcagggcccccgggaccaggggaggtgccgagcgcccgggttcctgccacagccagccttcctctcctccccggtccccccggtctctcctgtttcgggtcctgcctgcacaccgtatttctgctgcgctcggcggcagagctcgaaagccccaggccggcctgcccagcgcttttccaccgctctggcggcagcgttcggtcggcgcgagccgtgtagccccgatctgcggccccagcgcccaggcgggcagtggacaccgacgggaccccaggccgtacccccggcaccgccgcccccaggacccgcactgagaacgacgtacgcggctgccttgcaggcgacacctcgggggacgccccttgggcgcacggagcgagggccggcgggctcggggtgggttgccgcggtgtctgcaccgctccccgcgggcccctggtctgggaagtttgttctcttcttcagggagcttatgcgacaagccggatttcacaggccctacaaagcgcgttgagtcccctcgaagctctcggcgccaccagaacccgctggagggctgcctggaggtggtgatggatccaaggggacacagcggagtcagcggccgggatggaggcgacggagagcacgtctggtcgcctgagtcccatcccacagtaggcctacccggcagcctggggagtcagaagagggtctccagccacagccattacctcgctccttcctctccccggcctcggcgtccaggcccattggcttcaccctccgcgacctctggcggccctgactggggctctgggagcgggtagttcaggtggagggtctctggagccacacacctggcctcccgcaggtggggagacggtcccggaggcacaggaggagggaggcccaagcgtgcggctgggggtggtgagggtcagatggggaggggtgggtgctttgtaacctttggggtcctgggccctgtgatgagccccatcctttctgccattggactcggggtcactgtacagccctggtggagagagggtgaaggcttccctgggaacagcccactgagccccagaggccaggggaccaaagaggcggccgggaggacaactcggcccaagcggggaacaggggggcgaatcaggctccttggtacccaggatgacgttagtttatttaaataggaggccatggcccgtccaggtttattctccctggctctcaagcaatggaaaaacaatttgttttataatgctaatgtaatactcaactcctcaaataaaagtgcccttcatgataatgggcccagatataaacagaagcggctgagagggcccaacctgcttcttccaggcaggcctgtgaccgggagggggctgagtccaagcccagaggagagagacagtttgtttaaaatttctatggagctggactgttttataaaggaaggggctgagttaaggcatgctttgaaagaagacaaacagactttgcaggagctagaccctcaaatgagttatattttaaacaatttactgactttatgatctttaagcagaagcaaataacacattcaggtgcacagccgatgcaccccaactttccagtgcaaacaaggccgggaggagtgggaggagacctgtcagcaggcaggacaggtgggctgtgggctgcagggggtgggcagggggacacccccaggccaggggttcccttaacctggctgttactttgacgtcaggaaaagcccctggtgaaaaacttctctggtgggtgaagatcagtgatggcccgaaatcatctcggtgttctgaagcctaggaaagctgttggcctggcaccggggccacttcctacaagaactggcagcctcaggcggaatgtttgagggcaggtaatgactactacgggtagacatgagatggagtacgatgggtgaacacccaggcatggtccacagccctgtctttggacagttgccctacaggacaggcaggagatggggctggggaagtgggtgctcaccatcgactcctgtgatcttggtggagaggacagcactcgagacctgctagtggggctcatctgagtgggccaaatgactgcccctgaaagcccatctcttccatgtgccaccgggccccacgtagcaggctctgcagagggcttcttgttagttagatgaagccaaggaaggccagcgggcacagaaacatgtccagggtctgcctgtctccgccctctgtcctcgccagtcctgtcacttctctgaacctctgaacactgagctctttcctttctcagctgacctgaacagactga

SEQ ID NO: 9535 - DNA, 1262 bp, Artificial sequence
  DNA replication origin
gacgccccagggcagccggacgtctccgggcgcgccgccccccgccagcaagcccaagctgtggtcgctggccgagatcgccacgtcggacctcaagcagccgagcctgggcccgggctgcgggccaccggggctgcccgcggccgccgcgccggcctcaaccggggcaccgccaggaggctcgccctaccctgcctcgccgctgctgggccgccccctctactacacgtcgcccttctacggcaactacacaaactacgggaacttgaacgcggcgctgcagggccagggtctcctgcggtacaactctgcggccgcggcccccggcgaggccctgcacaccgcgccaaaggcggccagcgacgcgggcaaggcgggcgcgcacccgctcgagtcccactaccggtccccgggcggcggctacgagcccaagaaaggtaggcggcccgcggccggcggcgcccgggaggggagggagagccagccccggggaggcggagcgcccgggagacccgagggagggtccgggaagaagatccagggggccactcctgggacccagaattagcagagtgagggcggagggcgagatggaagccaaagaaggtgtggccctctttttagacttgccctgttattatttatttttacttaatttactgttattttgactattactatcgtggctgtcttagtttcggcaaacccagattgccacgaaattcaaattacagcgtgtcgccctaatgagcctgggtgtgtttcggtgtcttgttaaggagtcagagttgaatccgcttttctgccgttggctagaggcaaacagaacgttccagttactctcagaggcgttttgtcttcaaaagataaaatcaaatgttttttccgctttttgttgttgtcgttgttcggaaagaaaaccgttttttcccctgtgctatgttgcctgtgttgctcctaagtcaggctacccgaaagaggagttcaaggggggaagttaagaactagggaccatcaccaaaagtcgtctcagatagcggccctggagacagtcggtttcccaaactgctgtttgcctgggagtggaggatggtgggtgcacggtggtctgcgcagccagcaggctgtggggtcggttctgactaactgcccactcccctgacagatgccagcgagggctgcaccgtggttggcgggggcgtccagccctacctatagaagggccgagcacagcaatgcaagtaagtgggcaccctggtgct

SEQ ID NO: 9536 - DNA, 1271 bp, Artificial sequence
  DNA replication origin
cggcactgggccctccccacgggacccctcacctcgcccccacccggccacgtgacaggcggagcctgacctccccgggaagggcccgaggaatcgctcgctcaaatcccggcgaccccagggcaatgtggtgcggctggggctccggcccggacctggggtgtccggcgggcaacgtcctccccgccttagctctgcgccccgcctgggaagaaagcgccccgagaccttgcgccggccgctgcccgctcaccttcgtcctctgccgaggtctccgtgccctcctgcgccttgtcgggactctcgtccttgcttctggtagcgtcgccctcgtcctcgtcctcatcttcgcttttgtttctcggggcccaggtcatcttgttctccttcttgaggcgccggcgcgcgttggcgaaccaggtggagacctgggtgagggtcatcttggtgatgatggctagcatgatcttctcgcccttggtggggtaggggttcttgcggtgctcgttgagccaggccttgagagtggccgtggcgtcccgcgtggcgttcttgcggtacgcggggtcgttgagctggtacgggtaggccgcgctgccgtacgggtggtagctgatggcgccggtcatgccggtggtgtgcgcgtcgtagggtgcgccctggaaccaacaagagcctgtgagtggagtatgcggagaccccgcgggcaaccagccagaggatgccacccctccgcccgcccacggccaccgttccccccgtgagtctggctctggggctgcgcttcccgccgcaaaagagcaggaaaaacgcagtgtgattcgggaccagctgttgatcacaaaaagtaccggagttttattctcgaatttctgaactatttcactttcctaaaatgacccatcttcccctaagtgttccggagccgctcgtggcaatgtacacaaacccttgcacgtgcgcgcacacaggcccacaggtagctctttgatatctaaatttctgcagatgcttggagtgcggctgcctccccctactccctcttcccctcccttatatggttaaaaaaacaccccagagcccccaattcactattcactgctctaaagctgggcaaatccaatttgcaactcagaagccagtcaccgtttcgaattcttcaaatacgccgtaattagcattttaattcatcctttaacgtttaaattcgaggcatttgcagccttcgccaaggccccagcgactcggtcgctgcccagaaattccgccga

SEQ ID NO: 9537 - DNA, 663 bp, Artificial sequence
  DNA replication origin
aggagtcccgcgtcccgcccgcgcccggttaccatgtaggacgggaagccggcggcggcggcggcggcgtcggccgagtactgcagcgggctcccgaagccggtggccgcctgcgccgtgaaggccgccgagcccgggtaggggctgaacgccgagcccgacgccgagcgcgccagctcctcgctgcgcggagccgccaaagccgacgcgccgtaggccgggcacgagtagagcgccagcgagccgggcgcctggtacaggtagccctgcgggtaggacatggtgggcgcggggcgcggggcccgcgtcacgccgagcagcgggcagggcgcgcggcgccctccatccacgcccggccggggcgcggcgcggcggcgggcacccggacggccggcggaggcaggccggcccgggtactagcctgggcggcccgcgggccggggcggcggcggggtggcggtggcggcggcagcagcgcggagccggtgggcgcagccgcgcgccaggccggcggtcggggtttgggggagtctggagtcgggagtgaggagttgaggaaggagcgctcgagtttccgagggacattggaacgcgcagctgtccatcacgcgctcatctgcatattcgggggcccgcccctcccctgctccgcccgctgcagcc

SEQ ID NO: 9538 - DNA, 1363 bp, Artificial sequence
  DNA replication origin
gaggaaggagcgctcgagtttccgagggacattggaacgcgcagctgtccatcacgcgctcatctgcatattcgggggcccgcccctcccctgctccgcccgctgcagcctccgggccgcggccgggggaggggcagagagacgggagggaggcgggggagggcggaggcgacggaggcgggcggcgggagggaccggcaggcttttgtggcgcagccgcctctctagcagctccggccccagcccgcggctcgcggacctgcagcccagcccggccgcgctgcgtgccccggcgcgcacccctcccactcccatccactcggagccacgtcccctgcccggctccggccggctcccaccgtccccggccaccgtcttcgcccctgcccggcccccgccccttccagccactaccccgcccccacccccttctccaccctcacggactaggcagaggccgcccgcggtcaggccaggccgggtccaattaggggactcacagcctgccccgctgtgcaccccgaggaggcccggcccctgtgtccaatccggaagtcgcagggaagtggggaggtcaggatggtggcgcccgcggctcgggtcttcctccgggcagtgcgcgcggctctcacttccacggtcccggacctgctctgcctcctggcccgaggctccccgcgtggcctcgcgtctggtcgcctacccctcgcggtccactccgcccagcatggacctggatccggggcgccttggttgcgaattgccaggagggccctgaggtgagctttctgcccccaaatccgcagcgcaacccccggggccctgaacgttacgactttccactgttgggaatgacgccagggcttcagctaagaagacgccgtcccctaaagagttttattttattttgtttttctaagttgactcctctttcagatttgtgttgtcaaaacactggggggatgattgttacctgacaaaccgcctctggcaggacctgaagcctcccagtcacgtcgagaacgggcaggagctcaggttggcgccgccggtgcagtgggcattacaggtagctcaggtgacgcgcggctggagtaggggggcggttgccttgcggggctcagaagcgaggcggttggcgagggttcctaggaccccagcttcctagaaccctctccccatcacgcttctccaacccttttccactcggggatggccgaagagggcgtctggctgcccactccgaagggtcacctatggggggcgctcagggggatggaagagtgtcaggtctgtgctggcctattgggagcacccacccagcaggtgcctctatcctcggaagccgtctcgggtgggtgcg

SEQ ID NO: 9539 - DNA, 1378 bp, Artificial sequence
  DNA replication origin
ccccacgaccttgtctctgctctccccccagcagcaggtgagaagaaaaagaggctcctggatgtggccttgccaccatgtgggtttccagcatgagcctggccatcacctctccagcgtctccccagggcttctgactccacgtggatatggccagctttgcagtctatactcccttttcaacaggcagctgtccagcacacagctgcccagcactcacctgcccaccacacacctgtccagcacccacctgcccagcactctctcacctgcccagcacccaagtgctcagcactctcacctgcctagcactcactcatgtgcccagcactcacctgctgagcactcactcacttgtccagcactcactcacctgcccagcacccaagtgctcagcattcactcaactgcccagcacccactcaccagcccagcacccacctgcccagcactcaccagcccagcacttaccagcccagcatccacctgcccagcactcaccagcccagcatccacccgcccagcactcaccagcccagcactcacctgcttgtctcctaacgcaggcctttcaggtcactagctggtggtctcatcctcaccaaactgcaatcctgggtagctctggtgtgtgatgtgtgtggtgtgtatgatgtgtgcatttgtgtggtttgtgatgtgtgtgtcatgtgtgtggtgtgtatgtgtgtttatctgtgtatatggatgtgtctatgtgtttgtgtctctgtgtgtgtgcctgtgtgtctgtgtctgtgtgtgtctgtgtatgcctgcatgtgtctgtgtctatgtttgtgtctgtgtatgtatctgtgtgcatgtgtgtgtatgtgtatgtgtgtgtgcctgtatgctgtgtatgtgcctgtgtatgtgtctgtgtgtgtctgtgtgtctgcgtgcatgcctgtatggtatatatgtatgtgcccgtgtgtgtgtgtgtgcatgcctgtgtgatgtgtgtctgtgtgtgtgagtgtctgcatgagtgtctctgtgtgtgtgcatgcctgtatggtgtgtgtctgtttatgtgtgagtgtctgcgtgtgtgtctgtgtgtgtgtgtgcatgcttgtatggtgtgtgtctgtgtatgtgtgagtgtctgtgtgtgcgcacctgtacggtgtgtgtgtctgtgtgtgtgcatgtatggtgtgtgtctgtgcatgtgagagtgtgtgtgtctgtgtgtgtgtgcatgcctgtatggtatgtgtctgtgtatgtgtgtctgtgtatatgtgtgtatgtgcatgccttatggtgtgtgtctgtgtgtgtgtgtgtctgtgtgagtgtgtgtgtctgtgtgtgcatgcctgtatggtgtgtgtctgtgtgtgtg

SEQ ID NO: 9540 - DNA, 1328 bp, Artificial sequence
  DNA replication origin
caagacaaattcgagataaaggagggagagatgaagtcaagacagcctgactgccttggctgagctccgctgcggtgcggaccatggctggcctattcatgtccagggcccagggccaaccttctgtcacctctgttgtcctatgtcaaactttccggaaacaaggcccaagaaagcagataatcaataatgagatcaggagatgttatcagaagaaaaacagggccccctgctttgtttgtgggaggttgttttgcccaggctgcttgtcagtgagtgagtggggcgcgcagagcatgatggagtgggcagagatgaggctgggaggggagtgaggggaggggagaggaaggggggggaggggagaggggacaagagcaggggaaaggaggggaggggaggggagaggaagggaagaaaggaggggaggggaggggggagaggaagggagaggagatgaggggagcggaggggagaggaggggaggagaagcaagagaaagcagagggaagggtaagggaggggagggagagcagagggagaggggaggggctggggagccagtcacacagagtcaaggggaaaatgcagccctgtggccccctcaccttccccttccatcccaggggcacctcgagccacttctctgagtggcttcatttctttggtgtcctttctcggacaggttattgagagtttcagaggctgtggcaagtctgacttgggactctgcggggaagggacccagcctcctcagtttggcctcccctccaccacatggcagggggcgaaactgtcccccatatcaggcagacacacttctatggaacaacacttctgcatggttttggggacgcccatgcctcctcagaggactctaggcacacaccctcagttacaggacatctgctgcagccctgcctcgctcatggggagttagaccccactcctctgataggtgagcttctgtaggaaacacagcacctgctctttgtctatagaacaatgggcgcaggcacacctctgcctgataacaagctcacccacttccactatatgacagtaggagcacccgtctcctctgtgtggtaacaggtacacctgatcatcctctgcagaacagtgcaacccccgcctctccactgggacattgggcttacacaggacccctgcggataagcacaccacatggcctttgggtcatcaagcacgtgcctctgccacgtgatgtgggtttcctgctcctcctctgtacggcagtggtgcacacacttcccatctaggaccctaggtgcacccacacggcgctcacatgtgacaatggacac

SEQ ID NO: 9541 - DNA, 1179 bp, Artificial sequence
  DNA replication origin
caagcaactgcaatattgtaccataagaacaagggcagcgggcttatcactgctaccgagaaagcctgtgtcatggtgcgtctgttccatatttcagcgatcccagaaatcttcatgaaagaaggggcagccatcttgggaaccaaaagatgttgtacctcttagtggagagaaagtgtggggaggagaaaagctgctgctgccaggcgaacccagaggtgtgggggaaggctaaaccccgagaaacaagatgaaatcagcatgttcagatgctgggctggggagtgggggatgcgggacaagctgtccagacgtccagacaaaccaaaagctgtggaggaggctgaactctagggaataggatgaaatgagcacgctcatatgctgggctggggaggcccgggatggggaatgtgggacaagatgtccagatgtccagacaaacccagaggtgtgggggaggctgaaccccaaggaaccagatgaagtgagcatgctcagacactgggctggggggatatgggacaggacattaggttgcagggtgagccagaggcaatgcatgaagagggttgggtgaccccttagggttgggattctgtgcaaagaacaaaaggagacccagagagagctgcagcaggatcacatgtgccactgagcacaatcaccctgactgtcatggagaaaggattggaagcagtaaaacagtacagggagagggaactcagacgcgggttcagggacccaagttaaatgggtgggccccggaccagggtggggatggaggaaaatggacaacctgggggacactccccatgaggtcaccatgacctagtggttgctgtgctgggggagaggtttatgctttggatggccagatagggagtgggagagaaatcgcatgttaggggtgggagaatgtgtggatactgagagtgaaggtttgagtgcttcaaatttgtgatattggtgtgacatctgagaagaggtggctgaaagacagctggctctgcaagtttggagctccaacgagacagcagcaatggtagaagctctgggatccttggggtgtgtgtggcgtctgactccaggaagaaagaacagatcacagtgggagtctgggaatgaggaggcctgagcagaccttccgacctcgcactcggctgcctcacactgcac

SEQ ID NO: 9542 - DNA, 1430 bp, Artificial sequence
  DNA replication origin
acttgcagggaatttggtggagatagagatgccatctctccgacacccctaacaagctgccatatgtgtcaccatcattggcacccatggccttaacttttacaaatttcctctcctggtgccacaggccctccaagccccctcttcctttttctttctgcaacttgaacaccacttataggagcaaagtggagattcagctttgagtgagggagagaaggcacagaataattcctggtccaggggtcttccagccaaattcctggctaacagctacctgagaaaagttctctgaccaagtgggagtgtcagaaatgtcaaaggagtaatacttatctggcttttcacgtgtgcatgtgtgtgtgttatgtgtggctgtaggcttctgcaagtatgtgtgcgcgtgtgggtatgagaatgtgtgtgtgcattgtgagtgtgtgtgtagatgtgtgtatgggtgtgcatgcatgtgggaggatgaatgcaggcataggtgtgtgcacttgcgtgtaattgtgtgtgcacatatgtatatatgtgtggaggtgggtgtggaatgtgtgtgcatgtgggagggttatgcaggcataggtatgtgcactgaggtttaagtgtgtgtgcacacgtgtatgtgtgtgtagatgggcgtacaggtgtgtgtgtgcatttgggtgtaggtgtgtgcacgtgagtgtaggtgtgtatgtgtagaggatgcatgtctgtgtagatgtgtgcatgggtgtgtgtgcatatgggggtgtgtgtatgtgcgtacgtgtgcgtgtgtgtgtagatacatggatgggcgtgtgtccctgcggaagtgtgtgtgggcataggtgtgtgcatttggtagtagctgtgtatgtgcacatgtgtatgtgtgtgtacagaagcatggatgggtgtgtgtgcatgtgggagggtgcatgtaggcataggtgtgtggacttgagtgcagttgtgaaggtgcacaggtgtctatgtgtgtgcacatgggtgtacaggtggtgtgtatgtgggagaatgttcaggtgtaggtgtgtgcacttggaaataggtgtgtatgtgcacaggagtgcacgtgtgtataggtgtgtgcatgcgtgtgtgtatgtgagtgggtgcatgtaggcataggtgtgtgcatgtctgcacttgggtatagaggtgtgtgtgcatgggtgcgtgtgtgtgtgtgtgtgcgtgcatgactgtgcctgggtatattgcctgtgtgtggtgtgcatgtgtgtgtgagtgtgtgtgcgtggagaagcagagttcctaaaagtccatgggaagggagggcttgaggcatcgcagaaggaagggtgccgaggggcagtacccaggtggaggaaggtggtgctgactcttcagttttggggagcgagacatccctgtgagaaggtgtccccctg

SEQ ID NO: 9543 - DNA, 1087 bp, Artificial sequence
  DNA replication origin
tcctggtgttgcaagattggccttagatgagagggaaaggagcacaaagaaacttgcacaattctgaaagggtccggtgtgtcagcccctgcagggcaatgacaatggccttagtccgggccctcggagaagcaggtgctaaaatcaagatattttctgatgttatcaggagaaatgctcacagagccaggaatggcttcaagaaccccagaccaccatgcaagtctgaccccaaatgaaggagggaggggaggaaggagggagaggatgaaggagggaggggaggaaggagggagaggatgaaggagggagaggatgaaggagggaggggaggaaggagggggggatgaaggagggagaggatgaaggagggaggggaggaaggagggagaggatgaaggagggaggggaggaaggagggagaggatgaaggagggaggggaggaaggagggagaggatgaaggagggaggggaggaaggagggaggggaggaaggagggaggggaggaaggagggagggcaggaaggagggagaggatgaaggagggaggggaggaaggagggagaggatgaaggagggaggggaggaaggagggaggggatggagggcgggcaggaaggaaggttagcagatgcgtcaaagagaccatcttcaggtgtcccaggcctgcgtctgcctcagtgtccgtgccctgccaagtcttgagctgagagtagcccggggttaggacggcctcagcagcaagacagtggtggggttcagactttggtaccaagagccccgggcagcttgaccccacccttggatcctgcatggagcctcctcaccatgccacagcgtcatgtttgctgggcttggtagagtgttgggcacacgtggacttcctgagatggtgcagtgcagaagcgggggtgggacccacacggttcttacgcggccctgcagggcaacaggggaagcttcctcccatcttgaagttccttcctttccctgatctgacttttttgttgggcaaaggccaaggccttcctcctgctatcaactcaatggcactgacacaatgcccagagccaccctgagcctcc

SEQ ID NO: 9544 - DNA, 1036 bp, Artificial sequence
  DNA replication origin
taggatgcacctggcaagggcctttgcttctaaaagtccttctcttcatagctccatcaatactggctgccttagcacgctcttcttccctcctcagggtggacgccaacataggactgcagccctcatcagttttaatgggaaaaacagacacaggtttgtggtgtccccaaagcctgagttccgtattcggattcccacagtggaggcttcagccagcctcgtgtcaaacaaggagacgagataattagggttcttgggaagcaggagcacacccatattctcagcaaactggttattaaggatcttgtaattggttgttaaacccacaggatattttaatgatgaaatcaatcaccggctttatgggttttctttggaagaggtcacacccactcaggactgtgccacaaccagcaggctcacctcacagcaccctgggggtggtcctgcctgtgtgtatccctgtgtgcgcccgtgcgtgtctgtgcccgtgtgtgcgcctgtgtgtgtctgtgcctgtgttcatgtgtgtgcgcctgtgcgtgtctgtgcctgtgtgtgcacctgtgtgtgtctgtgcctgtgtgtgcacctgtgcgtgtctgtgcccgtgtgtgcgcctgtgtgtgtctgtgcctgtgtgtccacctgtgcgtgtctgtgcccgtgtgtgcgcctgtgcatgtctgtgcctgtgtgtgcacctgtgggtgtctgtgcctgtgttcatgtgtgtgcgcctgtgtgtgtctgtgcctgtgtgtccgcctgtgcgtgtctgtgcctgtgtgtccgcctgtgcgtgtctgtgcctgtgttcatgtgtgtgcgcctgtgcgtgtctgtgcccgtgtgtgcacctgtgcgtgtctgtgcccgtgtgtgcgcctgtgcgtgtctgtgcccatgtgtgcgcctgtgcatgtctgtgcctgtgttcatgtgtgtgctcatgggcctatctgtaggtgagtaaaggcaggaggaggaggagaaatgagacttccaggtgaggacacaaagactctttccc

SEQ ID NO: 9545 - DNA, 2772 bp, Artificial sequence
  DNA replication origin
aataaagcccacattaagaaagatgaagttaatcatgacgttggaggggctccttcatcacggcctcacacccactgtcactggctcccaccatgagcacctaaagaccgtcgtgagccctgcaataggaatcagtagctcggaaactgaagtgctgggcagggattcgctaggtgtaaatcacatcttttgagatctttggagtttttggttcacactcctggttcccgtcttacacagagtagcagggagagccagggctcagcggttgcgggactatctcccggcacggaaggtgcaaggtcctggctttccacgtgtccctcggagaccccctggagccaggagcaggtgattaggcaccctggaagtcggaggctcaggggtagccagggagcacctcatgaggggcgggatgggcagacttcaccacattctcatgtttgaaccaggacagttttgcttcctgcggagctgtgagcaggccaggagtgggagctctttctgtggagagggcctcacatggactcaggtattcagggttgaggaggtgggcagtgtgtgtgtgtgtgtgtgtgagagtgcgtgcgtgtgtgcacgtgtgtacgcacacttatgtgtgtgcatgtgcacacctctgcatgtgtatgtgtgtggggtgtaagcatttatgtgtatatttgtgtatgtgtgatatgtgtgtgtgatgtgtgtaccccatccatgagcagagtgtgctgtgtgagtgtatatgtgtgtggtgtctgtgtgcatgtgtggtatatgtggtgtgtatctgtgatgtgtgtggtatatgtgttatgtatgggtgatgtataatgcgtgtgtatctatggtgtgtgttcaatgtatgtgtgatatgtggtatgtggggtgtgtatgggtgtgtggtacaagagatttgatatgtgtggtgtgtgatgttagtttgtgggtcatgtgtggtgtgtgtggtatgagcctgtgctatgcgatgtgtgttatatgtagttgtggtgcgtgatgtgtggtttattgtgtatggtgtgagtggtgtggtatgtgtggtgtgtgatgtgtgccatgtggtatatgatgtgtgacatgtgtgagtgtgtgtgatgtatggggtgtcagtgtgtggtgcatgtggtgtgtgatgtgcctggcatgttttatcttagtgtgtggtatgtgtgatgtgagcctgtggtatgtgatatgtgttatgggcagtatgctgtgtgtgctgtgtggcatgtatagtgaatagtgaatgcgttatctgtggtgggtgatgtgtgatgtgtgtggttgtatgggtgtgtgatgtatgatgtcagtgtggtgtgtgatgtgtgtggtatgagcctgtggtatatgatgtgtattatgtgcggtatctggtgtatgatgtgtggtatgattgtgtggtatttgtggtgtgtggtgtgtaatgtgtgtgttgtgtgtgtggcgtgggaggtacatagtttgtggtgtgtggagtgtgttgtgtgtgtgcgtggtgtgtgatgtatgtggtgtgtgatgtgtggtgtgtggtatgagttgggtggtatctgtagtgtgtgttgtgtgtgtggaatgtgatatatgtggtgtgctgtgtgtggtatgagttgagtggtatctgtggtgtgtgatatgtgttgtgtctgtggcatgtgatgtatgtagtgtgtgttgtgtgttttgtgtgtgatgtatatggtatgtggtgtgtggtgtttgatacgagtagtttggtatctgtggtgtgtgatgtgtgtgtctgtttagcgtgttatgtatgtggtgtgtgttttgtggtgtgtgttatgagttgtgtggtatctgtggtgtgtgatgtgtgttgtgtgcgtggtgtgtgatgcaggtggtgtgtgatgtgtggcgtgtggtatgagttgtgtggtatctgtggtgtgtgatgtgtgtgttgtgtgtgtggtgtgtgatgcaggtggtgtgtgatgtgtggcgtgtggtatgagttgtgtggtgtctgtagtgtgtgatgtgtgtgtggtgtattgtgtatgtggtgtgtgatgtgtggcgtgtggtatgagttgtgtggtatctgtggtgtgtgatgtgtgtgttgtgtggtatctgtggtgtgagatgcacgtggtgtgtgatgtgtggcatgtggtatgagttgtgtggtatctgtggtgtgtgatgtgtgtgttgtgtggtatctgtggtgtgtgatgcacttggtgtgtggggtgtggcgtgtggtatgagttgtgtggaatctgtggtgtgtcatgtgtgtgtggtgtattgtgtatgtggtgtgtgatgtgtggcgtgtggtatgagttgtgtggtgtctgtggtgtgtgatgtgtgtgtggtgtattgtgtatgtggtgtgtgatgtgtggcgtgtggtatgagttgtgtggtgtctgtggtgtgtgatatgcggtgtattgtgtatgtggtgtgtgatgtgtggcgtgtggtaggagttgtgtggtatctgtggtgtgtgatgtgtgtgttgtgtgtgtggtgtgtgatgcacttggtgtgtggggtgtggcgtgtggtatgagttgtgtggtatctgtggtgtgtgatgcacgtggtgtgtggggtgtggcgtgtggtatgagttgtgtggaatctgtggtgtgtcatgtgtgtgtgcaaagcttcagtttaccagtcggtagggtggcatgaggtccccctgtttacggggcttcttgaatttgggatgggaggagg

SEQ ID NO: 9546 - DNA, 2893 bp, Artificial sequence
  DNA replication origin
ttttttttgagacggagcctccctctgtcacccagcctggaatgcagtggcgcaatgtgggctcactacaacctccgcctcccgggttcaagcgattctcctgcctcagcctcccaagtagctggtactacaggcacataccaccaggtccagctaatttttgtattttaatagagacggggtttcaccatgttgtccaggctgctctcaaactcctgacctcaagtgatccacccacctcagcctcccaaagtaacgggattacaggcgtgagccaacacgcttgacctcaattgcgctattttcttacaaaaagcccggagtttggtggtgaatgatctcacacttcatttatttacatttacccaaagagcctctccactggtgcagagtctgacgaaggtgcagggcatgattctccgtccactggtgcagagtctgacgaaggtgcagggcatgagtctccgtccactggtgcagagtctgacgaaggtgcagggcatgattctccgtggcactcggggaggcatgtttttccagcattgccccaccttgctgggacctattgccccactgcactccatgcacactgctggtgatggaagtcctggccatctgtggcactggccatgatgtaggagagctgaggggagcagccacaggcagacggacctcagacccagctacagcaaggggctcttccagtccaagtccccttttctcatgtggtcaagagccaacctggcctccaaaatatggcggctcccagggatctgcccaacctctgtcgtacatgaatagtttccttgagcctaaggacatgccatgtaatccagatgatgggacaaacatggtgctgaaatctgttggattccctctccatgatctcattagctgcccatctttaaggaagttgatgtaattgatgaggagtgagacacagagtgctgaacttgggcccctcactgggaaactgagagaggatcttgcctcggccttgtgggcccattttgatgtttaaggatctctaccccaccaaaggtgtctggcagttactccaagaagagatgggaagcatgcagcctacccaccttccttgccagaaggggtaagaatggtaactggtcacccaccaggctctctcgtctcctaggccttcaggcttcaagggtggaaagtgctccttctgtaacagcagctgcatccggccctccagggatcccccaccagtgtccacacgtttctggttgattttctcagggttcctttactggcctgactctgccgggctgcttcccactcctgggcatcagcgcatctcagcatgtcacgttcactggctgaagccagggctttgcaagggggtttgagagacaggatggtgagacctgtggagggagcaccagaaaatggcacgaggggccgcaggcactcagctcttcagcatcgactctggcgaaggctacgtgttccacagtcattatgaaaaggtttgctgtctttgaggcaggacggattcagccttacacatggacatgcacacacacacaaacacacacacacaaatacatgtgcgtgcacacaaacacacactaaatacccataagaaaagccagctatgccagctcacctttgctgagaatgaagaagggcaccttgatatgcaatagtttaagtgaaaattcttaggagctcaaattgctagtgatatatactgtttttttcatttataagtaaacctattctattgtttacaaaaatgctctgatgtgcgggagcaaaggctttatttttcaagagggctcttctggagctgagcagtatgttggggtggctggggaggctggggtggctgggaagatgagtggctggggagactggggtggccagagaggctggggaggctggggtggctggagaggctggagaggccagggtgactgactggggtggctggggaggccggggaggctggggtggctggagaggctagagaggccagggtgactgactggggtggctggggagaccggggaggctggggaggctggagatgccagggtgactagggtggctggggaggctggggaggcgggggaggctggggtagctagggtggctgggaaggctgggtgacgggggtggctggggaggctggggtggctggggaggccagggtgactggggtggctggggaggccagggaggctggggtgactggggaggccggggaggctggggtggctggggaggccggggtgactggggtggctggggaggccggggaggctggggtggctggggaggccggggaggctggggtggctagagaggctggagaggcccaggtgactggggaggctggggaggctggggtgactagggtggctggggaggctggggaggctagggtgggcctatctttctcttgccctagcagcttgagcagttttgggagggagtatcctgaacagccttggtgggaggagtcatctacacatcccacaaccccaaaccacagctcattgcagctactaccaaccctcctgcatgctgcatgagcaccagggatttttctcattaatctttccaagaaatttaagtcctcctaccctcaagtttttgtaattctgtttataggcaggtaaagggaagcctgggatggtcaggagagttgtccaacaactccttattttcattctcaatgttcgcctggtctgctttgtcccgccctggccacggaggggctctaccctggtcaactctgacttcccaataatctaaaatcctcttgaacttcttaatctcttgctcttaaagttattgacacctggagttggttttctttattttctataatttgagcagaagaaaagtaccaccgggttgatgg

SEQ ID NO: 9547 - DNA, 1496 bp, Artificial sequence
  DNA replication origin
ctttttgtaaagagtcttccagggtcctaaaactgaaatattcttggtgtgtgttctaaacataaaacagactcgtctcttaaaagttctccccaaaaccccaaatgactgacttcttagaggacactgttgctgtcttctcactctctggaatgcgggtggaagaggggagccatatgaaggagaggtccagtgaggaggtgaagggagatgttcacagggagatgctaagcaaacacctatttgaacactaggaaagaattaagttcatgaacccaaccatctccaatgagtttctgtaatttctctgccaacctcctcagagaaggaaagaatgaaaatgtgaaagattgagttagagccagcttgtgagaccagggcaactgaagcaagcccctccctcctggacacctgagacctcccaggggcatggaaactttagccatcagccaggaccactcagaggccaagaggacgggcaacggaggatgacatggccaggtggtgggatcatggaagggggactacacctgtgggcaggtgatgggctcacggggggatggcggggagagtacacttgtgggcaggtgatggggtcatggggagatggtgggagagtacacctgcgggcaggggatggggtcacaggggttggtggggagagtacaactgcgggcaggggatggggtcacaggggaatggtagggagagtacacctgtgggcaggggatggggtcaaggggggatggtaggagtgtacacctgtgggcaggtgatggggacatggggggatggtggggagaatacacctgagggcaggtgatggggtcacagggggattgtgggcagaatacagctgtgggcaggtggtggggtcatggggggatggtggggagaatacacctgtgggcaggtgattgggtcacggggggatgatggggagagcacacctgtgggcaggtgatggggtcacagggggatggtgggcagaatacagctgtgggcaggtggtggggtcatggggggatggtggggagaatacacctgagggcaggtgatggggtcacagggggatggtgggcagaatacagctgtgggcaggtggtggggtcacggggcgatggtgggagagtatacctgtgggcaggtagtggggtcatggggagatggtgaggagtgtacacctgtaagcaggtgacggggtcacgggatgaacctatagtgcgaccccagctcctcaagcagcccagactacatgagccctagactgcagaagcacaatttctggactcctccagccagttcatcagtcaaagctacaattaatcatatgggattttcagtggaccctttaaaaggtcctttaaaggaaatgggtcagcacatgtgatttaaaataacagtttatacatttacaacgtacttaccgcaggccaagcattagcatctcatgtcatcttcaccatgatcctggaggaaggtaattcctggtgggc

SEQ ID NO: 9548 - DNA, 1257 bp, Artificial sequence
  DNA replication origin
gggtctgagctggggttaacagatttctgaaaatttcattgcgtgacagcctgtcctgcataatcccctcagctgtctcatgttccggggcagaaatgatcttatgtgtcactctaatagtctagaattacacttgtatcactgtcgccggcatatggggctgtgtatacccctaggcccagctccctctctttcatggcttttaaaatgatagcatttggcaaagccagctccgacagaaagtgcactctttccagggcggtgacaaaggggccaccagaggcctgaccgcagcggccaatcgcggcgctcttgaccgggtaatgagaggggctcctcgtcttaataacgcccagtgccgcaggagagagccggcctccacttaattatacagtcctcatcttaagtgctctggccacccggggcttcagctgtgcaggcccgctcgggggcctccctcccccaccaaacatattgatcgctggacagtcgatggggcctggagggctcaaggtagataatgcagaggaagcaatccccttgctcagccacttggagaggagggagagagagaggccgggtgggggcaagacaggagagagggaaagagacagagagagagggagagagacagggagagagagagagagacagagagggggagagacagagacgatgatagagacagggagagggaaagagagacagagagagggagagagacagagatgatggtagagatagggaaagagacagggagagggaaagagacagggagaaagggagggagacagagatagagggagagagatagggaaaaagggagagagagggagagggggagaaaaacaaagagagggagagagacagcgagagggagagagagagataatgatgatagagaaagggagagggagagagacagggagacagaaagagaaggagacagacaggaagggggagagacacagagacaaagggggagagagaaaaataggggaagagagagaagaggagatggggagagaagggtgtagagagacagagatgtgggggaagagggaggaacagaaagggagagagaaagacaggaatagaaagaaaagaggagagagacagagagagacagagagaaagggagagcgagagagtgagagaggggcagagaggcagagaggtgggatgggggttagagtgagcgtgccagggctgtaatagggcagatggcacatgtgcccaggcatcagcgttatggga

SEQ ID NO: 9549 - DNA, 1099 bp, Artificial sequence
  DNA replication origin
cagctgaccctgggcctcaaaggcaagccctgacctcagtcacacggggtggcggtgatatggtttggctctgtgtgcttcactctgcctcactcgccttccgcctgctggacgctgccctgttccccgcaggcggccgccgtggagggcaggcaccgcgctccctggctgctcccggggccttccaagcacagccacggccatggggccgaaacccagacctcgaggggcctgcgggcagagctcgacaagcccaggtcagtgtggtcagggccctagaagtccactcagcccacggaaaacttgcttcttaaagaatttcaaaatgtttctccctcgggccgagaagcctgagaagtccgaggctgggtggggcagacaaggcctccagtctgggcgtccccggccgcagccttccctcggacccacgctgctctccgcaacgtcggatgactggtcagctgcgcagggcgtttcccataagctcgcgggagagaagtcgctgcatgtgcattaggggagacacgtgcatgcctatgcttattgcacgctctcttccactcactgcattctctgccttagtatcgtggtgaagaatggtacacaacacattttacacgcgaacgctcttccgggaggaaggtcccactgagagatttgtaacaacatgcagctgtgaggccggcgcttggccggccaggccttccttgcaaggtctgtgcagacgggaatgttgggtgcccaggccttgaagggttcgctttctggggatcctattaaaataaggagatggcagtgccttctgatctcctcgtccaggttcattcttagcccacaggtgttcctgagaagccgctaggaaggcagtggtcgagtgactcagcgattcatggagattttgagtcaggtcacatgtctacattgtgtggaccttgcctcaggacgcgcttgatgggcagtaaatgtcaggtccaaaccaggagccaagacttgttatgacaccatcaagcaggagataaggattcagtaaggaaggctcaatttcccttaatctctgtggtgttgggaaacctgggttttgaaaagcttagccgctgtt

SEQ ID NO: 9550 - DNA, 1522 bp, Artificial sequence
  DNA replication origin
ggattggaggagcgcagaggctgaaactcaggcctctaagacgaacagaggctgggctggtatggtgttgtctgagggaatctgacggtctggcttggtaagtgctggacacctggaccactggactagttgctgcctggtgaagtcaggtgaccgagctgatgtggagagtaacaggaagtgacctgggcaggaggggtgaggccgctgtggagaagtgcgtttagcagagcctggcattgtgcagcagaatgtagaaggggggctggcaactcggagatggacatgtcataatggcatatccctcctagcacttacttttgccttatagaaaaattaggcgtctgtatgtgtttcacctaattgtctaatttagacatgtaacacagatattcagacaactgtctaattgatttcagtttctcccagagcacaagatactgtctattccttatagtggttccataaagccttcagggaataaacgaacaaagggaaaaggaggaaggaaggagagaggggggacaagaggaaagaaggagggaggcaggacaggaggaaggaaggaagagaaatgggaggaaagaacggagggaggagggatgggaggaaggaaggaaggaggaaagacaggaagaaggaaggagtgaggagggacaggagtaaggaaagagggaggcggggcaggaggaaggaagagaaatgggaggaagaaaggagtgaggagggatgggaggaaggaaggaggcagagggatgggaggaaggaagaaagaaggaaggaaagagggaggcaggacaggagaaaggaaggaagagaaatgggaggaaggaaggaggaatgaaaggaagaaggggggagggacaggaggaaggaaaaagggacacaggacagaaggaaggaagagaaatgggagaaaggaaggagggaggagggatgggaggaaggaaggaagaaggacaggaggaaggaaggagggaggagggataggaggaagtgaggaggatgaggaaggaaagagggaggcaggacaggagaaaggaaggaagagaaatgggagaaaggaaggaagaaggagggacaggaggaggaaaagagggaggagggacaagaggaaggaaggagggaggagggacaggaggaaggaaagagggaggcgggaaggaaggaaggaaggaagagaaatgggaggaaggaaggagggaggagggatgggaggatggaaggagggaggaaacagcagtcaggcactggtaacagctgtgctggtgatggccctgtaacatgatgagctgcccctagaagtgcagagagcaggggactgtcacagggtctgggagaagacagtgtgggaagggtgacatcatgagatcaacaagtctgtcagtcccgggcccagtgggcgggctgttgaaggaggtgctgaggttctaatcctggatttattaaacacttgctgagcgaccttcgacaaaccacttaactcaaccctagagataatgtcacacagtcctcagtttgt

SEQ ID NO: 9551 - DNA, 825 bp, Artificial sequence
  DNA replication origin
gccacccaagtcggcgacattgaggcaatagtcagacagtcctcagctgttgagacccccggtgggtccggccgctgcgactcgatggttccctaggctccgacccctgtgtccagtctgcgctttcctgccacgccaggcagggaccggtggcccctggggaccaagaatagtctacaatgagcgccccgagggtgcagggctgcagggacccagtggcgagcggagctgagttgggcaggcgggaggagtcgactcgagccgctccaaggaaaccccagaaggaaacgcccagaagcgaaggacgcaggacggtcgcaggctgcggggagtgccccccgcggcaagcatcgcggaaccaggtcctcagcagcgtggggacaccacccgggaacgcggcgggcggaccaagggcgacccaggccctaaagctgcggcactgggcccgtatttcccacaaacgcagggcagaggaatggaccgcagtggcctggcctggagtgccgctacgacgccgtccccagtgtcgaaggaagtgaattacatgcgtgtgcacacacgtaaatattttataaacctccccttaattaaccagatcatttccattatgcctccaatatgaacaacagcagcggtgtgagagttctcagggcttcttatttgatgtcaccagacggttgctcgggggcagaggcaccatcgccgtgccagctgcacttgtatttatttgtttttctgccttgttcctgtagggctccattatgcggtttttaattagtttgtgtttgtatttcacccgtcccaaatcaatgccatcccgaagca

SEQ ID NO: 9552 - DNA, 750 bp, Artificial sequence
  DNA replication origin
acgccccagctgtgaggcgctggacctctgaggcaggagagagccactttgttggcccctcagccacttttcctgcctccaaagggggtggctgaggcaggccctgccgctgctccggaagttgctcctggcggagctggccgcacccggtggctgccccctggtcactgtgccagagacaaagacgaggagcctgacaaaaccaggtctaggggtcgctgcgcagcggaatcggagctcctcctgcttagcgccggggatccagtccggaagcccttgggccccagtgctccggggacccaaggcacgtggcccagaaggctggcaagaccccgcgaagctcggcaatggggggtgactgggacacccctgctgggaagctaggaccttcagcgcgtccagggctgggacagatgcaggcctccggctgcagcggcatgggcagagagcgcgcgtgtctcggggagcgcagggggcaggctgtgggggtgggggttgggcggggaggagaggaaaggcccagaggcggtagtggagggggacgggcgttggtgtgcaactgcagtttaagctaacttgattaagctggtgttaaggcttcatggaaagtttacttgcaaggtgctgctgttgttatcattattattatgagtcagttttctaaatgggagggattttttattcctggagaagatcgtttcccttttctctctcccaaccctcggtgaggattccacccgccctgcccca

SEQ ID NO: 9553 - DNA, 1464 bp, Artificial sequence
  DNA replication origin
tctctgatgggatgctttggtggcaattctctctctctttctctcagtctaccctgcttcctagtatcctaggtgaaagttttggggacaagggccaaggagaaagaagagaggaggtgagtcagggcctgccaggctctgctagagcttcctagaaaggacttcctagaattggttttaggcgagggacctggagtgcagcctcaggccctggccttgggcagagaatagaccacaatctccccttctgcacctttgcagggctctccagggagcaagttacccagctttgctagtgccgcttccccaggaactgtgcagtcctcaggcaggattcacaggggagtctccaggtggggcccagccaggtcctccccacccagctcctccccacccagctccctggtgttttgaggagcctgcaatcactttgtgatgtgatgccaatggaggtgatgcagccggggcacagaggagtgggctggttgagttaggatgaagcctccactcccctattcctgcctccccacagagctctgccagctgcagagagacctgaggcttgcgggtggggtgggcggtggtgctcagtgggttggatggaggcagataagctgtagctgaatcccaaggctgagaagtgtccctggacttacatcccacctcattctccaggtcactcaagagggcgtatctcccctgtcaacctgaaatgtgacactgtagtttgctgaacaggacaggggtgggtgggactggcccacttctcacacagtgagtcacaggcaatggatggatttgttttgggtatagaggagaggaggttgaagatcggaaatctgtcttagggttagaaggtgtctggtggtaggctggggaacaggaaaaagctgcagttaggggcttcccggatttgtgtcaccaagaatccactccccaccaaccctcggcgtccccacaaacccagcccggaatctatgtaaaagcaggaaaggaaccctggaggttgtaggcggatcctggagtgtggaggggcgaattgagcgcgggaagcagcatgactagcaagacaatctgactcagagcagggaaaaatcaagcccgatgtcggagctggttattagtaattactaccatcacgggcattattgttgctaattataggcgatgtctcagtgtctgtcctcaggcccggaaaaccggagcccctcctgatgctgctgaagtccctgggcctcgaggctccgtgaagagagggaagcgaggcagggggtgaagggaccgcctggccggtgtccaggatacgggtggctcaaaccaccagcagaacagcatgccgactctggcccgatggccgccttcatcccgtagccccaacccggcctaaagccgagaagacgccagagtgcgctgctgaaattcccgcggagtccggtgtgctggagagccgcagcggggtgaact

SEQ ID NO: 9554 - DNA, 923 bp, Artificial sequence
  DNA replication origin
atgttagcaaagggagttccggactctgagaaagttgtaaagaccagaagatttcttggactaattagtttggtgactgaggccgcagagaaaacatttctgcggctagatttcgtttttgcccaatcgttccaaaatgtactttgcgcttttctaattattttggttgtaattgtaaagaagacgtttcagcctcgtctccactgggaattctttttgaaaggacaccttgtaaatctctcatcgcgtcccggcctccccgccgcctgaacaaaatgggggctgatctttttcgatagtaagagacctgaaaggcagccgggccgctttctttcaaaactacaagaaaagttacagggaaacccgctctttgcttgtgcacacttgaggggcgtttactccccgcttctcctgcggggagcggggagatatcgcgggtgcttggaaattgctttatcccgcgggcagcgacccaggagggggctgcctcccagggccccgcgcccgccgcacaattcaccagccgtccgaagtttaagcaccgaccttgcagtcagaccaaggaaaatggatgatttggaccggcagacaggccaatgcccccgcggagaattaagtgtgcagccgcctgccccgacatctaacgcccactgggacgggagactaagaggacaccatttgttttaagccaagggacactgttttctttaatcctccattatgtaacgcaggaagaaaagtgcttttctttctgtgcaaatgaaatgaaaacttgggcaacttacaaaagtaaaatcaaacaccgtttcagacaccagcacattactgcaacttaatttttgtttaatctcaaattcgcactcacgccgtggagagacctctccatccctttggacctctattgttaagattattttgattga

SEQ ID NO: 9555 - DNA, 1306 bp, Artificial sequence
  DNA replication origin
tgaccctcacgcaggtctccacctggttcgccaacgcgcgccggcgcctcaagaaggagaacaaggtgacatggggagcgcgcagcaaggaccaggaagatggagcgctcttcggcagcgacaccgagggcgacccggagaaggccgaggacgacgaggagatcgacctggaaagcatcgacattgacaagatcgacgagcacgatggcgaccagagcaacgaggatgacgaggacaaggccgaggctccgcacgcgcccgcagccccttctgctcttgcccgggaccaaggctcgccgctggcagcagccgacgttctcaagccccaggactcgcccttgggcctggcaaaggaggccccagagccgggcagcacgcgcctgctgagccccggcgctgcagcgggcggcctgcagggtgcgccgcacggcaagcccaagatctggtcgctggcggagacagccacgagccccgacggtgcgcccaaggcttcgccaccaccacccgcgggccaccccggcgcgcacgggccctccgccggggcgccgctgcaacaccccgccttcctgcctagccacggactgtacacctgccacatcggcaagttctccaactggaccaacagcgcattcctcgcacagggctccctgctcaacatgcgctccttcctgggcgttggcgctccccacgccgcgccccatggccctcaccttcctgcacctccaccaccgcagccgccggtcgctattgccccgggggcactcaatggagacaaggcctcggtccgcagcagccccacgctcccaggtacagctccaggccgcgtccacctgtcccctagctgggaatgcagaggcctggctaggtgtggtagcgtggggtgcagcatgagccgggagggtaccaggcagtggccgctgagccctggggctgcgcttaatccctgcttcaatttagaaagccagacaaggccctagggctctcccaagagagctttgccctaccggcgggcctgctacggggtggtggtggggtgaggggtgacgtttttcggcgaatctgcctgggcagccggcagaagttggtgggaaggaggcctgggacctctcccgcccgtctctccgtcctaactctgcctcttccgatctctcgcagagagagacctcgtccccaggccagattcgccggcacagcagttaaagtcgcccttccagccggtacgcgacaagtgagtgctgtttgcttttgctatgggagaaggcggtggggaggggggaggaggagtggtcgggacccgggcggagct

SEQ ID NO: 9556 - DNA, 911 bp, Artificial sequence
  DNA replication origin
gcgcagtcctagttgaaggagcgctccccgccagccctgggcgccgggcgagccgaggagactggagtttctccccagccgggagccgcgctggctgtcgaccccgcccccagggctccgctactggaaccggcgtcgcccggcgctgcgtcccccactcacagtgcccctgtcttcttgtctcgctgtgtttcccatgcagctctctggccccgcaggagggaacgccgcggatcctagcagccctcccgtccgcctgattaagggtcttcttttacttttgcgggggggaggggggaggagttggggagggagggaatgtgggaggaattaagacaaatatttcagactggtgtaaaggacaaatatgacaacgacgtcaaggactcgcatccgtcgctttctgcagaaaggggcttcttcggtcccgagctcgcgtccaggtggccaggcctctgccggcggctccagtggctgcgattatcgggttcggtaaatgcccccacgtgcttgtgtctctttccccccttttctgtatatagagtggtttcagattgtaaatagcgcgtcagcgaacttgtctaaatcatatatttttgtctaataaactaaatgaaatgacaccccctccccgctcctgctgctgtgtgcctgtccagcgtgtgtgtgagtgtgtgtttgtgtgtgaatgtgtgtgtgtgagtgtctgtgtggcagaaacagagacagagagagagaagtgggggatacagggatcctggaaccctgggtgggacccaagggtctgtggctgggggagatgggcttctcaatgggggcctttagagactgttgccacccaagacgcaggtgctttaaacatctcttcgttgtttgtggttgttgttgaatttttaaatattgtcactgtg

SEQ ID NO: 9557 - DNA, 1220 bp, Artificial sequence
  DNA replication origin
aaaacggtctagtggggacagggccgagtcccgaagtcagagccgagtcccgaggtcagagcggccgtcctccgctcgcacccccagcctgtgacccgcccttcccggcttgctcgagacccactggcgccagtgctgcgcgtggggactccgtgcatggccgaagcgagggggaaagtcggggcgctggtgtcttttcagaggttccaggaaagagggaggctcgcgttaggactaggaggtgccagtccacggctcctacccgctcccgacgcccgcatccttctacagccctccaccccgttcctggtccctgtagaggggaaggtcctctccctgccccgaggcgggaggaaaagcggcgaagaggaggctcgaagggcgccgcgtagggcaagtgggccgaggacaccgggggcgcgtcggggagcggggagtgggcggggtgggatgaggcagggaggagccgggccggagcggagtggagtggaccgcgggcggacggactcgggccgggccccggggagcagctccgcagtcggaatggacgtgctccaggcgccctctatggtccgaaagcggaatgcggccttgagcagcgcccatctcgctcctggggtgtgggggcaactctgggggcgctgggccttggggctccgtgggcacgagcctgcatttgtagtgatgggaaccaatttgtgttccaaggctgcacccactggttctttttgtgtgttttgggggagtgccgggcctgcaggttaggctactggcatttggagggagtgggcactgggctctacgtggggtgctcttactgtccagtgccttccttgctaaatcagagaggtgtttctcatctgccctcggccctagtccttcatggatcatcagagccctgggctcatcattccagaggttctgcaatggggccctagagcctactttgactgctgggcccaaatggatcttgtgtccttagccaaatcgtgtctctagagagacttgaccagctacgcccttcgcctctggtgaggaattgtgttcccagccacagagacatgctgctccagcaaccagtgtgctgggagatgccttctgggtgacgctggaaacagcaggttggattcaggtgggccaggtagagttctctgcccctgggcaagctcagctctttatttccctgaatcaaattggatggtctgtgctggcgcctgctg

SEQ ID NO: 9558 - DNA, 1209 bp, Artificial sequence
  DNA replication origin
gaagaaggcacgtctgtgtggtggaatgcaaaggggactccttgaactgagagaggcgtctacaggcagggacacagcccatctgggaagaaaccagttgactcacagaatggtgaggatgaagagcgctgggcctggaaccagaaaaccagctcaagtggccccagacaatgtgaggtaattaggatcgttactaaaaatcttccaggggataatgccacactcaccatgttgtgctcatagctcccaccccgctgcttggagcagagacgtgcaggtgtccgttcgccccatgagacagaaggcacagatgaagtggcagcgtgacccaacagggtcccaggacctggtactgtgcctggcactcaggcactggcggaatgaatagggcagtgtatggaagagatgggcaccatgtgatgagttttccactggtcatggctaaggggcagatggggcagctgctgaaatgacaaacgggggccaggcacaccatgaacaggagagtgtgtgtgtgtgtgtgtgtgcgcgcgctagagtgagagtgtgtgtgtgagtgtatgagcatgtgtgctagagtatgtgtttgtgtgtgagcatatgagtgtgtgtttgggcatatgtgtgtgtgctagagtatgagtgtgtgtatgtatgtgtgcatgtgagtgtagggggttgagagtgtgagatatgagtgtgtatatgtgtgtgaggatgtatgtgtgtgaatgtatgggtgtgtgtgagtacatgtgtgtgagtgtataagtgtaagtgtgagtgtatgtgagagtggataagtgtgtgtatgtgtgtgtatatgtgtgagtgtatgagactgtgtatgcatgaatgtgtgagtgtatgtgtgggagtatgagagtgtatgtgtaagagtgaatgagtgtatgagtgtgtgtatatgaggctgtgtgaatgtgtgagtgtgtgtgtgagtgtaacagtgtgtgtgagtgtgtgtatgtgtgtgagggtagttgggtgtatttgtgtgagtgtatgggtgtgagtgcgtgtgtgtgagtgtataagtttaagtgtgtgtgtgagtggatgagtgtgtgtgagtaaatgagtctgtgtgtatgaatgtgtgagtgtatgagtgtgtgtgagtgtatgagtgtgtgagtggatgtgtgtgtatgtgtgtatgaggctgtgtgtgcatgtgaatgtgtgagt

SEQ ID NO: 9559 - DNA, 1162 bp, Artificial sequence
  DNA replication origin
ggaggacgcgggaagatggagctgcccacggcctgcagtccgtgcctctctgcccgcgcggggaccacacagttggagaggctgccgggcaccggcgcgggcgatgctcagcatggacctccggccggtgcgcgctcctgccctgccttggggctggggactcggcgggactccagctactgcagtggctccgcgggctcccacctccgggccgcaccggcgccgccagaggccgggacacctgcagcccgcggagtgcggtctggccgcgcctctgtgcccgggcacagctgtggggacactgggtgcggaaaaccgggcgccaggacgtgggagagccgcggacctgcctttaaaggcgcgtgcctcgctctggagtttgcggagcgatcggagacggggaggctgaggaggaaactcttcccccgcgccatttgccccgagatgtggcggcgctcctggccccgcggtcacggccaccctcaactggccaggccgcggaggccggtgactggctgctgggtgcaatccctagggaggtctcagggctgcggatgggcctgggtctcggccgccacgggggtcgatcgggctactgtgtggacagggtggccaaggaggcagcaggtgtgcggtcaacagcctggccagaattctgctgtagctggatggggtgtgtgagcgcgcgggtgtacatgtgcctgggtgtgcgcgggtgtacatccacacctgactgcgtgtgcgcgagtacacgctgtgagcccatagtgtgtctggaattggtgggttcttggtctcactgacttcaagaatgaagccgcataccctcgcggtgagtgggtacagctcttaaggtggtgcgtctggagtttgttacttctgatgttcagatgtgttcggagtttcttccttctggtgggttcgtggtctcgctggctcaggattgaagctgcagacctaggcggtgagtgttacagctcttaaggcagagcctctggagttgttcgttcttcccggtgggctcgtggtctcgctgggctcaggagtgaagctgcagatcttcacggtgagtgttacagctcatgaaagcagagtggacccaaagagtgagcagtaggccgggcgcggtggctcacgcctgtaatcccagcactttgggagg

SEQ ID NO: 9560 - DNA, 1493 bp, Artificial sequence
  DNA replication origin
tagcacagctcctctcccggtgttgctcaggcagcgccttaggcagccccgcgcccaggggaggggcggggcgagccagggcggggcggggcgagccagggcggggcggggccctgactggactgcgtcgcgctcgggggccgcgccgggtagcgtttctttttagtgcctgaggcagctctggctcggagagccttttgctagccccacggggacctctgtgcacggatggacccgcccggacctggcgggaagcggcctggcaggcggcggccccggcggcatcagcagagacaggacggggccgacgccgcgggcccctgaggcgtgcgtgcccaccgggcccggcggcggcaccatgatgccgggcgagacccattcggcggcgcccgggacggcggcggacctgtcgcgatgtcagggctgcgcctctctgcagcaggtgcagcacctcccggggccccgggcgcggggggggactcggctcggccggccgggagcgcagggatgtggggtccggccgcgcgggctgtgcctcagtgcgctgctctcccttcccaaccgtagctcttgctcgctcgtctctctgctctctttttcctacatgagttttggggacggctttctttgctttatttaagcttgaaacccagagttcattgactggaatgcgctggtgtaacggtgggggtggagtaagcgaggtttggagggccccccaccttccctacccggcctcggagctccctagggcagactccgtaggtcagtgagggacaggtgaaacgccgagggcagttatctccctgaggataacgctttggtcttctggcccatcctgagtatttgttgtttggaggcagaatcttacgtgacatgtgggttgtctgagtcttagactcgaagagtctagggaggcgtttcagcttatagcagatgtgccatcccgaggctaattttttaaaaagcaagccaagtaattggtcaagtagcttgtcagttgtttgataaaagtagtttatgaaaggcatgcagagactggaggtttctaacagcggcgtgggctcttctttagagtgacataagggagaattgctagagtatggctccagatcttatggggtggtacttgggcaatagtgcccctcatttcccacgactctcctagctgcctgatgtcgggggtctcttttaacttcctactatcgcggtttcagtgataaaacggaactcaccagcacctcattacctactctgcctagtgttctaggaactacagacattgtggtgaacaaaataggatctctcataagtaagatgcatatgtgtgaataaggcctcagaagattttaggtgttagaaaataaaggaggatgttggaatattggtcttgtctcttagctagagtagtcaggtagggaatttttgagtcagtaactttcagatatttgaataatgggaaggatcgggctgtcagaagagatgtgggaaga

SEQ ID NO: 9561 - DNA, 1944 bp, Artificial sequence
  DNA replication origin
taaatattacaatgtttaaatatcgatatcacaccttttccgtagaaataagaattaaactgcaccagtagtttatgtatttagggctcctgcatttaacttggatatgtatgaaactacagtaatccaaacaaaagtttataagctccaagaaagtgatatattttacatttctcccttggagaaaacttttttttctagaatcatcaaaaacatcctaagctttctgttctttatcctggatgattgaaggaaggaggtgagtctgattgatcgcttggcttccacaggctttggctttgtgctccttcaatgtcagttctcgtgtcatggaacacacagccgggttacaggtgatgacacatatgatcgaaggtgaacgaacagtgtcctatcgtacatgggcggggacagtaaaatacgggcccattctgtggcttaatgctgtaggtaattttaagtgcttagtaactggtaatttatattaagagttgaattttgggcacactctaggggaaaagtatgagatgttgattaaccattgctggaggtagttggtaaagggctccaaaattggagagaagggcaaggagagcaggacaaggagagaacaagacagaagggcaaggagagaagggcaaggatagatagccaaagagaaaaggggaaggagggaagggcaaggagggaaaagaagggaggaaaaggcaaggaaggaaggggaaggagggaagggcagtgagggaagggcagggagggaaaggagggaaggagaaggagggaagggcaaggggagaaggggaaggagggaagggcaagaaaggaaacacagggagggaaagccaaggagggaaggggaaggagagaaggggaaggagggaaggggaaggaatgaaggggaaggagggaaagggaaggagggaagggcaaggaaggaaggagaaggagagaaggggaaggaaagaagggcaaagaaggaggggcaaggagagaaagcgaaggagggagaaggagggaaggagaagggtggaaggggaaagagggaaggggaaggagggaaggggaaagaaggagaaggagggaaggagaagggtggaaggggaaggagggaagggaaaggagggaagggcaaggaggaaaggggggaaggatggaagggcaaggagggaaggggaaggggggaagggcagagagggaaggagaaggagggaaagggaaggagagaagggcaaggagggaaggggaagaagggaaaggcaaggagtgaaagggaaggagagaaggggcaggagagaaggggaaggacagaaagagaaggagagcagggtggggaggttgtgagaggccatggaggacagactttgtgccatcttggtggagtcctctcaagtcaatgtgaggtgcttttctcaggtttgcccggaacacctttcaagaccaaccgtccatggccaattttgttatcaaagtgaaaaagaattgacttgaggcaggcagtgagcagtattggggcttcacctccacgtctccctccgtgaatgcattggtgttcttccagcccgctgtgtgtgcgcccctcccggctgtgttccctaacctctctccgtcacatttccacttctcaatcactttgtggattcatggcaacacagccacactatccttttatgagggcgtgcactccatgaactgagcactgggacaaagggaactggctttcaaggagtagacacaagtgcagggagacacacagggcatccctaggaaaaacggcagcccatccctagactgtaacacacacgggatgctatgagcatgagcttaggttgttgtttgagatccttgtaaagaagagccctgtctacagtgcttgcatcatgtgtgtgtattgattgcctctttgctgtgttttatgtgttttatatttcatggcgatactgctta

SEQ ID NO: 9562 - DNA, 2046 bp, Artificial sequence
  DNA replication origin
ccagatagacttctttcaaagaactttctgtgtcattctgttcataatgtaaagaaaaataaattaaaataggactacttcttttgtcccagagattagtctataaagattggcctttgtaacatgaagaaaggacagagctcatgaaaagttcaaaagaggtgattcccatatgagctaaaatttttaaaagtcatgcagtggggagggccatatgatgggaaagttcatggggtgggaggtccagggagtgggagatccatgtggtgggaggtccagggagtgggaggtccatggggtggggaggtccatggggtgggaaggtccatggggtggggaaggtccatggggtgggaaggtccatggggtggggaaggtccatggggtgggaaggtccatggggtggggaaggtccatggggtgggaaggtccatggggtggggaaggtccatggggtgggaaggtccatggggtggggaaggtccatggggtgggaaggtccgtgcagtggggaggtccatggagaaggaaggtccatgggttggggaggtccatgcggtggggaggtccatggagtgggaaggtccatggggtggggaggtccatgggatggggaggtccatggagtgggaaggtctatggggtgggaggttcctggggtgggaggtttatagagtcaggatgcccatggagagggaggtctatgagtggggaggtccatggagagggagatccatgggtgggaagggtccatggagttggaagttccctggggtggaaggaccctggggtgtgaggtccatgtggtgggaggtccatggagtgggagatccatggggtgggaggtccatgtggtgagaagtccatggggaggcccatggagctagaagatccctaaggtggggaggtccatgtggtgggaggtccatgtaatgggaacgtccatggggtgggaaggtccatgaagtggggagattcttgtagtgggaaggtccatggggtgggaggtccatggggtgggaggtccatggggtggggaggtccatggatttggaggtctatgtggtgggaggtccatggggtgggaaggtccatggggtggggaaggtccatggggtggggaatgtccatgggatgggaaggtccgtgcagcggggaggtccatggaataggaaggtccatgggttagggaggtccatgcggtggggaggtccatggagtgggaaggtccatggggtggggaggtccatgggatggggaggtccatggagtgggaaggtctatggggtgggaggttcctgggatgggaggtttatagggtcaggaggcccatggagagggagggctatgagtggggaggtccatggagagggagatccatgggtgagaagggtccatggagttggaagttccctggggtggaaggaccctggggtgtgaggtccatttggtgggaggtccatggagtgggagatccatggggtgggaggtccatgtggtgagaagtccatggggaggcccatggagctagaagatccctaaggtggggaggtccatgtggtgggaggtccatgtaatgggaacgtccatggggtgggaaggtccatgaagtggggagattcatgtagtgggaaggtccatggggtgggaggtccatggggtgggaggtccatgcggtgtagaggtagatgggtggggaggtccctgcagtgggagattaatgtgataagggaggttcatgggatggggaaatccctggggcaagtgggaggtccatggaatagggaggttccggggaagtccatggggtgagaaggaggtccccggggtgagtgggaggccctggggtgtggaggtccccggggtgggaggcccacaagatggggtgatcctttactgatagcctctctggtccttggtgtttcctgaagctccaggcaaggagccgaaaagtggggcagggtatctcagcacatggaaggggaagggctgccctgtgctctgctgtcgttagccttcctctccagcatgtctcgtcaccgggga

SEQ ID NO: 9563 - DNA, 1312 bp, Artificial sequence
  DNA replication origin
ggagagaggaaagggcacacctccctcaggatggaggggaggaaggagagcaccataggagagagggagagaagggtcacacctccctcaggatggaggggagaaggggagcaccacaggagagaaggagaggagggtcacaccttcctcaggatggaggtgaggagggggagcaccacaggagagaagagaggagggtcacatttccctcaggatggtggtgaggtgtggagcaccacaggagagagggagaggagggtcacacctccctcaggatggaggggaggtggggagcactacaggagagagggagaggagggtcacacctctctcaggatggaggggaggagggggagcactacaagagagaagtagaggagggcaacaccttcctcaagatggagggaaagaggagggagcaccacagaagagaaggagaggaggctcacacctccctcaggatggaggggaggaggggaggaggggagcccctcagaagagagggagaggagggtcacacctccctcaggatggaggggaggaggggagcactataggagagagggagaggagggtcacacctccctcaggatgcagaggaggaggaggagcaccagaggagaggagggtcacacctccatcaggatggaggggaggagggggaagcattgcatgagagaaggagagggggtcacacctccctcaggatggaggggaggagggggcaccaccggaggcaaagaagggagggtcacacctccctcaggatggagggaaagaggagcaggcattgtgtaggaaagacagtcctggggtgggtcacactggaagagatagggtggctcaggtggagggcagtcaaggacaggtgcctggagctgccttccaggtaagtgggggcacccacctcctgcttgcttgctgggtgagacacaatggtgccatgggtctctgtccaggtctggttgggagccctgccctgcccctttctggctttgtgatcacggtcagtggcagagttgccctctgcctctgttttctcatctgcaaattggggatttgtaataatgaccctactggagtgtgtctgctggaattctttatgtgacggtctgagaggatgcctgatgtgtgggaggcattccatcagcaggatcctcatgtcactcctgcagctgatactcctgccctttcattgctatcactacagcttctgcaggtgtgttcatgtgccatcctactatctacaccccacatgttaaacaaaacttgtctacagcaatggctccaaacttgtgggtacattagaatc

SEQ ID NO: 9564 - DNA, 1943 bp, Artificial sequence
  DNA replication origin
agcacgtagccgttctccaggcgcgggctgagcacccgcatgaagggcggcgagaaggggaagttgtcggggaaggtgaggttgagcaggatgaactcggtgttggtctccttcatgtcctgccacagcaccgagtccttgtccacctggtgcagcttcacgttccagtcgaacaggctctcgtccaccagctccacggagatgaagcggtcgctaaggcgcgcgatgtcctgcagctccttcatgagccgccggctgcgcacctgcgtgcagtgttgctggcgcgccgcggggaccaggctgccgcccgccgccgccgccaccgccgggcccggccccgccctggcgcccgctgccctctcgcgggggcccccggcccccgccgcagccgccgccgccgccgccgcagccgccggcgccttgtcgcgcggggccagctccgccgcgcgcttgccctttcccttgccgggtcccgggctggcgtcgcccgcgcccccggggtgctgctgctgctgccactgtgtggtgtgtgtgtgcgagcgtggtgtgtgtgcatgtgatgtgtgagtgtggtgtgtggtgtgtatgtatgtatggtgtgagtgtggtgtggtgtgtgtgtgagtgtagtgtgtgtagtgtgtggtgtttgcatggtgtgtgtgagcatagtgtatgagtgtgtcgtgtgtgaatgtgtgatgtgtgtgtggtgtgtgtggggtgtgagtatggtgtatgagtgtgtggtgtgtgtgcatgtgtgtgcttgtgtgatgtgtgaatgtgtgatatgtgtggtgtgtgtgtggggtgtgtgagcgtggtgtatgagtgtgtgatatgtgtgtgcgtgtatgtggtgttagtgtgtgagtgtgtggtgtgtgactgggatgtggtgtgagggtgtggtgtgtgtgtgctgtgtatgtaatgtgtgtatggtgtgtgtgagagtgatgtgtgagtgtgtgagggtgttttgtgtgtggtgtgagggtgatgtgtgtggtgtgtgtgtgtggtgtgtgtgtggtgtgtgtgagtagtgtgtgtaattgtgtgtagtgtgtggtgtgtgtggtgtgttgtgtgtgagcgtggtgtgtgtgctttgtgtgaatgtgtggtgtctgagtgtggtgtgtggtgtgtgtggtgtttgcatggtgtatgtgagcatagtgtatgagtgtgtagtgtgtgaatgtgtggtgtgtgtggtatgtgtcgtgtgtgtggtgtatgagtgtgtggtgtgtgtgtagtgtgtgtgcatgtgtgtgcttgtgtgtggtgtgtgaatgcatgatatgtgtggtgtgtgtgggggtgtgtgagcgtggtgtatgagtgtgtggtgtgtgtgtagtgtgtgcgtgtgtgtggtgtttgtgtgtgtgtggtgtgtgactgatgtggtgtgtgtgtggtgtgtttgtggtgtgtgtgtgagggtgtgtgtggtgtatgagtgtgtgggaatgtgtgtagtgtgtgcgtgtgtgcggtgtgtgtgatgtgtgtgtgatgtgtgtggtatgagtgtaatgtttgtggtgtgtgtgtgatgtgtgtggtgtgtggtgtgtgtgtgcagtgtgtgtgtggtgtgtctgtgtgtgatgtgtgtggtgtgtgagtgtgtgtggtgtgtggtgtgtgagtgtgtgtggtgtgtggtgtgtgagtgtgtgtggtgtgtggtgtgtgagtgtgtgtggtgtgtggtgtgtgtgtgcggtgtgtggtgtgtgtgagtgtgtgagtgtgtgtgtggtgtgtggtgtgtgtacggtgtgtggtgtgtgtgtgtgtgtgtgtgcggtgtgtggtgagtgtgtgagtgtgtggtgtgtctgtgagtgtgtgatgtgtggtgtgtgtgtgagtgtgtgagtgtgtggtgtgtctgtgagtgtgtgatgtgtgtggtgtgt

SEQ ID NO: 9565 - DNA, 745 bp, Artificial sequence
  DNA replication origin
aaaggggtgagaggagaaagagtccaggaggaaagggagaggagggtatgggagagggaggctaaggaagagggatggaagagaactatgaagggatgaggagagaatgagcaagctagagagaccagagagacggcagagaccgataccagagagacgggcagagactgagaccagacggggacgggagagacgggacggaaagcaggggcaggaagaaaacgctcagggaaaagaggtggaggcgctcggagcatccccgtggggcgctggtgtagtcagagcagggagcgagatggccggaggggccggcgctggccctcaccacggggcccgggcgcccggcggcgctgcagacccgatctcggccccgcgcccccagccccggcgcgctcgccttacctggcccttgaccaggctggctgcgaactggcgcatgacggcctccacggtgtaggcgctggaccagccgcgcggcgtgagcagctccatgcagatggcgccgccgtccagcacgtagccgttctccaggcgcgggctgagcacccgcatgaagggcggcgagaaggggaagttgtcggggaaggtgaggttgagcaggatgaactcggtgttggtctccttcatgtcctgccacagcaccgagtccttgtccacctggtgcagcttcacgttccagtcgaacaggctctcgtccaccagctccacggagatgaagcggtcgctaaggcgcgcgatgtcctgc

SEQ ID NO: 9566 - DNA, 2005 bp, Artificial sequence
  DNA replication origin
ctatattgccgcttggcatatgggcaccaaaggaattattattatacacagcattaatgtagaaataggaaacatttaatttcctgaggtccctctctctcttaaaaaaaaaaatccccatttctcatttcaaacctttgttttctcgcatctttcaaaatataggcagtggtccagttcatctctaagatctcttccaagtctaaaatgttaggactctgtgatcccagaagggaatacacattcctcttcccctgatccccaatgtcatcttcattgcgaagaatgaaaaacaataacagactgttccaaagaattctgattagcaatgattcaagaagcaaataaccaaggcatttctgcaaagaattcttccacttcatttgtataaatcctgtttgaaaaataaaactgagatcccctaccccccatgcttgcattctatcacatgaacctttcatcagactcaacatgtaactgcaggatggaaaataaacctctgatattaaagcactaagcctccctcagctgaagatgtttttctagagttgttacacctatgctatttctaactcgggaaatgtgtggaacctaaaccttagaaaagaaggactggcaggatgggtcaggaattacctgaccttctctgctggagttaggatgctatttgtttggaatcccaggggttccagctttagtgaaattggcagaacaagcattatttgattagtgtgaaagagcctgcagtgaaagtgccaggcagggaagaagtgatggcttctgataggccgcctgtagaaagatcaagccgaggtcatttggggtcttttaaagaaaacgatgattttttcataaatctaaaagatgcccacacagcaatgtaattttcttaagtaatgcttaatattgattcaggaaaacaccagagaactcaaccgcagtcgacagcatataattcgagcagataacaccatcacgcactcaccctgctctcaagtactttggggtttctttgcgtaaagctgccatctgatgcaataggtgagaaggctcaggagaactgtttggcccttcgtttcgtatttcgttaaaatctttagccctgataaaggatttaactgcttggggcagtgaggtaaggggatgaagaaaaagaagcaggtctgaaagagaccaagacctggaacgtctaccccagaggtggtggtcctaaggggttcggggaaggaagggggtgctctgaggggaaaacaggcattgccgtggggggggggggtctggtcttgtctcttaagggaatgcccaaaccacaccgccgcctctctagagtgagttcccaagagcaaaatttccacctttccaggagaggcagcccagaagaaggcagggggcggatttacaagcaggcagctgtccctccccacggcacccacctgcagatctcccacccgagtcccctgcggaggagccttgtgtgtgtgtgtgtggggggggttggggaggtgggagatcagctaggttggacacttaaatcctgaggtccagaaaaagttctcaccttcatagagattatagggacaggagattgaggagcagacaagagaggggcgagaaaaggtgagacggaggggaaagaagagtaggggagccagggagggtggagaaggaaaaaatgaaaaaggaacgggggtgggaatagatggggggacagagaaaggggtgagaggagaaagagtccaggaggaaagggagaggagggtatgggagagggaggctaaggaagagggatggaagagaactatgaagggatgaggagagaatgagcaagctagagagaccagagagacggcagagaccgataccagagagacgggcagagactgagaccagacggggacgggagagacgggacggaaagcaggggcaggaagaaaacgctcagggaaaagaggtggaggcgctcggagcatccccgtggggcgctggtgtagtcagagcagggagc

SEQ ID NO: 9567 - DNA, 1233 bp, Artificial sequence
  DNA replication origin
ggcgtgcaggtgcggctgggaactggcgcccttcaaagccccagtgtcccggagccgacagcgcgcgggtggaggagctgcagaaaggggcccacgccgcaaaggcgctgttgtcgaggtcccccatggggttccagggctggtgctggcgagccccggccgcgccgccccatctttaccgcgcaccccggccgctccgccccctctaccgcgcaccccggccgcgccgccccctctaccgcgcactccggcccgcccagcccccgcggccccgcgttccccgcctcccgcggctcctcagcccagcggccagcaggggatgctgccgggctccgaggcccgggtcctgcgcggcgccgcggggagacacgcgagtcccgggccggcgccgccctaggccgggagggtgtgcagcgtgactgcggcgagccccgacgcccgagaagcggggacctgctctcggggggattctttggagacagcctgggcgctggggaatccggcgggtggggaggacccagctcggcccttgaggcgctcaggcctagtccaggccatacaggtgtgcaggacagggaccagccacaggccgcacgcaccttaatatgcagtgaataaaaaagaccagacggacctggggttgatgacgccatctgaacaaagcgtccccgccccacataccgttcgcccctcctgagtccgtctcgtcggtgggagcagagccagggaaaatcactaaggactctcccctccaaggcgaggacttgcctgacccgcttaggcagcgccagcctcccaggtgcaggtggcttcgccctcccctagctggagttagggtgtgtccatgctctgagtcctggactccaggaggtactcaccgtgtcagcagaaggacgcatgaatctatttgaggtcacgtaccaaagagctgcagcgcctggctccttaatgcagaggcattaggaagcgagttgtctacttgcgatgaatgatgaaggactccactttacagaggaagagagaaaaccttgccgcaaatcagtcaccttcggactccaacctaattgaccaaagttaggttattgatgaggttattgatgggctggacaccagtgagctgagaacgagcagtagttaatccccagtgtccacaaagagcctgatggccactgtccctccatgtcccctcccggcccaggagtcagccaggcacctgggcaccgttcactgggt

SEQ ID NO: 9568 - DNA, 1145 bp, Artificial sequence
  DNA replication origin
ttgagcccgcgtgggaaacctgggcgcttcgcgcggagacgcctttgtggctgcttcctggagcatttttttccccttagagctgttcgctgttttccctgtcacgccgcttttctgaaagacgggttgtgcgctttgggcttattcctggacggtccccaaaggtccccgaaaggaccaggcccggacacgtggggccttggtttccggccggaagtcccgggaggtgtagggctagagttctggccgtggcgggccggtttctgcgtgctgcgtgcgcggccgcgtgggctatggggcggcggtcgcggggtcggcggctccagcaacagcagcggccggaggacgcggaggatggcgccgagggtggtggaaagcgcggcgaggcggtaggagccgggacccggcgggcgggccaggggctcctcctgggcttcccggaccccgaggcctgcgaggcggcggcgagggggcggctccttgggcctcggggtagacgtctctttccttcctcagggctgggaaggaggctaccccgagatcgtcaaggagaacaagctgttcgagcactactaccaggagctcaagatcgtgcccgagggcgagtggggccagttcatggacgctctcagggagccgctcccggccactttaagaattactggttacaaaaggtagggaggcagtgcctgattttttgggagttggggccaggatgctggaggttaaaggcgacggtgttttcttcgacaagtgttacagtgccagagaaccgtggcgtttcagcggtttggattcaggaagcattgaggtggggagcacagggtccaatgaaatggtcacggaggtattgcaggcgcaaggttagaagacgaaatgaaaatgagatctgaggaagattcggctcctggggaatcttccaggagggaagctgagggtcttaccttttggaacgtaagagaatttatagagaatgcataaaaccccttggttctcccctcctccgcgccccccctccatctttgtagttacatctttctaaatgagtcgcaagtaaaacttaacggtaggatatgcttaggagagaaggaatgcagtgttgctcttagggctcaaacagtgtggattgcttaaattttgaaggc

SEQ ID NO: 9569 - DNA, 800 bp, Artificial sequence
  DNA replication origin
gtggtgtgtgtgtgtgtgtgtgtatgtgtgtgtatgtggtatgtatgtctgtgtggtgtatctgtgtggggtgtgtgtgtatctgtgcgtggtgtgtgtgtatgtgcagtgtgtatcgtgtgtgtgtgtggggggtgtgtgtgtgtgtagtcaacaaaagctggctactaccacagtggggaaataagcttgtttaactttcaacatgaaaagtccaaaatcaagtagcaagtgggtgggagctactgaaagcctagaagccaaattcaaggggttgctcaaatccctcacaggagcagggcagcctcagaggagcaggggccaagcagtggagctacaggggtgcagctagaggagtagggcaagaagggtcaggttaggggtgggggtacagggatggggctagaggagtggtgctagatgagtgggctagaggatggggccagagtggctggagctagaggggtgggtttggggtggggttagacaagtgaggctagaagtgtggggttagagcagtgggactacagaggtggagctagagcggtggggccagaggggcggggctagaggggcggggctagagaggtggagatagaagggcgggactagaggaattgggctagagggtcggggctagaggggtgacgctagggctcagactccaggacagacagaagtgacggggatcgacaggctctgggaagtctcgtgcctcgtctgcctcccatggctggctctgctgcgctgctggtgatttgtgaaagtgaagattttactttgaagtgcaaaagctgttc

SEQ ID NO: 9570 - DNA, 876 bp, Artificial sequence
  DNA replication origin
ccaggtaatctgcccacctcagcctcccaaagtgctgggattacaggcgtgagccactgcgcccggcctcttctttcttttttttttttttttttttaatagagatggggtcttcctatgtttcccaggagttggagaccagcctggacaacataggaagaccccgtctctattaaaaaaagaaaaaaaaaattgtcaggtgtgatggtgcacgcctatgatcccaggctcaggaggctgcagtgggagaatcatttgggcccaggaggtcaaggctgcggtgagttatgatggcgccactgcactccagcctgggcaacagaataaggccctgtctggaaaaagagaggggacggggaggggaggaaggagggggggaaggggaaggggagtgagaggggaaggggagagggagggaggaggaggggaaggaaaggaaaggaaaggaaaaaggaaaggaaaaagaaaaggaaaggggcagcctgcctagcattgcggaagatcccatgcgcctctctggaagctgggaagtaatcatcatgtgtcaaagagcatgctggcccagggcgtgctttgtttggcccactccatgtttttttaatgtttaaatgttaatctctttattagttagctcttgctcatttatgctgcagtaacagacatccccaggacctcagcgtttcataggaacgacatggcacacattggtggtggctgtcctcccaggcagtaccccacatcttgtcttccgtgtttgggcacccaggctggagtagcaacccatctcagtcaatggcaaaggaaggtgagacatggcgaaactacacatttgccctcaagattctgctgggtatagcaatgtcatgccaaattcca

SEQ ID NO: 9571 - DNA, 994 bp, Artificial sequence
  DNA replication origin
ggagggttttgagcagaggagtggcatggactgaattttttaaaatgtcaactttaaattctgggatacacgtgcaagacgtgcaggtttgttacataggtaaatgtgtgccatggtggtttgctgcacttgtgaacccatcacctaggcattaagccctgcatgcattagctatttatcctgatgctctcccttcccctaacccccaacaggtcccggtgtgtgttgttcccctccctgtgtcgatgcattctcattgctcagctcccccttattactgagaacatgcggtgtttggttttctgttcctgtgttagtttgctgaggatagtggcttccacctccattcatgtccccacaaaggtcatgatctcattcctttttacggctgcatagtattctaagagtggcatgagatgatttttaaaatagtaacatcttttttgttttttaaaaaggatcacacgagcagctgtgcagaatgtgggaaaccagctagaaggcactgctttaaaatggacgggtggcggggaaagaggggtggagggaggaggaggggtagcagttgggttctggttgtttcgggcagtggagccaagaggatgtgttcattgtggacagagagaggagccaggcatgaccaaggattttggactgagccattggaagcaaacagctccagaataacggccgtttgacttgtgtgtgattttctgtagtttactgaatgcacgttctaatccttggtcatgatttccacgtgtacaatatgaaggtatttgaaaacgtctgaaacattcattttcattactaaccaccaccacttgccccaaagcctttgtatgcaacacacggacctttcctgttggggcgatgtttgaagggtcaagtgcttagtaatgtctactcatctgtgctggagacgagggggtagcatttacaacacgcctgtacgaaggccaggtcccgttctacttaaaaggcttggagcccg

SEQ ID NO: 9572 - DNA, 999 bp, Artificial sequence
  DNA replication origin
ccaagtgccccaaccacaccagtaaggccaaccaggctctctccatcatgccagctctcagaggcaccgctgccagggggctgtgctgagtggaattctgaggctacattacatagccttagtaaaaaaaactgttactattcattggtgatgaatactcattagctgacattcaccatcttcctgctgtgaccagacactcactgtatgacatgcttcactgagtctgatgaaaccgccgtcaccccattctacagacagctcagaggcaaagcacctgcctacacctcacgggcgccgtgagaccccaggcagcagctgcagctctgcagcccctgccctccgtacagtcaaccccttgaggcccccgccaagatgacagaaaacaactattcgagaaaggactatacaaaaggctggaaatcaccaattacacaaagtaagtatgagcgagtgagagagagggagacagagaaaagaactcactggatccaaagatgtaagccaatattaaagcacagcaagcagatgggattcgtggtctgcagctatttaccgtgagcctctgcacagcataccctggctgatacagacagcagagctgtgggcaggatgatgagatgtggcccctactctcactgagtttatatgggagggacagggggcatgatggggaagataagtagccaaaataaaccaaaaagttgctatgcagaaatttaaactggcaaccacggctgtgaactttaggttggtcagggagagcctccctgataccaagtggctggtactgaggctgagatgggaaaggtaacgagcagccagttacggaaagacaaggggacagcactctggcacaatggacagcaggacagggcccccaggtgggatggactaagagggcaccaaaggcaccagcacagcccaagcagcggagtctaagaccaggcctgagtgtacccgtctccatgggccagctacagagcagagagtccgaag

SEQ ID NO: 9573 - DNA, 1021 bp, Artificial sequence
  DNA replication origin
cagtcgcaacgaaacgacgtctggattacaaacgtcaccacctcccccgcgtacggctcacgcccaggccgaggcatgcggggcacggcatttacagggtcctctgcgtatctcacagggtagagaggtggcactcgagaccctgggcaaatcaaaaggaacacacggaagctggtcacgagggggttacctgttaccacgagatccagcgcatggggtcccgagactacatggtgggcttgctgatgttcacgtagtggcctggacaggttcactgtgccctcagaaagcccttaccttccagtactcccagcttccgaggagagcgggacccatttgacacctcaggtgcctctgtggggcctcaggctccctggtaacacagctgctccagaggctgctcctggaagcctcctaaaggcagctctcctgcaggtatcagtagctgagtaggaagcatcacaactcacagggaaatccagggcaggtcaagagtgcctccccccggatacccatcagtcctgcctccaacacagaggctaactcagccacgtctcctgcctccagtgccctgcacctcagcactgtcctgggttcctcctccagatgcccctagctgtaagccctccagttccctcggaggccctgctcaactcctgccagccccaccctgcccaccgcagctcatgcagaagctgcacagggctctgcccctggagaggctttggagtcccacccagctgcctgtcgtcttccccccagcaccaccatatggtgctgtcagcggcttctgcacactcttaggaaccaggtgccatgaggatagggctgctctgttctccaggtggaaggaatgtgtgttttacccacaacacccaccttgacaaccggaaggactctagagctgatggctctagaacatgcactcaaggggctgcacaggctgggacatgcagttctgtcacttactggcctagaagaattcttgtacctttcctcataaattccaaacgtcggcagg

SEQ ID NO: 9574 - DNA, 1403 bp, Artificial sequence
  DNA replication origin
ggcggggggtgtgtgtgggagcggcggggggtgtgtgtgggagcggcggggggtgtgtgtgggagcggcggggggtgtgtgtgggagcggcggggggtgtgtgtgggagcggcggggggtgtgtgtgggagcggcggggggtgtgagggagcggcggggggtgtgagggagcggcgggggatgtgagggagcggcggggggtgtgggggggagcggcgggggctgtgagggagcggcggggtgtgtgtgtgggagcggcgggggctgtgagggagcggcggggggtgtgagggagcggcgggggctgtgagggagcggcggggtgtgtgtgtgggagcggcggggggtgtgagggagcggcggggggtgtgagggagcggcggggggtgtgtggagcggcggggggtgtgtgggggagcggcggggggtgaggagcggcggggtgaggagcggcggggggaggcagagcgatgaagcccctctgggaaactgcctggcagctcttcagtaagtcacaggtggaattccatgccacccagcagctccatcccgggtgtgcccaggagaaatacaaacatacgtccacaccaaaaacctgcgtgtgaatgttcctagcggcattcttcaaaagagccacaaagtggaagcgaccggaaatcccatcagcggatgcgaggacagaggaaggtggcgcagcaggacagctggcatcattcgagcggaaacgggtatgagtcgccgccacagccgaccgcggcgggaatgagcatctgaagctcctgcttgctgccgggaagccaggccagaatcccacaggctgagtctacctgcgggaacaggagcgggcagatggaagggtgtggccgcagtggggcaatcctaacaaaaaagagctggactggctgggtactggctccaccttcaccacaccccggaggtggatgctatttgcacccctaatttacagatgggaaaggtcagacactgggccaggtctgcctagctaggaaatgaggtggggtccccacaagctgtgcaaccccaaaactcaagcccttacccatcacctccctacactgactccgtgtgtgccggagagagagtgggaaggagctcagtcacatgctccccccacacccgtctgagctccaccctggtttccacggaggccagttgcgatgctgaacatgacacccactacatcctctctcaggagacaagaacgctgggaaccatgggagcaggggaagaggccctggtcttgacgcgttctccaaagacacagagcccgttgttccagttctccatgaggctgactgatgtcacagccttcgcatcacagacacacaaaggagtgagctgctgagaagggaaaatgctcagtgcaccacgtcccaggtcct

SEQ ID NO: 9575 - DNA, 1824 bp, Artificial sequence
  DNA replication origin
agctgccaggcagtttcccagaggggcttcatcgctctgcctccccccgccgctcctcaccccgccgctcctcaccccccgccgctcccccacacaccccccgccgctccacacaccccccgccgctccctcacaccccccgccgctccctcacaccccccgccgctcccacacacacaccccgccgctccctcacagcccccgccgctccctcacaccccccgccgctccctcacagcccccgccgctcccacacacacaccccgccgctccctcacagcccccgccgctcccccccacaccccccgccgctccctcacatcccccgccgctccctcacaccccccgccgctccctcacaccccccgccgctcccacacacaccccccgccgctcccacacacaccccccgccgctcccacacacaccccccgccgctcccacacacaccccccgccgctcccacacacaccccccgccgctcccacacacaccccccgccgctcccacacacacccccgccgctcccacacaccccccgccgctccctcacaccccccgccgctcccccacacaccccccgccgctcccccacacaccccgccgctcccacacacaccccccgccgctcccacacacaccccccgccgctcccccacacaccccccgccgctggtcacgggtccacccttcaactgcagccatcccagggggtgtgaagtggatctcactgtggtttttattttcatttccctgatacagaatccacagagacataaacagacgagtggttctgaggggtgggtggggtggggcgtgaggcagggagaagagggagaaggttctggaattagatggtggtgatggtcacacaaggtggtgaattgaacatactaaaaaccactgacttgtaccttttaaactggtgaattttatcccaatgaaaaaaaaacaccttgttcctcctttgagacccagctctcgcgcccactcctccaagagcccggggtgtctctgcacctcattcatatcactggtgtgacttttgtatcttgtgctgtgatgtggacagcagacccttctcccttgtatgtttaacacgcgtgttgtggtgtggtgtggtgttggctgctcaggacacaccctgtcgtccaccgcactcggggagtttcctgcgtgacactggggtcagcagcgtggttggaatctggtgatggagctggtccctgcccacagcccccgccacatcagtggcttttcccgcagctccccacaaaaggatgtgccgcctagcagagatgagaatcaggttttcttgtaagaaagagttgctgaaggaaagccggtcacgtgcagtgatgttgtgaaagaaagtgatgacaagctaaaaaaagaaggacactgagaaaacattattatcagcagagtttatctgggccagatttggggaccccaaccccaggatgctacctcaggagtgttctgagttgcagcgattacaagcagattttttaaggacaaaatgaggagatgtggcaaggtggtcccagccccttcacctagaggggcccttgttgacagaggtgagctgatgaatgatcagttgaagactcccgtgcttctgggaatagtcattgtgagcatgtggtcagcccggttgctagaattcttcccatgagcaggtggggtccaggaacttcaggggctgactgtggcctcatgcccagtacctttagccattttaatttaccaaacctcattgtcccattctcttttcaggttcttggccataaaatatggcttttggaaaaataaagctgagac

SEQ ID NO: 9576 - DNA, 1032 bp, Artificial sequence
  DNA replication origin
acagcagaggcaagtaattgcaactcttctctattattgattgtataccttgaaggcaaggttaattaagtcctgttgtggggtttgagggccagaatctaatttttggagctttatttaatgtcaggagtggattgggtaataaaatgcatattgagaataagacagccttctgatcctttagggtctagggctgtaaagcatttcagggttgctgccaaacgagccatgaactgggctgggtttttatatttgatgaaaaagagcctaaacactaactgatttgggagaggttggatgaagaaaaaggagcattaaccttgactatgcctttagctccagccccctctttaagaggagattgttgggcaggtgggggagggctagtcgcagaacaaaactgtaagccagaccaggtgtgacaaggggaagtgatagaaggattatagcgtaggggagaggaggctgaggaagaattggagcctgattcagcctcatggggagtgacctgaggaggagcagtctggggaggaggggagaggttagatgggtcggtacaaaaggaagattgaaaagacttagtaacacttggggttgggactgaggggacaggtaggagggaaagaaggaggatttgggatgagttttattgggaacagagactagggagggaccgatgtgtaaaagaatgcctggatgtcaggcatctcagaccatttgcccattttacgacaagaattacgtagatcttgtaagatggagaaattgaaagtgccattttttggctatttagaaccattgtcgagtttgtattggggtcaagcggtatcgcagaagaaaataaggcatttaggttttaggtcaggtgtgagttgcagaggttttaagttcttgagaacacaggctaagggggaagagggaggaatggagggtggaaggttgcccatagtgaagggagcaagcccagagaaaagagagggtagagacacagagagagggggtgggtggggggtgattgcccccccaggaaag

SEQ ID NO: 9577 - DNA, 3032 bp, Artificial sequence
  DNA replication origin
attaatttcctcctccttatctgtgcccctacccccaaccaaaagaatgggtttagagaatcagatatacctgggtgttgaaatcccagctctaagttatcttaggcaagcacttaacctttaataccccatgtttttcatctacacaatagaggtgataatgataactatctcctatggtggttgtgaggattaaatgggattgttagcttagtgcctggtgaagcactcaagaaaggttccaacagtggtaataataacagtaatagcaatagcaaaattatctgatcgctctgggcccctgttagccagctatcaattcagtctctttccctgtcccttccacccttactgagttctctgaaaaacaagtgagagccaggtgcagtggcacatgcctgtaatcccagctacttaggaggctgaagcagaagaatcgcttgaagccgggaggcggaggttgcggtggggtgagatcgcgccattgcactccagcctgggcaacaagagcaaaactccatctcaaaaaaaaaaaaaaaaaagaaaagaaaaacaaatgacaccatgggtttggaaatgccttgagaacatgtcgggtgtgatggagaggagcaagtgttactgtggagcatcagtgtagctgtcgttactggtcgtccagctgctcctctgcctgctgtatcctgacttgacctttctctatttgcagtacatcgaggagttaacaaaggagagggaagccctgagtctggagctgcacaggaacatgtaggatgggggagcgggggatgggaggtctgagagcccttagcatgggtggtgtgctgggaggtggtgggtacaggtgagcatgctagggggtcatacaggtttacatgtgtgcgcagggaagctccagtgatggctgtgccactgactcatggggtagcctcaggcaactcacgtcttctctctggcctgccacctgggacttttaattcctggggtctcttccaatgccacggttctgtggttgtggggcgagggtagagggtcgatcaccaaagcggtcctttctgttctttgctcattcctttctctactgcctctggccatagcataaccaatgaggagctgaaggagaaaaatgccgaactacaagaaaaacttcgactggtagaaactgaaaagtctgagatccagctccacatcaaggagctaaaaaggaaactggagacggacaaaatcccgctgccacaggtgagcggctgcagccccgggggtgtgggagccgcatccggctgggacatggtctagggatcatgcagggtatggggaggctccagccaggagctggaaaatttgggtccttgttctggtcccaccatagaatcctatagagtgtgctaaaaatctacaaattgggaccatgcctgggaaatcagaacctcagggttagggcttaaaatttctttttaaagaatcatagacgaaaaccgttattttatagattacatttatatacctagcttatgactctatttccttttaaggttcaaaccaacactttgcaggagaagatgtggaggcagcaggaggagctacgggatcaggagaagctacggaagcacgaggagaagatgtggagacaggagcagaggctgcgggaccaggagaaggagctgcgggagcaggagtagcggatgcgaaagcgggagcagcagatgcgaaagcgggagcagcagatgcgggagcgggagcagcagatgcgggagcgggaggagcagatgcgggagcgggaggagcagatgcgggagcgggaggagcagatgggggagcgggaggagcagatgcggaagcgggaggagcagatgcggaagcgggaggagcagatgcggaagcgggaggagcagatgggggagcgggaggagcagatgggggagcgggaggagcagatgcggaagcaggaggagcagatggggaagcaggaggagcagatgcgggagcaggaggagcaggtgcggaagcaggaggagcaggtgcggaagcaggaggagcaggtgcggaagcaggaggagcaggtgcggaagcaggaggagcaggtgcggaagcaggaggagcaggtgcggaagcaggaggagcaggtgcggaagcaggaggagcaggtgcggaagcaggaggagcaggtgcggaagcaggaggagcaggtgcggaagcaggaggagcaggtgcggaagcaggaggagcaggtgcggaagcaggaggagcaggtgcggaagcaggaggagcaggtgcggaagcaggaggagcaggtgcggaagcaggaggagcaggtgcggaagcaggaggagcagacgggggagcaggaggagcagatgcggaagcaggagaagcagatgctgaagcagaagaagcagatggggaagcaggaggagcagatgggggagcaggaggagcagatgcggaagcaggaggagcagatgcggaagcaggaggagcagatgcggaagcaggaggagcagatgcggaagcaggaggagcaaatggcggagcaggaggaacagatgcagaagcaggaggagcaggtgcgaaagcaggaggagcaggtgcggaagcaggaagagcagatgcggaagcaggaggagcagatgcggaagcaggaggagcacatgcggaagcaggaggagcagatgcggaagcaggagaagcagatgggggagcaggaggagcagatgcggaaacagaaagagcagatgcggaagcgggaggagcaggtgcggaagcgggaggagcaggtgcggaagcgggaggagcagatgggggagcaggaggagcagatgcggaagcaggtcgagaggctgtgattcaaggaggagaggctgtgggttgagtatgagaagatgcaggaggaggaggagaaggtccgggggcaggtggagaagatgcgggagaagaaggagaggatgggagagcaggaggagaagatgcaggaggagcggtgctcagagccctgcctccctccctccaaatatccttgtgatatgagccatgct

SEQ ID NO: 9578 - DNA, 1260 bp, Artificial sequence
  DNA replication origin
tggtggtgatggtggtgctgatggtgatggtggaggtggtggtgatgaaggtggtggtagggtggtgatgatggtggtggtggtgatgaagatggtgttggtggaggtagtggtgatggtggaggtagtggtggtaattaaggtggtggaggtagtggtgacggtggaggtagtggtggtaatcaaggtggtggtggtggtggtggtggaggtggtggtggtaatgaagttggtgcttgtggtggtggtattggtgatggtggtggtgacggtggaggttgtggtggtgatgatgctggtggtggtgttggtggaggtagtggtgacggtggaggtagtggtggtaatgaaggtggtggtggtggtggtggtggaggtggtggtggtaatgaagttggtgcttgtggtggtggtattggtgatggtggtggtgacggtggaggttgtggtggtgatggtggtggtagtggtggtaatgaaggtgctggtggtgatgatggaggtggtggtgataatggtgatggtggtagtgatggtggtgatggtggaggtcgttggttgtggtattggtggaggtagtggtggtaacaaaggtggtggtggtggtgacggtggaggtggtggtggtgatgatgctggtggtggtgttggtggaggtagtggtgacggtggaggtagtggtggtagtgaaggtggtggtggtgacggtggaggtgatggtggtgatgatggtggtggtgttggtggaggtagtggtgatggtggaggcagtggtggtaatgaaggtgatggtggaggtggtggtgataatgatggtggtgatagcggtagtgatgaagttggtgatggtggtgatgatggagacagtggtggtggaagtagcgaagggccctatggtagagagaattttggattcagggtggtgatgggagggtttattaagaaaacatcaggaaacagagagggtatttctggtatctctgaaatagtaataataatttcctaggtctgtaacaatgcaaaagtcagaactggttgaaatgtaaaattcaggtaaagaaagcacattttaatcaaattccaaatcatatctgttcataacattaggccaaattctcgtctagccttatcagtctttatgcatttttgttgttgttgctgctgttgttttgttttttttaggcaaagtctcactctgtcacccaggctggagtgcagtggcatgatcatggctcaccacagcctccatctcccgggctc

SEQ ID NO: 9579 - DNA, 1824 bp, Artificial sequence
  DNA replication origin
cggggggtccctcctttagtacgcgggtcagaggacagcggggtctccctccttttcactcttttggggagctggagaggatttcccacccttcccgcctccccgcggtgggcaccggtttgccgtccagcccttcttcccctcagcgtagcagggttgagggctcccccatcctctccaccctcttgagagggccggggctccctgcgagggcggcagggcgcggaaacgccaggggacctaactggagaccggcaccatgtggaagtgaagcggcagtgactgcactgggagcccccgccacggcctcgcgggggcagcgtccgttgcgccctgcacgctcagcttcagtcacactttggaggtgccgtataagcctgtcatatcacaggtttacagagctgccccgtggctggtcgtggtcctcgccgagcccctctgctgagcggggatggcggcaaaggggcgccggggagagcggctgggcgcgggagcgggcgggtcggccctgggagtagctccctccctgtcaccttgggggcctggacgcaggaggcgctagagacccggcaggagcgttgtgggggcggatgtcaccagggacagtgtcccctcccgacacgcgtgggagcggaggccgctggccttcgccctgggggccgaaggggcttcattgcttatcaccaaaggaacccacccttctggaagtttcctcctattcgagtgtggtccggcccaaagagcccccaaatcccacctcctcccccaaagccttaccccaaggaatccaaggcacaagagccctcccttctcctgccaccagcgagcatcccagagggcagccccagagggctgttccatgcacttttcatctcttccaggagatgaccagctctcaggactcagccttgtcaccacctaagacctcagaaccttctcgaatggccccatgccccgcctccctggctgtcctgtcctcctcgctggcagagggcatgtaagctaggtagctgcgttaccctgagcacagggccaggccgggcacggatccttccagaggttttcattttagcatccgtcagtgcccacagggcctaaggatgagggctcaggagctgcacagctcacccgcagatctcatagacaccagaggcagggaggtggccgaggagactgggcccagggctgcgtgcagtacctcaggtccggccccaccaggctccctggtccctggacttccctccttctgaggacctggaaacaaggagtggaggaggaggcaatgggtgggggggtgtccccctgaagcctcctgtaggtcccaaggctcacctcccaccgtgggtcatcctgccctagcagcagaaagaaattctcttccctgcagtgtttatggactgctgcccccaccctgtcctgcctgccctccactccaacaccctcctgtgactgtaacccaggtaatttcaacctcagaccctcccaccaaacctcactgggctggatgctttgggctcggtgctttgctatgaacctcaggatgtgattactatactcccagattttaggtttttgaaggttctgagagcaagcttccatgacagacaacactgatgaatccgcggtataaatatccagaacccaatcccttccaaggaaacacggttgagtgggaagctggacacggtttctattgtgttggttctgtcttcctccggctgtgtgcttggtctttctggggcgggcagagttgcacatttccagtcctttcctgtgctagcaacagactaattattcatcttctcttcaatctttgctgcttct

SEQ ID NO: 9580 - DNA, 951 bp, Artificial sequence
  DNA replication origin
gtcccgcaggtagcggcggcgccgcatcgcctcctgccacatcggggccgctcacagggcgcccgccgtgcgcgcccggcccgggcagcgccgctcgccgcggccgcccgcgtcccacccccgcgccgcctcggccggcccggctgccggcacccggagctgcgcgcaggggcctccggcgcgggcggagctcggcgccccgggctgggcgcgctgacgcgcgggcgggggccgggcggcggcctcgggggcagctcccggcgccgccgccgccaccgccaccgcgcgggagggggcgggttccacggggccctccgcccgccgctccccgccccgcgcgcagccggcctccgtgcaggggcggtgtcggcccccacccgacggcccggctgcaggctggggacggcgggggctgtacggtggggggagtggcgaactgaggggctcccgctgcgccccggcccggggtcgtcctcgcccgccggcctcccacactcagccaccaggtcgtccacctcctctgccctatcccgagtgcagcgtgggtggggtgggagggacggccctccccgctacgaagtgagaacacagcctaaggggtggagggagggagtcctacccccaccactccccccgccccacctggctcggagcactgcggggctcctcagctcctctccactacctcaaggtcagcgggcagggacgctgccaccctcctgtttcctccaccccttagtgggctgcggggcctgctcccaccctcccccacagtcacagagcgcagccggggtcagaggacccggggggtccctcctttagtacgcgggtcagaggacagcggggtctccctccttttcactcttttggggagctggagaggatttcccacccttcccgcctccccgcggtgggcaccggtttgccgtccagcccttcttcccctcagcg

SEQ ID NO: 9581 - DNA, 1200 bp, Artificial sequence
  DNA replication origin
agctccgggtgccggcagccgggccggccgaggcggcgcgggggtgggacgcgggcggccgcggcgagcggcgctgcccgggccgggcgcgcacggcgggcgccctgtgagcggccccgatgtggcaggaggcgatgcggcgccgccgctacctgcgggaccgctccgaggaggcggcgggcggcggagacgggctgccgcggtcccgggactggctctacgagtcctactactgcatgagccagcagcacccgctcatcgtcttcctgctgctcatcgtcatgggctcctgcctcgccctgctcgccgtcttcttcgcgctcgggctggtgagtggcctccccgcgggtccagcgccgcgccttccccggccctgagaggagcccggccagccgagccgcgtcccgctccgggctgcccctcggcccgcggcagcccctcggcccgcggcagcccctcggcccgcggctccctgcttctcctgctggcccgcggcccggtggactctggcaagggctgcgggcgggagaaaagtttcctgggaaggctcttcccaaaataaagttcccgaggtgttcaccaggtggacgggcagggcgtgtgctttttgcatctttgcgcacccgctggcaaactctgcgctttccgccgggcaccgctgcccgcagcgctggaataggtcttccccgactcagccctgggcttcctgggcgagtcgctgtctcctgcccggttccactggcatggccccacagttggcattttagttgggattgggcgttattcaactctgcagaaagcctgccttgggaaagtggttaatgacaaggaaaatgaagaagaaaaattaagtatacatctttgcctttaaatctgtatgcatttagctctttagcccgatagacggaaagtgatgtggtgttgacttgtgaatcaatctttcatctcagagactacagttaagaagcgtttgggacggacgattgctttcccgtttctaaagaagtaacgtgtttagggttttggacaggttattaaagtggatttcatcacgaggagtataatgcagctcaacagctgatgtcagttttgccagtttatatttttcaagcagaaatccttggctcgctcccttgaaaagtgaggggaagtctgtagatggcgataacttcctgttactgatctctgagtgtgtggttc

SEQ ID NO: 9582 - DNA, 1340 bp, Artificial sequence
  DNA replication origin
caggggtgggttccgaggggcggggctggacagcctgtggagggggccgggtgggagcgtgcggagatgaagggggcgcggcagggtcagctggggagacagggagggtgagctcccgccaaggcgcctgggccccaaagagtacagctcaggcgactaccagtgtcagctgaacccctgggacgaggatgtgggagaagccgggtgcgcgaatgggtgtcttagctgcgatcaggggctgggagtcgcgggaatgctcagataggacccggtgctcttcggagaagggagcgggagccactaggtgtcaggatccctcaaaagcacagtggctctgtcgggacagcagggcgctctttctgcccagggtctggagggggtcgcgggaagccggggccgcccagcgggctgggcgcggctccctctggggtctgtctgcggcaggcccaggctagcaaggaaagaaggccttgctgccgggactacgcccggatggtccagggcgcgggaaaccctctgccctcctgcaaaccgaagaccagaaggaatagctggcgagccgcctgcagggagggctggactgagagtggtccctctgttctgtcctggccacaccggcccgtgcatttcctgggatgggatctgcgagtctgcgaaggccactgggcaccctgcatctcccaccagcggccaaaggcaggaaaagtagtaaattcaaagccagttgagggtcatctactcctttcttctcaccattgttcctaaatgtccccggtttgtcttgctcaagatgcaggggcaggggagtcattactgaaaaggagcattcattgaggaccctcagcctgcaggcgtaactgggacaggtctttctaattctagctgtcctggtggcttgagtgggtagagagggatatagattagccaggtgtctagggggaaggagatcgttcccttatggtgtataaggtgttcccagaaaatgcatccttcctttccccacctcctgcccccaccatcctagaccctaaataaattccccttctgactgggttagcacacactggcctgcatgccacacataaagtgtaagcactcttggacagcctcaccaacagaagcaatcgtgtttctagtttagacaactgctgtcggttgaattgtgtccccttgaaatttatgttttggagtcttaatccccagtaccttagaatgtgaacttatttggaaatagaattttacagagataatcaaaataaaatgaggccactaggatgagccctattccagtatgactggtgtctttgagaaaaggggaaatttggatatatagagacaga

SEQ ID NO: 9583 - DNA, 1097 bp, Artificial sequence
  DNA replication origin
gggggcgctggacggtggcggcatggaggacgacgaggaggagaccaccgcgtccacgctgcggggcaagcccaggccgccgcccgtctcggcgcagtccgccttcagctacatcccgccgcggcgcctggaccccaaagagcacagctactactaccgcccggcgcgggtgaggaccgcggactgggcgcggagaccggaaggctgggcggctgggcggctgggcggctgggcggctgggcggctgggcggctgggcaggggcgggcggccgcggaggggcgggggagaagggatcaccccagcggaagggtcttggggcggggctctccctcggagggagggcgtaggggcggggttcaccttagggaaaggggcctgggggcggggctcaccttaggggcgggggcctaggggcggggctcaccttaggggagggggcctgggggcggggttaccttaggggaggcagcctgggggcggggttcaccttagggactggggccttggggcagggttcaccttaggggagggggcctgggggcagggatgcgccgccggggactggagagaggagctcacaacgaggaggggccctgggaggggctgcaccgctagggatcggggacagagctcacagagtagaggggccctagaggaggagcgcaccttcgggcagggaccctgggggcagggcttcactaccaggggtgggttccgaggggcggggctggacagcctgtggagggggccgggtgggagcgtgcggagatgaagggggcgcggcagggtcagctggggagacagggagggtgagctcccgccaaggcgcctgggccccaaagagtacagctcaggcgactaccagtgtcagctgaacccctgggacgaggatgtgggagaagccgggtgcgcgaatgggtgtcttagctgcgatcaggggctgggagtcgcgggaatgctcagataggacccggtgctcttcggagaagggagcgggagccactaggtgtcaggatccctcaaaagcacagtggctctgtcgggacagcagggcgctctttctgcccagggtctggagggggtcgcgggaagccg

SEQ ID NO: 9584 - DNA, 1063 bp, Artificial sequence
  DNA replication origin
gccccgccccaagacccttccgctggggtgatcccttctcccccgcccctccgcggccgcccgcccctgcccagccgcccagccgcccagccgcccagccgcccagccgcccagccgcccagccttccggtctccgcgcccagtccgcggtcctcacccgcgccgggcggtagtagtagctgtgctctttggggtccaggcgccgcggcgggatgtagctgaaggcggactgcgccgagacgggcggcggcctgggcttgccccgcagcgtggacgcggtggtctcctcctcgtcgtcctccatgccgccaccgtccagcgcccccgccttggccgcggtccgtcccgcccgcccaggggcccagtcggagtctgcaggcctcaggttgctcagcgccagcgtctagcccgcgtctgtgttcggtcgttgcctggaaaccgccgcctggcgacccggagctgccctgcagcattcccgctccagggtggagcgaccctcccctcctccctcccggcccctcgactacacctggggtctctccttccttcctcctcgggaggagcccgactgggagacgccgcggggactacccatttccagcccgctcacctttcccatgcagcagcccctgcttcactcactgatcactccttcgcgagaccattagtgactgagcacctagcgcatggtgtgtcaggagctggagattgagccttgaacggagcaggccttgtccacaggaagcttacagtctggagaagacacatgaaagacgcgaagaagccaaatgacttgccgaggctccagggcagcgctgtccaatagaaacatgatgagagccacgtgtgtcgtttcttatttgactcagtaagtccaaaacgttatcatttcaacaaatggcactagctgcctttcaagctctcggtggccacgtgtggctagcagttacagtattggccagtgcaggtgtaaggctgcatgaatttacagaatctggcagaactcagctgctgtggacagggctcttgcaatcctttgccagtgtgtttacgttggcccttg

SEQ ID NO: 9585 - DNA, 1349 bp, Artificial sequence
  DNA replication origin
caacaagtcaatatgaagcagggaatctaagatcattagagaccaaaacttagtgctcatttcatttctagggcccaagtcccctactccctcaatgtgaaacagtgactacagaaaagatggagaccaggggagaacgaacagctccacgatcacaatgggcgtggcctgggaagtgtgtaaagtataacctgggcaaaggggcagatggaggtgacctttcttgtgctttctgtgaagaaacagaggtgtattggagccatgacagtgcacagccaaggaaagctatagaaacaataaggaactgtgcacatggcatgtgtagtcaggagcagcatcacctgtcactgggaggagtacagggacccagcaagttacctgtgaagagggaggggagctgctctatcccaaggactcccagcaactacacagctggcgggttgaaagtagacccacattagcagccaaatgaagccagctcagctgcatgtgcccccaaaaggcagagacattaactggggagtgggatagataaggaggatggattccaagtgacggaaggaaggggaataaaaggagagggagaggagttaagagttgagcaacaggtgtgaggagagggcaggtatgaggagggggcaggtgtgagcagaggtgcaggtgcaaggaatggggcaggtatgaggaggggagcagggtgaggagggagcaggttctaggaggggctgggttggaggaatggggcaggtgccaggaggggacaggtttgaggaggggtgaatgttaagagggaggcaggtgggaggaggggggcaaggaaccaggatggatcaggaagaaggagaggggcaggtaccggggacaggttctaggagggggccagtgtgaggatgtggcaggtgtgagaagaaggcaggtgtgaggaagagctgcagaaacccggttcctgagctggcaaagagaatgtggggctggttctctaaaaccttccccactgggaaatgctacttcctggggtcagagagaaagtggtatagtgagggtcccaaatatattgagggagacagagaaaggagacaaggggaagaaaagctagcatctgtgtgtgttactcatggttctccagagacacagaaccaacaggatgaaaagcgagggaaagagagagggagggagagagagatacataggattgatttattttaagaattggcttatgtcattgtggaggcttggcgagtccaaaatcttggggagcagccaggctggagacccagggaagagttgctggagtttcaaggcttctgctggctgaatttcttcttgctcagggaggtcagtctttgttc

SEQ ID NO: 9586 - DNA, 1408 bp, Artificial sequence
  DNA replication origin
aggcgctggatgactggcaccagcgctcctcgcacctggtgagcgacccccgcccgattcctgcgtggccttggcaggagcccctgaccgcgccgcgccgcgccgcgccgctggccgggacccggggactgcagcggtcggctggtgggtggtgccgatctcgggtgggatccatcagcaggcacctgggcgggggttgcgcgtacaggattaggacgaccgtcagtccgggggcgcccacagttgagctagtgcacgggctggaagtttgtgtacccgcctgtgccgaggtctgagcatggagaggtaaggagccggagtgtcgcggtgggcgagacgggacccctgcccaacacccggaaaggtgcgcacactggtctgtgcccgcccccggcgcgcctccaggctcgcactgccgcgagccgggggcaggggacacggaggtcgggacttggcggttcgggagcggccacctcgcagccccaccggcttgggcaggttttcctgctttccttacaggggaaccgggaggcaatgggacttgggctcaactccgccaagcgccttggttaatgaaagacactaaggcgggggatgcagaggcctggggaaccaccagccaggtgcgctgcagctaggcgagcccctttcaccaggcatccctccgctgctccacggattttgcacaccgcggctcagggtttcagaccccagggtttcgggcagatcgggctccagagggaatggtttctcccaagatgtgcgtgggaacggtcgtggaggagtgattcccccggctcgctccccgcggcggccggtgcctggcttggagcggtcacatccctgttcccctggctttggcgggaagcgcgttcacctcctcgccctttgcttgctttgtaccaggatgccgcggccggagttgggatttaactttcctgcgcctgcggcgtcctcgggattcccggcagggggcgctgcgagcgagcgctcggaggacgaggcgccacaggcagttgctgggtcctgggcgagtgggcgggagtcccaggcaacaaacagcagaaccaggcagatcttgcaataatttcattttgggggccgggggttgggggagctgatctggtggctatagagagctgtcagccttgctaggagaggggacaggaaaggtggtggccagacataaatgctctaactagaaaggtctcttccagagaaaaagatcgctgtaaagtcttccttgtctgggcatctgccttccttgtgactgttacatttactcagaaagaaatcgaaattgagggaagataacgtgagctttgtttaataccgttctgctttttaggggtactttagttaacacatcaggagtcacaaatgattgttctggtttgttttgaagaaa

SEQ ID NO: 9587 - DNA, 770 bp, Artificial sequence
  DNA replication origin
ggccagccgcggcccttggcccgctgcagccccggccctccaccttccccgtgcaggggcggcccggccagtgtcgctcatcccgggacgctcccttctcccacccaggactgccccgcggagctggcttggacacccaactttgccacctcgagggtcgtctctgctgggcgcgaacctgcccacccaccggttggccgcgcgctcggggaccgtgctcgtggcccccaagccggtgcccccattctggaactcagcgagtagggggcggctctggggaagtggcagggggcggctgcagctgctgcctccacttccctagccaggtgctgaagaggatcctcggagccgctctggcccccaggcgctggatgactggcaccagcgctcctcgcacctggtgagcgacccccgcccgattcctgcgtggccttggcaggagcccctgaccgcgccgcgccgcgccgcgccgctggccgggacccggggactgcagcggtcggctggtgggtggtgccgatctcgggtgggatccatcagcaggcacctgggcgggggttgcgcgtacaggattaggacgaccgtcagtccgggggcgcccacagttgagctagtgcacgggctggaagtttgtgtacccgcctgtgccgaggtctgagcatggagaggtaaggagccggagtgtcgcggtgggcgagacgggacccctgcccaacacccggaaaggtgcgcacactggtctgtgcccgcccccggcgcgcctccaggct

SEQ ID NO: 9588 - DNA, 948 bp, Artificial sequence
  DNA replication origin
tcccggcaagtagatcggcgcggggcgagcgggcgcggagagcgcggggcggagagcgctgggcggggagcgggggacagcctgggcccacccccgccccgccccgcccctgccccgcccccgccgccgcgccgcctcctcctcctcctcctccccgccggggtgaaactcgagcgccccacccgcgcctgacctccccgagcccctccccgggccccgccccttcccggtacaggacccccaccttcgctcctgggagccccgctgcaccccaggagttccattccagcctccccagtgcgagtgcggccgagcgctgacttttgggggctccctcccccgtctcactgggtccctctgcggctcccccgcccgctgtcccggttcagacgtggctgcaccccggaggggggcgccggccgagacctgagacgtggcgctccctctctgccggcctcggcttcaggtacgtgcggttccctcggctaaatctggcccgggggatggggggcaggggccgtctggtcctccggaactcgaactttgtgattttgttctttctgtgtgacatcctcatccgttctgagggagaaactccttaaagaagacgagagagtcagtcgttgcgggttcttggaggagcactttgggggtgagactcccggctagttcgggtcgatttcagcgggattaagtcaaggaaatgaacaaatctgacgaatcagggaggccagagaaggcgtccccaggtagccacgctgagcgttaagagagaagtcccgtatggtcaaagtcattcgtccaattctgtgtcaattattccttgttgcacttttgcaggatccttgggccttactaagtactcaggtgaaaagttgataattgggaagcaagtaaagtacctttgaagacgtgtataattggacactttgttgcagttcttcagtt

SEQ ID NO: 9589 - DNA, 828 bp, Artificial sequence
  DNA replication origin
ccagaagcttctggtctagtaggaaggacagctagttatcaaaaagtgacacaaccacaggtaaaatggaaatcatgtaagtgctgcaaaaagacacacatggagtacaacatgggaactgtggcctttccagggatccaggaatactttccagaagaatgggaagttggctgtatttgaaagatgagtagcaatttattaagtaaggagtgctgaaggaatatttcagaaagaggaaactgcaggtgtgcaaatgcctggtggaagaagggagagtagaatgttggaggcatgggcggatggccacctaggagaagctcagagaggggaatccgttgtgatggtgaggaagccgctgggtgggggcagactccagggggcctcatgggccatatcaggatgtcagtccctaccacgagggcaacagaagacacgaggaggaggcagcgaagggggtgccgcggctgagtttgtgttccctggagtctggatgcagcttggggacagatgccggtgggagggaggcaggagtggaggcagagcagtcagtgaggaggttcaggtgatagatgacgttgctttgagtggagtgtggtggggaaggaggggagttgtcaggctaagagataaaggagatgaatgtcagcagggcttgggcgtgggctggctgcgagcaggtcagggaggggaggtgggtgctggtgtgctcagctggtggagggcatacctgtcggtacacactcatgggggacagcggatttcagtccacctatgtgctatgtattagtctgttttcacactgctgataaaggcatacctgaaactggg

SEQ ID NO: 9590 - DNA, 860 bp, Artificial sequence
  DNA replication origin
tccaggaagccggggagggggaggtttgaagacacttagtggaaatcttaggacacacaagtcaagagcagattgaatttgtcattttttaaaacgttaccactgatagtttctcgatagtgggtcccaaggaggaattcattgacttaaagcactatttctttatttcttcgcactccggctccgagaagatggtaggacccatttccggtttttttttttttttttttttttttttttttttttttaaaaacgctgttggaaatctcgcgatggagggaggaggaggtgaggctggagcggcttggcgggttcctgggggcatgagaaggggtgcgggcgggccgggggctcgcggtcagctgaggtctccactgtcgaggcggtgaccgggtgcgggcggctgctctggcctccagcctggccttcggtgaccagagctcctggtcgccgcgcggtgcccgcgccggttctggcgatccttgtcggcgggcgcgtttccccagagactgttctaggctacttagtgcaagtgactcagcctttggcacgatcttaaggaatagggatagtggaggcacactgatggattggaatcgcagttctgccgctcttcctagctgtggctttgaggaaatcccttaacttctttgtccctcgggttccctgtctgcaaagtgacggtggtaacagtagtgcctactcacagggctgctgtgagattcaaggagaacggtgcctggcaagctgaacacagtgttggtaaataaattaacattttgcacaaatggttcagtaacttgccactggtatacagctagtaagaaacagttacacagcctgatgcaatgggtcccaca

SEQ ID NO: 9591 - DNA, 1161 bp, Artificial sequence
  DNA replication origin
accctcgccttcgatgaatatgggcgccctttcctcatcatcaaggatcaggaccgcaagtcccgtcttatgggacttgaggccctcaaggtaatggcacagggacctgctcgcggtgggctaaggggaggtggccgaggccgtggctctgcgcctgcgcgagttgaggagcggctctgccatgtgctccccggaaaggtcgagaatctccgtctccctgcggtctccggccgctcagcccgcttactgagctcgggagacgccggcgcctaatcctgggctcggaatgtgggggccagccaggctgggccgccagcgcccttcggagctgggtggggccgctcagtccggtcgcccgcgggagcaaagcgggaccgcctccccgcccggctcctccagcctgacggccgcgtgggactgcgctccagtgggagggcgccggggagatgctctgtcacctgtcggttaaggcgctgctgcttaacctttcgctggtccacccgcaacggcccttccgttttctttgtcactcgtaaaggtgtggtcacttaacagggtatttcatttctgagtgcttttttgcccacccttgaggaaaaatagcgaagagtgaaaaacggacgcacataaccgtaatacaaggtggtgtgcagtgagaaggacagctacggagagggtgcacataagcgtggtgctggaggacagctttagatcggggtgagaggtagcattctagggagaggaaacggtagaagtaaaggcttgggcaagaatgcgcatggcacgttgtagaatggaagagccatccggttttaatggagcactgacttctttaacttacaatagttcccgaaggtggaagctattgaatgcccaacatggaaaatacgacgttatctttggggaagaaggggagccattgagggggttttgagcagaatttcagtagagctgcacttcaggcagcaaagcttgagatagaccgaagggaataaggaagaccagaggggttaaagaaaccagggcaggggtgcaggtaagaaacatctgagcaccagacgttgacagaaaatgcagaggaagggacactccgagagggccttcagggtttgttataaagtgaattcataatagaccattccactaggtctctcaggtgtc

SEQ ID NO: 9592 - DNA, 1108 bp, Artificial sequence
  DNA replication origin
acccgggcgccgacgcaagggctcgggcgccgcgcgtcgccgacttaccttcctccgcggtgtccatcttgtctgggggggcggcggtgacgcagccacgaggctcccgcggccgggcggggaaagagggaggggagaggaggagggagccgggcccgggcaggtgcgtacgctcaggtgcgagagaggaagcgagaggaaggagaggggagagggagagggagagaggctgacagaaagcgagcgacacgggagggggaggggcgggaacacctaggggcgaggcctgggcggggcgccgaggcggaaggggcgggagctccccaacgacaggcgctgtcacttccggcggccgcggcgtgcactgtcggtcggcggctaaggaggggaggcacctgcatctggggcgcggcgaatcctcgcgtgcgccaggccgcctggggtagtcgccgagactgcgccggccagcggggccgaaacctaatcaggagctgagctttgatggcggcttctggagggacaaagaaggcgcagagcggtgggaggaggctgcgagaacctagctcccgccccagccgacgtgcgagacaaaggccccggcgcggggctcttcggaaggccgggaggttcctgtgacaatgcgagtctgcgccccacgctcccgcaccgtgatgccgaggccaaatggctagagtgggcccaggcatcagcatttctgtttggcagccgggcagttgtggtgcacgttttgaggaactactaaagcctgcctgtgatgaaaaaggcaaaagctgacttcaccaaaattactcccagggagacttctgcatttggctggaaggacatttgagtaaaccgctgaggctggtggttgaaacataatcctctaagggagatcggttccgataccctgagttagggacgcttgcctgggcagagctaaggggagaatgatcaaaagccaagctctgtccccgtcagcacgtcaccctccctcactgtaatccctgactgttttctctaaatgaagaattatttagagaatataaattagaagggccgccacgtcagaattgcctgagtgggagcagtctttccagcctcgaaa

SEQ ID NO: 9593 - DNA, 2426 bp, Artificial sequence
  DNA replication origin
ttcctcttgacgaactccttgaagaacaattttggaagtatttattaatttgctttaaaataacaacactcattatgtgttaatataaatactgtttttcgtgaaaataactattccaaactcccaaaattgatgaggaaagtggatttgttttatatttgccaatctctttaatacctattttaatgagaagcagctgggtcttttcatctctagctgcattcattctattatctcatgtagcctctagaaaataccactgcaaactggcaagacaataagtgaaaaagaagtcttaggggctgggcatggtggctcatgcctgtaatcctagtgctttgggagctgagatgggaggattgcctgaggccaggagttagaggttacagtgagctatggtggtgtcactgcactccagcctgggtgacacagcaagaccctgtctcttaaaaaaaaaaacaaaacaacaacaacagcaacaaaaaacttaagtgttactaggatagtagttgtgtctttgcattctctgagtgagaaacttgggatcccagttctcttctctaggccaagcagagccctggggcttgatttcagagttgttgggtttgcttagtatcttgtttgttggtttgtcattcagaaggacaggggtcttctgaaaaatcagtgccctaattcatgtgtgtgtctacatccttctaagtggagatccatgtctctctccccactccacctgtcctgttccaccattcgctagctggccatccacttggagtcagcagtgcttcctgtggtgagtgtgccctggagtttgccactgctttggtcctgaccacagctttctcaggccacgcagggctaggttgtctaggtggcagtgttttgtatcatggaatgagcccaccaagtgaccaattgctgtacccacgtggatgtcactccacctgttgtccttgcctctcacaggcagcaatgtgccagcaggactgtctttgccataccccaggccatagtcaatggccgacccgtcacgatgttcctggagggcagcgtcccacgggtgggacaccctttgtcatgctgtggctgctataccctacttcctacttgcacagccatctgaatgtgggctagggagcccaaaccctatgcctgagatctgtacatccacacttgcacccaccctccctggtagatcctacagtagtagcacatgccagtttcaaaagttaatccacagtattgttgtgaatggctggatgagggttcagctcctatatagataactggttattgtaggactgatccgcacctgtggcttcagtgactctggtgattctaggtaacctagatcaatcacattttctccccacccccaccatggccctgtcactcttaggtggcagttgtagtgcctactgaggcgaccactgtgaccaagaatcttaataatagggaatctcaatttgattctgcagagagagagcctgataaattaataccctatctaaagaatgcagcaggcgcacaaattacccactcccaaccctggaggataatgattaaaacaatatagaactctttcaaggccctgtagttggaaagagtccagtttaaatcctttaaagaggatctattgcagggcaagcctggtgctggcagccacggtaatcccactttcaatgtggtgtgctgaattcctggcagttaaaatgcttgtttttggatcttaacgtgctgccggggtccattgcaagaaagtccatgcctcttgtctttttggtaccttacgggctcttcttccctgagtttccctggagctgaagtgtgcacttgaagaaaattagtgttcaaagtagcgtgggctgcctggatactgctggtgggaatcatggaatgggagcgtggttctattttgtttgtgttggaactttgaggaagcttattaagcagggcagttggggcattagtattgcaccgctaggactcaaattctgggccagtaataagactgatcagagtgaaagtttttgccaaggatgttttcattaaccaagaatgaaggtgaaagtgggaagtttaaagatgttcaggtcctgtgtagttacgaacataaatgtgatgttgaccactgcattaatgcccatgacccactagcagcttccaggaaaccagagccctttgggtcgtggtagggggaaggtctgtgttcatagctgaaactgaaaggcaacagcaatagagacagcttaatttgactgaacatgagcaaccttacctgcttccagcacagacaggattgtcccattgatagttattctgtgggtgggggtgcatggcttttctacttgatgaagagattttgagaggtgacagcatgctggcagtcctcacagccctcgcttgctctcggcgcctcctctgcc

SEQ ID NO: 9594 - DNA, 1462 bp, Artificial sequence
  DNA replication origin
ggtggtgtacacgggcgggatggtgtacacggtggggggatggggcatacaggcggatggtgtacacgaggggatggtgtacacggggggatggtgtacacggggggatggggcatacggggggatggtgtacatgggtgagatggtgtacatgggcgggatggtgtacacgggggaatggtgtacacgaggggatggtgtacatggggggacggtatacacgggtggggtggtgtatacaaggggatgatgtacacggggggatggtgtacatggtggggacggtgtacatggggggatggtgtacatggtggggacggtgtacatggggggatgatgtacatggtggggacggtgtacatgagggggatggtgtacataggggggatggtgtacatgggggggatggtgtacacgggggatggtgtacatgagggggatggtgtacatgagggggatggtgtacacagcgggatggtgtacacagcgggatggtgtacatgagggggatggtatacacggggggatggtatacatgggtggggtagtgtatacgagcaggacggtgtatacagccgagccccacgaggttgccgaggtgggaggacagtgcatggacacgctataccaccaagagctggggagatgagggaccagcatggggacttgaaaggcgcagccaggagggaggctgctggtgagtgaagaaaagcatttcctggtggagagagcaatctcctgtgtcaaagcacacaggacaggacaggaaggacaaggactggcgggtggcacaggatttcctcggagcccggtgctgtgctggagccggctcatgagcctactgctaagtttccagcagttgtgtgagctggaggacttcaccttggcagcctgaactcagcagcagtgggagtatttacaccacatcgcttggcaaacatgactgagaaccaggaccttcccgagcagggtggtgccctgcaggctgctggggtggggtgtgagggcagactgagagctcctgcttgcagcagccacggaggtggctgacatccctggggaatcgcctgcagggatgaatctagggctgtgcttccaagggaagcgcaagaaacaaacacaggagggccagggtggagcaccatcctcacgggggagctgcagatgcagggaaagggccgctgcaagccaggcctggactgtccagctccacagtggctgtgtcaggaataaaccccacatcctcagggacaggaaagggctctgaggccgctccaggctatgggacaaaatgagccttccctacagaacaccatggtcagagcaaggctgataacacagcccgctgtcctcctctgggagtgagaataatgacagtcacctcgtgtggttactgcgaggagcagacagacaccttggccaggcccagaggggctcagcaatcacccaagtcacccagcca

SEQ ID NO: 9595 - DNA, 1182 bp, Artificial sequence
  DNA replication origin
tgatggcatgtcaatgccattcagtgctacacagccacgaagaaggccgcagatttgtgttgttagcatgtaagttggcatgtgttagcgtgtgtgttggcatgtgttagtgcatgtgttagtgcgcgtgtcggcacgcgttagcgtgcgtgtcggcgtgttagcgtgcgtgtcggcatgtgttagcgtgcgtgtcggcatgttagcgtgtgtgtcggcatgtgttagtgcgtgtgtcggcatgttagcatgtgtgtcggcatgtgttagcgtgtgcgttggcatgtgttagtgcatgtcggcatgtgttagcatgtgtgtcggcatgtgttagcatgtgtgtcggcatgtgttagcatgtgtgtcggcatgtgttagtgcatgttggcatgtgttagcatgtgtgttggcatgtgttagtgtgcgtgtcggcatgtgttagcgcgtgtgtcggcatgttagcatgtgtgtcagcatgtgttagcacacgtgtcggcatgtgttagcacgcgtgtcagcatgtgttagcgtgcgtgtcggcatgtgttggtgtgcgtgtcggcatgtgttggtgtgcgtgtcggcatgtgttggtgtgcgtgtcagcatgttagcatgtgtctgcgttagcgtgcgtgtcggcatgtgttagcacatgtgttggcatgtgttagtgtgcgtgtcggcatgtgttggtgtgcgtgtcggcatgtgttggtgtgcgtgtcggcatgtgttagtgtgcgtgttggcatgtgttagcgtgcgtgtcggcatgtgttggtgtgcgtgtcggcatgtgttagcacgtgtcggcatgttagtgtgcgtgtcggcatgtgttggtgtgcgtgtcggcatgttagcatgtgtgtcggcatgtgttagcgtgcgtgtcggcatgtgttggtgtgcgtgtcggcatgttagcctgtgtgtcggcatgtgttagtgcatgtcggcatgtgttagtgcatgtcggcatgtgttagcatgtgtgttggtttgctagggctgccataaccaagtcacagaaaccaggtatcttacaacaacagaagtgaatggtctcatgatcctaaaagctagaagtttgaaatcaaggcatctgcaggacaatgtaggggagactccttcctgcctcctccagcctctggtggctctcagcaatccttggcattc

SEQ ID NO: 9596 - DNA, 1109 bp, Artificial sequence
  DNA replication origin
tcccccggggccttcccctcgcgccccttcctggccagagttcagagccaggcaggcgctctctcgagcgcggggactgggcacctggcagcgttgccccagagctggggacagctggcgcgggagaagcagaagcaatcactaaagaagccgaacccgagtcgcgggcggcaagcggccccgcccctccctccgccggcccgcgggatgggggcggaggtggcggcggggggacgccggggcggagccggcctccagcttcgggaacctcggacccctggagccggcctccgccgagggcgtcgggcccccggacctgggtggggccggtttctcccgccgcttcagaggagcagagcgggttttctcccttcgggggatcccgggcttcggggctgactccacccggccgcggccgcttggaggccggggaatccccggggcgcttggcgggcagaggagccgggcgcgggagcggagccgtccacctgggacctgtgcccggggagcgctgcgggccgggccactctgaactgggggcggtcggctgctgtgggggagtcccagcccggaagggaggacaatcctcagagtcccccgtctcgcggaaccggggccggccgtggcttgagggttggtcagatcctgggatggggggcggggtgttccggaacctcagggagcatctgagtgggaacggacgacgaggaactccccgtccccatgcctggcctgtgtcacgtgcggggatctgcggactcacccccggaggctgcgactgggcgctgaccccacgtctggctgcccaaaagagcagggccgcgggcgacagccgcagtccaggcccacagcccctctggcccggccttgccctctccccgtcagtcctggcgccggggatgggcggggaggaggagggcgtgtgaggatttgccacagggagcccttgacttcggggtaggaggcgtcgtgagccaatcttgggggaaggtctctgcgcaaaggcgcggaggtgcgctcgcgcccgtcgcaggtcaaagactgcggaggccaccagccctgtgtccccctagcctccttccttcctttttttcccccgatcttgacag

SEQ ID NO: 9597 - DNA, 1107 bp, Artificial sequence
  DNA replication origin
ggctcctgagcaaaaagcatgtgcatttgtgctaggctgcatctgcagataccacggtccttggacaatacaaaaatcaggtgagaacgctgccatttgcccactgagcacagactacggggaacttggccaccgtggtcactctgcagttttcccttgaagtgctttgcttggtggaaggtgttccaccagccagtccttctcaggtcttcttaagccaactttttttcttttcctttcttttcttttcttttctaaacatctcgttttctctgaatctggtcataacgaaaggatagcctgtgcctgcctccacgcctcctgccctacccgggtggatgcccgcggctctggggctctccctatgccctgactctggggagccccggctggcattggctcgcgaaggtgacctgcggacagaccagtcagagatcacgttggctggtcgcggcgcgggccacaaagctcagcggaggtggggtaggggaccaagctgtcccggcgagggaagaaactgttgcttccaaatcattgcggctggaggagccgatctgcgccccagcgtgttaggacaagggcggcgcgaggggcccaggggccaaatggggcgctgggcaggaggggctgtctcctgcaggggaggaggaatggtcccctgccagggacctggggaaaggtaatagtcaggaggggaccgggccgcaagaagcccatcctggattgcagcacgggcagccagcgcgaattcagtcaggaggtccacggggaccggtaaacgagaaggggatgcggtgaggacgccggactggcgtttctgccgcgctgacacctcgactgctccctccccgcaccgcgtcccccagcctgagacggggaagccacccagggcaccgcgctcccaaacagcggggaaaaggcgctctgggcggcggctgagtgaccgagggaccggtccggagccaggagctgggaggcgcggggatgtggtggggaggaggggagtgggggcagtgagggggctcaaatcctgcggggacgcccgcttaccctgccgttgcggtcagtctcctgcgcctcctcgacgctcaccccgcgccgcaccag

SEQ ID NO: 9598 - DNA, 816 bp, Artificial sequence
  DNA replication origin
agacggcgatggggtaaaaaaggtgtgtgcagggcgggtgcagctctctagggaatagagtggtcaggctgggcttggcagaggtgatgttggggtccgtgtgtgaaagaggcaaggcagtgggccacagggacacagagaggggaaaatgccccagtagaggaaacagctcaagcaagggccccaactcaggactgtgcctggtgcatccagggagcagcccattggccggcagggctagagcagagtgagtgagaagaggaggagtaacccgggtccaggaggcaacaggaggtctcagagaccgtggacaggggcctggggaccccctgagtagggggagtgtcctgagccatcggctgccaatcatctgcatccactctggctgctgggtgggaaacaggctctagaagaatggggtggaggaagggggctgatgggagaccactgtggggccaggcaggcaaggatggtgtcacaccagggtgggggcagcagctggggaggcgaatttggattctggaaaggaagatttgctgttagaatggaggtgaggttgaatagaaaaagagtccaggatgaccccagagtttcggccctagcagctgagaggatgcagttgccatcaaatgagagcgacaggatgtgggacagagcgggcgtggggacagatggcacgcagacttcagtgtactgtgggagactgtctctggacaacccagtggtgacgtcaggtagagatgaatagcagcgtggagtcatggagagagaaccaagctggatacatacactgatagttgattttgtagatctatt

SEQ ID NO: 9599 - DNA, 870 bp, Artificial sequence
  DNA replication origin
tggccaggctggtatcgaactcctgatctcaggtcatccacccacttcggcctcccaaagtgctgggattacaggcgtgaaccattgcgctcggccagcccagctaatttttattttttgagatgggatcttgccatgttgcccaggcttgtatctaactcctaagctcaagtgatcctctagcctcagcctccctggcctcttcgggccttggcctctctgctgggattacaggcacgagccaccttgcccaccctgatactttcaataaataaacttttcccaaaggagtggtaggaatgtttcagccttttcatctaatgcatatttattgagcaccccagagcatgcagtcagttggaagttttaagcatgtgagctgggtaacgagggctgtggcggctgtgggaacccatatatgcatgggaacgtggacgatgagacaccgtgggtcaaggggcaccagggaagacctggagttggaagggatggctcatcaggtcaccaagtaaaaagaggaggcagaatattccaggtagagggactccttgtgcagaggccactagattagaggaagtgtggctcatgagtgaattacacggaatgctggctgtttgaccataaagtggattgggagggcattggcggtgagagctgagggtgaagaggtaaaaaccagctcattgaagagttgagacctcatctaaagagcagagcccatggagagtttcggatgagtagtggggatggtcagaggcccctgttggtgtcaccgtgctgctggtgtggagaatgaatgggggcagaagtgggacaaaggaggctagtcaggacaggagctgtggccccatggggacgtggtagcccagg

SEQ ID NO: 9600 - DNA, 1222 bp, Artificial sequence
  DNA replication origin
ccgcgcgagccgggtgagtgccactgccgttaagggggcgcggccgccgcgcgccgacgtggcgcagccgagcccaccgacggcatgcgcactgacgtcaccgcggcccgcccgccctgctgggccgcgagccaagcatacggtgcgtgcgcagccggccgcgccacgtcggatgctgtggccgggggcgggggcgggggcgggggcgggggcggaggagggaggggagagaaggggtgaagaagtgagagggagaaggaaggagagggaggcggggtccccgactggctgcggggactggagttgcggaaagttaagtagggcccagctgaggatggctcctgcagcgaacgcgctcagccgggctcctggctacgcggcgacggctgggtgactgcgccccacagtgcgggccagggccggggcgtcccggcagggaggcgaccgtcccctgaggccctcagcccctgccgcggcagcgcctaatgaagcgcggaaaggagagcccagatggcagcgacgggggccgagagagcaggaatttgttaaaagacgatgcgaggggagagcctgctttccgagtgagggccagcgctggggagcagagacggtggcttctgtccctgccctcctcgttatgaaccaaaaataaaattctaagccctgcagccaacggatggaccctcccctccgcctgtggccttctaagttatcttgaaaaactagttcaggccttgatgggaagcggaagtcaaacatggcctcacaaacatccgcacggagaccctaagactaatagaggactctgataagaaacatttgcagtgtattcccggcttcatctgcatgataacaccttggtctccacaactccttcatgcaacccggacattcccttctactgagtccaggtctttagatgataactctcaaccagttgccaatcagaaaacctttaaatgtacctatgacccggacgcctccacttcacattttacctcctaaagagccaacctacatcttacgtattgattgatgtctcatgtctccctcaaatgtataaaaccaagatgtttcctggccaccctgggcacatgtcatcagaacctcctgaggttgtgtcaatgcacgtccttaaccttggcaaaataaacttcctaaattgagaccactctcagaaacttttggttttcaccatcatcttcctgttgccgtggctgac

SEQ ID NO: 9601 - DNA, 2015 bp, Artificial sequence
  DNA replication origin
tcagtaatattggacatattactctaatggaaataaaaccaaactaatggataccattatctgcattctacaggaagaatttgagccttcgaaagtaaataggccacccaaagtcaaacaatacacaagttacaaaaaacatattaatactaacgtggcattctaacaagtgcttggaaggaaaaaccaagccggattaggggatagacgagcaggggcggggatagaggagcggggtggggggagatggaggagctgggacggggatggaggagcgggggcggggacggaggaagggggcggggatggaggagcgggggccggggaaggaggaggggggcggggaaggaggaaggggccggggaaagaggaggggggcggggaacgaggaacggggcggggaaggaggaaaggggtggggaaagaggagcgggggccgggaaggaggaaggggggcggggaaggaggggcggggtgggtatagaaaagtaggggtgaggatgctggcatctctattttgtggagtggggtcagggaggtgctgtcgggagccttaacgttgcagaaggacctgcagatgacaattgaaccagaccctggtgacacagatcttggcttcccagcccacagaagaacagatgtgaaggccctgggtgggaacggcttcgctggtgtgagaacaggctcctgggactgaataggcgtgagcagggggccaggaagacaggaaagctctgggtgtccaggacagtttggggaggagtagccacagcaaagctgcttgggaggtcactcccctggacagaggagagatggcccaggcttgaagggtgctggtggtgggaagcgtgcagatctggtatccacactggagggtttgctggtggcatggctattggtgtgggaaagaggaatcaagccttaccgcagtgcttctggtgtgaaccacaggggcctgaggtccccttcactgagccaggaacaatgggagggagggaagcagctttagggagtggaactaggactgcctcatggggacgtatatggttaccgaagagggacagagaaggaagcaggatctgcaaactgggatctcagggctggaggcagaattttggacgtcagcatatagatattatttaaagcaaagagaatggatgcaaacctgtaagcgaatgcaaataaagaaaagcagaaggcagaggctgagtcagcctgaggacattccaatattgagaggggtgcaaagagtaggggaagcttcaaaggagaccaagaaggaacccagtgaactacaggaagcatcaggagggtgtgactgtggcatcaggcaagaccaaaggagcaatgcgtgaggaggagaaggagaccaaccgaataccgaggaggaccaagagctgcctggtggtctgggaggaaggaagtcctcgtgacggggacaaaagtgctttctttggtcaggttggtaaatgtctaactccagcggtcccaaaagataatgagaattggtgaaggggagacagtgagtacagacaagcctttggcaaagttttattttaaacggaaatggagaaatgggcttgaagagagtgagggctggagagatgttttcatagatcacctagaagatattgcagtatttcgtgtgctgatgggaatgactgaatgcagagaaggaaaaacctggggacataggagagaaagggaaaaatggcaggaagaacattctcaagacaggaaaggtggataagattaagtgagcaatggggtcactgcccacagaaacagactgtggccatggacatggggaagagactggtagatggggtgacaggaagataaggatattcactcttgatttttttgttttttgcattttcttatggaaaatgagaagaagtgaggtcatctgctgagaataaggaagggttggagcttagagaacagagagaagagagaaagggaagggaggaaggaaggggacggggatgtggagtggtccttgagttgggtgg

SEQ ID NO: 9602 - DNA, 922 bp, Artificial sequence
  DNA replication origin
aaaagagcaatgaggagggggcaagaaagacgactgctccaagaaggacgtctgttccacctccagggtgggacacaagggagggagggtgggtgggaaattaaacagccctcgaggagggggctcggggggctgtgtcctcagggccgacaggagatgagcagaagaggtttgcgaaacggacacaggggattttgctgatttatttatttatttttcttttgagacagagtctcgctctgtcaccaggctggagtgcaatggcgtgatcttggctcgctgcaaactccacctcctgggttcaagcaattctcgtgcctcagcctcccaaatatctgggattacaggcatgcaccaccacacccagctaatttttatatttttagtagagacggagtttcaccatgttggccaggatggtcttgatctcctgacctcttgatccgcctgcctcagcctcccaaagtgttgggattacaggtgtgagccactgtgcccggccaattttgctgatttttaaccacaggttaaagagggaaaagaaatgggaggtggacagaagacaggtggaatatatgggggataactggctgctcagagcctttgatcgaggggtccaagtaatgatggtcgtcccaggaggcttgggtgattgtgacagctgaggtgatgagagatgaagggtgtaagttacaaataaatgcctccttagggaagggtgggggtggtaggtaggtatcacggcaggagaaaatgtctccactggagttctgtggggttctctgaaatcctccggagggtggaggcaaacacagaggaggagcagtcttaccaaaaacacgttcaggatggaagatatttcaacaatgtatgtgtccattacttatgtatgggaacgattaaaaacattttttttaggcca

SEQ ID NO: 9603 - DNA, 2664 bp, Artificial sequence
  DNA replication origin
gatgtgctcagggccaaaggagctgcaaaccacaggcattctccaggcccctaattctccacggaggaagtgcagtttgaattgattttaatggtgttttgaaatggagataaaagtattctggaagggtaaaatgccacaagcaaaatctcatttagaaaatatacagatatgtgaaaaggacaagttgtccagggacgtatggctggctttgagtgtgtgtgaaagactgtgtaagagcatgtttctgtgagagcacggggtgggtgtgaatgtttaaggctgtgggaggtgagggtgagggtatatggggagtgtgtgtgagtgtgcatgtgggatggtggtgtatggggagtgatatggtttggctgtgtccccacccaaatctcagcttgaattgtatctcccagaattcccacatgttgtgagagggacccaggggaaggtaattgaatcatgggggccggtctttcccatcctattctcgtgatagtgaataagtctcatgagatctaatgggcttatcaggggtttctgcttttgcttcttcattttctcttgccgctgccatgtaagaactgcctttcgcctcccgccatgattctgaggcctccccagccatgtggaactgtaagtccgattaaacccctttttcttcccagtcttgggtatgtctttatcagcagcatgaaaacagactaatacagggagtatgtgtgttgggggggtagggggagaggatgtatgaggagtgtgtgtgagtgtggggtgaggctgtatggggagtgtgtgagtgtgtatgtggggtgagtatggggagtgtgggggatgacggtgtatggggagtgtgtgtgtggtgggggagaggatgtatggggagtttgtgtgtgtgcgtgtggggtgtgtgtatggggagtgtttatgaatgtatggggtaagggtgtatggcaagtgtgtgtgagtgtgtgtgtggggtgaaggtgtatggtgagtgtgtgtgtggggtgcatatatgggtagtgtgtgggtgtgtgtgggaggtgtatatagggagtgtgtgtgagtgtgtgtggggggcgaggatgtatgtggagtgtgtgtgggcgtgtgtatggggagtgtgtgagtgggaagggggagtgtgtggggtgagggtgtatggggagtgtgtgtgagtgtgggctgagggtgtatggggagtgtgtgtgtgtgtgtgtgtgtgaggtgagggtgcatggagagtgagtgtgtgagcatatgggcatgtgaggtgagggtgcatggggagtgtgtggtgagggtgcatggagagtgagtgtgtgagagcatatgtacatgagttgagggtatatcgggagtgtgagtgcatgtggggtgagggtgcatggggagggagtgtgtgagagtatgtatgtgtgggttgagggtgcatggggagtgtgagtgcctgtggggtgagagtgtgtgtgtgagtgtatgtgtgggatgagggtgcatggagagagtgtgagagcatatgtacatgtgggttgagggtgtatggggagtgtgagggaatgtggggtgagggtgagtgggtatgagagtgtatgtgcatgtgaggtgagggtgcatggagagaatgttagagtatatgtacatgtgggttgagggtgtatggggagtgtgagggcatgtggggtgagggtgagtgggtatgagagtgtatgtgcatgtgaggtgagggtgcatggagtgagtgtgagagtttatgtatgtgtgggttgagggtgcatgggaagtgtgagggcatgtggggtgagggtgtatggggagtgtgtgagagtgtgcctgtgaggtaagggttcatggagagagtgtgacagtgtatgtgcatgtgaggtgagggtgcatggagagagtgtgagagtgtatgtatgtgtgggttgagggtgcatggggagcgtgagtgcctgtggggtaagagtgtgtgtgtgagtgtattgtgtgtgtggggtgagggtgcatggagagagtgtgagagtgtgtgtatgtgtgggttgagggtgcatagggagtgtgagtgcatgtggggtgagggtgtatggggagtgtgtgtgagtgtattgcgtgtgaggtgagggtgcatggagagtgagtgtatgagtgtaagtacgtgtgggttaagggcacatgggactgtgagtgcatgtggggtgagggtgtatggggagtgtgtatgtgagagtgtatgtgtgtgtgaggtgagagtgcttggggagtgtgtgagggtgaatgtctcacagggaggaggaacatgagagaggcatctactgagatgccgctggggaaaggcagagaaagaggagaggtcggtaaatccgggtcctcggggtgtttccatgttgagaaacagcatggcctttgtttttgaaggtaaaggacaactccccaggtgttatgaatgaggattgacagaatcagagctgagttgcaggaagattacagtgattttaacgtgtaggatggagtgaagggatagatctgtgagctgtcgcaaaagatgactttggggttttagaccttagagaacagagttataaatagaagtgatgaaggcagagggagaaactaagtttgaggggaagataagggctcactttaattgtgtcaaataggatatgg

SEQ ID NO: 9604 - DNA, 1405 bp, Artificial sequence
  DNA replication origin
gcgggcgcggcggctgctctctcagcccggccggctggcggcggcgcccggagccccgaggagcccgcaggagcccgtggagcccgcggagccgggcagggggcgctgcgctcgccgagctcggaggggccgccgggccgggcgctgcgcactcgcgtcgggagccgcctctcgcccgcggcgctcgcccctgccgcccgccagcatcccttgtcccgcggccgcgctcagacaacaaaagcggaagatgctgcagttgggcaaggtcaggaccttgccctgaagccgggcggcgccgcgcacgcctcttcccggactgaggagctgtcgccggcggagggtgcatgtttgcgaggaagccgccgggcgccgcgcctttgggtgagttgcggggctgggcggccggggccgggcgcagcctcctcccggcgccgtcctcctcctcttgccgctggtgggggtggtcctgggctcccggccggcaggcggcggcggcggctgctgcggggtttctgcctgcctcggggaggaccgcgatcgcgccaggtccccctcggaagccgctgtgcctggaagggggtccggggttagtgcctttcttggagcggttaccaagtggctgccctgcgtgctccccctccctgccacccatctccccgggaggaagcgtatttagggcaacaccgacaatgctgctccccgccaccctgagaacatactcggtgcattcatgacgtccctaatatacgggaggagacggggtgggggtggggaggacttccctccagtcttttgcccttatgttcaatgtcattacgatgtttggctagaacaaaatggaaagacttagtcatatgcgtccatggccgtgtcttcaggctcccgcggcttgccagaccctgagcccccttggtctatatttagcggcttcccagcaagcctttgcagccggcttcacaggtttcgggggcttctgcgtgctgacaatagacagccaggctccagaaagcgccgcctgaaagccaggtttggaaggctgtgcgtgtgtatgggagatgagcgatgcaaaattggggtgatccgtaattaatggctgaaagcgaagctgcttttttctttttttcccgaccctcatcttattctggtgtgtagtgtgttttcttcgattgccactcggcaggttgagcctctgctttcagaattaagtcactagaaaggtgatgcagcctccctggtgtttgtggtaggaaaacagacttgggaatttttggggtgtgtgtgtgtgtgtcacaaataacagttacttccaaaatgcccaaagttgtattttgctgtaaccgtgggggtatgaagggtgtgggagatgagagatagaggggcaggttgtgtttccaaggtgtttttt

SEQ ID NO: 9605 - DNA, 1410 bp, Artificial sequence
  DNA replication origin
agttagcttggagaactgttttttgcaggtgagacaaagcctgtgtgtgcatgtccacacctggggtaggaggaataaaagcgaacatttgtactgttgtcaatagtctgcttaatctgctcctcctagcaattatttgttacctatttaacctctgtaccgcttttctccttcactcttacttccatttatatttcaacttactcccaagtataataaagaatagacttgaatattcaaatcatttaagtttgttggataatctctttcaacacaaaatagaagcacaatgttactgagaatcgtaagcaccaaatcccttttattacaatttcctgcattctgtcatgcttatttgtgtttcagaaacaagctctgcgggggtggggggggtggggggggtggaggagatcacaacctcagacagtctgcggtgttcagggtcatgcccgtggcataattaggaggaacattcgacctggcccctgggcaggctgtgccctgcttggcttggcttgtgaatgcagcagacgtgagccccgtcctgactgctgctgaatcagagggacaggggcgaaggcccagaggccttccttggcacatgttttgggtttcgtttttcaacaagactttgaatacggtgattccacttgctgtatttcacagcaggctacgcatggggaagtcccgatggggtcaaggagcagtcaagccaggaggtgatatggaaaactgatttgaacgtgaagaaggcaatgcgagatgcactggaagactgtggggaaggatcaggggagtggttcactttgaaataaggaagaaaaggaggaagagaaggtggcagagatgcagcagaagataccaagagaggaggacaaggtggcacaagaaggggaggagagagaacttaatctgctcaagttccagactgggcaagggtctttcttgcaggaagtttacagacattccagtttcaaatctgaagtgattttgcctaaggagaaaccctcactacccgccaaaaacatgccatctgaacagggaaggtgatggcaagattgggcaggtgctgtggagaagacctctgctggacttcgtgcctccttagctctggaatcacaggatctgcaagagcatctacctgcgctcaccagcacgttccgccagcctccctcccccaacccacctggccactctaggacccctcgcaccctggtcctttgttgcaggctgacatctgccccaccagagtcaactgtcagcgccttgcacgtgaattagggaagcggagtaacctggggttccatcccttcccgggtcccttccagctttcgcctagctccggagcatccacccatctcaggtccagggcgtgcgttcccaaggatgctcggccctctcccaacccgc

SEQ ID NO: 9606 - DNA, 1285 bp, Artificial sequence
  DNA replication origin
tcctggtagcaccgatgagagcagacagacagcaactgcttggaagatgggggagagagccagcacattccacttctttcatagtgccacatcaaaaaatccacttaccttgcttcttcccacaggcaagggatggggagagaggccaggagtgtgagtctacctgaagttcctccacaaggaagtatgaggcatgaggaataactgacattcagctccatccactccttagtctctttaataatgttccactctaagccaggcacggtgctgggtgctggggcacaagtgtgaacaagacacatatgtgaccttaaagagctcatgatcaagtacattttcttcagaaatgtgtttcctagatcactgacatctgaatcatctggattttcactcaacacacgttttgaacacctgctatgaaccaggggctattctgggtgctgggaatacagccgcagacacaacagaccaagacccttccctccttagcttccattctagtggggataatatgtactatgtcaaaggctgtgggcaaaaataagtgaagcaagggagctggagaaggttgcagagagtgggtgggagtcagggcttgctactttatatagtggggatcagaagttggctcactggtaagggagcatttgagcagggacctgaaggacttgagagaatcatgtggctatctggtacatggagttccaagatgtgggaagatcacatgcaaaggtcctgtggcctaagcttgcttggcatcttaatgtaacagctgagggaggcccagtgcctggaggggagtgagcaaagaggaaaagtggtaggagttggagtaggagaggtattgggatgattgtgggggctagcaggaaaaacatgaactgacctccattctcaaaggacaattctggtctctgtgtgggaaagtggaaggggaaagatagaaccatttgggtgctactgcagtagtttgggtgagagatgatggtggtgtggcccagagtggtagtggtggatgagctaggaggtggtcagatttgggctatattttgcagcagagctggtggggtttcagggtgggttagaagtgaagggggatgagagaaagcagaccgcaaggctggttgccttagcaatggaaggagggggaagaccgagagaggagtgggtttgggacggaaatggcacatgatgtgggagatgctgagttcgatgcccgaatctgagatgtccacacagagaacagggagttggacatccatgtctggagttggaggaacgt

SEQ ID NO: 9607 - DNA, 1298 bp, Artificial sequence
  DNA replication origin
gcgccggcggctgccgcgagcctccatcttgatttcaatggggaaggaaggaggggggagggggaaatcacggccgagggaacccgggtgaaaggaaaagggagaacagggaacggagaggaaggaaaaaaaagaggggcttcggtaatttccggcgaacttcgtcaagggccgagcctgggctcggcggtgggcggagcctgggggaggggcggggccgcgttgggcggatgggctcccgcagggctggcggggaggctgcaggaacgttcggtttggttcggtctgcttccccggggcagctccaagccttggaaggcgcaggaaagctctgaccagccggggcggaccttcccaggcccggcattgcgcccccaaccggggcgctggctcctgcaccggtgcgcggtcccctgagcgccgaggcgtttcgtcgtctagcccgcaaggcggggtgacgcgggccggggcgggtgcctccctagtgggctcagcgctggccctggctcggggagggggcttcttaatagttgttgagtgaacatagagggcccgaaaacaggttatctgctccagtcccggaggccacggtactcctaagggtacaaagctctcctgtaaaatgggattcctctcggtgtatccccatctcccaggggactttcggctgctgaacctcgggttcacggtttctcagtccttactccgccagaatgaatggggaagatgacggggtctggggaggccaaaagaaatgttcctttgcggaagatccgtgtcaaaccagcgctggacgaatattctagttcaaaacgcctatgccccggctacgaggagagtgaaaggatccagtgccgggggaaacaggcagaagcaagagagatgaaaaacaactgggtgatgaaaccaccacacgagtatactggaaatagacaaatgtaaatggtggatggtggccatcaaatcttcactgctggagtggaggttacagccaggaagaggctagagtgatccttgtggtacagggttagagttggagacatcgttatggactcatgtttggggtctacatctatattatatattcataatgtatataatgggtctgtacagagatttgtagataaagggtcgtacacatacttgtatctctttgctttgtcagctgagtgggcctagacacaacactctgtagcaacgaatacacctagcgctctgatcttgcttctagtaccattctccaataaaaggagccagagctccttgaggaaatgactgattctaggactgggacggga

SEQ ID NO: 9608 - DNA, 759 bp, Artificial sequence
  DNA replication origin
gcagcggcggagccgccgcccccgccgcgtcctccggccccgccgcggcggccagcgcggctggctcgggctgcgggggcggtgccggcgagggggcagaggaggcggccaaggacctggccgacatcgcggccttcttccgatccggtgagtgcaactgcggccggcccgcccagcggcgctgccccaagcgctcggccgacccgccgcggagctgccgagctccggccaccgcgcgctggtgcccgcccgtccgtccgtcggggcccgcaggctctcgcctgggaccactgcttccatgcgccggggctgcccgccccacatccgcgtgtcccgctgcccgcgcagccgggcgcgcggcagcttggcccgaatgccaccacctcgccctccctgcgcccgcccctcgttttagggcagaatcccccggtctgccgctcccggcagccgcggcttcgcgggttggggcgccggctctttgtctctttcgctggaggaccgaggaggcggcggcggagatggcgtgggcggaggctcttaccccggaggccgagcggactgagccggggccggtccgggacgggaaattggtctttgatctgtgcctgtctctggctgatttgtacctggaccctcctcgaccccattagcagccgggtttctttgcttggccctctagcctgtcatctccccggccttggtctacacttctgtgaaacggggcagtcacggcactcactgcccagggagtggggacgg

SEQ ID NO: 9609 - DNA, 893 bp, Artificial sequence
  DNA replication origin
gcggggcactgtgtgggtggcgtggaggtggaggcggtgccaggtggccccgagtccaccccggcgcagagggggtggccgcgggagaggcgcgggtggcgaccggtccgcgggaggggcaccgggtttgctgcgcagggggcgtgacagggcgtccccggtaccccagcggcggcgcctcctcccgctccggcccagatcccgcgcgagccgggcccgcgtccccgcgtcccgcgtccccgcgcccagtccggtctgctcgcgcgtcggctgagcagcagcaggaggaggaggaggcggcggcggcggcggcggcctcggggccggcacccagagcgcagtccttagcgggccgggcacggggcagggaggatgcagactccgggttggagagcggaggagggcgggccaggtccgggcctggagaggcgggcgggggtgctggtggcggcctcggggaggacggccgggctggggacaccgacaggccgggggagcggccctgcgctgggggacgcgcgggaggtcggcggttcacgcttttccgtggcctctttgaaaatcacctccccagattcggtgagatcagttccccaatccgggtcacgaggagcaattgcagcgggagggcgatggtgagaggcagaagttagcagtgctggtagatacctggtttagtactgtcttctcttggttgtcttgatctttgctaggcggggttatttttgattcattttagcagattggttgtggctgggagtgacacagccgactgtccagtgttagcttggggttaatctactccccagtgctcactctccttgagaagtgcctgcagaaagcaaaggtttaggaaaacatgagctccttctaaagaaagctaccccccccca

SEQ ID NO: 9610 - DNA, 1199 bp, Artificial sequence
  DNA replication origin
agaaatactcagttgacacttaatgccgtatgaactggcttcaagccgtaaggtctgcatagatatttttctgcactcaacaataaaaggatttccataaacagttattatttgggtgacttgtctattttaatgtcctaaaaataaactgggagtttgttcttactatattttaagggaattatagcacatttctttctggtcagttgagtattgcatttcaaatagtcatcctctgcattccctgctaagttaaaagatgtgtgaggaacaggagtaaagaggttaaaaccgagggaaatgtgttgatgtctgtttggcttaattgaattagcttttttaattgggccttccgcacttgcctttcactcttaactgtgatggatttcgataggatctccctaggaaatttggcagtgatttctcagctgttgatgatcctggagatggagggtgtcagtggaggagattgagccagggttgggatggctgccgcaggaccgttgatgatcctggagatggggggtgtcagtggaggagattgagccgggattgggatggctgccgcaggaccgttgatgatcctggagatggggggtgtcagtggaggagattgagccagggttgggatggctgccgcaggactgttgatgatcctggagatggggggtgtcagtggaggagattgagccgggattgggatggctgccgcaggaccgttgatgatcctggagatggagggtggcagtggaggagattgagccgggattgggatggctgccacaggaattgatgatcctggagatggagggtgtcagtggaggagattgagccgggattgggatggctgccgcaggaattgatgatcctggagatggagggtgtcagtggaggagattgagccaggattgggatggctgccgcaggactgttgatgatcctggagatggagggtggcagtggaggagattgagccaggattgggatggctgccacaggactgttgatgatcctggagatggagggggcagtggaggagattgaaccaggattgggatggcagctgcaggaattgatgatcctggagatggagggtggcagtggaggagattgagccaggattgggatggctgctgcagaactgttgatgatcctggagatggagggtggcagtggaggagattgagccagggttggga

SEQ ID NO: 9611 - DNA, 1606 bp, Artificial sequence
  DNA replication origin
acactcaagtctgcaaaccactgatttaggaatataaaataaaaatcacttacaaaacaaaagcagtccttcccttcccatcttcctgacaccttccctcttggcatgaagaaaatgaggaagtgaggggtggaggtgccaaaagaggtgtccctgtgccaggttaagggagtgggtggtaggagttggaggtggagaacccagacagaatggttgggaaatggagcaaatacaccaagtgaacaagtaagttaatacattaaggaaaatagaagccaggtttcttgctgcctgagaatagattaacaaacttagaaagggaaaggatggaaagaaccctgaggtattggattcgaaatgcacaaacacatgtatttttaatacagatagacacagatagatacagcagtaattttatatggatgtgtatgtgcatgtgtagataatgtgtggatgggtgggtgggtgggtaagtggtgggtagatagataaatgaatgagtggctgagtggctgggtgactgcgtgggtggatggatggttgggtgatgaggtggcgatggacagttgggtgactgggtgtatggataggtggttgggtgactgggtggatggacagatggactagacaaatgtggatgggtggttgggtgactgagtcaatggatgggcaatttagtgatacggcagatggatggatatgggtagatgggtagattgataaatgtaggtggatggctgtaggatgggtggttggttggatagatgaatggatgggtaattggatggatggatggatggatggatggatggatggatggacaaatgaatgggtggttgggtgattaggagaatgaatggatggatggatggatggatggatggatggatgatgaatgggtggttgggtgactggttggatgaatggatgaatgaacgcatcaatgaatgaatgattggataaatggacagatgaatgggtggttgggtgattaggtggatggatggataaatggatggaggttgggagggtggatggatggacggatgggtggctgggtaattggttggatggaataatggatggggattggataaatagagggatggatggttggatggaaggatggatggatggatgggtgactgaatggatggatggatggacagatgaatgggtggttgggtgcgtgggtgggtgggtggatggatggatgggtggttgggtgattgggtagatggatgggtggtcgggtggatgaacaacgggtggttaggtggacagatggatgcagagatagacggatggatgggtgaatggatggcattcatatgtttcataagtctgtctgctaagagggtctagaagcagtgacacctcacaaacaaacaaaactctgagaacccaggtctttaaaattctaaacaccatacaatactgtaaggaaccatcccacttagtgagacgagtgatcccagggtaggcagggaaagtacaaaatgagctgggaacaagtgctcaaaggacaataaggacatatcaaaaagacacagaaaaaagctcctgctggccaagtctgaacaatttaggaatcaaaagagtatca

SEQ ID NO: 9612 - DNA, 2054 bp, Artificial sequence
  DNA replication origin
agttcagcggcgaagcggccccggcccggggcttcccaagcggcagggtgcccaggctagcgcgcgcgtccttggcgggggcgtctgggctcgaccccgaggcgttcgcggcgcctttcctggggctctccagcaccttcatcttggggatcggctccgcttctcgctcggacccctcggcgtccgcgccggggggccgcctgctgggcgcgctggggccggcctcgggggccgcgccagggggaggcagggagggcccgggggtggacgtacctgacatcttgtctgcctctgcctggctcgaggctgcagaggagaccagcacgggggggtggtgtcggacaggctgggggatccgggagggccggctcctgctcgtgctgggggcgccgccgcagctgctggggccgccactgtggccgctgccgccactgggggccccgccgccgccgctgcccccacccccgccgctgcccccgctgccgccgccgccgccgcccccgctgtggttcctctggtactcgattggcgatgtcaaggctgtaagacaagacagcgggagagactgggtcagggcgccaaggagcacgccgcggggtgagggaggaacagggcccaccctgggatgggtcatggggcagaccccgtgcaggggcgcagagcaaccccacccatcaggagagctagaagaggcccctgcttgccaaggtattgggatgccggctgagtgcagcgggtggaaggggccgcattcctcagcacatcccggactaagggccagtgtccacaggaagaccaaggcaacagatttgactagaactcctccagctaccaactggcttccgcaaaggtctttcctaaaccagagtcctggggtgaaaaagaaaccctggggctgccgtggaggcggtttcatagaccacctctgctctgcaggctgaacacagccctgagggaagctaaggagctactagaggcccctggagcgggaggctgtcccatctcttgacttgggtgcctgagttttcttacatcttcattgtagaaaaacacagaaatcaggccaaaataacatgtatggaaacatgcacaaactcttgaagtgttaaagcctttgaaaaatacgacaagcagatgcagccccccagccccagccccaggcatgtgtgagcaagcgttgaggagccagaggcagtctacaaactctgtgctggccacagcctcttccaggactaaggggtgtgcaagaagcaggtgaaagggtcccaagctcccagcccatgagcgatctcctttaatcctctgggataggtattactagttactcaactgagtgggtgtcaagtaaactctgacatcacagaccatgcgtgcaatctgggggcagttcattctattttaaagacaatgatgaaaatttagagcattctcaattccaagctatggattggaactcaatgcaccacataagaacaccacattgaacctcttcgcacctgaggaactgtgcctccctatcctcaagcgcccacccctagctgcagatgtaaatgattatcagcttgcaagcaggatggaaacttggagttaacacccaggcagcacataacacttggctaaaaatgccatgaggcttgagatttttcactgagtgcctatgttcctggctcttgaacatcacgcaaggtgtagaggtggctttcttgtgacagagaacattacaacatcctattgagcttgagcaggcatagatgcagaccgtgaatacgaacatgaagcaaagaacccagaagacacagatgacatgggcacatagcttcggactgaattctcaaagttctttgctgatcaccaaattaaaagccagtgttgaagccaacatttgcaaagagatcaaatacattaagaggcaatggaagggtagtgtggccacgcccgctgtgttctgcagcatctctgcaatccctcaagtcacggaagcagggaagtactgaaccgtctctttttttttttttgagacagagtttcactcttgttgcccaggctgtagtgca

SEQ ID NO: 9613 - DNA, 1047 bp, Artificial sequence
  DNA replication origin
agccccgccccactcccgcccggctcaggggcgcgctccagctcccgggctccaggattcccagcccccaacaggcagcgaaggtggccgccgaggagggcgcgtccctggctgcctgcgaccccgcccgccttgacggtccctgctcgcgccccccgccccgccccgcccggccccaggctcacctgcggcgggagcgccagaccgctcccgctcccttgcccgcgtggggctccttgtcgccgccatgccggccgcgctgcggacgggcgctgggcctcggcccgtggtctgcagtggtctgtcagacgcgacggccgcccgccggcgcccgggctcgcttccctgaggcgggctggggagggcgggggaggcgtagggcggggatgggtaccgactgacgcgccgggcagccaatcagaggccgggcaggggaggagcgggccctagaggggcggggcctccgcgcgctgtcggggtcgcgggccccagaactgcggagacctccgaggctcggcagcggggcgggaagctactcctggggtccaggcgcgttcctgaggctgctccccgggaaacatcttgggaattccacttgggcggatccggcgacctccttggcacttttcatcgaaggcccgttgattgggaagcacaatcgcggagggccggctgatgagggcgaggaaccagtgctgtttccccccgcgggcaggttgctgcgcgatgctgctctgttactgccggggtgggcgagcctggagtccagatgcagctgtcggcccaggacctgttcacttgactggggagattttctaatttttcttcccccgctgggtcagcagaacggggttacacttactgagaactcacagtttactttgggagcgcaaatatgtgcattattgacaaaactgtcctcttatagaatgatttatccaaaggaaaaaatatggggagtagtttacagtagaataaacagcccaaaaatgaaaaggcgctcaccttgttgttctcccccgcactctgccggtcagatgggccttt

SEQ ID NO: 9614 - DNA, 1412 bp, Artificial sequence
  DNA replication origin
agcgcggccggcatggcggcgacaaggagccccacgcgggcaagggagcgggagcggtctggcgctcccgccgcaggtgagcctggggccgggcggggcggggcggggggcgcgagcagggaccgtcaaggcgggcggggtcgcaggcagccagggacgcgccctcctcggcggccaccttcgctgcctgttgggggctgggaatcctggagcccgggagctggagcgcgcccctgagccgggcgggagtggggcggggctgcacccccactcggggtcgagccgctgtcggggacggggtagcacttgaataagggaggccaagctgcttaggtcgcctgcccgggcaggaaacgcaggttcctggaagaaagccggtctttggggtcggggtcccctcagagccgcgcggggagcccaggcagcggcggaggtcgcgccctgcgcctgggagcgagcccggggcgcgtggacccgcggggccccgtgtcctctcggggagctcgactcgctgacggagggagttgcgtttcgcgccctgctggcagaggatgtggcgcacaccttcgcggcagtcgagacttgctaacaacacagaatactctggctgaaaaaaaattcacccagacggggccgggcgcggtggttcacgcctgtaatcccaacactttgggaggccgaggctggcggatcacgcggtcaggagttcgagaccagcctagccagcatagcgaaaccctggccagcatagtgaaaccttgtctctactaaaaatacaaaaaattatccgggcatagtggcgagtagctgtagtcccagctactcggaaggctgaggccggagaattgcttgaacccggcgggcggaggttgcagtgagccgagattgcaccactgcactctcagccagggagacagagccttgctctgtccaaaaaaaaaaaaaaaaaaaaaaaaatcacccgacaagggcagcagcacagcctgggagttcagtcaggtgctgggtctcgacgtctccacccgctggctcggtagcggggtcctctcctaaccagccccgagaaagatgagcatagctgctgcttggttttgaaggaacacattcctgtgtctatatttgtctggagcccactagtggattttgggaggattccgtttcccaaacacacagtttgggctgcaggaactgcagtgattatggcaaattggcaggtgcggggattgtttatgaattgctgtttttggtcccagcttgagcttttaattcacagagcaaactgttgggtgcagtggaaacagcacctttctgggagtcagaggacatcattctgatgtgtcctcatccataaaatgagagcctccagttagctgatccaggcagcccctcccagtggagaagaactctgtcct

SEQ ID NO: 9615 - DNA, 1740 bp, Artificial sequence
  DNA replication origin
atcatattgcaaaccacttactctcttaagctagtcatttcatgcatcccttcaaaaatattttttcgtatagtaggccctgaggatacaacagtaaacaaagcaaaatccctttcctcatggatcttacattccagtgaaatagacaataaattgtgtgtgtgtgtgtgtatgtgtgtgtcaagttcagtggaaaaaaatgaaggagaataaaggggtagtgactgacagatattctgtttgttgttgttgtttttgagttccgggatacatgtgcagaactcacaggtttgttacataggtgtgtatgtgtgctgtggcagtttgtcacatggggtgtgtgtgctgtggtggtttgtcacataggtgtgtgtgtgtgctgtggtggtttgtcacataggggtgtgtgtgcgtgctgtggcggtttgtcacataggggtatgtgcactgtggcagtttgtcacataggtgtgtgtgtgtgctgtggtggtttgtcacataggtgtgtgtgtgctgtggtggtttattacataggggtgggtgcactgtggtggtttattacataggtgtgtgtgtgcgctgtggtggtttattacataggtgtgtgtgctgtggcggtttgttacataggtgtgtgtgctgtggtggtttattacataggcgtgtgtgtgtgctgtggtggtttattacataggggtgtgtgtgctgtggtggtttattacataggggtgtgtgtgtgctgtggtggtttattacataggggtgtgtgtgctgtggtggtttattacataggggtgtgtgctgtggcggtttgttacataggtgtgtgtgctgtggtggtttattacataggcgtgtgtgtgtgctgtggtggtttattacataggggtgtgtgtgctgtggcggtttgttacataggtgtgtgtgctgtggtggtttattacataggcgtgtgtgtgtgctgtggtggtttattacataggggtgtgtgtgctgtggtggtttattacataggggtgggtgcactgtggtggtttattacataggcgtgtgtgtgcgctgtggtggtttattacataggtgtgtgtgctgtggtggtttattacataggggtgtgtgtgtgctgtggtggtttattacataggtgtgtgtgctgtggcggtttgttacataggtgtgtgtgctgtggtggcttattacataggcgtgtgtgtgtgctgtggtggtttattacataggggtgtgtgtgctgtggtggtttattacataggggtgtgtgtgctgtggtggtttattacataggggtgtgtgtgctgtggtggtttattacataggggtgtgtgtgctgtggtggtttattacataggggtgtgtgtgctgtggtggtttattacataggggtgtgtgtgctgtggtggtttattacataggggtgtgtgtgctgtggtggtttattacataggggtgtgtgtgctgtggtggtttattacataggggtgtgtgtgctgtggtggtttattacataggggtgtgtgtgctgtggtggtttattacataggggtgtgtgtgctgtggtggtttattacataggggtgtgtgtgctgtggtggtttattacataggggtgtgtgtgctgtggtggtttattacataggggtgtgtgtgctgtggtggtttattacataggggtgtgtgtgctgtggtggtttattacataggggtgtgtgtgctgtggtggtt

SEQ ID NO: 9616 - DNA, 954 bp, Artificial sequence
  DNA replication origin
gccagcggcgtccggggacggagcaagcgcagcagccgcagcgcgcggttccccctccaggccccggcgactcagcccgcacacgtgtatgcgcatgcgccgcgtccgggcccttcagcctccggccgcacctcctcgcgcagggtcagaggccgtggggcgggccacggtgacgcgcgcggaagcgctctgcgggccctcggaaaccgccccggcggctgagaggctgcggccactgcctggcaccccgacgggaggggctccggatcgttcggagccggctgaaccccttcggccgcgagcgaccgcatgagtcgggggactatgccccagcccgaagcgtggccaggcgcgagctgcgccgagacgccggcgcgggaggcggcggccacggcgcgggacggcgggaaggcggcggccagcgggcagccgcggcccgagatgcagtgcccggccgagcagtgagtccgcgggggcgcggggcgcgggccgtgggcggcgggctcggtcccctccggaagccgggctggggtggggagtcgtcagcggagggtcctgggcgtcttcaattctgagtgaggccgttggcgacaaggaggaattggcagacagttttcccagtgtccgagtgcagatttttaaccccagggcccctcacaattctggtcacacagtgactcccctctcgtctcatttttgatatctgcatgtctgaagttaaagaaagttccagaaacttgggaagcaaacccgagaagtgatgtattttattactggttcccgctagatctttccttcagcctggcacagggaggaagtgaggtcgaccctgctgcagccgccggagaacggcgctgcgcgacttgttcttggaggcgacgtcccacctgttggacagactttggacccaaagagaatctgacccattctctctgaccctttaacggcctgact

SEQ ID NO: 9617 - DNA, 923 bp, Artificial sequence
  DNA replication origin
ccctcgtcccgtggggccgggggccggggttcccgcgctgtgccgggagggcccggccgtctggaagacttggcagccggggcaagcgacgtgggctcggacgcgcgaggagggctggggagcggggcgcggggctgggaagggcgccgtccggcggtggccgggctggcggcgggcggggactgcggaggaggcagcttgcgccggggctggggcctgcttcgggggactagcggcccgggaggtatggaggtgccgctccggggggggcgaaagaaacgtggaaaggtcgcccaggagggagcctgtcccccagggtttccaggggcaacggtggcccgtgtccctggaggacatgcgccagggcagcagggagtggtccccgcaggctcccaggctggggccggccgccttctggggcgctcagacctgtctgctgcagtttgcaaacagtacgcccgaattcttttcattgtaaaaaatttctattaaaaataactcgtaaagcctatcatctcttttaaataaaggggaagaaagaggaaagtgtgttctgttttgtaataccgggccccagtgatttcagggtaactagtcgcggtgctgagagtttgacctaaagctcggcagtgtgacagcaacgccagcatccccgcaccccaggactgtgacgcgagggaggaggacccagtgaatgaaaagggactctgggcagggctggcttcacgggcgtgcgatctgtgaagtcacagagggcccgcacttaaaaggactaacgcgctgctgttgcactcttgaatttgaacaagggtctctgcattttcattttgtagtgggcctggcatagtatgtagcctatcgtggtcttactattttataccaactctcacacacatctctgcatttaataaatataacgaagt

SEQ ID NO: 9618 - DNA, 1263 bp, Artificial sequence
  DNA replication origin
gcgggaaccggggctgcgcgcggcgcttgcaggccagctggagttccgggtgggcgtgggcttggagggccccgcactcggagcagccggccggccctgccggccccgggcaatgaggggattagcacccgggccagcagctgcggagggtgtactgggtcccccagcagtgccagcccgccggcgctgtgctcgatttctcgccgggccttagctgccttcccgcggggcagggctcgggacctgcaacccgccatgcctaagcctcccacccgctccgtgtgctgctgtgcgcccgagcctccccgatgagcgccgccccctgctccacggcgcacccagtcccatcgaccacccaaggtctgaggagtgcaggcgcacagcgcgggactggcaggcagctccacctgcagccccggtgtgggatccactgggtgaagccagctgggctcctgagcctggtggggacgtggagaacctttatgtctagctcaaggtttgtaaacacaccaatcagcaccctgtgtctacctcagggtgtgtgaatgcaccaatcgacactctgtatctagctactctggtggggccttggagaacctttgtgtcgacactctgtatctagctaatctggtggggacgtggagaacctttgtgtctagctcagggattgtaaacgcaccaatcagcgccctgtcaaaacagaccactgggctctagcaatcagcaggatgtgagtggggccagatacgagaatgaaagcaggctgcccgagccagcagtggcagcccgctcgggtccccttccacactgtggaagcttagttctttcgctgtttgcaataaatcttgctgctgctcactctttgggtccacactgcctttatgagctgtaacactcaccgcaagggtctgcagcttcgctcctgaagccaacgagaccacaaacccacgggaggaacaaacaactccagacgcgccgccttaagagctgtaacactcaccgcgaaggtccgcagcttcactcccgagccagcgagaccacgaaccccaccagaaggaagaaactccgaacacatccaaacatcagaaggaacaaactccagacacgccgcctttaagaactctaacactcaccgccagggtccgcggcttcatttttgaagtcagtgagaccaagaacccaccaattccggacacaacaggacacgtggatcctttaaatcaatgcttctgaaactttattgtggggattaatcacctgggg

SEQ ID NO: 9619 - DNA, 1053 bp, Artificial sequence
  DNA replication origin
gcttgcgggccagctggagttccgggtgggcatgggcttggtgggacccgcactcggagcagccggccgaccctgccggccccgggcaatgaggggcttagcacccaggccagcggctgcagagggtgtactgggtcccccagcagtgccagcccaacggcactgcgctggatttctcaccgggccttagctgcctccccaccaggcagggctcaggacctgcaaccaaccatgcctgagcctcccaccgccccgccccccccgcccgcccccaccccccgcccgcccgcccgccatgggctcctgtgcggcccgagcctcccggatgagcacagccccctgctccagggcacccagtcccatcgactacccaagggctgaggagtgtgggcacacggcgcgggactggcaggcagctccacctgcagccctggtgcgggatccactgggtgaagccagctgggctcctgagtctggtggggccttggagaacctttatgtctagctcagggattgtaaatacaccaatcagcactctgtctctagctcaaggtttgtaaacacaccaatcagcaccctgtgtctagctcagggtttgtgagtgcaccaacagacactctgtatctagctactctggtggggccttggagaatatttatgtttagctcagggtttgtgagtgcaccaatggacactctgtatctagctattctggtggggaggtgtagaacctttctgtctagctcagggattgtaaatgcgccaattagcaccctgtcaaaacacaccactgggctctaccaatcagcaggacgtgggtggggccagacaagagaataaaagcaggctgccggagccaacttcactcctgaagccagcgagaccccaagcccaccgggaggaatgaacaactccagaggcgccaccttaagagatgtaacactcaccgcgagggtccgcggcttcattcttgaagtctgtgagaccaagaacccaccaattccggacacacagggatgacatacacatttgtgaagtatatttttaatgtcc

SEQ ID NO: 9620 - DNA, 1216 bp, Artificial sequence
  DNA replication origin
tccttttatcttctttgaattctttggcagtttgattgtggtataaggtgggttcagttgactgggtttgtttctggaagattttaggtggctgaggctcagctcagtgctccctgtctgcatgttcttactctgggaggctggtactgggtctccagctttgttctctggcccctcaaagttaggaacctgctgttccagagggaccaaagtgtgcccagtccactggccaccacactttgaagggtgatgttggccaaagcacttcattggggtggtggcagcatgatccatgctcacttacacatgccagtagccatggcagtggtggggtgcatgcgtgctagctggcagaagcagggctgcagcattcctgcatgtgcttccactggcagtggggcagaagtggggttgcctgcatgtgttcgtactgtcggcagtggtggtgcggggggggtggggttgccagtgtctgtgtgtgtttgcaccagcagtggtcttggcatgggggtgtgaagccatcggtatttattggtgcattcacaacagttgtggtatcagcatgggtggggcaagattgctggtgtttgtttgtatatttgcaccagcaatggtggtgtggttgagtgcccacatgttagctgggggtgggggtggtgggttgcgctcatatcggcagcagcagcagggtctgcacacacagcactgggaggagagggagtgtgaggctcacccgtgtgcacacaccagcaaagcagttggggataggggaaaggctgtgggcaagtgaacgccagaaaagtggcacaggggaagctgtgatgaaaagagactgtgtgggctggtgtgcatcagcaggggtcgctctactggagctctctgatagtcaggcaaggtctgccgacaaaggagctatgatgagggttcctggaagcaccctggttgaacatctgaggctgcactgccgtcaggtgaggccaagctggggccccagcagaggccaacagacaggagagaactcagggtggacttgccgcatctcaaagacaagaccaccctgctctgtccaggtctgacagttactctgtggccaaagtcgcctagaggaccatgacgagccttgggggatgggtgtccctggccagctccactgcagctgctcccacaccaaactccgcaggctccacacaggctggagtcctgctcctaccccctc

SEQ ID NO: 9621 - DNA, 938 bp, Artificial sequence
  DNA replication origin
ccggccttcctccccggggctccagctgtgattgacgctgggcggcgagaggaggcgcctggcgctaacaaaagtccggcccgcgggcgagctgcgccgggtcgctagtcttcactcgctccggggacccgcaacaagtggccgccgcgccctccccggggaagccgcgggcgcgcaggggcagccgaaggaggcggtcgagccgcggagcccaggggcctgcccggctcagcgcccaccggaggggatcggggcgggcggatggggacccggcggcggcggcgcggtgagcctctgggcggccccggggcgcgggctgtgcgcggcgctgcgcccgccggcccccagcgcggattgtaagtgctgcagctgtgcccggccccgcctggagccaccgggggtgccaggaggggacgcagcaccccctcccactggagtgcggggacctctccaggccggaggtcggccccggagcttgggggggatgtgcagctaacggtcccgtcgggcgggctttcctcgggccgagcgcgcaggacgtgcgccgcagctatggagtgtcccgggagacggcgggcatgacggctacaggatgggcgcgaacaatggcaaacagtacggcagtgagggtgagtgggccgcccgtcctcagactcccggatcgcgtccctcctcccctttccctcgccctcccgactgggaagggaggttctcgcccgcggccgtgacgcaccccatttggcaccctgtctgggtcaccaccttctcctttggcagtgagtgaccagtgagtaggtcaggcgccccgaggatgcttttccactgtgggggtctctttaagcaacttcccagtttgtctttgggaaggctcaagttgcatctctgctgtgtttctgagcacatatgccttaaccttccttccctgggcatctggggtt

SEQ ID NO: 9622 - DNA, 902 bp, Artificial sequence
  DNA replication origin
aggttctcgcccgcggccgtgacgcaccccatttggcaccctgtctgggtcaccaccttctcctttggcagtgagtgaccagtgagtaggtcaggcgccccgaggatgcttttccactgtgggggtctctttaagcaacttcccagtttgtctttgggaaggctcaagttgcatctctgctgtgtttctgagcacatatgccttaaccttccttccctgggcatctggggtttaggagatgatggtttggcagatggcggaagacgtttttgaaaaataactcagtgaaaactttcccgggcctttgtgctccagccccctggactctactgtagcagaaaaaacttctggaaggagaagttaagtttccattctttgctcgctgctcctgctctgacagcttcatgaaactaagcacctatcagtcctgcgaggcgtggaatggctgggggctttgtctggtctctctcggggctggagacgggcaaaggaccatctgttacgtggggctggaaattgcacagaaatattgcctgtcaagtgggaacttggaagttagggaaactttaaactccacctactcctaaaaggatgatggatgtctgggttggcttctcccttctctctcctacctcctcccactctgcataaaaccgtagcgttgtatcccaattagcagctagcccctgatacgcataaggcaaaggcatttttctgcagttcaaaagttaagaaggtttgtgtctagtggtcttggctgaagaggagtggaagagaccgggtcagttttacagcccgcccccagaggacagttggttacaaaggaggggccagcgcttgcagactggtaggaatgcaggctagctattcagcctgtggcctggaggaaactcttatcatcc

SEQ ID NO: 9623 - DNA, 648 bp, Artificial sequence
  DNA replication origin
aatattataataacccaggcaattgattaggcctgcattaagactgctgggaagctgctagaattaaaagggattaatcacaagatatggtgatcagctggatggaggcaggatggaaggggtgggggcgctaagagcaagagaccctcaagtgtcattcacagaggctgactgggagatgggccatcagttgctaaaacactggctatcagaagagggctaagggagagaaaggtcataggctcattctgagtgttttctttttgcagagtttctggggaatccaagtggatgtggccagtgtgcacccagatttaagggtctggaactcaggctagaggttggaactggagatttgtatctggtagttgaaaccagtgtctgcagagaaatgctttggtgagaggagcagcagtttggggaacacggtggagaaacaggaaggggagggagaggatcgtggctggaaaaggagtggggtcaggcacatgaggaggagggaacttctaggaggaggagcaagtggccaacagtgccagatgttctgtcaagggttaggtgaagtcaagccaacaatcactcactggacttggcaatgtgggggtaacgtggatggatgcgagaccgcagtgaattgagaatggctgg

SEQ ID NO: 9624 - DNA, 1071 bp, Artificial sequence
  DNA replication origin
gggaaagagagcgcggagggggcgggagggagaggggaaaaggagggagggggcccggacgcctggggctagggggcgggacggggaggggatgcggaaggttctgcagctgcggcggcggcaggcgcggccgttcggtggagccgccggctcggctctgatggaggcggcgccgaattcggctgcgcgtgagagccgcgccgcggaagggggggccggagaagcgagggggcgggagggaggagcggcgcggcgggggtgacggggcgcgggcgcggggtgggctgggggcgcggatcagtgggacggagttcggggttcggctccgagcgggcgggctggaagtgggggatccctcagccgcctccacgggccggccccgcgctcacgtcggttccggggcggatgacccctctccaaacggcgcagcgctgcggctctcgtgagctgggaagtagggggcaggggagaggccgcgggtccagaaaccgttactggatgggccggtgggatgtggcgcgggccgggtggggcgcgacagtctgagccgagacccgcgtgggcttaagggtgcgcgaggcgggtgccctgggcgcgcccgaactggctgagcagtggagcgggaaagggcgcgggacccgggactgtaaccgccacttccaggccctcgctccccgcgcttggagccctcaagggcactctcagggatcctcgagagccttaaaacagaagtctctggaacctgtgtcctctccctgtctgtcccgccctcgaatccctgtgtcctcctcacccgctccctcctgcagtgagcatcccgggttgttggtaaagatcttggtgcctgggaggtcggagcttcgtctcctgaaatggtttatactagtgaaccctggcgccacgttctgtggcttataatcactttcgtcgttgccgcatgaggaagcaaatgacaccgccccttaccctggaaaagtggctgcagccttccccggatcttagttttactcaccccgaagtcaatttctcggtaactccaccctgcaaaacctctgtgggactcatcttcag

SEQ ID NO: 9625 - DNA, 950 bp, Artificial sequence
  DNA replication origin
ggcaaccgccccgtctgagaagtgaggagcccctctgcccggcagccgccccgtctgagaagtgaggagcctctccgcccggcagccaccccgtctgggaagtgaggagcgtctctgcccggcagccaccccgtccgggagggaggtaggggggctcagccccctgccaggccagccgccccatccgggagggaggtgggggggtcagccccccacccggccagccaccccatccgggagggaggtggggggtcagccccccgccaggccagccgccccgtccgggaggtgaggggcgcctctgcctggccgcccctactgggaagtgaggagcccctctgcccggccagccgccccgtccgggagggaggtgggggggggtcagccccccactcggccagccgccccgtccgggaggtgaggggcgcctctgcctggccgcccctactgggaagtgaggagcccctttgcccggccaccaccccgtctgggaggtgtgcccaacagctcattgagaacgggccaggatgacaatggcggctttgtggaatagaaaggtgggaaaggtggggaaaagattgagaaatcggatggttgccgtgtctgtgtagaaagaggtagacatgggagacttttcattttgttctgtactaagaaaacttcttctgccttgggatcctgttgatctgtgaccttacccccaaccctgtgctctctgaaacatgtgttgtgtccactcagggttaaatggattaagggcggtgcaagatgtgctttgttaaacagatgcttgaaggcagcatgctcttaagagtcatcaccacgccctaatctcaagtacccagggacacaaacactgcggaaggccgcagggtcctctgcctaggaaaaccagagacctttgttcacttgtttatctgctgaccttccctccactattgtcctatgac

SEQ ID NO: 9626 - DNA, 1208 bp, Artificial sequence
  DNA replication origin
tccacaaagccgccattgtcatcctggcccgttctcaatgagctgttgggcacacctcccagacggggtggtggccgggcaaaggggctcctcacttcccagtaggggcggccaggcagaggcgcccctcacctcccggacggggcggctggccgagtggggggctgacccccccccacctccctcccggacggggcggctggccgggcagaggggctcctcacttcccagtaggggcggccaggcagaggcgcccctcacctcccggacggggcggctggcctggcggggggctgaccccccacctccctcccggatggggtggctggccgggtggggggctgacccccccacctccctcccggatggggcggctggcctggcagggggctgagcccccctacctccctcccggacggggtggctgccgggcagagacgctcctcacttcccagacggggtggctgccgggcggagaggctcctcacttctcagacggggcggctgccgggcagaggggctcctcacttctcagacggggcggttgccgggcagaggtgctcctcacatcccagacggggcggcggggcagaggcgctccccacatctcagacgatgggcggctgggcagagacgctcctcacttcctagatgtgatggcggccgggaagaggtgctcctcacttcctaggtgggatggcggccgggcggagacgtgcctcactttccagactgggcagccaggcagaggggctcctcacatcccagatgatgggcggccaggcagagacgctcctcacttcccagacggggtggcggccgggcagaggctgcaatctcagcactttgggaggccaaggcaggcggctgggaggtggaggttgtagcaagccgagatcacgccactgcactccagcctgggcaccattgagcactgagtgaacgagactccgtctgcaatcccggcacctcgggaggccaaggctggcggatcacttgcggttaggggctggagaccggcctggccaacacagcaaaaccctgtctccaccaaaaccagtcaggcgtggcggcgcgagcctgcaatcgcaggcactcggcaggctgagtcaggagaatcaggcagggaagttgcagtgagccgagatggcagcagtacagtccagctttggctcagcatgagagggagaccatggaaagagagggag

SEQ ID NO: 9627 - DNA, 1348 bp, Artificial sequence
  DNA replication origin
taatttttgtatttttagtagagacagggttttaccatgttggccgggataatcttgaactcctggcctcaggtgatctgcccatcttggccagccgagccaccacgcctggccaaaatatgacaaatatttcctgagtgtgtgctatatgctgacactgttcttggtgcgggggatataacagcggacaaacaggtgagatccctgttctcccagagcttatattctagtggtgaaagtggtaaaaaaaaatacaataaacaaatatacaaaatgccagaaaaggccggatgttatgaagaaaactaaagcaaggacaagggatagagagtgacagaagttactactttgttgggtggtcatcattggcctttcaggaaaggaccttgagtagacacctgaagagcaagtcagggaatgatccaagcaggtaactctggaggggagtgttccaggcagagggaatggcacacacaaaagccctggggtgggagtgggattggggtgtttgcagggcagcaaggaggccattgtggctggggctgggtgagcaagggggaaacagtgttcattcagctcagaacttcatgccacaactgtgccagaggctttttgtcagctttctgccagcccctctggatgaattaggggagcaagagcctggggcgaggcaccagctgggacaccattgcaggagcacatggtggtgcagagaggctgagccaaggtaagtggggttggggaagaggagatggatttggggtgactctggagataaaatcaggaggacagaatgatttggtgggtagggggagagaaaggctatgggctagatgacttaggctatgggctagatgaggagtgcctggtagtgaccttaaccaatgcaagggtggctgaggttgcggcaggctgaggttgcccaggtttggccatgttgcagtggacgtggctgtagcttaccaggtgaattatccacgtgtcactacagtgacacagactgactctcagagtgcaggttgagtttgaagtatggagttgcatgtgttggagtttagtcgttgcagccttgggaacgtgtgaaatttcctggggagagctgggggagagtgttggggagattgaattaccacagtgggtgaccagaaagagcaccttgagaaggagagtggcagcagaggggagttccaggagagggttgttctggagcagccaatgtggcgatcacgaatgtcatccagtacttgacttgcaattgctccttcctggccttagctgaagcgatttctgtaggggcctggtggtctccaatcacacccgaaggggaggacactctcttcctgtctcc

SEQ ID NO: 9628 - DNA, 1280 bp, Artificial sequence
  DNA replication origin
caaggcccccagccgcctgtgccccgcggtgcgcgccccgctccgggacctgccgccaccgccgccccgccctcggcggcacccacacccaggcgcgcccgcgcgcgcgcccggccccgtccctgtctggaagcacagctgaagatggcgagcccggcgcctccggagcacgccgaggagggatgcccggctcctgccgccgaggagcaggcgccgccgtcgccgccaccgccccaggcatcccccgcagagcggcagcagcaggaggaggaagcgcaggaagctggggcggcggagggcgcggggttgcaggtggaggaggccgcgggccgggcggcggccgcggtaacctggctgctcggggagccggtgctgtggctgggctgccgcgccgacgagctgctgagctggaagaggccgctgcggagcctgctcggcttcgtcgctgccaacctgctgttctggtgagagcttgggcaaggtgggggcgctgaggagggcaggtgaccttggggcgcccggggccccggggacccagtgcagggggagcccgcgggacactgcggaggaagaattgtcagccctgccccactttctcggccacctgtctcgaacaggtagacactcaccgcaactttcctccggacgcacgtccctgtgagcagttgtcgttctccgtgtgcggatccagcctcagatgcgaggtggtcggccgaccctcaggcacctgcacctacaggtgttcccatcgtgcttgaaaacttcgcccctgctttctaaaactctgaggtcttgacctgctcgcccaagcttgccggagcaaacgtgcttgaacgtgtcttggttcttgcagccccagcaggcatatctggaccagattaggtacccgttcaaaacggtgccgcattcatcagtcacctgagatgggccctgaatgatttgttttttccttcccctggagcgttaggtttactgtgtttactccctgatgagaaaacgggaggcaaacaagcaggtggagtatgcccagcacccacccccgggtgtgcacagtgtggaaaacaggcatatttttaggtgaagtacagggagaacacacgggaatgctcagcccctgagcaacaggtttgtctctccaaaaagcgctcttcagaaaggccagggaaatgtctgtctccttcgttgaaagtggtgtcctgtcatccgttaccacgctattgagggcggagaaaaaccttctttgtttgctaagtgtcctcataacaaacatgacctacaca

SEQ ID NO: 9629 - DNA, 1032 bp, Artificial sequence
  DNA replication origin
tcgtcggcgcggcagcccagccacagcaccggctccccgagcagccaggttaccgcggccgccgcccggcccgcggcctcctccacctgcaaccccgcgccctccgccgccccagcttcctgcgcttcctcctcctgctgctgccgctctgcgggggatgcctggggcggtggcggcgacggcggcgcctgctcctcggcggcaggagccgggcatccctcctcggcgtgctccggaggcgccgggctcgccatcttcagctgtgcttccagacagggacggggccgggcgcgcgcgcgggcgcgcctgggtgtgggtgccgccgagggcggggcggcggtggcggcaggtcccggagcggggcgcgcaccgcggggcacaggcggctgggggccttgtgacgccacaggccacggagggggagccgcccgggaaagtgggtgcggccgagttcgcgcaggggcggggccgggcgccgggagctgggcggtgtccccggggggctctgggttcctggagggcctctccgggactcgaggaaaacgaccttttcccttgcagcggcgggagagggcgaagtggaggactgctgctcggttccgtatccaaaagagacccaaggctccaggcaaaatagattggacattttcactttctcaagccagggccaccggtcgcccaaccagcagccactgagggtggtatcggggcgccccttcccctggcagcgtatttcagcccccagagacatcccccacctcggccatccccagcgcctttgcagggacagcagcacaaccatagcagaggtcctgggcatcctggaaataacgtgctggtataaatgttggattgagaaaggaagaaaaaacatttggggtcaatttggggccctctcgtttgacacgggaggaaacacaaggccgcagcgttgggggaagctgcttcctttctctctcttctttctctctgtctcaggtgcttcctttctcttctctgtctctctctctctctctgcctctccctctctct

SEQ ID NO: 9630 - DNA, 954 bp, Artificial sequence
  DNA replication origin
cgggcgcgcgtcctcgggagtggcgccgtgacacgcatggtttccccggacccgcggcggcgctgacttccgcgagtcggagcggcactcggcgagtccgggactgcgctggaacaatggataacttcttcaccgaggtaagtgcgctcccagtccgacctggcctccggagcccagggagagaggcgtctgcccaccacgccgcgcgccctgggtactttttcctaagccctggaaggcgcaactttctgggagtctcctgaaatcaccccccatccccccgcggagtctctgatgagtaagcccgggcaggttttgtttcgtcctgtcccgcgctcgcattttgctccgggaggtagcgaaggtgcgtttccgtttgcgtgggtggctggctctcggggcgccctgggacacccgcgccaggtgaggcggcgcgcgccggggcgcgggcggggcgatccgcccgctcgactgcccgggtgcaggaagcccaataaaatgttcagcggggacctgcctttctccaagaaaggtcttgtctggtatttcctttgcaaaacgtgcgggcttcctgtgcaggggttcaaacacttccagaggagacggcttaatgaagtgtgagaaggagaggcaagggtttaatcggttactttgctcgccgagaagtgctcttttaaggcttgggataactccagaccctgggatcaaatgatcatgtatttgtgtagagtgtccatgcagattttgaattcgaatgtaaagaaaattcgtttagggcaaacagtggctattttaatagatgaaacggatgccctctttagggtcgttgagggtgggacactgaaacttaacttgagaaccctttttccccctttgggatcgagacttactgtggtttcttggctccctttcctttcttggttgtgtttatttaataaattctgtttaagtttg

SEQ ID NO: 9631 - DNA, 1414 bp, Artificial sequence
  DNA replication origin
tcggggcgggcaggaggacagcgggccgcaaagtgagcaggagccgcgatccccgcgcgagcgcttggaggtgagcagtcccgcgccgcggctcagccagctctcgcccgcgggactacagcccagcgacctcgccccgccctcccgcagccggccccgccctcccgcagccggccccgccctcccgctcgcggccccgcccccaggagcttggccctccgccaaccacaccgtctggccccgcccgggcggagcgccccgcccccttcccgaccaggccccgcccactctaagcccgaagcagccgcaggctcgttagcggacccgggagggggccgcgtgtttccccaggtcttcccacgtaggcgtggggaggggatttaactcttccctctgcagagagagactaaacaatcacttagaggggaggagaagggactgggggcttctgtgcctttcatgtttagcagacccgggaaccggctcaacacggatctcattaatgcagcccggtagactagcaatctcgggaaggaagcgcggtcagcggagctgccggggctgcggggccagatcaaagcggaagacggaggctaatcagaatttctggaagctgcattcccgtgttgactttctgtcctgcagtcgggtttgcttaagacgtttgcgtaacagcggggaaatgtagttttgaaactggaaggggacgtggccaatatcacctttaaaaatgtaacccttttctagacctcaaggaagcagagatggcagatggcactgagatggacgaatgatcaaacccacctggcactgagtcccgtttcccctagggcagttcttttaactttatgctgtgcgagggtcacctgggaaccttgttagaacgcaggctggaacaatctgctttccaggtgcccctcaggtgctacctggtcctgtgctgaacgaaagcttgtaacaagtagagaaattaagagtaaacgtttgtagcaatttaataatgccacgacatccaagcacatgatcagtggactctttgaaccgagtataaaccagtttgggtgttgtcagactcacgtggtgagtcacacctggcgccgcagtgtattggtacctggccgactgggaacaaaaatggctggttcttcagcacaaaagatttgagatgctctctccagggaatttgccaactgctactcaacctttaaaactcagctcacaaagtcacaccttccaggggaaggaacccttcccaaagatgctactccactcaccccacccaagctccccgtaaccactgggctagatgcccactctaggatttattcctaagactgttggggaaggactgtgctttaagatgagtatccccaggctgtctcacagcatgaatgaatgaatgaaacatccttct

SEQ ID NO: 9632 - DNA, 1079 bp, Artificial sequence
  DNA replication origin
gctgcctgccagtcctgcgccatgcacccgcactcctcagcccttgggtggtctatgggactgggcgccgtggagcagggggcggcgctcctcggggaggctcccgcagcgcaggagcggagcggggtgtggttgggggaggctcaggcatggcgggctgcaggttcggagccctgccttgcggggaggcagctaaggccgggagaagtcgagcacagcagctactggcccagttgctaagctcctctctgccgctagccggcgggctagccggccgctctgagtgagggcccacggagcccacgcccacctgaactcgcgctggctctcaggcgccccgcggcagtcccggttcccgccctcgcctctccctccgcgcctctccctccacacctccccgctagccgagggtgccggctccggcctcggccggcccagggaagggctcccacggtgcagcggcgggctgaagggctcctcaagtgcggccagaatgggcaccaaggccaaggaggcacgcagagagcaagggctgggagggctgccagcaggctgtcacctctcactatgagggagagcagatttgtcaaggctgcttaaacagtcccatgattctgtgggaggggcacccatgtaaaaggggtccccttaggccccgaatttaccatggcctgggtaataggcctatttgctgggagaatataaagctagtccaccatggcttgcatatgaagcatattaactgcttcatctggggggcttcacttggtattttatagggagagttgggcagtccccttctcagagcaaaccgaccttataatggcattctgcggtccactaggctgattgctttcttaggaataaccccctgtgcatttggaacacgtatactcagtgattgttcagtaatgagctgtgggtcctgcattaatccaaacaagctcttaaattgtgtagcatttaggccggtgcggtggctcacacctgtaatcccaccactttgggagaccaaggcaggcagatcacctgaggtcaggagttcaagaccagcctcgccaacatggagaaaccccatc

SEQ ID NO: 9633 - DNA, 1083 bp, Artificial sequence
  DNA replication origin
gtatgtccctcttgccaacaggtaagcaaagtgaacgcatcttcctaccccggtggctattctgtgtcccggtgctaaaccaagtgtccgcccccttagggcacccggacaagccgcggttggccctagctttgactcgagcgctcgcaagcagcagcgtgcgggctgcctcggccaaccccgtcttctcaatattggtggcctccattaaagcacagacatcaaaaacatcgacggcccctttcccctcttctcttccctccttcctctcccaagttccgagagcatcctccgaggggcgacgtctctcgccccaccagctggacctcggcgaccgcgcctcccccgaagctgcagccttcggggctgagccccgcgggtgcgggtgcaggtgcggagccgcccaaggtgcgcaactcgtttgcagcggcgcagcccagacgcgcctgcagctggggctcaccccaacctcgctgccagccgaggtagcggaatcgtagtcgacgtcgggagcgggctggactggggtctgagaagggtagctggtgccagggggtgtcattcatcacctcgaggcagctccctaagtctgagcgagagcccgagcacttcttatccaacggttccaaataaatgagggggagagagagagagagagtgagagagagagagagagagagagagtgagtgagagagtgagagagtgggagaagtccacggacagcccaggcggcgcggcgggggaagggggacgcaggaatggaggagaggagaggggaggcggaggggggatctgaatagagggcatttaggaaacgttggcggggcacagagttgggaggtggggggaagggaggaaccaggatggcggataggagagaaatgggggtgactgtgctggaggggaggggaggtgggggcccagagctggggggagtcaaggggaggcgggcgtgtccaggctggaggggagaggggagggtctgcgccggaggaggggaggggagcagagggagtgcagggggtggggagatggagctggagggggtggaggggagacgggcggggcgccgggctggaggg

SEQ ID NO: 9634 - DNA, 949 bp, Artificial sequence
  DNA replication origin
gggagcgagcgcgagaaatgcagaggctgcagcggcggcggcggcggcagtagcggcagcggcgacgacggcggcggcagcgctccaactggctcctcgctccgggctccgccgtcgagccgggagagagcctccgccagcggccaggcaccagccagacgacgccagcgaccccggcctctcggcggcaccgcgctaactcaggggctgcataggcacccagagccggtaaggaggcgcgcccggtggccccgcgccgccgcggacccgggggcctccgtcccccaccgcgccgcgccccgccccgcagcccccgggctctcccttcatgcagcgggcagcagggatgtgggcccggattggacggcaagggcctggggtccctctgtgagggctccgtcgcacttcggggatcccgggtgatggggggcccagaagtgggaggcttcagccgctcgcatggtggaggggtgaggggggcggcgaggttggtaaacggagctggggggagggggctgtcggggagaggagctgcgggtgacgggaggaattgccgaatgcgaaaccccctcagtgcgttgagtcccggggagacggttctgtgggctgaagggagcgcttccgtcatcggagcccttaccagcctgggagaaagcgctcggggcgaggggcgcagcagccaaagatggagggtgggggtggggtggggcgggagtccggggagaaagaagatggggaatctggcccgatcagaaggaagtgggtggctttttgctttggcaaacgggttttctcgacccatgggactcctggatcttggttctggggccaaggaatacgaggttcacacggcgacgtgcactcagaagcacctcccgagcagatcggagccccagcctcgtcagtggcggaattgccttcctacgaacccgtgggctgcctcggagca

SEQ ID NO: 9635 - DNA, 1071 bp, Artificial sequence
  DNA replication origin
gggaatctggcccgatcagaaggaagtgggtggctttttgctttggcaaacgggttttctcgacccatgggactcctggatcttggttctggggccaaggaatacgaggttcacacggcgacgtgcactcagaagcacctcccgagcagatcggagccccagcctcgtcagtggcggaattgccttcctacgaacccgtgggctgcctcggagcagtttgttttttcgagcctttggttccaagaatgcgccaggcgcctccgccctgggtcccggccccggcccgggcccggggggtgtgggcttgaacctgacagcgcgcggccctaactgggctcagccccgctgggagcgtagggttggggttgagcagcttttgcccaaagcgctaaagctgaaacccggcgcccggttcctgctccccccgcccccgtcccccctccatttccagaaaaataaaaattgcggaatcctggatccgatcgcacgcacaatgcgcggctgcaaaccgcattcttttcatgaatattcatcgaacgcttggccaggctccttatctgcgtccccagagacatttccgccttgaaacgaactcggtggacagcccttgcccatgtaattctcactctgctgaaattagcacagcacacatgggtgcattttttaggaccttgtacaggttgacaacacctctgtctcccccgcggccactcgcactgtggggcgggctaaaacccaacactagcgtcgaaatggccttctgctatagggttgtggaccgaccccccacccccacctcccgggattacagcccgggccaacagacccccagtatactgcaggcaaaatgaatgaatcgggactgtaattacctattcctttgtcttggcctcgcgcatgcgccggagagcagggtgtggagggcccggcagccccatcccatctccatcatccagccacccactcccctcccgagccgaggaacaaaggcgtttgccctaaatgttgcgggaaacccttggacaccaatgacagtttttcccgcctgtgtgtgtgtttcttcttttccag

SEQ ID NO: 9636 - DNA, 1166 bp, Artificial sequence
  DNA replication origin
tctcaatgagctgttgggtacacctcccagacggggtggcggccgggcagaggggctcctcacttcccagcaggggcggccgggcagaggcgcccctcacctcccggggtgtctggccgggcggggggctgaccccccgacctccctcccggacggggcggctggcctggcggggggctcacacccccacctccctcccggacggggcggctggcctggcggggggctgacccccccacctccctcccggacggggcggctggccgggcggggggctgacccccccacctccctcccggacggggcggctggccgggcagagggactcctcacttcccagtaggggtggctgggcagaggcgcccctcacctcccggacggggtggctggccgggcaggggctgatccccacctccctcccggacggggtggctgccgggcggagacgctcctcacttcccatacggtgtggttgctgggcggaggggctcctcatttctcagatggggcggctgccaggcggagggtctcttcacttctcagacagggcggccgggcagagacgctcctcacctcccagacggagtcgcggccgggcagaggcgctccagcggggcagaggcgctccccacatctcagacgatgggcggccgggcagagacgctcctcacttcctagatgggatggcggccgggaagaggtgctcctcacttactagacgggatggcggccgggcagagatgctcctcactttccagactgggcagccgggcagaggggctcctcatgtcccagacgatgggcggccaggcagagacgctcctcacttcccagacggggtggcggccgggcagaggctgcactctcggcgctttgggaggccaaggcaggcggctgggaggtggaggttgtagcaagccgagatcacgccaccgcactccagcctgggcaccattgagcaccgagtgaaccagactccgtctgcaatcccggcacctcgggaggccaaggctggcggatcatttgtggttaggagctggagaccagcccggccaacacagcgaaaccccgtctccaccaaaaaaatacgaaaaccagtcaggtgtggctgcgcgcgcctgcaatcgcaggcactcggcaggccgaggcaggagaatcaggcaggg

SEQ ID NO: 9637 - DNA, 909 bp, Artificial sequence
  DNA replication origin
gagcccctccgcccagcaaccacaccgtatgggaagtgaggagcgtctccgcccggcagccaccccgtccgggagggaggtggggatcagcccctgcccggccagccaccccgtccgggaggtgaggggcgcctctgcccagccacccctactgggaagtgaggagtccctctgcccggccagccgccccgtccgggagggaggtgggggggtcagccccccgcccggccagccgccccgtccgggagggaggtgggggggtcagccccccgccaggccagccgccccgtccgggagggaggtgggggtgtgagccccccgccaggccagccgccccgtccgggagggaggtcggggggtcagccccccgcccggccagacaccccgggaggtgaggggcgcctctgcccggccgcccctgctgggaagtgaggagcccctctgcccggccgccaccccgtctgggaggtgtacccaacagctcattgagaacgggccatgatgacaatggcggttttgtggaatacaaaggggggaaaggtggggaaaagattgagaaatcggatggttgccgtgtctgtgtagaaagaagtagacatgggaaacttttcattttgttccgtactaagaaaaattcttcggccttgggatcctgttgatctgtgaccttacacccaaccctgtgctctctgaaacatgtgctgtgtccactcagggttaaatggattaagggtggtgcaagatgtgctttgttaagcagatgcttgaaggcagcatgcttgttaagagtcatcaccactccctaatctcaagtacccagggacacaaacactgtggaaggcctcagggtcctctgcctaggaaaaccagagacctttgttcacttgtttatctgctgaccttccctcc

SEQ ID NO: 9638 - DNA, 1391 bp, Artificial sequence
  DNA replication origin
gtgaggttaataagtcctgttgtggggtttgagggccagattctaatttttggagttttatttaatgtcgggagcagattgggtaataaaatgtatattgagaataagatggccttttgaccttttagggtctaggcttgtaaagcctctcagggttgctgccgaacgagccatgaactgggctgggtttttatatttgatgaaaaagagcctaaacgctatctgatttggaataaagaaaaagcagcattaaccttgactatgcctttggctccagccacctttttaagagtaaattgctgtgtaggtgggggagggctagtcacagaatgaaactgtaagccagaccaggtgtgaggaggggaggcgataaaaagattacagggtggaggggcggaggctgaggaagaattgggacctagcttaggctagtgaggaggggagaggtcagatgggtctgtagaaaaggaagattagaaagactcagcgccgcttggggttgggactgaggggacaagcgggagggaaagaaggaagatttgggacgagttgcactgggcacagagactagggagggactgatgtataaaagaatgcctggacgtcaggcacctcagaccatttgcccattttacgacaagaattatttagatcttgtaggatggaaaaattgaaactgccattttctggctatttggaactactgtcgagttgtattggggtcaagcggcattgcagaagaaaataaggcatttaggttttaggtcaggtgcgagttgaagaggttttaagtttttgagaagacaggctaagggagaagaaggaggaatggaaggtggaatcttacccatagtgaaggaggcaagcccagaaaaaagagtagagacatggagaaggggtggggggatctagccctgcagaaaagcagagaaggggttggggcatggaaataagggattggggcacagagataagaggttggggtgcggaaataagggattggtttcatgcgcatccgtgtgaagagaccacgaaacaggcttgtgtgagcaacatggctgtttatttcacctgggtgctggcgggctgagtccgaaaagagagtcagcgaagggagacaagggtggggccgttttataggatttgggtaggtaaaggaatattacagtcaaagggggtttgttctctggcgggcaggagtgggggttgcaaggtgctcagtgggggtgctttttgagccaggaaaaggactttcacaaggtaatgtcatcagttaaggcaaggaccggccatctacacttcttttgtggtggaatgtcatcagttaaggtggggcagggcatattcacttcttttgtgattcttcagttacttcaggccatctgggcaca

SEQ ID NO: 9639 - DNA, 1120 bp, Artificial sequence
  DNA replication origin
tgaggaagaattggcacctagctctgcctggctaggaggagagaggtgagatgtgtctgtagaaaaggaagattagaaagactcagcaacacttggggttgggactgaggggaccggcgggagggaaggaagatttgggatgagttgcattgggaacagagactagggagggaccaatgtataaaagaatgcctggacatcaggcacctcagaccgtttgcctattttacgacaagaattatttagatcttgtaggacggaaaaatcgaaagtgccgttttttggctatttggaactactgtcgagtttgtattggggtcaagcagcattgaagaagaaaataaggcatttaggttttaggtcaggtgtgagttgaagaggttttaagttcttgagagcacaggctaagggagaaggaggaatgaagggttgcccatagtgaaggaggcaagtttaaagagcagggtagagacacagagggaaggggtttgggggttcttaccctccagaaaagcaggaaaggggttggggcatggaaataaggggttggagcgcagatataagaggtcggggtgtggaaataagggatcagggtgcagagataagaggttggggcacggaaataagggatcgtggtgcagagataagaggtcggggcacggaaataagggatcggggcgcagagataagaggttggggcatggaagtaagggatcagagcacagagataagaggttggggtgtggaattaagggatcggggtgcagagataaggggtcggggtgtggaaataagggattgggggattcttgcccccagaaaagcagagaaggggtagagacacggagagaaggggttggggggttcttgccccctagaaaagcagtacttgccactaagggtgaaggagaagggattggggggttcttgccccccagaaaagcagagaaggggtagagacatggagagaaggagttggagtgttcttgcctcccagaaaagcagtacttgccgctaagggtgaaggaccaaggcaggtgttctcgcatggtcagacacctctgaaacatgggtgaataatcagagaggcgtccctgcaatgattaaacaccaagggaag

SEQ ID NO: 9640 - DNA, 1158 bp, Artificial sequence
  DNA replication origin
cctttctagagggaaagtcagatgatggacagataaatataaatgactctaataggttggtgcagcagtcattgtggtttttgccatcaaaagtaatggcaaaaaaaaagtggggaggagctggtgctgtagttcattaacagtaatggcaaaaaccacgatgacttctgcaccaacctaatagcataattacaggtgtgcacaatgtggcaatagggaacttccaagtgctaggatagcatctagcttcctggagtcaggagacaggggttgcaacctaaccaaggttaagtccaagtgaggggggtgggcagggagtgatatgtcagtggagactccaagggtgaatggtaattagagagtaaaccccgattgggagagggggggtgtttccagcacagagaagagcctgtgcaaaggccggggaggcaggggggtgggaggacacactgtgtgcatccacctgaggggcggcaagcaggctggagctgagcgggttgagaggaggatgcgaagcccgggaaaggcaccccaggcagagggcacagcaaggcaaaggcccagagtcaggcctgagcctgtatggtttgaggaactgacagaggcctgtccagcaggaagggaaccgcagaggggagagaccttaggccagagcagagggcagggtagagggcagggctgtgttgggcactgtgcgctatggatgggcgctggcatttaagaggggagaccataggccagagcagagggcaggaccatgctgggcactgtgggctgtggatgggagctggcatttaaaaggggggaccataagccagggcagagggaagggccgtgctgggcaccagagtggagaccataggccagggcagagggcagggccatgctgggcactgtagcctgcagatgggagctggcaaccataggccagggcagagggcaggcccgtgctgggcactgtaagctgcagatgggagctggcatttaagagaggagaccataggccagggcagagggcagggccatgctgggcactgtgggctgtggatgggagctggcatttaagaggggagtccatagaccagggcagagggcagggccatgctgggcactgtgggctgtggacgggagctggcatttatgctggggtgatgggaa

SEQ ID NO: 9641 - DNA, 2308 bp, Artificial sequence
  DNA replication origin
agatcaggaagaagataagaatgcccagattttctaatcctattggacatcatacttaaaatcccagtcagtacaataaggcaagaaaaagaaataaaatgcatattgattggagagaaaacagcagtgtccttagttgtagatgacatgattttacacacagaaaatcccaagaaacacaaaaactaactaaataaataactcccagaaataatgaatgaatttggcaaagtagaatttatgatcaacaaaccatatttctacattcacatagaaagccaatcatattttgacataatagcaatgtataattggagattcaattttttaaaaaatgcctttgtataataggtccaaacaatgaaacatttagatatgaatctttccaaacatgtacaggatctccatgtactacgagaggcctatgaagacaatttttgcatatatgtatatatgtataaataaatgggtgttgtggtgggtggatattgtggtgcgcaggtaggtgtggactcaggtgtggtggtgggcgggtgttgtggtggtgggcgggtgttgttctgggcaggtgtggactcaggtgttgtggtaggcaggtgttgtggtgggcaggtgtgggctcaggtgttgtggtgggtgggtgttgtggtgggcaggtgtgggctcaggtattgtggtgggtgggtgttgtggtgggcgggtgttgtgggcaggtgttgtggtgggcaggtgttgtagtgggcaggtgttgtggtgggtgggtgttgttctgggcaggtgtggactcaggtgtggtggtgggcgggtgttgtggtgggcgggtgttgtggtgggcaggtgtggactcgggtgtggtggtgggcgggtgttatggtgggcgggtgttgtggtggacggttgttgtggtgggcaggtgtggtggtgggcaggtgttgtggtgggcaggtgttgtggtggacgggtgttgtggcgggcaggtgtggtggtgggcgggtgttgtgggcaggtgtgggctcaggtgttgtggtgggtgggtgttgtggtgggcaggtgtgggctcaggtattgtggtgggtgggtgttgtggtgggcaggtgttttggtgggcaggtgttgtggtgggcaggtgttgtagtgggcaggtgttgtggtgggtgggtgttgttctgggcaggtgtggactcaggtgtggtggtgggcaggtgttgtggtgggcgggtgttgtggtgggcaggtgtggactcgggtggttgtggtgggcaggtgttgtggtggatgggtgttgtggtgggcagttgtggtggtgggcaggtgttgtggtgggcaggtgtgggctcaggtgttgtggtgggtgggtgttgtggtgggcaggtgtgggctcaggtgttgtggtgggtgggtgttgtgggcaggtgttgtggtgggcaggtgttgtggtgggcaggtgttgtagtgggcaggtgttgtggtgggtgggtgttgttctgggcaggtgtggacttaggtgtggtggtgggcgggtgttgtggtgggcgggtgttgtggtgggcaggtgtggactcgggtgtggtggtgggcgggtgttatggtgggcgggtgttgtggtggacgggtgttgtggtgggcagttgtggtgggcaggtgtggtggtgggcgggtgttgtggtgggcgggtgttgtggtgggcaggtgtggtggtgggcaggtgttgtggtgggcaggtgtggactcagtgtggtggtgggcgggtgttgtggtgggcaggtgtggactcgggtgtggtggtgggcgggtgtggtggtgggcaggtgtggacttgggtgttgtggtgggtgggtgttgtggtgggcaggtgtggactcaggtgttgtggtgggtaggtgttgtggtgggtgggtgttgtggtgggcaggtgttgtggtgggcaggtgttgtggtgggcaggtgtggactcaggtgtggtggtgggcgggtgttctggtgggcaggtgtggactcaggtgtggtggtgggcgggtgttgccacgggtttgtcacctcttcctgacccaggaaagtgcaggttcccaagagcactcccaggtgttgggttcaggttttccactatgggacccagcaccaattctgggccccaggaaattctctctggaccctgtgctcttaccccgtgtatagacattgagctattggtaggtctttacaaacaataccgggtccactattctgagaggagctgaactcctgtgtgagacaccacatcggaaacaccagggccaaaagccaggtgagctcccggcctgcactgtca

SEQ ID NO: 9642 - DNA, 1202 bp, Artificial sequence
  DNA replication origin
gcagtctgcggcaggagcgccgggcatgggctttggcccggggtgtaggaggcgcgcaccctctggccggatgggcggcgcactcagggcccaggaggccatcccaggggagccccgccagcccccgccggagcccgagctgcagctgccacctgcaagtggtgcgctggctgcagcagtggcaaccccggatcccgtcctcccgcctcacacccatcagcacggaccccgggggcgacgcagtggcgaagtcgggctgtgggcccacgggcggcaccaggcggagaagcaccactcaaccccatccctgggctgcagagggcccagcgcgggggcccggagcatcgggagccggtggaagaggagaagagcgcgcaggccacagtcaaacaggccctggggcagggcgcgccttgcgctccagggagccccgccagccggcggcacctgagcagcaaccgcggcctgcactgggcgccgcgagagagctgctagggcggtttctccgcctagggcctgttgggcggggccggctaaggtgcacgtgctcgctggtcctaaccgttctgttgggcgtttctgctgagaggcgggaggcgctgagagtatgtgcaaaggtccgtggacggaccgcattgcttgttgttgcgcttcggaggcggagatccccgaaggcgagctgaaatacggctggagagttcccaggatacaatttgcagcagacgagtatggaagactaccagccggagtggtggcccaccctcagggagcgcttgtgctccgacggcttctcatttccccaataccacattaaatcatctcatctgaggaggatccacagagctgtcttctgtggtaatctggagaaactgaactaccttctgttcacgttatcatgacgctgcctgagtagttgtcgaccttgttttcacattaactggctgttttgttgtggctgcacttctgtttcattaccttcatcagaatcatagcttggaggcttcatagctccctgattcaattctgtcccatatttcaacttgtggtatttggctcttttctgtttaagagcatactccaacattctgatcatcctcacgagatccttcttcaaattttcttggcccttcctttctccctgtaggaaggcaatctgggccgtaattgttgatgaggtcttggagcctcccttctgctcccag

SEQ ID NO: 9643 - DNA, 919 bp, Artificial sequence
  DNA replication origin
ggggttgccactgctgcagccagcgcaccacttgcaggtggcagctgcagctcgggctccggcgggggctggcggggctcccctgggatggcctcctgggccctgagtgcgccgcccatccggccagagggtgcgcgcctcctacaccccgggccaaagcccatgcccggcgctcctgccgcagactgcctgacttgccgcggccgggctggccccggggtccgcgcggctggaggcgcccgcctggtcggagattcccaatcctcggcgacccctgctccatgtgctggtggcggctagcgcccatgggctgacctggcttcccggagctgcggccggccacgcccaagggccccacaggctgcgctgcccttgccagctgctcctgacccgcgcccagagtgcaggacctggcgcttggcactctgcagccacagggatgaggctgagcgcaggttctcgttcctcatggcgccgctggggccacaacctgacttcacctccccgtcgcccaagtcgtgtgatgggcacgtgtgaggaggggcaatcggggttcccaaggctgctgcctgcatgccactctgtggccactaggatagggctgaggagctgccaggggatgagcacgtcgtggccatcgggatggggctgagagtctatctttatccttatgcacccgcccagccgacttcctgacagccactaccacagcgtcctgtcagggagtccttgctgttggggcggggatggggagggcatggagaatcagggatggtctggccattgctgctggtgcctgacgtgcaggtggcagctgcacctagggcacgggctggtaggtctcttttggatggtttccaggtggcccattgcgccgtgaccaagccagagggtccactccaccttagcccacactagg

SEQ ID NO: 9644 - DNA, 1579 bp, Artificial sequence
  DNA replication origin
taggaattggagagacttattaaggactgtaaatctgggttttggtaggggtatggctttaattacttggtcaaggaaaacaactgcatatccagcaattttgggggagccagtgggcctggaagaggagccatctatgaacagttgttcatagggattggtgagaggctcagaggaaatatttgggaaatgtggctgtacaaggtccaggatgtcagtccaagaatgagtaagaggggaagaagatatggggagtaaggatgttgggttgaggggagcacttttggcaacactggatttgggattttcaataaagagggcatggagtgactgaactcgggaaggagagagggagtttaacacctgggaggagaggagatcctgtaaattgtgagggcagtggatggtggtgctttggccaagtgttagttttttgctttccagagctaaaacggctgccactgctaatgctctaagacaggttggccatcctttgaagtgtggtctaattgtttagagagataagctacaggggcaaaggaaggaggatcctctttctgttgccctaagataccaaggtttactcctcagcttttgacagtgtagagaatgaagggttgggagatatcaggtaaggacagggcaggtgcagtgacaacagtggtttggagtttatggacactgagaagtatgttatgtgtgggacttaggggttcactgagggagcctttggctgcttaatagagggggtgagccaggagggcaaagttgggaatttatatcctaaagaaacctgccaatcctaagacagagaattttattttttgaggaaggcggaggcaagctgttttattaaggctgcccatgccagggtcatagctcagaccctggggcagagttggactcctaagtatgttactgttggggtggatagttggactttggagggggagactctatatcctttgctagcaagaaagtttagaagggtaatggtgtgagtttgagagtcttttagggaggggctccagagaaggagatcatctatgtatcgaaggagatggctgggggactggtctaaggaggtgaggtcttgggctagagcttgtccagagaagtgagggctgtccctgaagccttgagggaggatggtccatgtgagttgtgattgaaaagtgtcaggattagtccaggtgaaggcaaagaggttttgggagtcagggtgtaggggaatggtaaagaaggcatcctttaagccaactgtggtgtagtgggtggtgttggaggggatgagagacagaagtgtgtagggattagggactatgggatgaatagtgaggacagcctaattgatggctcagaggcccctggacaagttggtacgagccgtctgatttcttaacaaggaagatggggatgttatatggagagtgagttggtctaaggagaatgcacgagcagagtttgtttataatgggctgtaagcctttttggtgggtgagagagatggggtactggggtacgctgggaaatttggaggggtcttttaagtggatttttatgggataatggtaagcag

SEQ ID NO: 9645 - DNA, 2388 bp, Artificial sequence
  DNA replication origin
agtctgttattccagaatcaaaaaatgtaaatggtggtacacacacactagtatataagggcataattcttagaattggttgagatgagagctataaggttagccgagagaaggaacgagtagaccccaaactcaggcaagcaagtttttattaacctgctgggctgctccagaggaggcagcctcatttacagactgctgtggggttttatagggcaaggggctaggctggggtaggggaaactgagtagggtagcaggtgtttcaaccatttcctggaaatgtttttgcccgttcggctaagcaaggtgggcagatgtcttaactgtatcctagaactgtttactagttctactgaaagtcttgcacaagcggctgtagaaaagttggggaggtgtttgtaggtggtcacaaaggactgtattgtgaagttcctggaggaggaggaggggtagcttggatctctaacattccggcctttaataggtcataaaggaagagggcaacgttatcatctgactgcttgtagctgtggaagggcggcgtagaagaggaaaggctgggggtttcggatggttgtttttgaagccatcagtattcttgaagaagcagcatatcttgaactgtcctatgggtgaaggctttgatgtggtcctgtaaaaactgggtaaggagacgtatgaagcagggtccaaaagctaagagaagaagcatgcttatagctgggcgaaggaggggtagtagccagggagcccaaaagctaagggaccatgaaggccagagggaccaggtagaggatgtgttttttttttttttggtgggggggtggggtttggttttttcattttttgactgcatcttgtactaggcctgattgattgagataaaagcagcactgtttatctaaaaagatgcacagccttcctttttcagcagtgagcaaattaagacctctgtgattttgaaggacaactgcggctaaggagtctacctgtgattggagggttgaaacagtgttagctatgtctttttaactgcctgtaagatcttgtgagagacagtgatagtacatgagggaagtagaaagccccgccactctggttccaaccacagtagtcatttctagccctactaggagaagtattaactgaacggcactgcattggcgcacttgagtttttacaaggattcataggctttggtttccaggggcaatgttaatttttgggcttaggacaaccagagtacaagtaccagtccagttggtagggaggtagaggtaggcggaggtaccgcacaggaagaatatggcttggctaggtaaacaaaattggttgtgtatgttaaaaaggtgtttaagcttgtggtcttcatgtatccatgctcctagggtgcttgctaaggcagctgtgaggagtggctggaagagggtattgggggatggttggattgaacctggttattttcctggtggaggagaaaccgttttgtgtctaccaggagtttgtggttactgtttaacagggggattaggagatattcgtttggggttgggggtggtgagccttataggggaatgtagtccagggttgaagggataggcagggtaggtgtcttttgttgcagtatcttgagtttatgttgtgtagtacagtggtgttaattttcaggggccagaaaagctcatagtaacccagaaaatggaaagattagtatgattaactgggccttggagttgcagagtgaagttgtgaagttgcagtgaagttgcagtggtttgaaggtaggtgtcttaggaggtgacctgaggggaagtggcattggatgcacagaggagcttgagaagtttagaagatgttggtggctgtaggacggaagatgggcttagtatggttggtaggagtggaaccaatatggaaataggggcacattaacagagctgcttgccttattgtgttgagaggtttttcattttggaataggaattggagagacttattaaggactgtaaatctgggttttggtaggggtatggctttaattacttggtcaaggaaaacaactgcatatccagcaattttgggggagccagtgggcctggaagaggagccatctatgaacagttgttcatagggattggtgagaggctcagaggaaatatttgggaaatgtggctgtacaaggtccaggatgtcagtccaagaatgagtaagaggggaagaagatatggggagtaaggatgttgggttgaggggagcacttttggcaacactggatttgggattttcaataaagagggcatggagtgactgaactcgggaaggagagagggagtttaacacctgggaggagaggagatcctgtaaattgtgagggcagtggatggtg

SEQ ID NO: 9646 - DNA, 1192 bp, Artificial sequence
  DNA replication origin
tgcctgccagtcccgcgccttgtgcccgcactcctcagcccttgggtggtcgatgggactgggcgcctggagcagggggtggcgctcatcggggaggcttgggccgcacaggagcccacggggggcggggggggggccggggggggcgcggggggaaggctcaggcatggggtgctgcaggtcccgagccctgccccgcggggaggcagctaaggcctggcgagatatccagcgcagcgtcggtgggccggcactgctgggggacccagcacgccctctgcagccgctggccagggtgctaagcccctcattgtctgggccggcagggccggtcagctgctcctagtgcggggcccgccaagcccacacccacccggaactcgtgctggccggcaagcaccgcgcgcagccagggttcccggccgcgcctctccctccacacttctccgcaagctgagggagccggctccggccttggccagcccagaaagtggctcccacagtgcagtggtgggctgaagcgttcctcaagtgccaccaaagtgggagcccaggcagaggaggcgccgagagcgaacaagggctgtgaggactgccagcacgctgtcacttctcagaggtactgtcactgacacaccgtgggataagatgactatcaccagaaaattaatgatggctttttaaacattagaagattggcaataatgtcacactggtaattgatttttctcttgccactaagaaacagaagtaaagaaaagaacttgcattttaatgttgcgttagctcaacgttggggcatcttttaaaactctctacctggttgaggaatgtattgtagttctacagtaaaaactggcattaaaaggtactgatatgtatttagtatgttgcagtatcttggttcaagcttctggctcaggtgatggttcccataatagtgagtaagcttcccatactatttattcagtggttgttggcacaggtagttctttataacaatcactctcttggaaattatgcccagggaggggatagagacattggataagcctatccactatatcaagtagctcacaatgtggctgcttgtcatattacccttcacaattgagttatttttaaaacatgttgttaggtttatctttttcctcatttcattcctgcataaataatattataattcttatca

SEQ ID NO: 9647 - DNA, 871 bp, Artificial sequence
  DNA replication origin
cctactggatccttttggtttggttgtcataaatggagaatgaccgtgcctgggcctctgcagttcattaaagaactacacacaagcggtttacctgctccgttcgtagctgcggtggcgagatggtgttctccctcggtcataatcagatctgtaccggctgtcttgtcttctcctgtcgggactgcggcctcgctcccgccgatccagggaccgatgcctctcacctcgcccatgactgtgatctcggtgcctgtggtcatcatagtgtttcagcctttctggggaccttctctcactgggagcctttgggagtgggtatggagggagatgtctgaaatgaggactactgctgttattagcactgggcaggaaagaactagggttgttctggaaactattaaaactgggaggtgggaagttgtggtgagaatagcccggagggtactgataattaacctgctgcggcatgactggagggggcgggggatgaggcatggagggagggggcatcatgaaggggaaagtgccttgtccaggaggtgccccagggactggggggttattaggacaaggcattggtggtggcatgggaggaaaacaaggaggaactgggaaggggtgcctcatctggtggttggggaaaggcggcctgattgggcaggggggaagagggccttgcgctgacggaggcatgggtggggggaagggtacaaagtctggtcgtggagggagaaaattgggggctggagagtttgagaaagtggtggaaggggcacttggaggttcatattgatattgcacaggaggctgctgagggtgaagcagcctcagattttggggcctaaaggatggtgctgagggtctggct

SEQ ID NO: 9648 - DNA, 1601 bp, Artificial sequence
  DNA replication origin
gcgtcccggctgcagcgggacggtcgcttcacctgctcgcggcttggccgaggctcccgcggcttcctcgcgcgtccagacccaggcgccgcccggcgggtccccgcgcagctgccgccaccgcggccaccaccggtgccgccgccgcgcctgccccgagctgcagagccgcggttcgccggcagccgcgggaggcgcaatcccggtgccttgggttcggcctgcggctcctcggctgcctgcagccgccgccccgccgcgtcccgctgcccggggccggcacgcaccggcgctggggtccgctcctcgcctcgctgcgcaggggatccgccgagcctccaggatgggcggggattccctccccctggttgattcgaggggcgggaactcccttccccgagtgacagggacggggggcggggattcccctgcaggaataacaaggtgggcggggatttccccgagcgagccccgccgcgggcaaggcgtctctctgggtgagccaggagtcctggtgcgcccgcttcagaaacctggggatcgtgggaggaaggcatccagggagatggctgctccgaatctccatacaggcggggcttagggcgccatctaggtggaacagagcgagctaggggacgtgaagttgcctctgcatagcactttacacagcaaagagaaaaatgtcagttaccttatcaaagaatggggcggaggggccacaggagatgggggaagagctaaccactcaccccaagctacccttagcctctggtccttgggataccaaaggtaatttagcactggtacgaggatttcggggagaggggacctcttggcacctcagagctgcttaatcccccagttaagcccctgggggggaatcccatggccctggggtggtggttttggtcccatgagcactagccacgagctcctgccgagtggactgtgagagctaatgccagccgcccttggctcccgtccaggtcactcgaggaaccgagcctcaggcttttgggatccttcattccggtggattttcaggaaggccttcaaatatttttggttctttttttgtcatccttgtcattctgcctaccaaagggagaggatgataagaacataataggaagactgcacagctctgcaaattaagctctcttaagaggaaaaagctggtctttttcaagtgctggcagataagagtaaaaacatatgaaaaattgcaaaacctgggataatgaatagttgaataatgcttttgacattttctacagaacagtaattggaaatctttgctttcggggggatggggatgggacagggcaggccccagctgcagttctgcccagcaaggcaataaactctggcctctccgaaaagcaggcagacataaatcacctgcgcagaccggacagcgctgtcccaccacaccagagaccagagtgggcccaaggcatttggaggtggtattgtcctcaggggctggggtggagaagttcttgatttcagctgttcttcagcttttataattaccaggccattgagatcaatgcttgcacaaatccaagcatcgtatatgacaagctgggcactcaggc

SEQ ID NO: 9649 - DNA, 1032 bp, Artificial sequence
  DNA replication origin
ggcggatcccctgcgcagcgaggcgaggagcggaccccagcgccggtgcgtgccggccccgggcagcgggacgcggcggggcggcggctgcaggcagccgaggagccgcaggccgaacccaaggcaccgggattgcgcctcccgcggctgccggcgaaccgcggctctgcagctcggggcaggcgcggcggcggcaccggtggtggccgcggtggcggcagctgcgcggggacccgccgggcggcgcctgggtctggacgcgcgaggaagccgcgggagcctcggccaagccgcgagcaggtgaagcgaccgtcccgctgcagccgggacgcgcggctccgggtgggcaggggatgggggaggcccggcacccccgagaccgtgtgtgcccaggaaagtttagctacaaatccgggtgcgggaatcccagccctggcagggcggggagtgaggacgccgaaccggggtcccacgttgggcggcgcaaactcctctagcatccggccggggacggggagggcgcagcccaggggagggggctagacagagcgggaccgagacagcgggacaaccggagacgcactgccgggggtactcaagacagggccgggacctcctgctcgggcgcgcatcccgggtccccatccctgggccgtcttctggtcccttcctccgacaggagtggaggtactcaggtactccggcctcaggtaatgtcttggggaccatcctccctcgggcttgtttcatctctcaacccccgcctctttgcccagatgagacgttagacgcggggcgagggaatgcagggggcgcgcaaagatcaagggcatcttagggccggttattggcgtctgccggggagatggggaacatagtgatagggaaatcctgctctctctctgaagtcgagtttctcctaaaatctggtttctccctccctctgttcctctctccctccctcgggtttgcgtttgtgttttaagtctttgagctgcctgtggtccccgctatttggaaaatccattaaag

SEQ ID NO: 9650 - DNA, 1183 bp, Artificial sequence
  DNA replication origin
gtccccatccctgggccgtcttctggtcccttcctccgacaggagtggaggtactcaggtactccggcctcaggtaatgtcttggggaccatcctccctcgggcttgtttcatctctcaacccccgcctctttgcccagatgagacgttagacgcggggcgagggaatgcagggggcgcgcaaagatcaagggcatcttagggccggttattggcgtctgccggggagatggggaacatagtgatagggaaatcctgctctctctctgaagtcgagtttctcctaaaatctggtttctccctccctctgttcctctctccctccctcgggtttgcgtttgtgttttaagtctttgagctgcctgtggtccccgctatttggaaaatccattaaagcgcaaggctgaattcagcagcaggagggtccaggacccctggcaggagtttgccagaagctgtcctcggcagcccaaatctatgcagagaccttgataagggacactggagtgggaagaggacaaggtctggcatgggctggtcgcagagactggaatggcaggcacgagggcattccagagctccagacctgccctgggactggccgttgggcagtgttgggggatggagctgagtctgagtctgtcccctgcagctggcctaacctcttgcctccaccaaaggtagggtaggtggatatgtttgccttgacaaatcgcaatgaaactactggaagtggttgctgagtggctgcagtaagtgatgccctgatctgtccttgcagagagaccccctggaccttcagggcctgttctccagtggggtctctgaacactggagggctttaggggcctggcatctctactgggccagcttttgtgggttgtgacttctgggtggtggccagataggtacaggttggcaggtgtgaagtgggagtgctgcttgtgggggcagaagagaatgtctcagaacacacccctggctgtaggtggtggttctggcttcatgaattccttcttccattaggatgggcccagagcttctgctcctataataaccacctagttgtgtgagtgagtgtgtgtgttgcgggggttaggtgtaggagtaggggggtggcaggtgctaggagaggaaaaatcagaaccatgtaaagtatataaatgtacctaccttgacatagt

SEQ ID NO: 9651 - DNA, 1395 bp, Artificial sequence
  DNA replication origin
agcccagctggcttcacccagtggatcccacaccagggctgcaggtggagctgcctgccagtcctgtgccctgcacccgcattcctcagcccttgggtggtcgatgggactgggcgcagtggagcacggggtggcgctcattggggaggctcgggtggcacaggagcccacggagtggaggggaggctcaggcatggcgggctgcaggtcccgagccctgctcgcgggaaggcagctaaggcccggcgagaaattgagcacagcagctgctggcccaggtgctaagcttctcactgcccggggccggtggggccggccgggcgagtgcggggtccgcggagcctacgcccactcggaacttgcgctggcccgcaagcaccgggcgcggccccggttcccgcccgcgcctctccctccaaacctccctgaaagctgagggagctagctccggccttggccagcccagaaaggggctcccacagtgtagcggcgggctgaagggctcctcaagtgccgccaaagtgggagcccaggcagaggaggtgccgagagcgagcgagggctgtgagggctgccagcaggctgtcacctctcagcctgactcattttccaacccttcccttgccttctggacagtcccctgcttccctagctctgacatcctcatgaccttctgtctccagcattgtcaggcccttggaccagctcacggcagccaggacacagaggcattgtgccattcctaggccagctgagggacgtggacagtgtgagggctcaagcatgatgatatttccaacaggccttcttgtacatgcagggcaggccagggcccgttgccagcacctgagaggagctgtgatgcagctcatgatccagtgatcgcatccaactggctgccggctgctgtccaggcctccgggaggacccgcagcctctgtccgggtcaggggaatcggcgtctttcccagaccaccatgagggccggcgttcctgctcagctgtgaatgctgctgttgttatggctgctgcttggcttaggttaagcggcttgtttgttttctaacttcaggctgggaagagggagcgtttggatctggcaaggaccttggtgtgcaaagtgaagtccctgattggaaggacgcagcctggcaggggcctgctgcgctgctcatgattggatgtgaggtttctggggcctctgcaagctcggagctaagagtggtgaagagtctgggtgtgggggtgggaggacagggaaaagaggacagtctgggggtgggggcaggaggatagtgggaaagcactttttttttttttttttttgagacggagtctcactctgttgcccaggctgaagtgcagtggtacgatctcggctcactgcaacctccg

SEQ ID NO: 9652 - DNA, 1405 bp, Artificial sequence
  DNA replication origin
agatggggcagccgggcagaggcactcctcacttcctcctagactgggcggccaggcagaggtgctcctcatttcccagatggggtggcagggcagaagcgctcctcatctcccagatggggcggccgggcagaggcactcctcacttcctcctagactgggcggccaggcagaggcgctcctcatttcccagatggggcggccaggcagtggcgctcctcacttcccattcgggcagctgggcagaggcgctcctcacttcctcccagatggggccgccgggcagaggcgctcctcacttcctcccagatggggcagccgggcagaggcgctcctcacttcccagatggggcggccaggcagaggcgctcctcacatcccagacgatgggcagtccggcagagacgctcctcacttcctagacggggtggcggccgggcagaggcactcctcacttcccagacggggcggccgggcagaggcgctcctcacatcccagacgatgggcggccaggcagaggctcacttcctagacaggttggcggccgggcagaggtgctcctcacttcccagacggggtggccgggcagaggggctcctcacatcccagacgatgggtggccaggcagagacgctgctcacttcttaagacggggtggcgggcgggcagaggctgtaatcttagcactttgggaggccaaggcaggcggctgggaggtggaggttgtagcgagctgagattacgccactgcattccagcctgggcaacattgagcattgagtgagcgagactccgtctgcaatcccagcacctggggaggccgaggcgggcagatcacctgaggccaggagctggagaccagcccggtcaacgcggcgaaaccccgtctccaccaaaaatacaaaaaccaatcaggagtgggggcgcagtgcctggaatcccaggcactcggcaggccgaggcagaagaatcacgggagcctgaggcagggaggttgcagcgagccgagatcatggcagtacagtccaggctcggcaagagagggagaccgtagaaaggagagagggagagggggagagggggagagagaggatgttttcttaaaaacaggtatttcaccgtcttaaacctgccatctttctgagaataaacttggagcagtgcgggcatgccctctccaccaatctgggtggccggaaggggacgtgaatgttttttgaacgttaacgtactacacattgtgctaaatgctttaatgtgcatttcttaaaaatctgctcagcctttcaaagtcagggtgttctcctcttttttcaggtgagggagtggaagttcagggagattaaatcattagcctacagtcacaaggtaactcaggagctgagggctaaacctagttctgcc

SEQ ID NO: 9653 - DNA, 1360 bp, Artificial sequence
  DNA replication origin
agaggggctcctcacttcccagtaggcgcggccgggcagaggcgcccctcacctcccggacggggcggctggccgggcggggggctgaccccccccacctccctcctggacggggcagctggccggacagaggggctcctcacttcccagtaggggcggccgggcagaggcgcccctcacctcccggacggggcggctggccaggcggggggctgatccccccacctccctcccggacggggcggctggccgggcttgggggctgacccccccacctccctcccggacggggcggctggccgggcagggggctgacccccccacctccctcccggacagggcggctggccgggcagagtggctcctcacttcccagtaggggcggccgggcagaggcgcccctcacctcccggacggggcggctggctgggtggggggctgacccccccacctccctcccggacgaggtggctgccgggcggagacgctcctcacttcccggacggggtggctgctgggcggaggggctcctcacttctcagacggggcggctgccgggcggaggggctcctcacttctcagacggggcggttgccaggcagagggtctcctcatttctcagacggggcgtccgggcagagatgctcctcacatcccggacggggcggcagggcagaggtgctccccgcatctcagacgatgggcggccgggcagagacgctcctcacttcccagatgtgatggcggccgggaagaggcgctcctcacttcctagatgggatggcggccgggcagagacgctcctcactttccagactgggcagccaggcagaggggctcctcacatcccagacgatgggcagccaggcggagacgctcctcacttcccagacggggtggcggccgggcagaggctgcagtctcggcactttgggaggccaaggcaggctgctgggaggtggaggttgtagcgagccgagatcacgccactgcgctccagcctgggcaccattttgagcactgagtgaacgagactccgtctgcaatcccggcacctcgggaggccgaggctggcggatcactcgcggttaggagctggagaccagcccggccaacacagcgaatccccgtctccaccaaaaaaatacgaaaaccagtcaggcgtggcggcgcgcgcctgcaatcgcaggcactcggctagctgaggcaggagaatcaggcagggaggttgcagtgagccgagatggcagcagtaccgtccagctttggctcggcatcagagggagaccgtggaaagagagggagaggagggagaccgtggggagagggagagggagagggagagtcatttgcagctttt

SEQ ID NO: 9654 - DNA, 934 bp, Artificial sequence
  DNA replication origin
ccgggagggaggtgggggggtcagccccccacccagccagccgccccgtccgggaggtgaggggcgcctctgcccggccgcccctactgggaagtgaggagccactctgcccggccagccgccctgtccgggagggaggtgggggggtcagccccctgcccggccagccgccccgtccgggagggaggtgggggggtcagcccccaagcccggccagccgccccgtccgggagggaggtggggggatcagccccccgcctggccagccgccccgtccgggaggtgaggggcgcctctgcccggccgcccctactgggaagtgaggagcccctctgtccggccagctgccccgtccaggagggaggtggggggggtcagccccccgcccggccagccgccccgtccgggaggtgaggggcgcctctgcccggccgcgcctactgggaagtgaggagcccctctgcccggccaccaccccgtctgggaggtgtacccaacagctcactgagaacgggccatgatgacaagggcggttttgtggaatagaaagtggggaaaggtggggaaaagattgagaaatcggatggttgccgtgtctgtgtagaaagaggtagacatgggagacttttcattttgttctacactaagaaaaattcttctgccttgggatcctgttgatcggtgaccttaaacccaaccctgtgctctctgaaacatgtgctgtatccactcagggttgaatggattaagggcggtgcaagatgtgctttgttaaacagatgcttgaaggcagcatgctccttaagagtcatcaccactccctaatctcaagtacccagggacacaaacactgcggaaggccgcagggtcctctgcctaggaaaaccagagacctttgttcacttgtttatctgctgaccttccctccactatt

SEQ ID NO: 9655 - DNA, 1522 bp, Artificial sequence
  DNA replication origin
cctggcgcccgggccccgcgccgccgccccccgcccagcccgccgcgcccgcacctcgcggtccttgaggcccagcaggagcacttcctccatcagggtcagccgcgtttccttggagtcgcccttgtcgtcgtcgtcctgctcgtcgcggcggctctgcgcgtcgtcctcgctgctgccggcgccgccgcccgccgcccgctccttgtcggcggcgttgcgggaggcctcggtgcgccgctgcaccaggccggagctgcgctgggtcagcgaggtcatggctcccgccgaggcgccgagccgggccgagagggtcgcaggaccgaccgggtcgccctcctcctccccgcgcggcctccgatccgggtttccgtgttaaatccggacgccggggcgacgtccgtcggcagcagggccgggggcagtcatgaggaaacaggtcagggcgaagcgggctggccgggcgtcggcggggcaggagaggagcgccttcctgcctgtggccgcagtccccgaaacaccccgagctccaaggcggaggcggcggcggcgcctttccaatatggcggccccggctgacgtcaccggaggatgtggcagagtcggcgcgggagagctgggccgggaggcgccggaagcggcggccggggatccgctgccactgcagcctacacccttcccggccctcggtgcttgtcttttctttggcgttcctgcgccccctgacccgcggtcctgcagtcctgctcccgtgacgtgccctccctccttccgttccccgtttccccttcactacccagggctggagcctgaacctggcggggccccccgtgaatggaagagcctgggccacgcgaaggtggaccccactcagcctccagccgtgccctccacgccccagacaccgccgtcttcggaggcgactccgcggtcgtgtggacggggtcccatttggactccggggtctgcaggatcggcaggaaggactttgctctctgctgctgggcggggaggggtacgctatctgccgggactccctaaccctttagaaggagcaagtgcgtccaaatggtttgaaagtggacctttattgttttccaggagtaagaagatagaacagttgaccagttttgtttgtaaaacttctttccttgcctcggacttgtgctataaagtgaccagggcgtagtgagtacagttagtaccgcacacgttagcacgctcgaccttaacgatctttttatagagacaataaacctgcagcgtttcatgccacgtctttgtacgcatcggatgtctctccgtgtagttactaggtgaaatcctcttggcgtgcgcaaattaggttaaaaaaatagctgtcaaacctgagacaggagttggaggagtagagggtggcgcttgttaagtgaaacatttaaccaggaatggtattgtgtgccatcctgtattaaacaatgtatggacagagtggaacaacagcaaagcaaaaaataaaaattttttaaaaaaagtgatcatg

SEQ ID NO: 9656 - DNA, 1422 bp, Artificial sequence
  DNA replication origin
cctcccggacgggtcggctggccgggcagaggggctcctcacttcccagtaggggcggccgggcagaggcgcccctcacctcccagacggggcggctggccgggcggagggctgacccccccacctccctcccggacggggcggctggccaggcggggggctgacccccccacctccctcccggacggggcggctggccgggtgggggggctgacccccccatctccctcccggacggggtggctggccgggctgaggggctcctcacttcccagtaggggcggccgggcagaggcgcccctcacctcccggacggggcggctggccgggcggggggctgacccccccacctccctcccggacggcacggctggccgggcggggggctgacccccccacctccctcccggatggggcggctggccgggcggggggctgacccccccccacctccctcccggacggggtggctgccgggcggagacgctcctcacttcccagatggggtggctgccgggcggagaggctcctcacttctcagacggggcagctgccgggcggaggggctcctcacttctcagacggggtggttgccaggcagagggtctcctcacttctcagacggggcggccgggcagagacactcctcacctcccagacggggtctcggcagggcagaggcgctcctcacatcccagatggggcggcggggcagaggcgctccccacatctcagacgatgggcggccgggcagagacgctcctcacttcctagatgtgatggcggctgggaagaggcgctcctcacttcctagatgggatggcggccgggcggagacgctcctcactttccagactgggcagccaggcagaggggctcctcacatcccagacgatgggcggccaggcagagacactcctcacttcccagacgcggtggcggccgggcagaggctgcaatctcggcactttgggaggccaaggcaggcggctgctccaaaaatgctaattaacaggaagaaaaaaattactcggtagggcagacagcctctaacatggctcccagggttcatggctgtgtaatcttctctccttgtgtatgggtgaacctagtcacttgcttccaacaaacaggacatggcgcaagtgattagatcacagaagactgtgatacctctttcccttttgtggagcccttggtttgagaaagggaagctgtcattttgtagagctgccctatggagaagtcaatgtggcatgaaagtgatgtctccggctgacagccattgagggcctcaggcctcccaatggccgcacgaatgagctcagaaatggatcctcccccatttgaacagtgagccagaaacctggtctacagccccacaccaaaccttgactgccgttttgtaagagatctggagcc

SEQ ID NO: 9657 - DNA, 960 bp, Artificial sequence
  DNA replication origin
cccgtccgggagggaggtgggggggtcggctccccacccggccagccgccccgtccgggagggaggtggtggggggtcagcccccctgcccggccagccgccccgtccgggaggtgaggggcgcctctgcccggccgcccctactgggaagtgaggagcccctctgcccggccagccgcccggtccgggagggaggtgggggtgtcggccccccgcccggccagccgcccgtccgggagggaggtggggggggggtcagcccccctgcccggccagccgccccgtccgggaggtgaggggcgcctctgcccggccgcccctactgggaagtgaggagccgctctgcccggccagccgccccgtccgggagggaggtggtgggggggtcagcccccccgcccggccagccgccccgtctgggaggtgaggggcgcctctgcccggccgcccctactgggaagtgaggagcccttctgcccggccaccaccccgtctgggaggtgtgcccaacagctcattgagaacgggccatgatgacaatggcggctttgtggaatagaaaggcgggaaaggtggggaaaagattgagaaatcggatggttgccgtgtctgtgtagaaagaagtagacatgggagacttttcattttgttctgcactaagaaaaattcctctgccttgggatcctgttgatctgtgaccttacccccaaccctgtgctctctgaaacatgtgctgtgtccactcagggttaaatggattaagggcggtgcaagatgtgcttggttaaacagatgcttgaaggcagcatgctcgttaagagtcatcaccaatccctaatctcaagtaatcagggacacaaacactgtggaaggccgcagggtcctctgcctaggaaaaccagagacctttgttcacttgtttatctgctgaccttccctccactattgtcccatgaccct

SEQ ID NO: 9658 - DNA, 1308 bp, Artificial sequence
  DNA replication origin
ggagcccgagccgccgcctctgcgtccgcgcgtcgctgcttcccagggcggcggtatgctggggaaaggagtagtcggcggtggcggcggcaccaaggcccccaagccctccttcgtgtcgtacgtacgccctgaggtgagggggcgccgcgcaggcggggcgtcgggcaggggcggccggggcgaggggcgccgggagccccttccttgcagcggggagcgccgcggagcgcttcctgcccttgtgccgggcgacggggcagccaggcgggctgaggccgcaggagcgcgctggggcctccgcgcgggccggaatggggaccccggcgcaggcaggcaggtgcctgagcgcagggcccgagcgctggaggctggtggaggggcccgagccgagaagggattgcggcccggaacgcccctggggattctggagaggacctggggttgtgggcactgctgggaggggtagggccgtgggtcggagcccccaacggggcctgctcggagcccgcgtgggtccgtcctgcctctggactttctcagtgagcccagaagcccgccggcctccgctgcctgcgtctgagtgcctcgggtgcggctggcgggatgccctgcacctacgtccgcctcccgtcagcgctgcggggagaaaagggggtcggcctggcctcagccagtctctgcttgtctctcccttgggaattctccgctgtcgcttctttctcctcatcccctcaccatcatcctttccacccacttcttactcttctgaatcttcaggtcaagaaatttgttcattcattcagaaaatacttctcgagctcctactgtgtgtcaggcactaagtgcttgtgatagacatcagtgaacaggacagagatctctgcattcctggagcttatttgagggggaaaggagaaacggggtgaattatagataattaagtaaattatacggtgtagtaggaggtgataaatatcatgggaaagaaaagaaatctttttcctcctcgcaaaggtggcatttgagccgagacttgaagatacgagaggtctgagagaagagtcgtccaggtagagggaacagcccccgggaaggtcgtgaggtgggagtgtgtctgaagggttggcggagcgtcaaggaagccagcatggcagaggcccatggacaagggggacagtcataggagaggaggttagagagatcagaacttgtaggccttgctcagggcttcttgagcaatagttcttaatccaaatgcctaatgagaagccttcttgttttgcatctgtaaaggtttttttctgc

SEQ ID NO: 9659 - DNA, 1184 bp, Artificial sequence
  DNA replication origin
gatgccaaaatggcgaccggcaactactttggattcacccacagcggggcggcggcggcggcggctgcggcccaatataggtaacggcatcctgccttctctctgttcgccccttgctctcccctcggtccggatcctgtcgatgcgacgcccccgcgcccgtccccagccatcccagagccccggcccgctgcaggcctggcccggcccagcccggcggcctctcccgccccgccccgccccgccccgccttgcccggcccggcccggcccgcggcggggagcggcccccagtaggggggaggtagagacggcggaggtgtagggacgtggaggcctcagggcccttcagcggccccttaactaaaatggcctcctgcggccgccgagcggagccgccaccgccgcccggcaggccccccagtccccgcctccgcgcgtccagcccccacctcccatcttcttcccacttgggggatggagagggtggctgaagggacctcacggggagtgccgtgtcgcaggtccactggcttctcgtgcgacgcctctctgcgtcgtcgcctggtgcttcaacccccggagcccagataacgtgtcgttgtctcgggtaccttttcctccgccgtggggcttcttccccagacgctccatcgctagcgagtcctgctgacaaactgcgggtgtcactgtgttcatcgggttcctttagtttttcctgcaaggagagagattcacataccaaccacctgtaaattgtgtagttcttagactggaaaagatgtgcgaagtttctagtgctgataaatgagtgcccagccttgtttgagctatggagtttaggccccaggtgggcctgtcattctccttgcgggggtctttcccctgcggggaatggtggggagggaagaagatgcaagtgagattgtactgagtcattgtaatgcaccggatgaaatccctgctttaagggaagctctcatttctgaagtctgtagttcattatacatcttaccaaagacaaacacaacagtggattgttaaattgttacttttgagtcaatctgagacttttgattcaggccataagcgcacacggctcctgcgtgatatgctttttatgtatgttagatgttggttaaacccaggcagtttttttcatttgatttacttcaggaggcacgg

SEQ ID NO: 9660 - DNA, 1585 bp, Artificial sequence
  DNA replication origin
ttctccaaggttctacattttctctttctgaaatgagtaacaggacaaatcagacaggttctgagagcctgtacttttgtaggaggcgtggggagcaaggttggcacaaaaaagaattgaggcattgtttctgctctggcacaagaaagtaggacaaagccctgaatttcatgggtgggttctgattcaccctttgcatttcttttttttcctttcctttttttttttttttttaagacggagtctcgctctgtcgctcaggctggagtccaggggcgcgatctcggctcactgcaacctctgcttccagggttcaagcgattctcctgcctcagccttctgagtggctgggactacaggcgcccgccaccacgcccggctttttttttttttctttttttttgagacggggtttcaccatgttggccactgacctcacctcgtgatccacccgcctcggccgcccaaagtgttgggattacaggcgtgagccaccgcgcccggccagcatttccttttaatgttcatatccaacaatgaggagagatgaggagcagggagtctgggggatgggcatggagaaggtaaggaagaggtgaaatgcaggcagtacatatgtacttgatggaagacacgaaacataaggccagagaaactagacgatcagaagagggactggaagaggaaagagaatggttgaaaacgaactgagaaactaaagggaagaaagcgaggaaacagagggaaagaggaaatgcttacatgggggcaagtactgttctgtccttaccactaaagatctggcacgtgatctggtctccctctcacttgactccagccagactgatcttcttgctcttgaacattcattccttcatctggacccttccacttgctgctcttcctgcaggcatctcccaggcctgtccttccttccttcaagtggtctccctaaccacactctacatgaaatagcacctcccttacccttattttccttactctgctttatttatgcttgaagctccagtcaccatcagacagaatttctgtgttttggctaccggctgttggctgacatatacccgctcctagaacgtaaactccacgggaacagggactttgttttgttctctgccgtatctccagcacctacaacactgcctgacaccctgctgggtgaccgatatacgccggatggctcagggagtgggtgcaggtcgaggaaagggtatagcaagaggtatgtccgggagggatgtttagggtgtgcttttagtccaacagaaaagcactctccatcctttttctatttctctcctctccttctccctccctccgcacttcagaggttggggaaaagctgcgggaaagcaggaaataaggaaaaatcctaaattgcccagctcgaattccaatgaaaaattaatgagcgaggaagacagggaggcagggaataagtgcacatgcaaaagttaaggaagccagtggaaagcaaagaaaaaggcgaacagacgtcactctctctggtcacgctccccgactccccagaggacaggcgaggcgcttctggcacacgcccccg

SEQ ID NO: 9661 - DNA, 1370 bp, Artificial sequence
  DNA replication origin
agactgtcgaaggtcaccaaatcagtgaccatcgttgtcctgtccttcttcctgtgttggctgcccaaccaggcgctcaccacctggagcatcctcatcaagttcaacgcggtgcccttcagccaggagtatttcctgtgccaggtatacgcgttccctgtgagcgtgtgcctagcgcactccaacagctgcctcaaccccgtcctctactgcctcgtgcgccgcgagttccgcaaggcgctcaagagcctgctgtggcgcatcgcgtctccttcgatcaccagcatgcgccccttcaccgccactaccaagccggagcacgaggatcaggggctgcaggccccggcgccgccccacgcggccgcggagccggacctgctctactacccacctggcgtcgtggtctacagcggggggcgctacgacctgctgcccagcagctctgcctactgacgcaggcctcaggcccagggcgcgccgtcggggcaaggtggccttccccgggcggtaaagaggtgaaaggatgaaggagggctggggggggccccatttaagaagtaggtgggaggaggatgggcagagcatggaggaggagcctgtggataggccgaggaccttctctggagaggagatgcttcgaaatcgggtggagagaggaaattggcaaagggatagagacgagccccacgggccagacagccaacctccgctccgcaccccacagcctctccttactcttcccacgctgagtagtgtgggggcgcccagaagcgaagacaagcagcaaaaatgtagagaaattggcacggggagcggggcttagccaaatgatgcacagacaattgtgcccgtttattccagcgacttctgcggagagggcagccgtcggcacaaacactcctttgcgtcttggcaaacgagactgcagcagcgccaaggtcctacttgctgcggggctgccccaggaatctagagctggtaggcaagaaacgcttttggagttaagaaaaagaactgaccatcctggtccgcccacaggagaaacggcaaaggaaagccacctccaatggagtcattatgacaattatcattccggactgggccagcgggaacaccctgagcccgacctagctgcacagccccggagctcagacgttagcagggggataacacctgtcaccagcttgggagagccattctctggggagtgtcgtcgctgcgggagggaggagacacagtgtgattagaagggctggacagggaaatttcttcaggctgctgccccaaaaggtaaaagggggctcatatgctcacttggtagcagagttggaagtggagcgctggcgcgttgcgcgcaggaagctcgggcg

SEQ ID NO: 9662 - DNA, 1015 bp, Artificial sequence
  DNA replication origin
gggggggtcagccccccgcccggccagctgtcccgtccgggagggaggtggggggggtcagcccccctgcccggccagccgccccgtccgggaggtgaggggcgcctctgcccggctgcccctactgggaagtgaggagcccctctgcccggccagccgccccgtccgcgagggaggtgggggggtcagccccccgcccggccagccgccccgtccgggagggaggtggggggggtcagcccccctgcccggccagccgccccgtccgggaggtgaggggcgcctctgcccggccgcccctactgggaagtgaggagcccctctgcctggccagccgccccgtccgggagggaggtggggggtcagccccccgaccggccagccgccccgtccgggagggaggtgggggggtcagccccccgcccggccagccgccccgcccaggaggtgaggggcgcctctgcccggccgcccctactgggaagtgaggagcccctctgcccggccaccaccccgtctgggaggtgtgcccaacagctcattgagaacgggccaggatgacaatggcggctttgtggaatagaaaggcgggaaaggtggggaaaagattgagaaatcggatggttgccgtgtctgtgtagaaagaagtagacatgggagacttttcattttgttctgcactaagaaaaattcctctgccttgggatcctgttgatctgtgaccttacccccaaccctgtgctctctgaaacatgtgctgtgtccactcagggttaaatggattaagggcggtgcaagatgtgctttgttaaacagatgcttgaaggcagcatgctcgttaagagtcatcaccaatccctaatctcaagtaatcagggacacaaacactgcggaaggccgcagggtcctctgcctaggaaaaccagagacctttgttcacttgtttatctgctgaccttccctccactattgtcccatgaccctgccaaatccccctctgtgagaaacacccaag

SEQ ID NO: 9663 - DNA, 1348 bp, Artificial sequence
  DNA replication origin
ggggtggccgggcagaggcgcccctcacctcccggacggggcggctggccgggcaggggggctgaccccccccacctccctcccggacggggcggctggccgggcggggggccgacacccccacctccctcccggacggggcggctggccgggcagaggggctcctcacttcccagtaggggcggccgggcagaggcgcccctcacctcccagacggggcggctggccgggcggagggctgacccccccacctccctcccggacggggcggctggccgggcagaggggctcctcacttcccagtaggggcggccgggcagaggcgcccctcacctcccggaccgggcggctggccgggcggggggctgacccccccacctccctcccggatggcacggctggccgggcggggggctgaccccccacctccctcccggatggggcggctggccgggcggggggctgaccccccctcacctccctcccggacggggtggctgccgggcggagatgctcctcacttcccagatggggtggctgctgggcggagaggctcctcacttctcagatggggcagctgccgggcggaggggctcctcacttctcagacggggtggttgccaggcagagggtctcctcacttctcagacggggcggccgggcagagacgctcctcacctcccagacggggtctcggccgggcagaggcgctcctcacatcccagatggggcggtggggcagaggcgctccccacatctcagacgatgggcggccgggcagagacgctcctcacttcctagatgtgatggcggctgggaagaggcgctcctcacttcctagatgggatggcggccgggcggagacgctcctcacttcccagactgggcggccgggcagaggggctcctcacatcccagacgatgggcggccaggcagagacactcctcacttcccagacggggtggcggccgggcagaggctgcaatctcggcactttgggaggccaaggcaggcggctgggaggtggaggttgtagtgagccgagatcacgccactgcactccagcctgggcaccattgagcactgagtgaacgagactccgtctgcaatcccggcacctcgggaggccgaggttggcggatcactcgcggttaggggctggagaccggcccggccaacacagcgaaaccccgtctccaccaaaaccagtcaggcgtggcggcgcgtgcctgcaatcgcaggcactcggcaggctgaggcaggagaatcaggcagggaggttgcagtgagccgagatggcagcagtacagtccagcttcggctccgcatgagagggagaccgtgggg

SEQ ID NO: 9664 - DNA, 1479 bp, Artificial sequence
  DNA replication origin
taccaggaggagtcaccctctatagactagggaacttcaccttccgtgagatttagtggcttgctcctcatgacacagttagcgagaggcaaggctgaattcaagtgcaggcttcaaaggccatttctctgtgtccctgttgtaagcactgggcccatgggatttgacaaccatcagcctgggctcagatttcaagtggggaaaagtatcagcaagtgagtggagccggaggtgaaagcagcagcaaggaaacagcggctggccgggggtgggcagggggcgggggtggcaggggcgggaggggagggtggcgggggcagtggtggcgcgggggggtgttggcgggggcgggggggcggtggtggctgtggtgggggggggttggcccctcctgggccctatgctgggctttctggaggagctccacagagcccgggcctattttcccattggagaaaccacttttgtgttcttagacacaaactttgtttttagtctatttgtccctttctggtgggccattgatcagaggagcagccatgaggcccacccagcaagagcaggctttgcatttctctggatttgtatgtgtgtgtgtctgtgtgtgtgtttgtgtgtgtgtttattgtggggtgagggtttcaatcacacacaggatagaagggagttccccagggctcccaccaaactgcacaaccttcacagtagccagtcctcagcagcactggctgttcttctatcagctcctcctagatcttctccttaggcttctgaatgactcctcattcattttctctgaaaagaagaaaaaagtatcctcaattgcactcatattagtgtctgccctctgggagtcggctttttctaagctgaatgcatgcagcagacatgcagaatagaccgtgggtgagccagacgctggggggatggcagggacagcgggagcaggcagcctgtctcaagatgtggccctaggcagacttcagcgagtcctgcagtaaactgttcatttattatcccacaaatatttactccagagccactaagtgctcgagagagatgtgacaccatctgcacagctttctagtgactgaatccagaggtaaagctttgagaatctgcggccctgtgctgccaggcttagcccatgtgtcccggaaaccacagtctgcagacagggccaggcagcgacggggtaaatgggggacaaataaagatggtggagtgctggtgaccttagttctgcagccaaatgcttgctctaacttcaaaataccctccaacccatttgctgctccatataaacaatagagcttgtccagagcgcttacagggcctaaagtcagaaacggcttgagccagaggagattattacggttaactattttatcaaaaagagtggaacctgatggagcatcaaaatcatcgctaccttaagataatttaaaaatgactttgtgcgggaaaggagagagatga

SEQ ID NO: 9665 - DNA, 1140 bp, Artificial sequence
  DNA replication origin
agaatcacgatgaaacactattgtagaaattgccagcattaaaccaaaagaatgttggtcagttcatgtttcttttacagtgtgactttgtttgagagggataaaggacaggaagaggagtgtacatcttgctttagctgttcctcacttggctaaggaacttttgctgtaggaagtgaagaccctgcacctagttacaaggcttttgatgcttgtttgtcaagttcaactgttaaaggggagataggctcttccctagtagggagagggaggaaggaaagggggatggggcggggggagggaacaggtaatatctgccatataaatattagtatgtagctgacacgttataaactgagctgttagggtgaatttcaattttgttggaatcgaccttttttccctcttaagttcaattgacttacagtagatcccagaaagaactcaatacgttatttattctagaaagctttcttccctgagcaaaggaggcagagctaacgaggagaagggaggagcttaggtgaacagaactgaagtcacagctggttagcatgactagaatgcatggaaaagccagcccaaattagatgagtgggtagatagagagctttgaaatccttggaattaatggtggagtccatcgtaattgaaaggtcgggccttagtgggctgggatagggagagaagctgtcggggacctggggcagtgagcctgtaccccgtggcttctcacacactattttgaaggcgttcccatgcgcaatctcgcctgtcagttcaggctgtaggtttctcctttctaactcctgagcagaacaacactgaacggtggtagtcttgccttgccacccaatgagtgctagaaaacagtcacttcaaccaattggttcagtccggagaacgtgagcacattctactttactttctgttcaatgattttggaaaacaaccttttagattctggtcagaaggggcttggatccgtgactttgaaacactcgccactaccacaaacgactttggaagttaatcagaaataaacagtatctgggatctcatccgtcctaaacccaggggtcagagcgtggggggcttccactaacttcaggttaagaggatgaaacagatccgcggaga

SEQ ID NO: 9666 - DNA, 2070 bp, Artificial sequence
  DNA replication origin
ggccgcgttttcctggggaagcggcgggcggggtggagcagccagctgggtccggggagcgccgccgccgcctcgatggggtgagtgcgcggcacggagttgggaggctcccggcgcggggtcccgggctcgtgtccccgcctttgtgtctggagctcgggcgcgggaggcgctggggacggcgcccgggcggagcggctgagcgggctgcagccggggtcccgccacctctccctggtccaccgccggcagcccactgtctgcggagagcagatctggggacaagaggaaggagaggaaggtggagatgagggtagagcgggaagacccggccaagttaggagaagggttcttcccgggtcctccgcgactcgcaggccggctggggcggggcgcggggcaggggccgcggcggagggagcgcgggtgggaatgaatgagcagacccggagatgcaccctggagtctgcgccgggtcccacctgtttcgccccgcgcggcgcctcgctgcccccgcgtcggtgctgctgagcccaatccgcctcccggctgaacttggaggaggtggggagggaggtgcgagcgggagactccgggtggctcccaggacgcggggtccgctattgttcctcctctgactccagggagcccctcggccggcccaagggcgggggcgagacccctctgggcctgcccctgccccctaccttgttttccccgccgcagctcggggagaacggatgctggagttggggcagactcggggccgccgggacttcgggagtaaggaggacgtggagccaccagaaaggcgcccgccatctcccgcgacccctgcctggtggggggtggggggtggggtgtcgtcctcaaccaccttcgctgccttcttgggcaggttggtgtcggtttagtttctgcggtttgcagggttgacatcctaactcctttgagtttcgcatcccccttttgtggagggggctcagagcctggagaagcaacagacggggaattaaggcagatgcagcccagcacagcgtggaggggtccgaagtggcctcacgggggcctgagcatggctgtctttccaggctcctctttatttgccaggagcccagctaagcccaactttactcccagaaatgttgaggggaatctgcggactcgaggcccctcgcctcgggaccagcggcttctcttcgccgcagctcacgcatgatcggggtgggattccgtcttccttccgggagaggagaatgcccagctgcctgggatggggaaacgttgccggatctctggggaatgtggtctcaaggctgcaggggcctggcagagaggaactgtccatcactaggacatagccgaagctcgccttagcgaagagagtctcacctcctcgggctttgcacagagttggagaagaggtcgggaatcacagggaggctggattttggctgctctgtccccagcctgcaggtccctgttcgccctgtggctcggaattttattactgatgtatataatctgataatcttttcttaatgatgcctaacaagtgtgatttttttcccccttgggtttgtaagacagttgattttatgtgaggagattgatccagttcttatattttagccagtgcttgtctaacagagattgggagagctatcccgtgctgggctgttgcacagttttcatctccattcactgagatgcttcagtaatgaatttattgttttatggctttttggagatggtggtggtggtggtgtgattataaccctgctggaaaatcttattactgttatctgaattgaagagacagaaaggatgctgagccccctagggattccgtaggggaatgatgtagtgtcccgcccaccagtagtgaacctgacagtgaaattctctctccagtctgctagttttcaaagcatgttctaggcaggtacacgtactatcacctaggctttaaaagtgaagaagcagatttggaggttaagaacaactgggccttggaattaatagaatgcagtggacaacttttgcctctccttcctccaccccctccct

SEQ ID NO: 9667 - DNA, 1140 bp, Artificial sequence
  DNA replication origin
ccgccaggtccctctctgctggctccgcggagtccgcccgggggaagggaaggtcggggagggccgggcttctccgagtggccgcgggggctgcgggacaggtacttacccgggtgccatttcagggccagcttccgataggccttcttgagctcctcctcgctggcgtcgcgccgcacccccagcgcctcatagtgacacttcatcgcccgaccgggcgggcggccggcgctggggcccgggacggggtcggggcccgggcccgggccgaagcggcggcggcggcggcgctggcagtcctctccggcgggagtccgccgcccgcaccgggccagccagcgagcccggcggcggcggcggcggcggcggtggtgtaggtcagtgaaggcgcgcggtggcggcagacgacgcaggctgcggcaagcgggagcgcggcgggggcggtgccggcggccgccgcttcgcatgggctaggggtgggctctgtgccggaaagggccgcgcgggagggggtggggcctcggcggggtgagaggcgaggccccgaggaaggaaggcggggccttggcgaggagagaggcgggccgcgcaggagaaaggcgggagcttggcggggaaagaggcgggccgcgtgggaggaaggtaggccttggccgggaagaacaggaggaaggcgggaccttggtgtgagaggcggggcctcggcggggcgagaggcggggccgcgcggaagggaggcagggccacgctggtgtcattgtgaggggcacagatggcggtcagtgtgagtggcagccgacctgagggctgaagggggagataggagctgggatgggagaggattctggaaaatatctgattataatttctcaatggatccccgtttttatagataaggcgattcagactccaagtggtcaagtggttggctcaagcctcctcagctaatacagtagcagaattcggttggactgaatatcaggttttttttttaatctctttaattctcttcagctgccacttaagatatctggtattgatcatcttgaccaatatgcttgagaaaggacagttagattatttaagcggaaacaatttaaaagggaagcatcaacacacttaatgaaaagccttaccacc

SEQ ID NO: 9668 - DNA, 1346 bp, Artificial sequence
  DNA replication origin
gcccgctatgggttctcatggtacctgcaggggtcctccttagcacttgcatcatttacattgaactgttttattagctcctctcttcaggagactggaagtactaggaggtttgtttcagcaaaacattgtattcttaggaccctacccctgcatcacagatgctcagttgatatttgttgaaggattaacagatgggtgggtggtagattgatgaatggatggatggatggatggatggatagataaatggatgggtggatagataggtgggtgggtggatggatggatggatggatggatggatggatggatggataggtgggtgggtgggtggatggatgggtggatggatggatggatggatggatggatggatggatggatggataaatgggtgggtaggttgatagatggatggaaaggtgggtgggtgggttaatggatggatggatgcatagatgggtgggtggatggatggatggatggatggataaatgggtgggtggataaatgggtgggtggttgatagatggatggaaagatgggtgggtaggttaatggatggatggatggatagatgggtgggtggatggagggatggatggatagatggatggataaatgggtgggtggataaatgggtgggcgggttgatggattgatggaaagatgggtgggtaggttgatggatggatgggtgggtggatggatgttccagccactacataggtcaactctacattttctcaaaatgcattgtaaagagctggatcgtggtttccctccctcttccccacaagttgctctgggagtatgaattgccccactcccagaccagcctcgctaagggccctgactattaatactctggttggacagatgacttttctgcaaagaaagggctcctgagggaagctgaataaaatggggaaaaaaagaatgaatataagccagtaagagagacaagcaattatcttgctagataaatagcccagatgttttgaatgaagcaagtctgaaagaccatattgttcatgagaggtgactaaatcaggtagacacaggctgtattggtacaagatggaccaaagtcatgagggagagagggactttgggactggtagtaatgtcaggaggtggtagggatgctcaaacccctggcaataggcaaagaagtggagttttcaccttgagcccagtgctttccctcccctagcccacctgcctttgaatttccacatcctcctgctttctcctctttctctaccctctttcccggtttaccactctttcaatttccggttcctcttgctttgcatgacaaggactagcagaagccccgg

SEQ ID NO: 9669 - DNA, 1487 bp, Artificial sequence
  DNA replication origin
tgaatacgctaaagagaagccataaagagcttcctttaactgaaaaggtgaccttggtgttctttggctagggtttgttactctgcatggttttaggcatccaccagattcttggaacatattcccccatggataaggggagactaccgtatgccttctcccaatatttcaatgttgctggtacacatgtattagctatctgtcactgcatagcaaattatctcaaatttagtagtttacaacacaaatattgatcatctcacagtttctatgagttgaaaatacgggtagagattaacagtgtgcctctggctcaaagtacctcatgaggtagtgcgtccggaatcagagggttctttcttggtctcactgacttcaagaatgaagctgcggaccctcgctgggagtgttacagctcttaagttggcgcgtctggagtttgttccttctgacgttcggatgtgttcggagtttcctccttctggtgggttcgtggtctcgctggctttaggagtgaagctgcagaccttcgcagtgagtgttacagctcttaaggcagcgcgtctggagttgttcgttcctcccggtgggctcgtggtcttgctggcttcaggagtgaagctggagacctttgcagtgagtgttacacctcataaaagcggtgtggacctaaagagtgagcagtggcaagatttattgcaaagagctaaagaacaaagcttctacagtgtgtaaaggcacccaagcgggttgccaatgctggctccagcagcctgcgtttattctcttatctggccccacctacatcctgctgattggtagagcccagtggtctgttttgacagggtgctgattggtgcgtttacaatccctgagctgcacacaaaggttctccacatcctcaccagattagctagatacagcgtgtcgattggtgcattcacaaaccctgagctagacacagggtgctgattggtgtatttacaaaccttgagctagatacaggctgccgactggtgtatttacaatccctgagctagacataaaggttctccaaggccctactagagtagctagataacagagtgtcccattggtgcactcacaaaccttgagctagacacagggtgctgattggtgtgtttacaaaccttgagctacatacagagtgccaattggtgtatttacaatccctgagctagacataaaggttctgtaaggttctactagactcaggagcccagctggcttcacccagtggatcctgcactggggctgcaggtggagctgcctgccagtcctgcgccgtgtgcccgcactcctcagcccttgggtggtcgatgggactgggtgccatggagcagggggcggtgctcgtcggggaggctcaggccgcacaggagcccacgcagggggagggggggctcaggcatggcgggctgcaggtcctgagccctgccccgtgggcaggcagttaaggccgggcg

SEQ ID NO: 9670 - DNA, 1534 bp, Artificial sequence
  DNA replication origin
cccgccttcgtcaacgcctgggtacgtccccctagccgcgtgggccacgcacgtcctggcacttaacctctgcccgtccggcgcgaagttagaggcccgggcggcgcggacggcgcgcactcccggcggtagggagctgaggcaaggggcccgagcccaagcccgcggccgcggcccggcccacgatgacttgctaccgaggcttcttgctgggcagctgttgtcgcgtggcgggcggccgggcggcggcgctgcggggaccgggtgcgggaggccccgccgcgcggccccggctgggcggtgacggtggcggccggcggcacctggggcaggggcagccgcgcgagctggcgggctgtggcagccgcgcggacggcggcttccgcccctcccgggtggtggtggtggccaaaaccacccggtacgagttcgagcagcagcggtaccgttacgcggagctctcggaggaggacctgaagcagctggtgggtcctggctcggccccgcttcgctcccgggctcggccggggctctggtggcggctgcgccccctcggggggacctctcgggacgactcttcccagggcaccgcagatgccggtcctgcctctctcgcggcccccaggtcctctggcttctccctgggcctcctttgcctttgggcgtgtgtgcgagggagaggcagggccggggagagggggagagagagggacagtggttcatgcagggacttaggaggcaggggcgccgcggggagggcgaagaggggctgccgagtggcctcagagtgaggggtttgaggattcgttggtgccctcgccgcccccgccctcgttccctggttgggacccactccaagaaagtgagccagtggcctgaggtctggacgccctgcgaacagctcccctggccgccgcgagaaagggggcccagggcgccgctgagggctgccgggggaaaagggccgaaacaaccgcggacacacccccttttactctgcaggactgcgaggcctagggcactccggaaagtccttcagcgtgagccttttccttgctggaacgtggtcgttggacactacgagcttgttttaaaagcacaggtctttggtgctaagaaggaaaagggagaaaatttgacttgtatatgtacgttattaaggagaaatgtcaggacaaggggctggtatactgggtagtgtgtgaaataaaaaagcctgcgactcttgtgcagcagtatctccacaatataccatatttgatatgtttattaatatatctgcaaagatacaaatccaagggaaaaaccagagtttgaatcttcctgttgtcatccccccccaccaactttaaaaacagtttctgatcccataccaccatccaccaactttaggaaaaggagagtgcccggtgctaccatgagcagtatgtccagaaaaatatattggaaatctcttaattgttggcactgtgcaccaaaaggttttggaattaattgcacataactgatttagtttaattctgtgcaagactag

SEQ ID NO: 9671 - DNA, 755 bp, Artificial sequence
  DNA replication origin
gggggcgcagccgccaccagagccccggccgagcccgggagcgaagcggggccgagccaggacccaccagctgcttcaggtcctcctccgagagctccgcgtaacggtaccgctgctgctcgaactcgtaccgggtggttttggccaccaccaccacccgggaggggcggaagccgccgtccgcgcggctgccacagcccgccagctcgcgcggctgcccctgccccaggtgccgccggccgccaccgtcaccgcccagccggggccgcgcggcggggcctcccgcacccggtccccgcagcgccgccgcccggccgcccgccacgcgacaacagctgcccagcaagaagcctcggtagcaagtcatcgtgggccgggccgcggccgcgggcttgggctcgggccccttgcctcagctccctaccgccgggagtgcgcgccgtccgcgccgcccgggcctctaacttcgcgccggacgggcagaggttaagtgccaggacgtgcgtggcccacgcggctagggggacgtacccaggcgttgacgaaggcggggaaagcgtggcgattgggaaacgggagaccccacgcgggagaaaggtgggcggggaagaaatggaggccccagctagtgggttttgtttgtttgtttattcgtttcactcacgcctgcataatggctgcttcgccgcccgggggcgacctccccgcaccacacgcttccccgaggtcgctcttctcccgcccccaggctaact

SEQ ID NO: 9672 - DNA, 987 bp, Artificial sequence
  DNA replication origin
ttcactcacgcctgcataatggctgcttcgccgcccgggggcgacctccccgcaccacacgcttccccgaggtcgctcttctcccgcccccaggctaactctatcggccaatcagagcccgcggcggctccggatccgaggggccgcgccattggctgcggcctgagaaagaggtagaattctgttaggcgattgcgtcgccctgaggaatccagctggatccggtctgaggcggcgcggggccagcgggtggggttttgagcggctggcgggaaggcaggttcctggcatatgctcgcttgggttctgttctgcaggccgaccacgtgcccattggtttatttgaccagggtcggtgtgatagctggtgtgtctggggccgggctgggggctgaggaggcggacccggctcctgctgcaccgtgtgcgtggcttggcacgaaatcctctcggcgtgggacccagtgcccgccccgctgccccctgcccccccgaagagccctacctataggacaaagtccaaatgaattagttctttgaaagcttttaactggaaaggagtgagttaaagcaatgtttgatgactattgatctggctttggaatcttgggtagcttgggaggcaagaagaggaggaagggatgctgttgggataatgacccgtggagtgatcaggacctgggctggggtgtgacgagaacagaaggaaacgtcccattgtaaggggagaaccacatggcagtgcacatcctgctgttcaattccgcagctccttagatccccttcccctggcactgtgtttgctcctttgtagtcctggcgctacgtcgcttctggactttgggcaggttacctcatctttctgggcctcagattcctcatctgtaaaaagggggttagggtgaccccaaggttctaccaagtccaaatcgattcagtgaatctatgactctcctcacgggcccaccagcaccagcgttcattcgt

SEQ ID NO: 9673 - DNA, 1362 bp, Artificial sequence
  DNA replication origin
ctttctcatctttgtgggccaatcttccttcaatctttgaaggtgctgtcctttggatattttttttcttttatcctacttgatgacattggaggcttgattgtgatataaggtgagttcagtcaactggtctcatttctggaagattttaaggggcccaggctcagcataggattcctggactgcatgccgttactctgggggactggtatcagggcctggcttttatctctggctcctcaaggttaggaacatgctgcactggaggggtcaaagtgcttccaaactgaatggctattcgcaacatccatgccaatggatggtgacaagcaaagcacttcatagggtgatggcatcaggatctgtccttgttcacatgtgccagcagcagtggcagcagaaaagtggtaagatgcatgctcatcagctgtggctgggtgctagtgggtgctgggttgctggcttccatgagggtgttcacagcagctgcagggcagcacggctgggtggggatgccattagcaactgtgcacgtgttcacagttgtggtggtgttagcataggggtggggtgctggtgggcacaagactgtgtgcaccctctgtgagcattcccacaggcagcagtggctgggtccactgttctccatgactcgttttgcaccagtggcagtgttggctcagggacaggtgctggcaggcatggggctggtgggctccatgcccaccaaagttctgatgacagtggtggtgtggccagaggattgggatagtgggaggtggatggggggaggggaggggggaggaagaaaggtatggtcacaccagcaggatgcacgtgcacatgcacactggttgggaagggaagacaaggtcgccccaggtgtacgcataccagcaaaaggatggtgcagggaggtcatgggcaagtgcatgcaggcaaagtggcacagggggaggctgcatcgggggcagcacaggtgagctggtgcatgttcatggggcccactctgctggagcactctgccggtcaggtggtccatcagcacaggagctatgatgcaggcccccaaggcaccagaggctgccttgcaagcaggcacatccaggctgggtcccagaagaggccagcagaccaaggggtgctcaggtcaaaatggccccgtctcatgggcaaaacctccctgcagagttcaggtccaacaattcccccaaagctaaaatatcttataggaataagtcgagcctagagagatgggcatcttgatatcaggtagtgatagtctccacatctgttctttctcaaagttgttttagctgttctgggtggttctttgcatttccatatgaatttttggatctg

SEQ ID NO: 9674 - DNA, 1382 bp, Artificial sequence
  DNA replication origin
cacttgatcagaggcagaggtaggatatggaaccggatcaagtccaaccgtggactttccaccctgctgcgccgtctcaagtttgtccctgattggttctgaatccctggcgcccattctcatcccgcccatccgaagataaaacaatcttcctcccgcgccccgctgcttcccgggagctcccaggaactctagagaaaacaggaaaactgaaaagtgcgctctgcctgctgtgccaggcatgtccctcagggggagccaacaaggctttatttcgtcccggcagctggcccctgggcacggcccccagcccggcgtcccagttccagccgcgctgcaggggcgcgagggtgcccggctcgcaggtgtccgcgcgcaccgcagggctgcccgagtgcggctggcggaatccctccccagctggggaggaaggcagttgttttcttcctggtggaacgttccacttgaaactgttccacaagggctgttctcgcctccgactccgggaggaactgtaattaacacagcaacaaacgcccacgacgctaactggcaaagggagtgtaacacgagccgctgctacaaccgaactgggccaattgctttcccttcttgcctcccatttggtctgttttggttccgcagtcatccaactgtagcgtttcttaaaacatgtcagtggctggtgtttgtgttttgggttgaacagtttcacacacgtcgctggagcccgtgctcgaccagctgctgtgctggggatttgctttctgcggctttgggagtgtcaggtagcaaaacgaagagagtagtcgactagaacggtggcggggaggaggaggagggattgtctgcagtggagtcgggagcctcctccggaccaggacaggtaaaaccggtctgccaggtctcagggggagcgggtggagacgtcccacctcacctggctgcgctccgactcaggctcagccggcaggttctggggcaatgggggaagggagaggggccgggcccttgtgggtcccgcacgcacacagtactcaggggccagccaggtgccatcccaggtggcccagcttggggtgggcagccagggttggggcaggggtgcgtcctgagttctttacctttgaaaggtctgatttccaatgctgcccttacacatacccttgctcctgccgagtttagtccgtggcttcactggggaacttgttacatggagattcacgggccctgccggagacccagtgaggcagaatctgccctttaacaagatcctcaggtgatctgcagacacgttaaagtttaggaagcactgactgccttatgacatattatactttcttctaacgtctttctatcaatttcccatcgtgtcaacacac

SEQ ID NO: 9675 - DNA, 930 bp, Artificial sequence
  DNA replication origin
gccgccccgtctgagaagtgaggagcccctccgcccagcagccaccctgtctgggaagtgaggagcgtctccgcccagcagccacctcgtccggaagggaggtgggggggtcagccccccgcccggccagccgccccgtccgggagggaggtgggggggtcagccccccgcctggccagccgccccatccgcgaggtgaggggcgcctctgcccggccgcgcctactgggaagtgaggagcccctctgcccggccagccgccccgtccgggagggaggtgggggggtcagccccccgcctggccagccgccccgtccgggaggtgaggggcgcctctgcccagccgcccctactgggaagtgaggagcccctctgcccggccagctgccccgtccaggagggaggtgggggggggtcagccccccgtccgggaggtgaggggcgcctctgcccggccaccaccccgtctgggaagtgtacccaacagctcattgagaacgggccatgatgacaatggcggttttgtggaatagaaaagggggaaaggtggggaaaagattgagaaatcggatggttgccgtgtctgtgtagaaagaggtagacatgggagactttttattttgttctgtactaagaaaaattcttctgccttgggatcctgttgatctgtgaccttacccccaaccctgtgctctctgaaacgtgctgtatccactcagggttgaatgaattaagggcggtgcaagatgtgctttgttaaacagatgcttgaaggcagcatgctccttaagagtcatcaccactccctaatctcaagtacccagggacacaaacactgcggaaggccggaaggccgcagggtcctctgcctaggaaaaccagagacctttgttcacttgtttatctgctgaccttccctccactattgtc

SEQ ID NO: 9676 - DNA, 1287 bp, Artificial sequence
  DNA replication origin
cacctttcccccttttctattccacaaaaccgccattgtcatcatggcccgttctcaatgagctgttgggtacacttcccagacggggtggtggccgggcagaggcgcccctcacctcccggacggggggctgacccccccccacctccctcctggacggggcagctggccgggcagaggggctcctcacttcccagtaggggcggctgggcagaggcgcccctcacctcccggacggggcggctggccaggcggggggctgacccccccacctccctcccggacggggcggctggccgggcagaggggctcctcacttcccagtaggcgcggccgggcagaggcgcccctcacctcgcggatggggcggctggccaggcggggggctgacccccccacctccctcccggacggggcggctggccgggcggggggctgacccccccacctcccttccggacgaggtggctgctgggcggagacgctcctcacttcccagacagggtggctgctgggcggaggggctcctcacttctcagacggggcggctgccgggcggaggggctcctcacttctcagacggggcggttgccaggcagagggtctcctcacttctcagacggggcggtcgggcagagacgctcctcacataccggacggggtggcagggcagaggtgctccccacatctcagacgatgggtggccgggcagagacgctcctcacttcccagatgtgatggtggccgggaagaggcgctcctcacttcctagatgggatggcggccgggcagagatgctcctcactttccagactgggcagccaggcagagaggctcctcacatcccagacgatgggcggccaggcggagatgctcctcacttcccagacgggttggcggccgggcagaggctgcaatctcggcactttgagaggccaaggcaggctgctgggaggtggaggttgtagccagccgagatcacgccactgcactccagcctgggcaccattgagcactgagtgaacgagactccgtctgcaatcccagcacctcgggaggccgaggctggcggatcactcgcggttaggagctggagaccagcccagccaacacagcgaaaccccgtctccaccaaaaaaatacgaaaaccagtcaggcgtggcggtgcgctcctgcaatcgcagctctcggcaagctgaggcaggagaatcaggcagggaggttgcagtgagccgagatggcagcagtaccgtccagcttcggctcggcatcagagggagaccgtgg

SEQ ID NO: 9677 - DNA, 1210 bp, Artificial sequence
  DNA replication origin
agaacaaaatgaaaagtctcccatgtctacctctttctatacagacacggcaaccatccgatttctcaatcttttccccacctttcccccctttctattccacaaaactgccattgtcatcatggcccgttctcaatgagctgttgggcacacctcccagatggggtggtggccgggcagaggggctcctcacttcccagtaggggcggccgggcagaggtgcccctcacctcccggacggggcggctggccgggcggggggctgacccccccacctccctcccggacagggcggctggccgggcggggggctgacccccccctcctccctcccggatggggcggctggccgggcagaggggctcctcacttcccagtaggggcggccgggcagaggcgcccctcacctcccggacggggcggctggccaggcggggggctgaccccccaacctccctcccggacggggtggctgccgggcggaggggctcctcacttctcagacggggcggctgctgggcggaggggctcctcacttctcagacagggcggttgccaggcagagggtctcctcacttctcagacggggtggccgggcagagacgctcctcacatcccggacggggcgacagggcagaggcgctccccacatctcagatgatgggtggccgggcagagacgctcctcacttcctagatgggatggcggccgggaagaggcgctcctcacttcctagatgggatggcggctgggcagagatgctcctcactttccagactgggcagccaggcagaggggctcctcacatcccagacgatgggcggccaggcagagacgctcctcacttcccagacagggtggcggccgggcagaggctgcaatctcggcactttgggaggccaaggcaggctgctgggaggtggatgttgtagggagccgagatcacgccactgcactccagcctgggcaccattgagcactgagtgaaggagactccgtctgcaatcccggcacctctggaggccgaggctggcggatcactcgcggttaggagctggagaccagcccggccaacacagcaaaaccccgtctccacccaaaaaatacgaaaaccagtcaggcgtggcggcgcgcacctgcaatcgcaggcactcggcaggctgaggcaggagaatcaggcagggaggttgcagtgagccgagatagcagt

SEQ ID NO: 9678 - DNA, 981 bp, Artificial sequence
  DNA replication origin
agatgtggggagcgcctctgccctgtcgccccgtccgggatgtgaggagcgtctctgcccggccaccccgtctgagaagtgaggagaccctctgcctggcaaccgccctgtctgagaagtgaggagcccctccgcccagcagccgccccgtctgagaagtgaggagcccctccgcccggcagccaccccgtccgggagggaggttggggggtcagccccccgcctggccagccgccccgtccgggaggtgaggggcgcctctgcccggccgcccctactgggaagtgaggagcccctctgcccggccagccgccccatccgggagggaggaggggggggtcagccccccgcccggccagccgccctgtccgggagggaggtgggggggtcagccccccgcccggccagccgccccgtccgggaggtgaggggcacctctgcccggccgcccctactgggaagtgaggagcccctctgcccggccaccaccccatctgggaggtgtgcccaacagctcattgagaacgggccatgatgacaatggcagttttgtggaatagaaaggggggaaaggtggggaaaagattgagaaatcggatggttgccgtgtctgtatagaaagaggtagacatgggagacttttcattttgttctgtactaagaaaaattcttctgccttgggatcctgttgatctgtgaccttacccccaaccctgtgctctctgaaacatgtgctgtgtccactcagggttaaatggattaagggcggtgcaagatgtgctttgttaaacagacgcttgaaggcagcatgcggcagcatgcttgttaagagtcatcaccactccctaatctcaagtacccagggacacaaacgctgcggaaggcagccgcagggtcctctgcctaggaaaaccagagacctttgttcacttgtttatctgctgaccttccctccactattgtcctgtgaccctgccaaat

SEQ ID NO: 9679 - DNA, 912 bp, Artificial sequence
  DNA replication origin
aggagaccctccgcccggcagccgccccgtctgagaagtgaggagcccctccacctggcagccgccccgtctgagaagtgaggagcccctccgcccggcgggagggaggtgggggggtcagccccccgcccggccagccgccccgtccgggagggaggtggggggggtcagcccctcgcccggccagccgccccgtccgggagggaggtggggggtcagccccctgcccggccagccgccccacccgggagggaggtgaggtgggggggtcaggccccccccacccccagccgccccttccgggagggaggtggggggatcagcccccggcccggccagccgccccgtccgggagggaggtgggggggtcagccccccgcccggccagccgccccgtccgggaggtgaggggtgcctctgcccggccgcccctactgggaagtgaggagcccctctgcccggccaccaccccgtctgggaggtgtacccaacagctcattgagaacgggccatgatgacaatggcggttttgtggaatagaaaaggggaaaggtggggaaaagattgagaaatcggatggttgctgtgtctgtgtagaaagaagtagacatgggagacttttcattttgttctgtactaagaaaaattcttctgccttgggatcctgttgatctatgaccttacccccaaccctgtgctctctgaaacatgtgctgtgtccactcagggttaaatggattaagggcggtgcaagatgtgctttgttaaacagatgcttgaaggcagcatgctccttaaaagtcatcaccactccctaatctcaagtacccagggacacaaacactgcggaaggccgcagggtcctctgcctaggaaaaccagagacctttgttcacttgtttatctgctgac

SEQ ID NO: 9680 - DNA, 1094 bp, Artificial sequence
  DNA replication origin
ccccccacctccctcccggacggggcggctggccgggccgggggctgatccccccacctccctcccggaaggggcggctgggggtggggggggcctgacccccccacctcacctccctcccgggtggggcggctggccgggcagggggctgaccccccacctccctcccggacggggcggctggccgggcgaggggctgaccccccccacctccctcccggacggggcggctggccgggcggggggctgacccccccacctccctcccgccgggcggaggggctcctcacttctcagacggggcggctgccaggtggaggggctcctcacttctcagacggggcggctgccgggcggagggtctcctcacttctcagacggggcggccgggcagagacgctcctcacctcccagacggggtcgcggccgggcagaggcgctcctcacatcccagacggggcggcggggcagagacgctccccacatctcagacgatgggccgccgggcagagacgctcctcacttcctagatgggctggcggccgggaagaggcgcttctcacttcctggatgggatggcggcctggcagagacgctcctcactttccagactgggcagccaggcagaggggctcctcacatcccagacgatgggcggccaggcagagacgctcctcacttcccagacggggtggcggccgggcagaggctgcaatcttggcactttgggaggccaaggcaggcagctgggaggtggaggttgtagcgagccgagatcacgccactgcactccagcctgggcaccactgagcactgagtgaacgagactccgtctgcaatcccggcacctcgggaggccgaggctggcggatcactcgctgttaggagctggagaccagcctgggcaacacagcgaaaccccgtctccaccaaaaaaatacgaaaaccagtcaggcgtggcggcgcgcctgcaattgcaggcactgggtagactgaggcaggagaatcaggcagggaggttgcagtgagccgagatggcagcagtacagtccagcttcggctcggcatcagagggagatcgtggaaagagaggg

SEQ ID NO: 9681 - DNA, 866 bp, Artificial sequence
  DNA replication origin
ttcccggccgccatcccgtctaggaagtgaggagcgtctctgcccggccgcccatcgtctgagatgtggggagcgcctctgccccgccgccccgtctgggatgtgaggagcgcctctgcccggccgcgaccccgtctgtgaggtgaggagcatctctgcccagctgccccgtctgagaagtgaggagcccctccacccggcagccgccccgtctgagaagtgaggagcccctctgcccggccagccgccccgtccgggagggaggtggggggtcagcccccgcccggccagccgccccgtccgggagggaggtggggggcacctcctccaggccaccgccccgtctgggaggtggggggcgcctctgcctggccgccccttctgggaagtgaggagcccctctgcccggccaccaccctgtctgggaggtgtacccaacagctcattgagaacgggctatgatgacgatggcggttttgtggaatagaaaagggggaaaggtgggggaaagatagagaaatcagatggttgccgtgtctgtgtagaaagaagtagacatgggagacttcattttgttctgtactaagaaaaattcttctgctttgggatgctattgatctatgaccttacccccaaccctgtgctctctgaaacatgtgctgtgtccactcagggttaaatggattaagggcggtgcaagatgtgctttgttaaacagatgcttgaaggcagcatgctcgttaagagtcatcaccactccctaatctcaagtacccagggacacaaacactgcggaaggccgcagggtcctctgcctaggaaaaccagagacctttgttcacttgtttatctgctgatcttccctc

SEQ ID NO: 9682 - DNA, 1030 bp, Artificial sequence
  DNA replication origin
cttctttctacacagacacggcaaccatctgatttctctatctttcccccacctttcccccttttctattccacaaaaccgccatcgtcatcatagcccgttctcaatgagctgttgggtacacctcccagacagggtggtggccgggcagaggggctcctcacttcccagaaggggcggccaggcagaggcgccccccacctcccagacggggcggtggcctggaggaggtgccccccacctccctcccggacggggcggctggccgggcgggggctgaccccccacctccctcccggacggggcggctggccgggcagaggggctcctcacttctcagacggggcggctgccgggtggaggggctcctcacttctcagacggggcagctgggcagagatgctcctcacctcacagacggggtcgcggccgggcagaggcgctcctcacatcccagacggggcggcggggcagaggcgctccccacatctcagacgatgggcggccgggcagagacgctcctcacttcctagacgggatggcggccgggaagaggcgctcctcacttcccagactgggcagctgggcagaggggctcctcacatcccagacgatgggcggccaggcagagacgctccttacttcccagacggggtggcagccgggcagaggctgtaatctcggcactttgggaggccaaggcaggcggctgggaggtggcggttgtagctagccgagatcacgccactgcactccagcctgggcaacattgagcactgagtgaacgagactctgtctgcaatcccggcacctcgggaggctgaggctggcagatcacttgcggttaggagctggagaccagcctggccaacacagcgaaaccctgtctccaccaaaaaaatatgaaaaccagtcaggcgtggcggcgcgcgcctgcaatcgcaggcactcggcaggctgaggcaggagaatcaggcagggaggttgcattgagccgagatggcagcagtacagtccagcttcggcttgg

SEQ ID NO: 9683 - DNA, 961 bp, Artificial sequence
  DNA replication origin
taattaattaaaaaaagagaaaaagaaaatacctattatcgagggcaaacaacttcagggcaaagaaatagctcattgtactccctccaagttctcagtatagataaatttgggctgaaggccagattgcatgtggaaggaaaggaaagggaagagggaagggaagggaagagggaagagacgggaagagggaagggaagggaagagggaaggaaagggaagacggaaggaaagggaagacggaagggaagggaagagggaagggaaggggaggggaggggaaggaaagggagggaaggggagggaagagaagggaagagggaagggaagagaagggaagagggaagggaaaggaagggaagggaaggaaagggaagggaagggagaagggaagggaaaagggagggaaaagggagggaggaagggaggaagggaaaagggagggaggagggagggaggacggaggaggatggagggaggacggaggcagggagtgaggggggaagggagggaaggagggagggagtgaaggaaggggagtgaaagaaaagaaagaaaataatttatagtgactagcagttaacagggatctggtctgatttttgccccattagatatctgcctctgagcaaggaaaacagttcatgatttgcaataaaagaaacattccaataatccaagacatgcccagcctttgaggacttagatcctaaactaccttgtcttccccaatcctgtacactacaccacactctcagtctcctcctctgcttaactaagctccatctccactgacatctctgcctagtctcttaatccaatgcatagcctgcttatctcccagtcagttcctagtttaccagcttcctctcctcattcccagactcaggaattctacagatggctgctactcaattccatccttagaaccatacttcttgtactttgtctaaacagcaac

SEQ ID NO: 9684 - DNA, 1312 bp, Artificial sequence
  DNA replication origin
cccgtccgggaaggatgtgggggggtcagccccccgcccggccagccgcccaatcctggaggtgaggggcgcctctgcccggccgcccctactgggaagagaggagcccctctgcacggccagccgccccgtccaggagggaggtggggggccagccccccgcccggccagccgccccatccggaaagtgaggggcgcctctgcctggccgcccctactgggaagtgaggagcccctctgcccggccagccgccccgtccaggagggaggtgggggggtcagccccccgcccagccagcccccccatccgggagggaggccgggaggtcagccccccgcccagccagccgccccgtccgggagggaggcggggggggtcagccccccgcccggccagccgccccgtccgggaggtgaggggcgcctctgcccggccgcccctactgggaagtgaggagcccctctgcccggccaccaccccgtctgggaggtgtactcaacagctcattgagaacgggccatgatgacaacggcagttttgtggaatagaaaggggggaaaggtggggaaaagattgagaaatcgaatggttgccatgtctgtgtagaaagaggtagacatgggagacttttcattttgttctgtactaagaaaaattcttctgccttgggatcctgttgatctgtgaccttacccccaaccctgtgctctctgaaacatgtgcggtgtccactcagggttgaatggattaagggtggtgcaagatgtgctttgttaaacagatgcttgaaggcagcatgctcgttaagagtcatcaccactccctaatctcaagtacccagggacacaaacactgcggaaggccggaaggccgcagggtcctctgcctaggaaaaccagagacctttgttcacttatctgctgaccttccctccactattgtcctgtgaccctgccaaatccccctctgggagaaacacccaagaatgatcaattaaaaaaaaaaaaaaagagaattaagcctcaaagccattaattaacttgcaggatctaagttttctgatttttctaggatgtcattttacttttttttttcttttgagacacacagtctcactctgtcagccaggctggagcacaatggtgttatcttggctcacagcaacctctgcctcccggttcaagcaatttttgcgccttagcctcccaagtagctgggattacaggcatgtgccaccacacccagctaatttttatattttaatagagacggggtttcaccatgttgaccaggctggtctcgaacacctgg

SEQ ID NO: 9685 - DNA, 1253 bp, Artificial sequence
  DNA replication origin
gatggggcggctggccgggcggggggctggccccccacctccctcctggacggggcggctggccgtgcagaggggctcctctcttcccagtaggggcggccgggcagaggcgcccctcacctccaggattgggcggctggccgggcggggggctgacccccccacatccttcccggacggggcggctggccgggcagaggggctcctcacttcccagtaggggcggccgggcagaggcgcccctcacctcccggatggggcggctggccgggcggggggctgacccccccccacctccctcccggacgggcggctggccgggcggggggatgaccccccccacctccccccggatggggcggctggccgggcggggggctgacccccccccacctccctcccggacggggcggctggccgggcggggggctgacccccacctccctcccagacggggtggctgccgggcggagatgctcctcacgtcccagacggagtggctgccgggcggaggggctcctcacttctcagacggtgtggctgccgggcggaggggctcctcacttctcagatggggcggttgccaggcagagggtctcctcacttctcagacggggcggccgggcagagacgctcctcacatcccagacggggcggcagggcagaggcgctccccacatctcagacgatgggcggcctggcagagacgctcctcacttcctagatgggatggcggccgggcagagacgctcctcactttccagactgggcagccaggcagagaagctcctcacatcccagacgatgggcggccaggcagagacgctcctcacttcccagacggggtggcggctgggcagaggctgcaatctcggcactttgcggggccaaggcaggcagctgggaggtggaggttgtagcgagccgagatcacgccactgcactccagcctgggcaccattgagcactgagtgaacgcgactccgtctgccatcccggcacctcgggaggccgaggctggcagatcactcgtggttaggagctggagaccagcccggccaacacagcgaaaccccgtctccaccaaaaaaaatacgaaaaccagtcaggtgtggcggcttgcgcctgcaatcgcaggcactgggcaggctgaggcaggagaatcaggcagggaggttgcagtgagccgagatggcagcagtacagtccagctttgggtcggcatcagggggagaccgtggaaagagagggag

SEQ ID NO: 9686 - DNA, 1073 bp, Artificial sequence
  DNA replication origin
agcacctccaaagcgtccgagactgggtacagtcgtccaggcgtgacgggggcgcggggagccagtgactcctctgggaggggaagggattagggccagaatctctcaaaggtgcaaaaatccagtcaagagagggttttcgggtataccacggaggattaaaactttcaagacaaatgcagtctttgcctaacagcaatggtaaagcatttactgagctcttactacatgttccgctagagcttgtcatgcgtgatttaatgttcataactttaagaggtgggaggagtattttaaatcgaatcagtgctttgggaagttaagtaacttaaaccagatatcccatacaggccaaaagtctccaagtccctgctaacttcttgctctcgcaacagaatacctatttaggtgggaagaatgaggtgtgggcggcaggctgggtgagtggtgcccccgagcctgccctcgactagccagaagcccggttgggacccgaggcaggggaatgcgcttgattttatttccaaagagaaacaccgtccttgcttgggccgagggctcgttcaggggcctataggagctaccgggacaagaaggggaggtctctggttggggtggaggacgaagggtgggaactacccgattgccccccaggaatgggggatgttgcgcaccagtagaggggactggacaggaatcgtggtggtgggggtggggggttaactggaggggacagcagccctgcttgaaactctgacccctaagaccgtgtggtggagaagggcagctgcaacctgaaccaggagtgcgagctgctcctggggcgcgctgaggagggagaagcgaactggggacttgcaaggagggcaggagtgcccgaggagccgctggcctgcagcggtgccggaggagggcggtgacgaggttggagaggggcgcagggacccgcagggagcccaggcttaacgtgcattctgcggttctctcccccacctcccgcctgcccgcgcaggtgccgccgccggacgggactttaagatgaagttatgggatgtcgtggctgtctgcctggt

SEQ ID NO: 9687 - DNA, 1904 bp, Artificial sequence
  DNA replication origin
ggcagcagggggcaccagaaaccgtctgagccgtgtcgcgcccacgcggcccggaggctgtgttatcattttagttataaaaccggagaaccaccactccctctacgagcctcccgaaatcccattagcccgggaacctgtggaggtccttactggcatctctgcttttcaggctcccacccctccattctcgctggttttcctctccccacttcacctgagcgggtttcttggcaacctgctttcagaccatccctcaccccttccacgcgtcaccgtgacagattcgcaggaggcagcgctcccgccgtcagtgcccccgcaccttcttgtgcctggcaggctgggaggtttgtttgggctttgccttcaagatccaggtctcagagagagaaaaaggaggcggtggggcggggagacgggtttgctataaactcggtttttttttttttttttttggcggggggaggtagagacagaaattgctggaagatctattgcttttcttaactatgcttcgtgtccttgactgacagaggacttattctcccctcaaccccccataactgcggggcccaagatgagggaaggaaaaagaatttgggacacttctcgcaggcaaactgggaaagcggtctgtttaaagggccaggttccaggcccgagagcacccgaattgctagcgggaaagggctagggacacggcggacttcccagagatcggacacttgttacttgttgaaaaggcgccaccttccctgacaaagcgaaggcgcagcgaaacagtacgagtttggtcgaggccggctttgacggctttgcgggactgggtgcgtgaatgaggttggaagaaacatctcttccttgaaatacctaagcatatattccaaacactgagcaagagtcgagcgcgttctaacatctccgcagcaggggccggaagagttgcctttgtccccgcctatgagcagaagggtcgcgagctctgggatgggtaagccccccgggggcgcgcacatgggtcctggcggcggattctaccaaagccgaaactagctgggccccaggaagctggcgggaacccgcgaaagtccgtttccagcccgaagagggttcgtttttcttcgttggggcaggaaacaaaccaccagtgcggaattagcctcgaggtggtgtaaagtagtggcagtggtggtggggtgtttttggaaggcggcacagagtacaggagaaaaaggggtcattaaaataataacctcaatggcctagtggagtctcaagaatacgttcgagacagagatttgaatccaggactggcaagaaagcccctctcctaacctcgacggggatggttagttggggtggagggcgttaggaacgtgcaggcaaccgggtgaggaatgtagctttgccagacctcgcccggaggaggtgagccctccatttttaggttctcagcacctttgcagcagcccctcccccggcctgcgcttttccttggcacagatcaaaacaagctcaatagtaagttgcactcttggcaatgatagtatctctgcacgtccagagaggacacatttcgacggcggtgggttcgaagatgacccaagccctgaatcgttctgtgacttgacggaagagcacctggccgagtcggggaaggaaactgcccctcttgggcattccgggtccaggcgcatctggggctccacagatctttgcccacgtggaaaaggcaacatgcccctccgaaaggccggcctctctccggttctacttttctctctcctcgcatagcttaggttccctctagtctttccactttctactctcaccgtttgctctggggtccagacgcacccctctgactagggcgcccttcagccggccgcacccacccgcga

SEQ ID NO: 9688 - DNA, 1033 bp, Artificial sequence
  DNA replication origin
tcaaccggcgcggggagtcccgtgaagacatgagggcgccaggagcgcaggctggtcttctagagcccgggctgggggtccggggtccggggtgggggaggggaggcgcggggccccgggagggaggggtcgggaggcgtcggctgggcctggcggtgggggaggagaggagagcagcgaggaggccctggagttcccgaggcggggggccggggtgcgagtgggcgacgcgaggcgcccctccctgggctgcagggagagcgctgagagcgcggagacgccgcggggctagcgccttctcctctccgggtggatcaaaaatcgagaggaatgtgcggcgctctgcgcgggccagccgaaaggggcaatccgaacttgaccgcggcgcccgcgccgggctttgcccccgcgcgccgcactgggagggtggcgctctgccggtgcagggcagcgccgggctttcctcgcgcctgtcgaaggccggccttcccgctcgggtgtctcgccctctcgcttctccgcagggcaggaggcagtggcgagaaaaggagctgccggccggagttctagcaccgagaaggagaggtgcggagcggccgggtgagggaagccgagtatttgccaggggacgctgcgagtggggatgaatttatagggctctcactccgtgacgtgccctccagtggcttttctgattcgctttctgacctaaacacacattagtttagtccccatgctaaggccaacacggtctccaaatatctgctggctgaagtcagaggctttgcatatcatgtattacatggcaggcaatgaagaaggcttctgaggctggccggctcctcagtcctaggctccattttcatgctgttgtaatctaataccagacatggggcaggcacatacattcaaaatcccaattccagaggcgtaagatcactttatcaggaacgggttaggggaggttgagctaaacctgcttttatccagattttcgaaaatgcagatgggaaacttcagcaagcgcccactt

SEQ ID NO: 9689 - DNA, 1781 bp, Artificial sequence
  DNA replication origin
ctccgcggtcctcaccctgaaatcttggggcgccccccctccaccccacctgggccctcctcctgccgcgcccctctaggcgactttttctaacacctcaaaggttgctgtagttggtccagcgcacttgggggatgcgaggggtagacgggggtctgtgatttgcaagtggggtgggggtgagaggaagagaggcgggaccgtccgggtctgaggcgctaagaagataaatgggatttaaggctcgcagatggagagctgaggccaggccgctcagactgggacgccgggtggagattagggcctggagcgggggagtgggggcccttcccggcagaggaaggcaacttgagaccctcctggggaggagatgaaactccaagttaagcctggcgtcttagggagggacgcgagctcgagcccccaggcggaccgagaaaagcccctgggcggcgcccagctgggcctggggcagggggccggggcggggtcctggcctctgatcccgggatcgggcttcctgggttgtctcctgaatggagaaagactctttctccgccgctgaatttgctgccctaggactcagtaaaatgtaccttttgccagatttcgcggtagtgcctggagaggggagaccctgcctgggacacaagtcccgttgcatactggcgttctgacctccaaaccagcgagaagagaaagcagatacaataaataaaccaagagggaataaacttagaggcaaacgcggccctcggcagttcctggggaaagatcaaaggccgtaggaagtgccccgcagaggaaatctgcagtcactagcgacaggaccgcgcccgccccctccccaccttgcaacgctgccaggactcggtgggcgtcctggctcttcacagttagcctatgtttgggagcgcgggaggaaacaatgttgactgatatattcttctcccctccccagccccccaaacacacacacacaggatttctactcctcttttaagaatgaaatatcccctggctggagagtttgtaatgagctcaatcttgttagttagcaaagctgagtgtgttcccttatgtgttggcattttcaagtgtgcaattgtctgttcacaaataaattcaaagtcccctccaacttgagtatttggaagttttagctgtgacaccagagcttgtcctcttacatagaactggagcaaagttcagacagaactatgctcttcacgtccaaggtgaccataaagccggccactaagctaagcaaagtgactgcccccaaggctgctagtctcaaaggtctcaaaatcatagactttttagcattttaaaggtcatctaggccatgcctccactccacgcaggagtctgctttcagcattggtgtcgggtcgtgccacctccctttgaactccacctgtgtgagagagctcctccagcgccagctgagaagttgttagaggcctttctttatgcgaaagtgatttcttatctcggacttaatgtggcacccagaaccaagcgagtgttgcaatgcagatgcctcccatgcaggctttcctacttaaaaatgattctctgtgatgctgaaactggaagtaataataatcgttgatattatggctaccatttatttaaggtctcctatgtaccagaccttctttgaagtgcattttaatcccaataacaaccataccaggaagatactgtcattactattctcgccttttacaggtgaggaacctgaagcatgggaaggttaagaaacttgcccaagg

SEQ ID NO: 9690 - DNA, 1061 bp, Artificial sequence
  DNA replication origin
ccggctggagcgactcggccgtggcggtggccgttaccgttgcctctgggaggctctggcggcggcggcggcccgcggggttcgcggagcgcagcgggccgcccttcgcccgtggccgcctcaagcagcctcgcgccgacacaggggaggcgagacggcggctgcggaggcggcggcgcattgtgcccggccccctccttggcggctcctgcccccgggcggctgtgggatctgggcagccccggggcggcggccgaggctacagagccggcggcaggggatggcaagatagcggcgcgggagcgtaccgtgagtcctgggggcgggtgggcgcggcgcggagcaggggagccgcggagccccgagcggggtccccaggggcggcccgggcggggtggggcagcgctcccagctctgcggagcgtcctaggggagtgaccccggagagcgccgctccgggtcccgccgctctccgcgcgcccttgggtcaccctcgtgtcctgggggacgcggactccagcgcccagaacttctgccccacgcagggcagtgagttctgaggccagaggttacctgggggatgggagggagcttgaaatgtttttccttcggagaggtgacctgccaggtgatttcgtgcccctctgcttcaactcccctttaaacctgttcctcgtcctttctgtatccgtagtgcatttgacttacctgtatttttatgtgctaacttccgaaggtggtgtactggttaaacccaaagttaaagtgttggaggtcaaagttaggctttgtgaaagatgccatttctgttatgttgtgtaaaagcacaaagctggattcaggagttctgagcgacacaaaactgcacatcacgtgttctgaatttacatgattaatctgaattaatgtgatttttgccccccaccccccacattccgctaccaaaaatatatgaggtcttttatttgcagttgggtatctttgtgttcctttttgaatgtttaatgcagtcaaatattgttataacctgtattgttattgagtggcatttatatggaaat

SEQ ID NO: 9691 - DNA, 1169 bp, Artificial sequence
  DNA replication origin
atcccacagccgcccgggggcaggagccgccaaggagggggccgggcacaatgcgccgccgcctccgcagccgccgtctcgcctcccctgtgtcggcgcgaggctgcttgaggcggccacgggcgaagggcggcccgctgcgctccgcgaaccccgcgggccgccgccgccgccagagcctcccagaggcaacggtaacggccaccgccacggccgagtcgctccagccgggactgcggcgcgcgggggcggcgcctgcacgccgctcggctgggggcgcagcgggcccggccccgcccctgacccgcccctgcccccggccccggccccgccccaacccgcgcgcccccgccgatccccggccgcgcgcccgcgcgcgcgggtgctccaaggagtcggaggaacgcggccgcgcgacgggccccggacgccgagggtggtgcttcctccgagcctccggtggtgaggccgctctcagaaggtcatggaagcgcaggggagagcgaggcggccgagcccaggcaaatcctcgagaaaggccgagtgcgcgacggctctgcggggaggaccgcgcctccccgaatgcggccgctgctgccgctgcaaacagtgccttgaggagaggaaagcggggaaccgtgttttcgccgcctctgtaaccactgcacacaagaaaaccagcttctgggagagggggatgattgttgggactttgcgaattacctaaacagcccagggccgaggcgccgccgctcgcgtcctggtcctcctgccgggtgtggggctcccctgcccgagatggccagcgggcgcgccgagagtatcctggagccatctagtcttgcctcggaggcggggtgggcttatttgtgcggagaagaaacggatctcttaatggggtgagatttttcctccgtacattgttcccatttccgcagtttcacttggcctcggttttctagcagagtaatcaccaaatgaaattagctggagagcgtttgatggcgcagaatcacggtctgaagatgtttacgctgtatgccggacgcgtttgatggtgttctcttcggcacaattaattttgcaaagttcagaaatgtgccagacagagcccctggcacgcagtcaggactctacagacacaccttgagtaggaaacaggcttgttt

SEQ ID NO: 9692 - DNA, 1199 bp, Artificial sequence
  DNA replication origin
cgcctctgcccggccgcccctactgggaagtgaggagcccctctgcccggtgaggagcccctctgcccggccagccgccccgtccgggagggaggtggggggtcagccccccacccggccagccgccccgtccgggaggtgaggggcgcctctgcccggccgcccctactgggaagtgaggagcccctctgcccggccagccgccccgtccgggagggaggtgagggggtcagtcccccgcccggccagccaccccgtccgggtgggaggtgggggggtcagccccccgcccggccagccgccccgtccgggagggaggtgggggggtcagccccccgcccggccagccgccccgtctgtgaggtgaggggcgcctctgcccagccgcccctactgggaggtgaggagcccctctgcccggccagccgccccgtccaggagggaggtgggggggtcagtcccctgcccggccagcccccctgtccgcgaggtgaggggcgcctctcccggccgcccctactgggaagtgaggagcccctctgcccggccaccaccccgtctgggaggtgaacccaacagctcattgagagcgggccgggatgacaatggcggttttgtggaatagagaggggggaaaggtggggaaaagattgagaaatcggatggttgcggtgtctgtgtagaaagaggtagacatgggagacttttcattttgttctgtactaagaaaaattctgccttgggatcctgttgatcggtgaccttacccccaaccctgtgctctctgaaacatgtgctgtgtccactcaggtttaaatggattaagggcggtgcaagatgtgctttgttaaacagatgcttgaaggcagcatgctcgttaagaatcatcaccactccctaatctcaagtacccagggacacaaacactgcggaaggcccgcagggtcctctgcctaggaaaaccagagacctttgttcacttgtttatctgctgaccttccctccaatattgtcctatgaccctgccaaatccccctctgtgagaaacacccaagaatgatcaataaaaatttcaaaaaaataaaaataaaaataaaaaccaaaatcatatcaagtgtttcctcaaaccacaacagaataaaactagaattcaataacaggagaaactttggaaattttctttggaaaaatagctcctg

SEQ ID NO: 9693 - DNA, 1210 bp, Artificial sequence
  DNA replication origin
gggggactgaccccctcacctccctcccggacggggcggctggccgggcagaggggctcctcacttcccagtaggggcggccgggcagaggcgcccctcacctcccggacggggcggctggccgggtggggggctgaccccccacctccctcccggacggggcggctggccgggcagaggggctcctcaccgggcagaggggctcctcacttcccagtaggggcggccgggcagaggcgcccctcacctcccggacggggcggctggctgggcggggggctgaccccctacctccctcccggacggggcggctggctgggcggggggctgacccccccacctccctcccggacggggtggctggccgggcagaggggctcctcacttcccagtaggggcggccgggcagaggcgcccctcacctcccggatggggcggctggccgggcgggggctgacccccccacctccctcccggacgggtggctgctgggctgagacgctcctcacttcccagacggggtggctgccgggcggaggggctcctcacttctcagacggggcagttgccgggcagagggtctcctcacttctcagacggggcggccgggcagagatgctcctcacctcccagaccgggtcgcggccaggcagaggcgctcctcacatcccagacggggcggcagggcagaggcgctccccacatctcagacgatgggctgccgggcagagacgctcctcacttcctagatgggatggcggccgggaagaggcgctcctcacttcccagacggggtggcggccgggcagaggctgcaatctcggcactttgggaggccaaggcaggcggctgggaggtggaggttgtagcgagccgagatcacaccactgcactccagcctgggcaccattgagcactgagtgaaccagactccgtctgcaatcccagcacctcgggaggccgaggctggcggatcagtcgcggttaggagctggagaccagcccggccaacacagcgaaaccctgtctccaccaaaaaagtacaaaaaccagtcaggcgtggcggcgtgcgcctgcaatctcaggcactcggcaggctgaggcaggagaatcaggcagggaggttgcagtgggccgagatggcagcagtacagtccagcttcggctcggcatcagagggagaccatgtaaagagggagagggagaccgt

SEQ ID NO: 9694 - DNA, 1840 bp, Artificial sequence
  DNA replication origin
ggcaggagaatcaggcagggaggttgcagtgggccgagatggcagcagtacagtccagcttcggctcggcatcagagggagaccatgtaaagagggagagggagaccgtggggagagggagagggagagggggagggggagggggagggggagggggagagatgattttggtttttaaaaattagttgagatggccaggtgtggtggctcatgcctgtaatcccagcactttgggaggctgaggcgggcagttcatgaggtcaagagatcgagaccatgctgccaacatggtaaaatcccatctctacaaaaatacaaaaattagctgggcatggtggcatgtgcctgtagtcccagctgctcaggaggctgaggcaggagaatcgcatgaaccagggaggcagaggttgcagtgagctgagatcgcgccactgcactccagcctggtgacagagcaagactttgtttcaaagaaaaaaaaattagttgagacttgttttgtggtctaaaatatggtctattttggagactattccatgtgctgatgagaagaatgtatattttgcaggtgttggataaaatgttctgtaaatgtctgttaggtccatttggtctaaagtgcagtttaaaatcagtgtttctttgttaattttctgtctagatgatctctccaatgctgagaaagggatactgaaatccctaaatattattgtattagagtctatctttccttttagatttagtaatatttgctttattatatatctggatactctggtgttgggttcacatatatttggtattttttagatcttcttgctgaattgagccctttattacatataacaactttctttttctctttttctggttcttaacatctgttttatctaaatacagctactctcacttgcttttgatttcaatttgcatagaatatcttttcctatcccttcactttcagtctatatgtatctttatgggtaaagtttgtttgttgtaagcagcatgtagttgggtcatttttaaaaatcctttcagcctacaccattcaagtggggaatttaatccatttacattacattcaaggttattattgataggtgaagatttattcctgtcattttgttaacattttgtcatcctgttttttggttgttttttatattcttttttcttttctttctctcttattgttcatcattgcagtttggtggttttctgcagtggatatatctgagtcatagctctttctcatttgtgtgtctgttctaccaattagttttatattttcacgtgttttcatgatggtagatatcatcctttcacttccagatatacgattcccttaagcatttcttgtagggctggtgtagaggggataaattcctttagtttttgcttatcttggaaagactatttctctttcatttttgaaggatggctttgctgaatatagtattcttgcctgaagtttttttttttttcttttagtacttagaatatatcagccccttatctcctggcctttaagttttctactaagaaattcattgttagtctgatgggggtttccttatatatgacttgatgcttttctctttctttttaaaaaattatctccctgtctttgacttttgactgtctgccttttttggggttgaatatcttttgggatctctgagctttctgtatctgatgtctatatctcgtgcaagaattgggaagttttcagctattattttgtaaaatagattttcaatgtcattgcccatgtcttttccttatagaacaccaaaaatttgagtatttggtcaccttgtggtgtcccatatgtcat

SEQ ID NO: 9695 - DNA, 1088 bp, Artificial sequence
  DNA replication origin
ctcactccccaccgcccggcgcccgccacccctggcacttgccttcccctggccctgggttggggagcgagccggggcgctggccggagccagggcagccgcagctggcctgcgagccaatcctaattggggctgtgtgtctgtttcgcgcagggcggaatgacagcggcgaggagaacgtcccgctggatctgacccgaggtaacgcggggcgccgcgggcgccgcgagggcgcgctgctggggaggagccgggtccggggctgggggccagaggcaggggcgggccccgcacgggaccggcggggtgcgggggccagagccggagccccgcctgccggcccgcgggaaccgagcccggggccgcctcgccggacccatccccctacccagcgcccgcttccctcgcccgagcccttctccgggcctcgggctgctgcgggtgcgggggagccccgagtggaactcggcagacccggcgaccctctgggctcgagctccggcagagtggtttgcacctatcccggagtccggcagcccaagctaggggcagctggagggaggtagaggctgttatttaggttgcaggaggatgtttgagggaagagcgaccacatcctgccctccccgtccccggagcagaagccggacctgctcggtgcttgccgactgcgtgactgctttcccctttgcccaccgtcctgtggggacccgcagcattgataacttggtagtgaaacctagaactggtcattactgctaaatgtctggtttatgctgtttcccttctgcttccctttcccgggccgctgggactgtagttggctaaagaccgccccctcaccctgctgcaggttcattgtttaccttctgcagtggagatgggtttgtttacaccttccgaactggggaaactcgggtgatatttttaatgacctaatcccgttactagccagtgtttcctctatcacttacagtactagagtttattcgacattatctcgttgaagatttagtagttacgtacaagattcttttctcttccacggtaaacaggattgagcctactgattccgacgaagtcatatt

SEQ ID NO: 9696 - DNA, 837 bp, Artificial sequence
  DNA replication origin
ccgccgggaggggcagttcccacgaggaaagtcccattgatgcgagttggcagtgtagaggatgctcccctccggccgccgcggaagccgtcgtccaaatgcaggcgagcggggaggaggaggccgggatgcggccggcgggccacctgctctcgccggcctgccagtctcctgcttgctctgaagccctgccatagacggccccgctcccccgtgtatccactgaaacatttttttataaaaacgctgcgcacagttttagactcctttcctggaatcgctttgctccaactaagttaacacgtaacaaagtttgttttccagcctcgcccttgatcttcagaatgcccctctcggctaggagggcttctccaagtggaagtggttaggcagttttgtttttggccgccaggcgtaggacgcgagaagggggtgcagcggccggggaccagggcggcggtccccgcggtgggatcgcgccagcgccgggaggccggggagagggtgttctctgccgggagccgaggcgaggctgctgggtactgtgtccggcttttatggctctgcagctcctaggatcgtggctcatgcaggtgttgtggattaatctattttatgcataagcctattaacattagggattttaattctagaaactgcttagttaatacgtatgtgtacacacacacacacacacacacacacacacacacacacacacacacacacacacacacacacacacacctggccactgacccagcagctttctcttgaactacatttactttaaagagaggagcgatttgtcctctccagttcctcagctcatctttc

SEQ ID NO: 9697 - DNA, 1297 bp, Artificial sequence
  DNA replication origin
gcaaccatctgatttctcaatcttttccccacctttcccctttttctattccacaaaactgccattgccatcatggcccgttctcaatgagctgctgggcacacctcccagatggggtggcggccgggcagaggggctcctcacttcccagtaggggcggccgggcagaggcgcccctcacctcccggacggggtggctggccaggcggggggctgaccgccccacctccctcccggactgggcggctggccgggcagaggggctcctcacttcccagtaggggtggccaggcagaggcgcccctcacctcccagacggggcagctggccgggcggggggctgacccccccacctccctcccggacggggcggctggcctggcgggggctgacccccacctccctcccggacggggtggctgcctggcagagacgctcctcacttcccagatggggtgtcagccaggcggaggggctcctcacttctcagacggggcggctgccgggcggaggggctcctcacttctcagacggggcggttgccaggcagagggtctcctcacttctcagatggggcggccgggcagagacgctcctctcctcccagacggggttgcggccgggcagaggcgcttctcacatcccagacggggcggcagggctgaggcgctccccacatctcagatgatgggccgccgggcagagacgctcctcacttcctagatgggatggcggccgggaagaggcgctcctcacttcctaggtgggatggcggccgggcagagaggctcctcactttccagactgggcagccaggcagaggggctcctcacatctcagacgatgggcggccaggcagagacgctcctcacttcccagacggggtggcggccgggcagaggctgcaatctcggcactttggggggccaaggcaggcggctgggaggtggaggctgcagcgagccgagatcacgccactgcactccagcctgggcaccattgagcactgagttaacgagactctgtctgcaatcccggcaactcaggaggccaaggctggcggatcactcgcggttaggagctggagaccagcccggccaacacagcgaaaccccgtctccaccaaaaaaatacgaaaaccagtcaggcgtggcggtgcgcgcctgcaatcgcaggcactcggcaggctgaggcaggagaatcaggcagggaggctgcagtgagccaagatggcggcagtacagtccagctgccgctcggcatgagagggagaccgtggaaagagagggagagggga

SEQ ID NO: 9698 - DNA, 865 bp, Artificial sequence
  DNA replication origin
gtctgggctggggcggggctgggcgcgcggggtggggcggctcccgtggttttcacgccctcggaggtgcggagtgggaactcggaggggaccctgggaagccccggtgctttccccggcgaccgcttagccgctcctgaactcggcttccagtggggccaccactgaaaccggcgaccgtttccgcctcgctgcctgccgctcggagtgtactatttcttgaacctcctgtccgcgggccgcaacatctagatcgtggaagagagggcagttgttttaggattctacctagggttggccgagaaaggagaagaaatacggtgtctgcgctagcgcgtgcgccccggggttagacttgggtgcgcccagcggacgtggtaggtgggtgggtgggtgggtaccagattgggcggggaaataacgaagaatccatcctctcaccataaaaggagttggagtcagttggcagtgcccagactgcgggctgcgcttggtcgggcaccccaggcaaaaaagaaaaaaaaaaaagagaaagaaagaggaggagacagtgattgcagcctctcccggcgcaggtggcagagccttgcggctttggagagaggtggagccttggtgaggttgggaggactgcctaactgcgatctttttctccattcttcctcctgggaacttctccgccctgaaagggtagcgtgagcttcatgccttcggccggccgtgttatactcgttagacccaattcaccatgaatcctttgaaagactagtggagagtgagaagggggtttcaaagtcactggagtaaaggaattctccaagcaccacctcatgattaattcttggaaaagcctgtttgcgcggcc

SEQ ID NO: 9699 - DNA, 852 bp, Artificial sequence
  DNA replication origin
cgccccctccgccccctcccgcagcgccatgcgcagactcagttcctggagaaagatggcgacagccgagaagcagaaacacgacgggcgggtgaagatcggccactacattctgggtgacacgctgggggtcggcaccttcggcaaagtgaagggtgagaaccccgcgggactaggcttggccccagctgaggagccgcacgacttccgctttccgcacctcttcatcctcccccgcccgctgcgtcccttctttccagggctgggcagcccctgtcccggatcctgcgggagctctccccagccgccgcggggctgcggcgcggccagcacaggccgggtgggggtgggggtggggtaggggccagtcgccatggcgacggcgccgcggcctgaggggctggtaggtacgaggggctgggatgcgaaggtgcaaactttcccaggtggggcaggcgggcggcgcggcgcgctctgggtgctgggagggggcgccgggcgcgatccccggggaggcggcatcttgtgcgcccgggttgtgctcccttggctcagggccagcccatcgcttccttggcggtccttggcgttgtcggtatttccgtcctctgtaggaggctgtcgatttaccggcccctgctgtttcccgagtgcgaaatgtgtttccgcagaagtaaggtttctttgtgggtagccgacatcattttttttaaagaccatgtcgtcggaaaggatcactggtttccttcggagcagttaatgagtataaactggttcagtatttgcgatgcatggtttacgttctgaatgagactgtgcctttagtgtttccgaattaacaggagtttctcc

SEQ ID NO: 9700 - DNA, 959 bp, Artificial sequence
  DNA replication origin
ctctgcccggccagccgccccgtccgggagggaggtgggggggtcagccccccgcccggccagccgccctatccaggagatgaggggcgcctctgcccggccgcccctactgggaagtgaggagcccctctgcccggccagccgccccgtctgggagggtggtgggggggtcagccccccgcccggccagccgccctatccaggaggtgaggggcgcctctgcccggccgcccctactgggaagtgaggagcccctctgctcggccagccgcccagtccgggagggaggtgggggggtcagccccccgcccggccagccgccctatccaggaggtgaggggcgcctctgcccggccgcccctactgggaagtgaggagcccctctgcccggccagccgccccgtctgggagggtggtgggggggtcagccccccgcccggccagccgccccatccgggaggtgaggggcgcttctgcccggccgcccctactgggaagtgaggagcccctctgcccggccacgaccccgtctgggaggtgtgcccagcggctcattggggatgggccatgatgacaatggcggttttgtggaatagaaaggcgggaagggtggggaaaaaattgagaaatcggatggttgccgggtctgtgtggatagaagtagacatgggagacttttcattttgttctgtactaagaaaaattcttctgccttgggatcctgttgatctgtgaccttatccccaaccctgtgctctctgaaacatgtgctgtgtccactcagggttaaatggattaagggcggtgcaagatgtgctttgttaaacagatgcttgaaggcagcatgctcgttaagagtcatcaccactccctaatcttaagtacccagggacacaaacactgcggaaggccgcagggtcctctgcctaggaaaaccagagacctttgttcacttgttt

SEQ ID NO: 9701 - DNA, 1273 bp, Artificial sequence
  DNA replication origin
caacttcttcgcaaggaggaggggagcacagccaagtcatccggaataaaaaattatccgtgtaaatatataagacagatcctcccgttttcataaacaactagagtcccagggttcaccctcaggccccctggcacaacaggaggaaaataaagccagactcccggagccccactccagtacctccgagcttcgcctctgatcagagagcgcgggttcgcgtctgcgctggggccaatggtgccggggcctccggcccgcgtggccccagcccggggtccccgccgccgcccgggctcagcagcagccgccgccgccaccgccactgtagcagctgctgctgccgctgccgccgccgccgccgctccctagccctcctcctcttcccatggctgcgccctgcttggcagctcgcgggctgtcaggcttggggaggagagagggggcggggtgaaacgggaagggaggatgggagggcaggggtgggaaaaggcggccaccgttcaccaggggtcacgccgcgcctggcccgcagtcccccagatccaggttgcagaagcgaaggcgaagcggacgttcaaggaggccagttcgagaactgctgcggagaggccgagtgccgcccgggccaagcattccgagttgctgggatgaagtcttcccggcgaggagctggagttggtgcgtgtcactctcaactgagctgcgcggctcctcctagaggaaaatattggtagttgcaatacacttccttcctctccgcctgcccgttccaaatgaaagcaggacctacaagagcgttaagtgcagtccacagactcaaagaaacacttacaaaaaggttagctatctccaggaatgagaggaagatcagcgagataccttggaaagcgtgtttagccatccaaatattgcctttccatcaacaatcaagttccaaactcctgctcactggggcacagtgaaaagatagttaaaactacgaaggactttattgtggaggttagaagacggagacagagagaatgagtaatttaccaaggacactcagcatgttagcagagaggtatctgctagaggacagggatgcagggagagcagacacaggccccagcctgaagttcctgagccaggaaaagggttttaactctgcctcacgctggacatagctcatctgtcaaatgcgagccctgcctacttcattcacaagaagttgtaaaagtgttgcagaaagttaaagttgtgcataagcatgtcatttttgtacagcatc

SEQ ID NO: 9702 - DNA, 1183 bp, Artificial sequence
  DNA replication origin
ctggcgtctgctctggcccgcgagtagtgtacgtggaggggtttactccggagacagttttgttaaagtcataaaagttttgctagtgtgtttctgtttgccatcatctgcctggctgcggcaggaactgccgaggctgctgctgttgcgcggggaagaatccccggcagcgcgactggagagactggggaggtcgagctgtgcgcgtggacacagcgcgcagagcgcgcggtcttttgcgcgtttgtgcgggccgcagccgcacgttggcaccgatggaactggggtcagtagagtgacagccaccagtccgcatgaactggggtaagtggaaattgtggcgagccgacctcccccagcttttgacacactagtggttgtaaaatcaaccaggcttaaagttttgacagaactgccagaggctgcgggtcaatggggtggccgcgtgtctagggagagggcgctggcggcgcagagggtgcggggcagggcacttgcgagtgcgtggggaagtctatttggggcgagtgctttatatatagcccgaggggatgcctgctgagaccgagctgcgggggctctcggtctggcgcggactgtgtgtcctgaatgagtgtacgtgtgcgctgtgtgtgcgcgcgcgagtgtgcgcctggggaggcgtgtcggcgcctgagccagtagggtgtgcagggtggaagaggccacagaggtgccgcctgtctgtttgtgccgccaggagaccttggaagggacagagaaaggtaacggaaggccaaagtgttgggaagtcagagtagtttctgcataggattaagtattaagggctttaaaataactaaacgcattgccctgagtggctgaggactggaagtgaggttttggggagttctcaggagaactgcatgggagggcgtttgggaggtctaagggatgtgtaatatgtgtgagtacagaacttcggagacagacacaggttggagctatgaatttgaaattttcagggtgctgctgtccacagtccagggactggctggtttcagaggtattcaggctccctggtgtgtgtgcctgggaagacactcatcttttcttgcagacatgggatattgtggcaggtcaggctctgtttcctgagcaactggtgttccaggctagtttccacctgaatcaccctagaagt

SEQ ID NO: 9703 - DNA, 967 bp, Artificial sequence
  DNA replication origin
cagtgaccgggctcctccgacgaggctgcggccgccactcctgcctgcgcctgggcctcctcctgggtggcaggcgtggactcttcgtccgaaggttgtgcacgccgcaccaggggaatccaaagaacgcgctcctgtcccgtggggaagccccagtaccgctgattctggttctcagagtggtggcccagcggtgttggaaggtaacgcgccgtcccgcgaattcgatcttctgggtctccggatggttcccactggggctctcgggctgtctctctggaaccaaaagcccccctcacatggcttcgccagtgcatcgcttcttccaggggaagtttacagagacaaggggattcagaagatcaagcttgtggagcccgcctccttctatgctcctcctgcttacgaggcggtccagcccggagagatcaaggagaactgggcggtgagctaactgagagctaactacatcagaagaggaaccgccccagtcgccttcagtgtccacataggcccctcctggagcaagttgtgggaagtgagtctagtgaagacagatgggattagcagtgaaaaatccaagagacctccggacgcctaaggagggaagctcttttgggagacggggaagtgtagatatccgatttctgaccccaaacgttctggtagtactacaggagagaccgagaaccagggctgtgggaaagaggtatgtctgtatctttgagctagagtgtgtgcgtttggtgggatggatactgggctgaaggcagggtgtgggtgtggtgtttgcgatgaaggggaatgggagggaagctcaaaggattatttgggagggagcttggaggtggttagggaaaatggcccagttctaaagattaattcccaaagtgttgggattacaggcgtgagccaggtcaggagtctgagaccagcctggctaacatggtgaaaccctgtctctatt

SEQ ID NO: 9704 - DNA, 1621 bp, Artificial sequence
  DNA replication origin
agaaagcacagcacctgtgcttatgcctttgcatttcgaagttggcaacagtcaatgggaaactggattccaaattatgccagggaatactgggccaggggctttcagcaggacccttaccgtttctggaatttcaagggctattacaatggtctcgtccaggactcatgagatgcctaactgacatagttcgggcagtgatgtggaagtgaggaaactcaggcagtcattgatttcttaaccccacagatgttcttcctctgtctctgggtgagaaaagaagacctggaagagcagtgagggacttccagggtggggaatgactgtctccatcacaggtagataatctaggtcctatctgtgataggctatcctgatggatcaacaggttacccaagctgaaaaaagcattcaagcacttcctttggagtgtgaggcagaaaccaggacagctactggtccaccagaggacaaaaatcaaccccattttactactttggctcttcagtgtggtgcgcatagggcagtgaaggtggatgagcaacaacatccaccttcagctatacacggagacaacagaagactccaggcaggacagaggagggcaacgacaacatgggggcagtcccaggtggatgtatccgtgtgtgtgtgtgtgtgtgtgtgtgtgtgtgtgtgtgtgtgtgtgtgtgtatgtactgtgacagtggtcaggggaagggaggggagggttgagatcttcccagtagagaagtgaaaagcacagaactgagtaaagaggtcccagaaaagaaagaggagcctgcaagccactacagaagtttcttgcccaaaggaatggtcttttgccccactaggggctgtgtatgttgtgaagtccatggaggtatccagggtgtgggcttcctggctccagtagactcaaggtccctttgaactagggaggaaaggggcctgtaaggtctccccagttggaataagcgtcggaataaagcacatcctgacagggctggggggcactaattaaactctatggctgggagtgggaagggggaggtggggacaaagggctgctttctctgtgtgcaggcttgagatgcacagggggtgtaaggagagtctgagaaggagggggagaaggaagagaaggaggacgaggagaaggaaggtaagttttctgggatggacctggtgctccaggtagacaggaagcctgggctgcgcagtgtgtttggaggaaggtggatgaaggggcaagtctgttccttggcgcgccctttggcccgggaggccctggctacctccctgctccctggccgggaagcctgagaatgtcccgcgttggcgtggttcgggacagcacagggacccccaatcagagcagcccttgcattggtccatccatccccaaaagctaggccagaaacacacgcgatgcagacttttgccttggcgttggattttattccgagaacagactaaagagaataatgtgtccgaagcgctgctcagccacagcctcctgagtggcatgggaacagagcagaggcattacggaaacccagttcttgggcagaggatcaggaacccaagggcctcgttggacatctcctggcttctg

SEQ ID NO: 9705 - DNA, 1140 bp, Artificial sequence
  DNA replication origin
ggagaccgtggaaagagagggagagggagaccatggagagagggagggggagggggaggggtgatctctctttcttttccccacatttcccccttttctattccacaaaaccgccatcgttatcatggcccgttctcaatgagctcttgggtacacctcccagacggggtggcggctgggcagaggggctcctcacttcccagacggggcggctgggcagaggcgccccccacccccaagacagggccgtggctgggctggggctgcccccacctcccggacggggcggctggccgggctggggctgcccccacctcccggacggggcggctgccgggcgagatgctcctcacttcccggacagggcggctgccgggcggagggactcctcacttcccagacagggcggctgctgggcggaggggctcctcacttctctgacggggcggccggtcagagacgctcctcacctcccagacggcgtggcgttggggcagagacactcctcagttcccagacggggtcgcggccgggcagaggcgctcttcacatctcagacgggtggcggggcagagtcgctccccacatcccagacgatgggcagccgggcagagacgctcctcacttcctagacgggatgacggccgggaagaggcgctcctcacttcccagactgggcagccgggcacaggggttcctcacatcccaaacgatgggtggccaggcagagacgctcctcacttcctagacggggtggcggccgggcagaggctgcaatctcggcactttgggaggccaaggcatgcagctgggagggagaggttgtagcaagccgagatcacgccactgcactccagcctgggcaccattgagcactgagtgagcgagactccgtctgcaatcccggcacctccggaggccgaggctggcagattactcgcggtcaggagctggagaccagcccggccaacacggcgaaaccccgtctgcaccaaaaaatacaaaaaccagtcaggcgtggtggtgcgcgcctgcaatcccaggcactgggcaggctgaggcaggagaatcaggcagggaggttgcagtgagccaagatggcgacagtacagtccagcctcggctgggcatcagagggag

SEQ ID NO: 9706 - DNA, 1415 bp, Artificial sequence
  DNA replication origin
ttaaccctgagtggacacagcacatgtttcagagagcacagggttgggggtaaggtcacagatcaacaggatcccaaggcagaagaatttttcttagtacagaacaaaatgaaaagtctcccatgtctacttctttctacacagacacggcaaccatccgatttctcaatcttttccccacctttcccccctttctattccacaaaaccgccactgtcatcatggcccgttctcaatgagctgttgggtacacatcccagacggggtggtggccgggcagaggggctcctcacttcccagtaggggcggctgggcagaggcgcccctcacctcccagacggggcggctggccgggcggggggctgaccctccccacctccctctcggacggggcggctggccgggcggggcgctgacccccccacctccctcccggacggggtggctgccgggcggagacgctcctcacttcccagacggggtggctgccgggcggaggggctcctcacttctcagacggggcggttgccaggcggggggtctcctcacttctcagacggggcggctaggcagtgacgctcctcacctcccagacggggtcgcggccgggcagaggtgctcctcacatcccagatgaggtggcggggcagaggcgctccccacatctcagacgatgggtggccgggcagagacgctcctcacttcctagatgggatggcggccgggaagaggcgctcctcacttcctagatgggatggcggccgggcagagacactcctcactttccagactgggcagccaggcagaggggctcctcacgtcccagacgatgggcggccaggcagagacgctcctcaattcccagacggggtgtcggcctggcagaggctgcactctcagcactttgggaggccaaggcaggcggctgggaggtggaggttgtagcgagccgagatcacgccactgcactccagcctgggcaccattgagcactgagtgaaccagactccgtctgcaatcccggcaccgcgggaggccgaggctggcggatcactggcggttaggagctggagaccagcccggccaacacagcgaaaccccgtctccaccaaaaaaatacgaaaaccagtcaggcgtggcggcgcgcgcctgcaatcgcaggcactccgcaggctgaggcaggagaatcaggcagggaggttgcagtgagccgagatggcagcagtacagtccagcttcggctcggcatcagagggagaccgtggaaagagagggagagggagaccatggagagagggagggggagggggaggggtgatctctctttcttttccccacatttcccccttttctattccacaaaaccgccatcgttatcatggcccgttctcaatgagctcttgggtacacctccc

SEQ ID NO: 9707 - DNA, 974 bp, Artificial sequence
  DNA replication origin
tctctgcccggccgccatcccatctaggaagtgaggagcgcctcttcccggccgccatcccatctaggaagtgaggagcgtctctgcccggccacccatcgtctgagatgtggggagcgcctctgccccgccacctcatctgggatgtgaggagcacctctgcccggccgcgaccccgtctgggaggtgaggagcgtcactgcctagccgccccgtctgagaagtgaggagaccccccgcctggcaaccgccccgtctgagaagtgaggagcccctccgcccggcagccaccccgtctgggaagtgaggagcgtctccgcccggcagccaccccgtccgggagggaggtgggggggtcagcgccccgcccggccagccgccccgtccgagagggaggtggggagggtcagccccccgcccggccagccgccccgtctgggaggtgaggggcgcctctgcccagccgcccctactgggaagtgaggagcccctctgcccggccaccaccccgtctgggatgtgtacccaacagctcattgagaacgggccatgatgacagtggcggttttgtggaatagaaaggggggaaaggtggggaaaagattgagaaatcggatggttgccgtgtctgtgtagaaagaagtagacatgggagacttttcattttgttctgtactaagaaaaattcttctgccttgggatcctgttgatctgtgaccttacccccaaccctgtgctctctgaaacatgtgctgtgtccactcagggttaaatggattaagggcggtgcaagatgtgctttgttaaacagatgcttgaaggcagcatgctcgttaagagtcatcaccactccctaatctcaagtacccagggacacaaacactgcggaaggccgcagggtcctctgcctaggaaaaccacagacctttgttcacttgtttatctgctgaccttccctccactattgtcctatg

SEQ ID NO: 9708 - DNA, 1013 bp, Artificial sequence
  DNA replication origin
gcgcctgtaatcccagctactcaggaggctgaggcagtagaatcccttgaacctggggtgcggaggttgcagtgagccaagatcgcgccactgcactccaggctgggcgacacggcgagactctgtctcaaaacaaaacaaaaggaaaagaagagaaaagaaaaagaaacgcaggcaccctgaaatcgaaacttgttaggaccaacaagccaacgacagacgaatctgcggggtcctgcgacagacacgccagccccgccgccacagcacagggttctggaggtcgagctgttctgcgggttctgcggcggcgctgggaagagacggcgcccgggcagctcccctgtcaccggcttggaggagcggcgggctcccctagcccagcgccgccgccgccgcccgggaacgccaggctcaccccagctggggaagctccgaatccctcagatcggcgacctgagtgctgtcgccccgagaaaatggaggcatcgagcaacgagctgtgctgagaccgagagacctcagttctgcgaaatgtcggtgcctggagcttgcgaatgactgcggccggcgggttgtcaaggacaacattccttatggcgcaaccaacagcgctgtcaccaagaaactggactctgagaaaaaagagggtttcggccaccgagaaactccgtgccacatgtgccgtgacagcaaaaccgcccgctccgcgccgctggtgaaagagctaacgaacgccaggtgctgcgacagtgacaccgggactagaaggcctcggatggagaatgggacgcccagagcaagcaggaaaacgttttgtttggctcaactagcgctgtcgcaaccggaaaactgtcaggccagtgctgctgcggatgtgagaaaccggtgatccgaaggcggagtggcgctgggcgctggactcgctggtgtgaaaatctggctgctctaggacccggcaagcgcgggcaccaggcgaacgccagcgactttgccagacaaatgcatgtctt

SEQ ID NO: 9709 - DNA, 1273 bp, Artificial sequence
  DNA replication origin
ttcaccgtgttagccaggatggtctcgatctcctgacctcctgatccgcccgcctcggcctcccaaagtgctgggattacaggcgtgagccaccgcgcccggccggtactccgaagccctcagatcggcgacctgggcgctgtaggcaccgagaaaatacaggcaccgagccagaagcagtgccgcaaccaagagacctcggcttggcgaaatggcggcgtctggagcctgcgagtgacgccagctggtggggctgtcaaggagaacattcgttacggcgcaaccaacggtactgtcaccaagaaaccgtcgtctctgagaaaaaaagagacgttcggccgccgagaaactccgtacaagtgctgtgacagaaaaaccgccggctccgcgcagcggcaaaagagccaacgggaacgccgggtgctgcgaccatgaccccggcactggaggacgtgggatggagaatgggacacacggagcgagaagggaaacgtttcgtgcagaccaactagcgccgccgccaccggaaaactgactcgccagtgctgccaatgaagtgcgtgtgagaaaccgatgactggtgggaggagcagcgctgggcgctggacccgcgagtgtgagaatctggcggcgctaggacccttcaggcgcgggcacgaggcgaaacccagcgctgttgccaaagacaaatgcgcgttcttttgggcgccatcagcggtgcagccagtgatcactcccaggctctgagaaactagagatgtcagccacaaaccctccgttcagggaaagtttgcggcgccgtgacggatcgactggcactgggtgcaacattgtcttgtggcctagagactagaatataaaaacaaaaaccaaatacaaaactgctgctggcattactcctactctcccccctcaagtcagtggcttcaggcttaagaaaacctgtatttttcttggctgtgccataatccgtaattaccgaggcccccagcgacccacccagtgtgattcgcagagggaaaggagctggaataaggaccgtgaatggggcggatgtggctcgtcctgggagagagctaaagcttatgctggtcgcaaacagcattacattgcaggaaactgctcttccaatggccgtggctgggtccttccacaccatccctctgccctagacctttgtccccgttcagagccatcagagattctaggagagctgtcgacaaccgcatctcttcggaacttggaaactctaggttcaagatctccgtggaga

SEQ ID NO: 9710 - DNA, 1250 bp, Artificial sequence
  DNA replication origin
tcaaggggagagggagcaaaggcctcaccatcaatccacacgtcctgtgctagagtcttgcgattcttatttcccctaccctcctgcaacgattattcccatatatcaaggccatctgacagagttaaccatcagaattaaatagcagttcccacagagttccatcccctggagaggtacctagctgccggggcaggcctgaagcctcggtcaggaggcattgagtctttcactctccacggaggtcttggactgagaacttcaagttccaaagggatgaggtgtcggcttcgcccttaggagcctggagggctctgaccaaggagaagggcggagcccagccactggaaggtttgtttcttgcagtggaagacggttggcgacccggatggcttttgttaccagggccagcccaatccgcccgattctcggtccctatactgcctccttttcccatgcgcatcgcaagggatcggttgatggggccctcagtatgacttcgctaggaaaaataaaggtcttcttaggcgggaggggactgatttgaggacggagggtgggagtagtgccagcagcactttgtcgtagtggcactgggtgggcagttatcagttgcagtccgctcgtttctcagtgcccacggtttctcactgacagtgcagctcgtttctcagagccggcggatgttcatgggcagcaccatcgagccagaagcagtatttgtcctggtaagtcatttctcaactgccgaagtgtactaggttccagtcccgctggtttctcgaatctgctagtcccacacgagcaccaataggtaaacccagccggcagtttccggctagcactttcgctatttgaagacattaggaagttatgtggtggctccgtaccctcctttctccatccgaggccggggtcctaaagtcggtgtcacggtggcagcacccagcgttttgttggctctttcgccagcagcgccgagcggggggttttctgtcacagcacttgttgcaccgaatttctcggtcgcagaacctctcttttccgagggtcgacattttctgcgtgacaacaccgttggttccgccaaaatggatgttgtccttgggaactcctccggctggcgtcactcttagggtcccagcaccgccatttcgccaagccgagttctcttggtcgcggcacatcttgttcctcggtgcctccattttctcggtggcggcagcgctctggtagccgatctgagggat

SEQ ID NO: 9711 - DNA, 1175 bp, Artificial sequence
  DNA replication origin
tccgggaggggggagggggagtcagccccctgcccggccagccgccccgtccgggagggaggtgggggggtcagccccccgcccggccagccgccccgtccgggagggaggtggggggatcagccccccgcctggccagccgccccgtccgggaggtgaggggcgcctctgcccggccgcccctactgggaagtgaggagcccctctgcctggccagccgccccatccgggagggaggcggcggggggggtcggccagccgccccgtccgggagggaggtggaggggtcagccccccgcccggccagccgccctatccaggaggtgaggggcgcctctgcccggccgcccctactgggaagtgaggagcccctctgcctggccagccgccccgtccgggagggtggtgggggggtcagccccccgcccggccagccgccccatccgggaggtgaggggcgcttctgcccggccgcccctactgggaagtgaggagcccctctgcccggccacgaccccgtctgggaggtgtgcccagcggctcactggggatgggccatgatgacaatggcggttttgtggaatagaaaggcgggaagggtggggaaaaaattgagaaatcggatggttgccgggtctgtgtggatagaagtagacatgggagacttttcattttgttctgtactaagaaaaattcttctgccttgggatcctgttgatctgtgaccttatccccaaccctgtgctctctgaaacatgtgctgtgtccactcagggttaaatggattaagggcggtgcaagatgtgctttgttaaacagatgcttgaaggcagcatgctcgttaagagtcatcaccactccctaatcttaagtacccagggacacaaacactgcggaaggcagcagggtcctctgcctaggaaaaccagagacctttgttcacttgtttatctgctgaccttccctccactattgtcctatgaccctgccaaatccccttctgcgagaaacacccaagaatgatcaattaaaaaaaaaaaaaaacaaaacaaatatttacgtatgataatgagaagaacactgtcctagatggctgaaatgctaatagtctttaattcactattttcttattctgactgttgcaaagatttgtagttttattgatgattctcact

SEQ ID NO: 9712 - DNA, 1293 bp, Artificial sequence
  DNA replication origin
cccccacctccctcccggacggggcggctggccgggcagaggggtcctcacttcccagtaggggcggccgggcagaggcgcccctcacctcccggacggggcggccggccgggcggggggctgacccccccacctccctcccggacggggcggctggccgggcagaggggctcctcacttcccagtaggggtggccgggcagaggcgcccctcacctcccggacggggcggctggccaggcggggggctgatccccccacctccctcccggacggggcggctggccgggcagggggctgaccccccctcccccctcccggactgggcggctggccgggcggggggctgacccccccacctccctcctggacggggcgactggccaggcagaggggctcctcacttcccagtaggggcggccgggcagaggagcccctcacctcccggacggggcggctggccgggcgggggctgaccccccccacctccctcctggacggggtggctgctgggcggagacgctcctcacttcccagacggggtggctgctggacggaggggctcctcacttctcagacggggcggttgccaggcagagggtttcctcacttctcagacggggcggccgggcagaggcgctcctcacatcccagacagggcggcggggcagaggtgctccccacctctcagacgatgggcggccgggcagagacgctcctcacttcctagatgggatggcggcggggaagtggcgctcctcgcttcctagatgggatggcggccgggcagagacgctcctcactttccagactgggcagccaggcagaggggctcctcatatcccagacgatgggcggccaggcagagacgctcctcacttcccagacggggtggcggccgggcagaggctgcaatctcggctctttgggaggccaaggcaggcggctgggaggtggttgtagcgagccgagatcacgccactgcactccagccttggcaccattgagcactgagtgaacgagactccgtctgcaatcccggcacctcgggaggccgaggctggcggatcactcgcggttaggagctggagaccagcccggccaacacagcaaaaccccgtctccaccaaaaaaaaaacgaaaaccagtcaggcgtggcgacgcgcgcctgcaatcgcaggcactcagcaggctgaggcaggagaatcaggcagggaggttgcagtgagccgagatcgcagcagtacagtccagcttcggctcggcatcagagggagaccgtggaaggagaccg

SEQ ID NO: 9713 - DNA, 906 bp, Artificial sequence
  DNA replication origin
tgtctctatgaaaaaaaaaaaatttgccaggcatggtggcacatgcctgtagtcccagctactcaggaggctgaagtgagaggactgcttgagcccaggaggtctaggctgcagtgaactatgatcatgccactgtactccagcctgggcaacagagtaagagagtaagatcctctatttcacaaaaaaaaaaaaaggaaaagaaaagccttctagatacaaaaaatgcttctatatacaaaatatatacaacatacacaaaaacacttctatatgcaacatatacaaaaaagatgttttaaataaagaagattggcaagggcgcaggggctcatgcctgtaatcccagcagtttgggaggaggaggtgggtggatcacctgaggtcaggagttcatgaccagcctggccaacatggcgaaaccctgtctctactaaaaatacaaaaattagctgggtgtggtggcacgcttctgtaatcccagctactcagggggctgaggcaggagaatcgcttgatcccgaggggcagaggttgcagtgagccgagaacgtgtcattgcactccagcctgggtgacagagcaagatttagtctcaaaaaaaaaaaaaaggttattaaaaagacataaaaatatagttgttggtaagaaaaatgttgttcagttttgagggtttcgagatggggtctcattctgttgcctgggctggactgcagtggtgttatcagctcactatataacctcaaacttctgtgctcaagggttcctcctgcctcagcttcccaagtagctgggactgtaggtgcacacaaccataattgggtaattaaatatttttttttgtggagacgggatctcagtttattacccaagctggtcttgaactcctggactcaagggatcctc

SEQ ID NO: 9714 - DNA, 1022 bp, Artificial sequence
  DNA replication origin
cccttcgtgagcgccaaatccccgcgctcggccccgcccatccactgaggggtgtgggtaggggcgtggcccgttcccttgctggtcggcgcccggaaggcgtccgcgtcagccggagctcgacgcggtgacggtgtgcgtcgacgtaagtgacgcgcaagcctgggccgctcctccttccctcagtgagtgccggcccggtcggggcgggggagaagagggagggcgggggagggagaggcgacccgagagtcgttgtgggtcgcgggccggaccgggtcccggggcggtgggagccccggccgggcagaagggcttggcgggccgttagaggaccgccacggctgtcgagtcccctcccttgttggacttgcgcgccctggcgctcggaacctccggcgctgtgcccaccccgctctagctcgcgtctcccgactccaattaggtcaggctcggagtcccgcggccgcggctccggtctcaacgctccggggccgctcggctcgcctttcttccctcgcctttctctcctcttgcttcaccctccccccttcttttcacgttgctggttttttttgttgttgttttatgctttaggggttttgttcctcggctcgagctcatgggtgtacattatcatgctcttcttttgtagagcagcccgacggccatggaggctgaagagacgatggaatgccttcaggagttccctgaacatcataaaatgatcctcgaccgattgaatgaacagcgagagcaggaccggtttactgacatcaccctaattgtcgacggtgggtagggcagtgggcagaggagcgaatttttggcttcagtttttttctgtccttcggacacccgcctttttttttttttttttttttttaacccatcctctatggtctccctaccaaagtctgcagagtgtgtgcactgggaccagattgcacttgtcagtgtccactcacacagcgtgctgcagaaggctggttggtcagtcatgccttccacgtagtctggtg

SEQ ID NO: 9715 - DNA, 1214 bp, Artificial sequence
  DNA replication origin
catgacaaccagaattagaagtgctgttgcaacactaacagaaaccatcttttgaagcggttctgtgaatcacattgaatactgatgatgcaagctagtgtgatacatacttttcaaacattaaaaaaaatcttattaccataaacaaatattcaccttagatttccatttgaaatcttgacttggaatcactttttttcatctggtttcgtttgtttcccttttggattcccgcggcctcaattgcaaacgcgatttgtgtaatttccaaacttgtcagaactgcacgggtaagagcttagaatgtgattcattcgctcttattttgaaacgggatgaggaatggggtgggggagggggggtagacagagagccctcttgtctactgtactcaggaggacgaaaacaggggagggaaggggaaaagagaggagaaagggagaaagggagggagggaggaggagaagagaaggggagaggaggaggaggaaaggagggagggagaagagggaaaaggagggaaggagggaaggaaaaaacagaaaggaaagaagtgctatagcagaatctttgctgcccatgttatctattgccttgacttctccatctgccaagatgtgtcaagcacgcagaagctggctggaatcgatattttaaagacccggttgcgatcttttcctggtcgtatcaaggagtcctggagcttctaatattcctggagggatatccaggaagaggaaaagaggctcttccttacttcgtgcggtcttccaaaagaagcacctttcgctggggagagtcgcggcgtggggtgcaatggaaggttttgttctcctgggccacatgcgttagatgtcagttctctccaccagcagcaccggccggcgcgcgtggggagatcacgccggtcttctgcccttgtaacaaacgctccagatttggtctggtgccttagggctctggtccagcgcacccgctgtgcgcaacgctaggcgctaagctgcgctcctcggctcacgtgtggacgcgcacgcagacacgagtgtccacaccatacagagacatgggtgcacacacgcgcgcacatagacatgggcgccgcacatgacacgggcaccacacatgacacgggcacacacgcgcgagcacgctctcgccctggctctaatgccccctcctctcgcttgcggatcggcctgggcaggtgtgggggt

SEQ ID NO: 9716 - DNA, 1030 bp, Artificial sequence
  DNA replication origin
tcatggcccgttcttaatgagctgttgggtacacctcccagacggggtggcggccgggcagaggggctcctcacttcccagaaggggcggccaggcagaggcgccccccacctcccggttggggcggcggccgggcggaggcgccccccacctccctcccggacggagcggctggccgggtcggggctgccccccacctccctcccggacggggcggctgccggacggggcggctgccgggcagagacggtcctcactaaccagacagggcagctgccgggcggaggggctcctcacttctcagacggggcggctgccaggcggagaggctcctcacttctcagacgggtcggctgccgggcagaggggctcctcacttctcagacagggcggctgccaggcagaggggctcctcacttctcagatggggcggccgggcagagacgctcctcatctcccagatggggtcgcggcccggcagaggcgctcctcacatcccagacggggcggcggggcagaggcgctccccacatctcagacgatgggcggccgggcagagacgctcctcacttcctagatgggatggcggccgggaagaggtgctcttcacttcccagactgggcagtcgggcagaggggctcctcacatcccagatgatgggcggccaggcagagacactcctcacttcccagatggggtggcgtccgggcagaggctgcaatcttggcactttgggaggccaaggcaggcggctgggaggtggaggttgtagctagccgagatcacgccactgcactccagcctgggcaccattgagcactgagtgaatgagactctgtctgcaatcccggcacctcgggaggccgaggctggcagatcactcgcggttaggagctggagaccagcccggccaacacagcgaaaccccgtctccaccaaaaaaatatgaaaaccagtcaggcgtggcagcgcgcgcctgcaatcacaggcactgggcaggctgaggcaggagaatcagacagggaggtt

SEQ ID NO: 9717 - DNA, 894 bp, Artificial sequence
  DNA replication origin
cgcgaccccatctgggagatgaggagcgtctctgcccggccgccccatctgagaagtgaggagcccctctgcctggcagccgccctgtctgagaagtgaggagcccctctgcccggcagccgacccgtctgagaagtgaggagcctctccgcctggcagccgccccgtctgagaagtgaggagcccctccgcccggcagctgccctgtctggttagtgaggaccgtctctgcccggcagccgccccgtccggcagccgccccgtccgggagggaggtggggggcagccccgacccggccagccgctccgtccgggagggaggtggggggcgcctccgcccggccgccgccccaaccgggaggtggggggcgcctctgcctggccgccccttctgggaagtgaggagcccctctgcccggccgccaccccgtctgggaggtgtacccaacagctcattaagaacgggccatgatgacgatggcggttttgtcaaatagaaaaaggggaaatgtggggaaaagatagagaaatcagattgttgctgtgtccgtgtagaaagaagtagacataggagactccattttgttctgtactaagaaaaatacttctgccttgggatgctgttgatctatgaccttacccccaaccctgtgctctctgaaacatgtgctgtgtccactcagggttaaatggattaagggcagtgcaagatgtgctttgttaaacagatgcttgaaggcagcatgctcgttaagagtcatcaccactccctaatctcaagtacccagggacacaaacactgcggaaggctgcagggtcctctgcctaggaaaaccagagacctttgttcacctgtttatctgctgaccttccctccactattgtcctatgacc

SEQ ID NO: 9718 - DNA, 1206 bp, Artificial sequence
  DNA replication origin
cctctttctacacagacgcggcaaccatccgatttctcaatcttttccccacctttcccccctttgtattccacaaaaccgccattgtcatcatggcctgttctcaatgagctgttcgatacacctcccagacggggtggtggccgggtagaggggctcctcacttcccagtaggggcggccgggcagaggcgcccctcacctcccggacggggcagctggccgggcggggggctgacccccccacctccctcccggacggggcggctggctgggcagaggggctcctcacttcccagtaggggcagccgggcagaggcgcccctcacctcccgggcggggcggctggccgggtggggggctgacccccacctccctcccagacggggtggctgccgggcggaggggctcctcacttcccagacggggcggctgccggacggaggggctcctcacttctcagacggggcagctgccgggcggagggactcctcacttctcagacggggcagccgggcagagacgctcctcacctcccagacggggtcgcggccgggtagaggcgctcctcacatcccagacggggcagcggggcagaggcgctccccacatctcagacgatgggaggccgggaagaggcgctcctcacttcctagatgggatggcggccgggcagagacgctcctcactttccagactgggcagccaggcagaggggctcctcacgtcccagacgatgggtggccaggcagagacgctcctcacttcccaaacggggtggtggcgaggcagaggctgcaatctcggcactttgggaggccaaggcaggcggctgggaggtggaggttgtagcgagccgagatcacgccactgcactccagcctgggcaccattgagcactgagtgaaccagactccgtctgcaatcccggcacctcgggaggccgaggctggcagatcactcgcggttaggagctggagaccagcccggccaacacagcgaaaccccttctccaccaaaaaaatacgaaaaccagtcaggcgtggcggcgcgctcctgcaatcgcaggcactcggcaggctgaggcaggagaatcaggcagggaggttgcagtgagccgagatggcagcagtacagtccagcttcggctcggcatcagagggagaccgtggaaagagagggagaccgtggggagaggggagagggg

SEQ ID NO: 9719 - DNA, 862 bp, Artificial sequence
  DNA replication origin
gcctctacccggccgcgaccccgtctgggaggtgaggagcgtctctgcccggctgccccgtctgagaagtgaggagtccctccgcccggcagctgccccgtctgagaagtgaggagcccctccgtccggcagccgccccgtctgggaagtgaggagcccctccgcccggcagccaccccgtctgggagggaggtgggggtcagccccccacccggccagccgccccgcccgggaggtgaggggcgcctctgcccggctgcccctactgggaagtgaggagcccctctgcccagccagccgccccgtccgggagggaggtgggggggtcagccccccgcccggccagctgccccgtccgggaggtgaggggcgcctctgcccggccgcccctactgggaagtgaggagcccctctacccggccaccaccccgtctgggaggtgtatcgaacagctcattgagaacaggccatgatgacaatggcggttttgtggaatacaaaggggggaaaggtggggaaaagattgagaaatcggatggttgccgcgtctgtgtagaaagaggtagacatgggagacttttcattttgttctgtactaagaaaaattcttatcctgttgatctgtgaccttacccccaaccctgtgctctctgaaacatgtgctgtgtccactcagagttaaatggattaagggcggtgcaagatgtgctttgttaaacagatgcttgaaggcagcatgctcgttaagagtcatcaccactccctaacctcaaggacccagggacacaaacattgcggaaggccgcagggtcctctgcctaggaaagccatagacctttgttcacttgtttatctgctgacc

SEQ ID NO: 9720 - DNA, 1326 bp, Artificial sequence
  DNA replication origin
cgcggcccaggccccggctccggccccgaccagcacctggggcccgatcgaaaccgtccgacatgctcctcctcctccgcctcctcctccaggggccgctgccgctgcgctcgcgataggacgcggggggaaggcgccgcgggtcggctatagccgccgcgcctcactcgggcctcatggaggaggagggcggcgggccccggctcggctgctcggtgcttctggcggagcggacggcagcccgagcacccgccgctccagagcgcccgccccgctcggctaccctcggctttccagttctcccccaaaacccggctccccgccttcggcgcggcaggggcgcaggcgggtcacagcggccccctgcggcccggaggcccgggacgcgcccgcgaggatcctccagttcgcggctggccggccgccgggcccagcaggccgcccgccgagtggcgtcttggccacctgccggcccgcagccaggctcgggcaggggcatctcggttccggggccaggctgggggggatgagggatgaggggtgagggggacgcttaccacaggcaggcccgacctactcggtagttctcaggagagacgtgcgagaccgacagttgacgcccgggaaataaaaacacggggggagggggcgtggaccctgcgccagggttcgctggcgcacaggtgtgttcaatgactcggctccggccgagacccgcggactgctgaggagtggtccctgggagactgtcacctgctccgttagcatcgggggaagggagtagaaacggaatcaaaatatgtgtcccctctttaattcaccctaggtgtttaccacagtaggtcacacctacgtttaacaagcttcgttctcttcccgttaaccttcccctccagaaatttcaagaaaatgtgctacctttcagtgtaactctgccctctttttcatcttgcatcagtgctgtccaatgaaaatataatgcgagccacaaatgcaagccacttatgtaattttacattttggagaagccacattaaatgagtgaaaagaaacaggtgtggccaggcgcagtggctcacgcctgtaatcccagcactttgggaggccgaggggggcggatcacctgaggtcgggagttcgagaccagccagaccaacatggagaaaccccgtctctactaaaaatacaaagttagccgggcgtggtggcacatgcctgtaatcctagctattctggaggctgaggcaggagaatcgcttgaacgcaggaggcagaggttgcagtgagccgagatcgtaccgttgcactccagcctgggcaacaaga

SEQ ID NO: 9721 - DNA, 740 bp, Artificial sequence
  DNA replication origin
ccattgtctgagatgtggggagagcctctgccccgccgccccgcctgggatgtgaggagcgcctctacccggccgcgaccctgtctgggaggtgaggagcgtctctgcccggccgccccgtctgagaagtgaggagaccctccgcctggcaaccgcccgtctgagaagtgaggagcccctccgcccggcagtcaccccgtctgggaagtgaggagcgtctccgcccagcagccaccccgtccgggagggaggtgggggtcagcccccgccaggccagctgccccgtccgggagggaggtgggggggtcagccccccgcccggccagccgccccgtccgggaggtgaggggcgcctctgcccagccgcccctactgggaagtgaggagcccctctgcccggccaccaccccgtctgggaggtgtacccaacagctcattgagaacgggccatgatgacaatggcggttttgtggaatagaaaggggggaaaggtgaggaaaagattgagaaatcggatggttgctgtgtctgcgtagaaagaggtagacatgggagacttttcattttgttctgtactaagaaaaattcttatcctgttgatctgtgaccttacccccaaccctgtgctctctgaatcatgtgctgtgtccactcagggttaaatggattaagggcggtgcaagatgtgctttgttaaacagatgcttgaaggcagcatgctcgttaagagtcatcaccac

SEQ ID NO: 9722 - DNA, 1142 bp, Artificial sequence
  DNA replication origin
cgcccttaatccatttaaccctgagtggacacagcacatgattcagagagcacagggttgggggtaaggtcacagatcaacaggataagaatttttcttagtacagaacaaaatgaaaagtctcccatgtctacctctttctacgcagacacagcaaccatccgatttctcaatcttttcctcacctttcccccctttctattccacaaaaccgccattgtcatcatggcccgttctcaatgagctgttgggtacacctcccagacggggtggtggccgggcagaggggctcctcacttcccagtaggggcggctgggcagaggcgcccctcacctcccggacggggcggctggccgggcggggggctgacccccccacctccctcccggacggggcagctggcctggcgggggctgacccccacctccctcccggacggggtggctgctgggcggagacgctcctcacttcccagacggggtgactgccgggcggaggggctcctcacttctcagacgggcggttgccaggcggagggtctcctcacttctcagacggggcggccgggcagagacgctcctcacctcccagacagggtcgcggccgggtagaggcgctcctcacatcccaggcggggcggcggggcagaggctctccccacatctcagacaatgggcggccgggcagagacgctcctcacttcctagatgggatggcgaccgggaagaggcgctcgtcacttcctagatgggatggcggccgggcagagatgctcctcactttccagactgggcagccaggcagaggggctcctcacgtcccaggcgatgggcggccaggcagagacgctcctcacttcccagacggggtggcggccgggcagaggctgcaatctcggcactttgggaggccaaggcaggcggctgggaggtggaggttgtagcgagccgagatcacgccactgcactccagcctgggcaccattgagcactgagtgaaccagactccgtctgcaatcccggcaccccgggaggccgaggctggcggatcactcgtggctaggagctggagaccagcccggccaacacagcgaaaccccgtctccaccaaaaaaatacgaaaaccagtgaggcgtggcgtc

SEQ ID NO: 9723 - DNA, 1129 bp, Artificial sequence
  DNA replication origin
aggtttcgcctgtccccgagagtggaagggcccctgggggtaactagcctttgagctcaaaggggcatttcgtgaggtcgccttttggttcggagagcgcgcggcgatcgggtggagggggcctggcgggaagaaagctggggcggggaaggggcgcgggccgaggtgggagcggagctgcagtcacgtggccgcccgccgccgcggagttggggctgttcttccgggttggaggcgcagcgccgcggggcccaagcccgggtctgccagcgcgacgtcctctcgcggccctcagggcacagcccaaggctgtcagcctcccggcccaggtgagcgcgacggcactggcgggtgcgggcagccggggcgcgcgcctagggcgcagctgggaaaggggctcgggcctttcctgaagaccacggccctcgccgggagagagacctgtcaaagagcaaagcggggcggggtcggcggtgtcccgggcgcagggtgcattggggtgtccgcaggccgcaggcttaggtggggaagaagcaccgtgcctcttggtgtccctttctcgtctcctgctggggcgatgtcgaagggagtgggctggtggatttgggaactgggtccccgaagagggcagggaatgaggcggcagctgtgcaggtgcagatatttgcagctttgggggacagcgagagtcgtacggggtcatttcggccctcaagatcgggggtggtggagagggaggtcatagaggactttcgatgggcggttcatccagagaggtggcagctggatgcccttgaggtatgcttgacccttgagggagttcggagagggtgtccggctggggacataggagattgcgagcacaaattgtgagtgtgagttggggcggtctggcggtggtgggtacaagtttctggggcctaggctggtgaggaggaagagacagcggagagggcgacctgggcagagctagttcaaactcaacagccggaatgactatttgcagccgtggccaatcggcttcctagggaggttataaatagcggtctcgtgcagatgccagcgggtggcagttagttgccgagcaagggacggcaccggtggcagtagccgtgacaccagtggcttt

SEQ ID NO: 9724 - DNA, 933 bp, Artificial sequence
  DNA replication origin
atttacagcatcccaaggcagaagaatttttcttagtacagaacaaaatggagtctcctatgtctacttcttcctatatagacacagtaacaatctgatctctcttttccccacatttcccccttttctattcgacaaaaccgccatcgtcatcatggcccgttctcaaggagctgttgggtacacctcccagacggggtggtggccgggcagaggggctcacttcccagacggggcagccaggcagaggcgcaccccacctcctggacggggtggctggccgggcaggggctgccccccatctcctggacggggcggctgccgggcggagatgctcctcacttcccggacggggtggcggcggggcaaagacgctcctcagttcccagacggggtcgcgccccggcagaggcgctcttcacatctcagacggggcagcggggcagaggcgctccccacatcccagacgatgggcggccgggcagagacgctcctcacttcctagaccggatgacggccgggaagaggcgctcctcacttcccggactgggcggccgggcagaggggctcctcacatcccagacgatgggcggccaggcagagacactcctcacttcctagacggggtggtggcagggcagaggctgcaatctcggcactttgggaggccaaggcaggcggctgggagggggaggttgtagccagccgagagcatgccactgcactccagcctgggcaacattgagcactgagtgagcgagactccgtctgcaaccccggcaccttgggaggccgaggctgtcagatcacttgcggtcaggagctggagaccagcccggccaacacggcgaaaccccgtctccaccaaaaaatacgaaaaccagtcaggcgtggcagcgcgcgcctgcaatcccaggcactcagcagcctgag

SEQ ID NO: 9725 - DNA, 1379 bp, Artificial sequence
  DNA replication origin
ttgacaaaactgccatcatcatcatggcccgttctcaatgagctgttgggcatacctcccagactgggtggcagccgggcagaggggctcctcacttcccagatggggtggccaggcagaggggccccccacctcccagatggggtggtggccaggcagaggggctcctcacttccagacggggtggccaggcagaggggctccccacttcccagaggggcagctgggctgaggcacccccccacctcccagacggggcggctggccgggtgggggctggcccccacctcccggacggggcggctggcgagcgagggctgccccccacctcccggacggggcggctggccgggtgggggctgcccccaacctcctggatggcgtggctgccgggtggagacgctcctcacttcccagatggggtggctgccaggtggaggggctccccacttcccagatggggcggatggctgggtgggggctgcccccccacctcctggatggggtggctgccgggcggagatgctcctcacttcccagacaggcgactgccaggcggaggggctccccacttcccagacggggcagctgccgggcagaggggctcctcacttctcagacggggcagccggtcagagacgctcctcacctcccagacggggtggcagtgggtcagagacactcctcagttcccagacggggtcgcagccgggcagaggcactcttcacatctccgatggggcggcggggcagaggtgcttcccacatcccagatgatgggcggccaggcagagacgctcctcacttcttagataggatgatgtctgggaagagatgctcctcacttcccagactgggcagccgggcagggggctcctcacatcccagatgatgggtggccaggcagagacgctcctcacttcctagacggggtggcagctgggaagaggcgctcctcacttcccagacttggtggccaggcagaggggctcctcacatcccagacgatgggcggccaggcagagatgctcctcacttcctatacggggtggtggctgggcagaggctgcaatctcggcactttgggaggccaaggcaggcggctgggaggtggaggctgtatcgatctgagatcacgccactgcactccagcctgggcaacattgagcactgagtgagcgggactccgtctgcaatcctggcacctcaggaggccgaggctggcagaccactcgtggtcaggagctggagaccagcctggccaacatggcgaaaccccatctccaccaaaaaatacgaaaaccagtcaggtgtggcggcgcgcacctgcaatcccagacactcggcaggctgaggcaggagaatcaggcagggaggcg

SEQ ID NO: 9726 - DNA, 844 bp, Artificial sequence
  DNA replication origin
ctgagtatagtctcagtttatgagagtatttctttctgctttgacaatcagcagggatcataaatttgaagcaaatcgtggcttttctgcgtctgggtctgtgtttaagactgaggaagattctcttggaagagcagctgctggtggagggggtgctggagggactcctcggttcggggggatggctcccgacgacatctgtcggaagagggtgacgcgctgcgggacagtgctcctgccccctgcctgaaggcccgttccggggaccgccgtcacgggttgagggatggaggccagggactcgcccacagtgggatgaggtctggaaatcagagtggacacctcatggggcagcgagggctgcgaggcggagagtggcctgacttcccgggtcaggttggtgttgtgaagcgcctgcgtgctcttgtgcacttcatttttcggcgtggagctgccaggtgtctgtggctgcggggacggctgctgtggctgagtctgcggcggctgggactgctgtacctgctgctgcggctgctgttgcatgagtgacagctgggaggcggtgggggaggcatagtggaaagttcgagcggccagagggctctgtacaggagggctgcagaccgcggtggtgtaggagcagggtgacaggatggctgatggctggggggtctgtgtgctgggactgggggagtgcaggttgctgtgagacaggctggtcgctgtgtacaccggtggagattgtgtcctcatgcgggaggtcggggtcgtagtagacgatgtggaattcagggttgtcatttgaggataattgatgggagcgattgcctgcaccatctccctg

SEQ ID NO: 9727 - DNA, 1538 bp, Artificial sequence
  DNA replication origin
cggccgcggccgagaagcgcctgggcaccccgccggggggcggcggggccggcgcgaaggagcacggcaactccgtgtgcttcaaggtggacggcggtggcggcggtggcggcggcggcggcggcggcgaggagccggcggggggcttcgaagacgccgaggggccccggcggcagtacggcttcatgcagaggcagttcacctccatgctgcagcccggggtcaacaaattctccctccgcatgtttgggagccagaaggcggtggaaaaggagcaggaaagggttaaaactgcaggcttctggattatccacccttacagtgatttcaggtgagggctcccggtcgccgccccaccctcccttcaggcgcgccctgaaacgcgcttccccgcccttgggtggggggcgtcccggggactaggagggcgggcggggggtggcgctgccggcggcgtcggctcgggctaagcaggctccactcggcgcctccgggtagtttccacccaggaggggctcggaggatgtgctcctgttgcccgggaatcccggacgggctctcctccttggcctcctgaacttcggggacagatcagggaaggatggaggccacggtcaccctcctgggaggaggcgaagttgtacaagggaaacttttacttcagagacgagagcgtgaggaagcgggaagccacccttcctcgcgcggctccctcaagtgtggtctcaaccaggagggaaaaggaggcttctggggctcagaagaagactgggtaaccggagacagcgattcacaagcccgagcagttcctgccgcgctcgcccctggggagtgtgtttagtctgtttttctttataggcgctggttatcctcgctgtgtttactcagaaacagcggccggcaggcaaaagaagggcaatttgcacttggatagtccctgacgtgaggtctcaccaaagccaggcgcttccaggcagggcaggagcgtggcaggaagcctctagttcctgaaacagagagagggggcgttgacagagcccctttctgaaatagagcggcaccctttcttgaccttgactgcaagtctatttcaaaaatctttttcacgtcctccagctcgggaagaaggacaggaaagctgtcagcaggaaaactccgctttggagaattaaaattaagacgttttctgatcttacttgtcgctcaagtattcgttcggtgataagcatatttagagattgtcaaatgaaggtcgtgtagtagatcctcttattagcgtgtgcacgattatcttagctcctgaacaaggctggacttcccattttaaaatccagaactagtaactcctaataactcagggtgatatttatttatttggccgaactcgttcgaaaagaaaagaagaatcaactaaaggagtatgtgcatatactaagtattctttataggataaatatagcaatgtaaagcagccttggagttagtttagaaactaagggaaattgtcaccaactacatgccttaacgggagctgtcca

SEQ ID NO: 9728 - DNA, 1985 bp, Artificial sequence
  DNA replication origin
gccgccgccgccaccgccgccaccgccgtccaccttgaagcacacggagttgccgtgctccttcgcgccggccccgccgccccccggcggggtgcccaggcgcttctcggccgcggccggccccgcgcccgtcgcggacgccttggcggggaagacgctgttgccatcgtcccggctgttagacgaagagttgggcttgccgcctccttccatgcccggaggacgcggccggcgacggcgcgggctccagactcgccggccgcccggcgccggagacacgtagccgagagggtaggggcccgagccggctgccggcgagcccagctgcccgtcgcggcggcggcggcggcggcggcggctgctgcttcccgaccgcgccgctgctagctgcgcgcctggctcccgccgccgccgctgcccttagtggctgcggtccgggctccggtgcggctggtgctgaagctgaggctgccggagctaggcgaggctcagctcggctcagccctcgcgccccagcgcctcccctcggctgccctctgttggccagaaagggtctctccccgtccgctctccacacatgctcgttactcttgctctacttctgcccagcgtgacattgaactcaagagccctcggaggagacattcattggtacacgtggagaaggactcggtgtatgtttgcatgaaagacaggggagagaggagagagagcaagactgaactagcgagtgtgtgttggtccaaaagaaacaaacatcttaaactcatgaagacattgtctgaacgcctgtttgaataacgttacagatggagaaaaggggacaagctgactatgcatgccaacaattcaagtgcaaaaccaaatgtccaaaagaaagtaaagtttgacaatggaaaataaatgtccaaagtatcagggaaagtgtgcctgtgcgtgcgcgtgcgcgtgtgtactagaaagagaggcagagggcaaaagctaccaggtctgtgtaatcctaggtaaccagctgcttggggcttttcagattaaggttctgcacctggggacagacaactgacctccttacacttatccttgttaattcttgcagagttttttaaacagaggacgggatttctttctttccaaggccattcgtatcaatacacgtgcaagcagatctatcagccaccaatattgaaagaaaagtgtgtgagggaggcctcgcctgagctgacctatctttttagataagttacataatcaataaaacacattaagggatgtgtgtgtcggtcagtgtttaacgacaccacgctaggaagttaagacgtcttggaatctctcgtcagaatgtcattaccatttcagaaggggggaacactcttaagggaaacttacaagtgtagtactgatgctgaggaaagcattatccgtttcctcttattccctctgcgtctctgaaacccactggattagctaaaggaagcaaaatgtgctgccaaacccaccagtcactcagcaggggagccccggcgtctgaagagcttcaagactcccgaatgtcccaaaacatctgtttcagatacaagcattgcctccctgcccatagcctcttcaaaggaaatcttgccctgccaagagtcccagatcccctgggttcctgtcagctgtagccacattttatggagaaggggcaggcactcaaggagggaatgtgtatgtcaggctggcaactagtgagctatcatgaggaaaaaaaaaatgagtggggctaatcaaggtgtttttctgaaaaattaaacagtgatgaagccaattaacaatgaaggaagcaaggataaagacaaaggaagacaattggatgccttcctgaggggttaacagaggctgagaaaggaagcagagaacagagaaaatagcagagggaagcagaaacgagccattaggcctaactcagttgcaattctgtaagatttccttaccattctccttaccat

SEQ ID NO: 9729 - DNA, 1189 bp, Artificial sequence
  DNA replication origin
tttctattccacaaaaccaccatcatcatcatgccccgttctcaatgagctgttgggtacacctcccagacggggtggtggccaggcagaggggctcctcacttcccagaagtggcggccgggcagaggcacagcccacctcccggatggggtggcggccaggcggaggcgcacccacctccctctgggatggggaggatggccaggcaggggctggcccccacctccctcccggatggggcagctggccgggtgggggctgccccccacttccctctgggatggggaggctggccgggtgggggctgccccccacctccctcccggacggggcagctggccgggcgggggctgccccccacctccttcctggacagggcggctggccaggcaagggctgctccccacctccctcctggacggggcggctgccgggcagagacgctcctcacttcccagacggggtggctgctgggccgaggggctcctcatttctcagacagggtgactgggcagagacgctcctcacctcccagacggggtcgtggctgggcagaggcactcctcacatcccagatggggtggcagagcagaggtgctccccacatctcagatgatgggtggccgggcagagacgctccttacttcctagatgggatgacggccgggaagaggcactcctcacttcccagactgggcagccgggcagaggggctcctcatatcccagatgatgggcagccaggcagagacgctcctcacttcccagacggggtggcggccgggcagaggctgcaatctcggcactttgggaggccaaggcaggcggctgggagggggaggttgtagctagccaagatcatgccactgcactccagccttggcaacattgagcactgattgaacgagactccgtctgcaatcctggcacctcgggaggccaaggctggcagatcactcgcagttaggagctggagaccagcccggccaacagagcgaaaccctgtctccaccaaaaaaatacgaaaaccagtcaggcgtggcggcgcacacctgcaatcacaggcactctgcaggctgaggcaggagaatcaggcagggaggttgcagtgagccgagatggcagcagtacagtccagctctggcttggcatcagagggagaccgtggaaagagagggagagggagagg

SEQ ID NO: 9730 - DNA, 789 bp, Artificial sequence
  DNA replication origin
aatgaggagcccctcggcccagcagccaccccgtctgggaagtgaggagcgtctctgcccggcagccgccccgtccaggagggaggtggggagcagcccttgcctggccagccgccctgtccaggaaggaggtggggggcagcccccgcccggccagctgccccgtccgggagggaggtggggggcagcccccacccggccagcctccccatcccagagggaagtggggggcagcccccacccggccagctgccccatccgggagggaggtgggggccagcccctgcctggccatcctccccatcccagagggaggtgggtgcgcctccgcctggccgccaccccatccgggaggtgggctgtgcctctgcccggccgccacttctgggaagtgaggagcccctctgcctggccaccaccccgtctgggaggtgtacccaacagctcattgagaacggggcatgatgatgatggtggttttgtggaatagaaaagggggaaatgtggggaaaagatagagaaatcagattgttgctgtgtctgtgtagaaagaagtagacataggagactccattttgttctgtactaagaaagattcttctgccttgggatgctgttgatctatgaccttgcccccaacgctgtgctctctgaaacatgtgctgtgtccactcagggttaaatggattaagggcggtgcaagatgtgctttgttaaacagatgctggaaggcagcatgctcgttaagagtcattaccactccctaatctcaagtacccagggacacaa

SEQ ID NO: 9731 - DNA, 937 bp, Artificial sequence
  DNA replication origin
tgaacatcatgttgtcacggtcagaatcagaactaaattgattaagggtctgaaacagtttggcaactcttgggcacttatgctgataagaaaagtgatgagacagggtaatgaaaagaggctgcaagaaatgaccattcgtgcattcagccaacatttaggccaccctcctgtattccaggcactgtacatggcactgagtatgcaaagcaaaaggagtcatggtctactggcgggagccttctcagtggagaaaagatcaacaagaaaagtgcctgctggagacctctcctagggcataaaccaatatagaggtggggcagctacgtcagcctggggtgtccttaggcagaacagaaagtgagaatcagagcagtatctcatttctgaacacctggattgtagctttcccttgactgtcaaaggaggtggttttaaaaatcaagccaaacaggtttccatcttttaggaagaccctggaacgtgccagttgattctgaccatttctcatgaacagaaacacctaggaagggagaactggtgagtttcaagaggaggaagtccctcaaaaggggctgtgtttcgtaaacggcgccccaaaagggctgaactacttcgatctggaggaaaaagactcaggcactgagggaaggggagggtgcacgtctggagtaattttaaggccttttccgtgttatgtgatgtggcaataaggaaagatttgttcgttttattatttttttaatttttaaagattttcttttccccccttttccccctcccagccactccggtttgggtttgccacaagactataattcctttagaaagtggagtcgaattcataaaagtgatggggggaggggcgcggagagggaaggctgggagccccagggagtcttcacgaccgctcagctcccggcgcgagtggaggtcg

SEQ ID NO: 9732 - DNA, 1025 bp, Artificial sequence
  DNA replication origin
aaagctacccctggagtggatttgttttaaccccgatcaggacttgagccccacattcggtggtgtcaggggaggcctggccgggcagaaggcaagggctagagggcggcgaggtccctctgcgccgcgtccgaggggatgcggcgcgcccccgactgggtgcagcgggaggccgccccccgcaacaagtgccgggtgccatggcaacagcgggaatttcccgataggggaggccggaagcagcctcagccgggctcgcggtagcgaaagcaaaatcccgggggagcaaaatggacgaaaggcgacccccaggcaggggcgctgggtgccttgggaatccgaggaatcccttctctttgccagtcggaggggactagagggagccgaaggggccggagatgggccgagcgctgccccccgggggtcctcggcgccgggcgcagcttacaagcgcagcgcagcgcagcaggctccattcccggccgccgccgctcagcccattgcgcaaaccaaccccgctctgccgccgctgctggaacccaggaagcgtgcttggaggcttcgggcactacgcggggctggaaataccacgcactgccccttcgcctagacccccgctccggccacgcgggctctgccctcaaagctggtggctgcctcagacttggcggtgggggaggggaaggggagaggctggcgccccctcccccttttggctcccgcgctcgttgcagcagctgttgccaaatgaaccccagaatggggacgtgcaaccctccaccccacccccagccacagacgtcgcggtcagaaaactgggaagggggcgctgggtccgaggttctggaaaagcaagaactcacctgcaaacaggcagtccttctcagctctggacttctggatcacgacgtcgatatccttctgaattcgctcttgccttgaacacatccccattaaataaatccctggaaaagaagcagccgctatttccaccccaccccacccccctcgcacgcttccagctt

SEQ ID NO: 9733 - DNA, 1384 bp, Artificial sequence
  DNA replication origin
ttctaacctggtcattctgcgcttatttttgtccctttctccacccacttaggaaaaacagagaaagggacgcaccgcgcagcccctaggcactgtggtttagggctagtgccctcggcacccgctgccaggagccgggcgctgccaagggctgcggaggggccacgttctcccggggactggggcatctcctgcgtgctggcgacaggctgcgggggcggagtggtgccagggcgggcgctcgcccgtcggatatgcccacccgtcccgtccagggcaggaaagcctgccagggcgccatccccatccccaccgcctccaggctgccggggctgggccgctgtacgggagccaaggtgcggtgccccgcgtgtggacgagccgaggtgcagcccgcggggccgcagggccggggtggggcggggcgcggccggagcagatccggtgtttgcggaatcaggaggggcgggctggggcgggccctcggcgctgcaggagctgcccagaaacttttccctgctctcaccgggcgggggagagaagccctctggacagcttctagagtgtgcaggttctcgtatccctcggccaagggtatcctctgcaaacctctgcaaacccagcgcaactacggtcccccggtcagacccaggatggggccagaacggacaggggccgcgccgctgccgctgctgctggtgttagcgctcagtcaaggtaagcggggatttcgctctgcatcggctgcaggagggacccgcgcggcttcctggggctcgctggagggattgggcggaactagggagcgagctccgtgtgttccctcggattccacgtggactcgggctcccagccaccaggacctgcttggaaagagatacttcttcgttcccttcctgctatcccaggccttgcgtccccattaggcgcgtctcgccctgtctgttaagcaccctccaaagtcatctcagtgagtgctttgttttaggtacacacacgcacacacacacacacacacacagacagacacgcacgcactcaagcatggacagtgtggggatccgcgggtgtcctggagaccgcgagtcctgcagcccaacttcccctggctcagacaggtgccgcgcctgccagagaccagggaaatccggaatccattgctgatggcggcctgcagctccccagcgcggtgcttgctggctttgcagaagcctgcgagccccaaaatgcttatttttcaacccaaggatgtgaataatgcctctatttcttacttgaggacgaagcgctgtgtttcttcccggggggacttggaataaaccaagcgccacttaaatacttggcagaggggaattcttccttcccttctgccttcctcttattg

SEQ ID NO: 9734 - DNA, 1066 bp, Artificial sequence
  DNA replication origin
cttgataatcccagtgggggtcctggttggagactggctctgcaccagtaggctggacaggagcttggtgatgaattgtatcagcatgtgcctgaactagggtccagatacagtccaggtcttctggggtgagggtggaagagaggataacatagaggtcatgccaggtttgttcataagactgggtaaggtactgaagctctctaatataagaggtaggttcttctggtaatgaacaaagtcctttgttaatttgagagcgatcagtgagggagaagggaacatgaactctaacaatactttcagttcctgctacttcccaaagggggcactgtagcacaggcactgaagtaagggtggggcatgggccaaagatggtgcctgagtgagtatgggtgggataaaaggaagaatctggaggtggttcctgctgagggtttgaagggggaagtggggttgagttaacaggcagtggaggatagataggggtgtaaggtggcgggacgggtttacaagcctcaggagagggagatgggggagaagaatgggtacaggcaatactagaattgtcctgaggaggggatggtgtagaaaaaagaagtgaatactgctggctgggaagatggtgactgggaagatggcagctgagaatatggcagctgagaagataaaagaggaggctggcggggggcggttaaagaagatagttgagagggagaggtaggggttgggaggggtgggcagcagtctgctggatcgatggaggaaaaagaggtaggattgggaggagaaaggcgatctgggcagcgagaatggaggagaaagatttgaacaggtgagcaagaattgcagaggtcaggttgtgatctgagtgcaaaaaggcccggacctaaggaatttctccccatttctccagtcgtcatcaataattgcttaaatcagttaaaattgtaaatttggatgttccatttgtgggccattttgacccattatccaattcgttttgtgcccagactgaattgcataaaaagacaaggcgcttaaggcagatatcttgcttgaggcc

SEQ ID NO: 9735 - DNA, 1110 bp, Artificial sequence
  DNA replication origin
ggcggcgaggtcacccgcttttaccagcctgctgcaccgaatgcgcgcggtgcaggtgcggcggccgcggggctttgtgattcatgcccactttcaaaggggggcttgggcccgtctgagaggcacccaaacaactgtcttctaatattagcacggctgtatttcgggatctattatagtctgtccagacagatcccattgtaatgggatcttttattaaaagattagcactatctcctgcagttggtggaaaaaaatctgttatcactgagttatttgcagttgtggaggggggaaggttgacggaagatggggggtgggagggctagaggaggactgggggagggtctggcggggggagggcagttgcagggggggaagaagggcagatttgaaattcgtagaacaaatcccagtgacctgcgaatgtccaagaattttgtctgcatacttcgctatctgttgtccttcgggcttcagatgcgaaaagaacaaatttaaaaggcagctttggaataaacaatatagcattttccgtgaagtaatcgttttatataaaaggaaatatcgcctcctcagtttcattcagcggtgccaaaaatgttataaatgagagacccgccaactttcagcgaagaatgccaggcactgtacttaataaactgaggctacagaagttcattatggatgttgcaatcttttttattccgcgaaaagagagaagacgagacagaaagagagagagattggagccgaggagactgagagacagacagaggcacacaggacagaaactggggagtctccaggcgggagaggaagggggggccagaccgcctacgtcggcgcccccgctccgggctccgactccagacgccgcgaagtgaaaggggagaaaagaaagggagagggcgaggctgtgccgcggggagaccgggcctgaggtgttaaacatttttgtttgcttccgactagtccagacgaagggccgcgtctcggtagcgctctgccagggtggaaggtgccggggccggggttcctagcaacacctctgggctgggggtggctgcaaagtcaggcactcacagacccagacacaaaacctcgcgg

SEQ ID NO: 9736 - DNA, 905 bp, Artificial sequence
  DNA replication origin
gaactcgacgattcccttccagccgttttgatttcgggcacctccgaaagataattgggaagggtttccagaaggtgggaaatgtcacctgattcacactgaacttttgaaagctccccacccccaaggagccgcgcacaccctcgctcgcggccgccctcccacagccccacacactgggagaccgcccaccgcaaaccgcggagacccccgtctagatttaaagcgcggctgcgcccggcttctgacgtccattgaatcgcgcgggcggccggcggcgagcgcggggctgcgccgggatcgctgcgccctccgccgctggcctctgcgacgcgcgccgctcgcccgagccacccgccgccgcgccggctccccgcgccgctgcgctcctcgccccgcgcctgcccccaggatggtccgcgcgaggcaccagccgggtgggctttgcctcctgctgctgctgctctgccagttcatggaggaccgcagtgcccagggtaagcgagtggggatgcgctggggaggcttggctgaggacaggggggtcgacttttctgtggtctccacttggtctgttctgagcaacgctgctctcggaagatgttgaaccaacttggggactccgggatggagaggagtgggaaaattgtaggcaatgacactttaggactgggaactgagtttggagctcggttatcttgaaaaaggaaagggagcgagctggggtcttagtagttagggttaaatgctccaagttctggccatgataactttagatgtgatctcctctgtttggctctgaagaagggaacaagtatcagtagtagcctggagatttcagtcgacccatttgcagtctcatctctctccctcccacatcttttggatacttaaaaaaaaaaaag

SEQ ID NO: 9737 - DNA, 986 bp, Artificial sequence
  DNA replication origin
tctcattaaggagcacaggttggtgggtttcaccaccacacttggctaagaagtctggcgtgtattccctacagcctgtaacaggcagaattagagtctgcacggcttaccagggcaagggacaggaaggggaagcccaggaacaaagctctcctactcccaaaccccagtcaggtagtggggaagctaagggtaagacgccctctactgagggcctgcaagttgggaagaaggagtcctacctttacaggggatgcagttgggggcgcccccgttgaaaatcatccacttgaagagtgtgttgtcattcacgtcctcctcggtccacgaggtgctcagccggccggtgctgcagcactcctccttgctcagttcggtcttgtacaggacctggcagcggccgttcttcgcttgacggagccagcagttcccagctgtgaagagacaagggtggggaggtgggtgagtgagcagtgagcggtggcagggcagggagagcgaggtggctagcgaaggagacccggcggggatggggagggggtgagcgtggaggaggggaagtgagagagacgcgggagaaaagtaggaaataaatcgaaaggggtggaggggtggaaaaagaaggcagtggagggggaagccctgatcacagagatgggaggtgggcgagagggagggagggagagagggagaagacagggcgccccagccatatcaatgtcagttaccagtgacccagacacaacacgtgcagcttgcattgacttttactagactgtttacttttattcgtcccatttcataacctgcagagactcgaagagcagattaaagaacctgacaaaaacaggatgcgacggatgtttttacatgctggtttcatgtaggcgggtacaggaattatttgtgacaggggttaagaaagtaagagaacgagagagaggagagaggagagatggaggggagagagagggagaaggaaagag

SEQ ID NO: 9738 - DNA, 1221 bp, Artificial sequence
  DNA replication origin
agcacatcttgcaccgcccttaatccattcaaccctgagtggacacagcacatgtttcagagagcacagggttgggggtaaggtcatagatcaacaggatcccaaggcagaagaatttttcttagtacagaacaaaatgaaaagtctcccatgtctacttctttccacacagacacagcaaccatccgatttctcaatcttttccccacctttcccccttttctattccacaaaaccgccattgtcatcatggcccattctcaatgagctgttgggtacacctcccagatggggtggtggcctggcagaggggctcctcacttcccagaaggggccgccgggcagaggcgccccccacctcccggacggggcggctggccgggtgggggctgaccccccatctccctcccggacagggtggctgccgggcggagatgctccccacctcccagacggggcggctgccgggcggaggggctcctcacttctcagttggggcggctgccgggcagaggggctcctcacctcccagatggggcggctgccgggcggaggggctcctcacctctcagacggggcggccgggcagagacgctcctcacctcccagacggggtcgcagccgggcagaggcgctcctcacatcccagacggggcggcggggcagaggcgctccccacatctcagacaatgggcggccgggcagagacgctcctcatttcctagatgggatggcggccgggaagaggcgctcctcacttcccagactgggcagctaggcagagacgctcctcacatcccagacggggtggcggccgggcagaggctgcaatctcggcactttgggaggccaaggcaggcggctgggaggtggaggttgtagcgaacagagatcacgccactgcactccagcctgggcaacattgagcactgagtgaacgagactccgtctgcaatccccgcacctcgggaggccgaggctggcggatcattcgcggttaggagctggagaccagcccagccaacacagcgaaaccccgtctccaccaaaaaaatacgaaaaccagtcaggcgtggcggcgcgcaccggcaatcgcaggcactcggcaggctgaggcaggagaatcaggcagggaggttgcagcgagccgagatggcagcagtacagtccagcttcggctcggcatcagagggagaccgtggaaagagagggagagggaga

SEQ ID NO: 9739 - DNA, 876 bp, Artificial sequence
  DNA replication origin
gaaatgaggagcgtctctgcccggccgcccattgtctgagatgtggggagcgcctctgccccgccgccccgtctgggatgtgaggagcgcctctgcccggctgcgaccccgtctgggaggtgaggagcgtctctgcccggccgccccgtctgagaggtgaggagcccctccgcccggcagccgccccatctgggaggtgaggagcccctctgcccggcagccgccccaactgagaagtgaggagcccctccgcccggcagccgccccgtctgggaggtggggagcatctccgcccggcagccaccctgtccgggagggagatggggggtcagcccccacccggccagccgccccgtccgggaggtggggggcgcctctgcccggcggccccttctgggaagtgaggagcccctctgccaggccaccaccccatctgggaggtgtacccaacagctcattgagaatgggccatgatgacaatggcggttttgtggaatagaaaagggggaaaggtggggaaaagattgagaaatcggatggttgctgtgtctgtgtggaaagaagtagacatgggagacttttcattttgttctgtactaagaaaaattcttctgccttgggatcctgttgatctatgaccttacccccaaccctgtgctctctgaaacatgtgctgtgtccactcagggttgaatggattaagggcggtgcaagatgtgctttgttaaacagatgcttgaaggcagcatgctcgttaagagtcatcaccactccctaatctcaagtacccagggacacaaacactgcggaaggccgcagggtcctctgcctaggagaaccagagacctttgttcacttgtttgtctgctgaccttc

SEQ ID NO: 9740 - DNA, 989 bp, Artificial sequence
  DNA replication origin
acatcttgcaccgcccttaatccatttaaccctgagtggacatggcacgtgtttcagagagcaccgggttgggggtaaggtcatagatcaacagcatcctaaggcagtagaagttttcttagtatagaacgaaatggagtctcctatgtctacttctttctacacagacacagcaacagtctgatttctctatcttttccccacatttcccccttttctattcgacaaaaccgccattgtcatcatggcccgttctcaatgagctgttgggtacacctcccagacggggtggtggcctggcagaggggctcctcacttcccagaaggggcggccgccgggcagaggggctcctcacttctcagacggggcggctgccgggcggaggggctcctcacttctcagacggggcggccgggcacagacgctcctcacctcccagacggggtcgcggccgggcagaggcgctcctcacatcccagacggggtggtggggcagaggcgctccccacatctcagacgatgggcggccgggcagagacgctcctcacttcctagacgggatggcggccgggaagaggcgctcctcacttcccagactgggcagccgggcagaggggctcctcacatcccagacgatgggcggccaggcagagacgctcctcacttcccagacggggtggcggccaggcagaggctgcaatctcggcactttgggaggccaaggcaggcggctgggaggtggaggttgtagcgagccgagatcacgccactgcactccagcctgggcaacattgagcactgagtgaacgagactccgtctgcaatcccggcaccttgggaggccgaggctggcagatcactcttggttaggagctggagaccagcccggccaacacagcgaaaccccgtctccaccaaaaaaatacgaaaaccagtcaggcgtggcggcgcgcgcctgcaatcggaggcactcagcaggctgaggcag

SEQ ID NO: 9741 - DNA, 1310 bp, Artificial sequence
  DNA replication origin
gctcgctgcacaggctcagcacctcgtgctctcgcagcgagatctctcctgggttctccgacctgaagtcgtacagcgcccgggcgcgcagcgccatggtcccggcgccccgactggcggtcccgactcccggcgtcccgagccgaggcccacctgaggggcccgcggtactgctcgagccctggcgcgcggactggagccccgaaggcggcaaacccacgctgcccggaccagccggtcgcgccctccgcgcggctccgctcgcagcgcctccacttcgcagcgccgactgccgcgctgggccgccgcagccgccgccggtcgggggcggggcccgcggcctcccacgtctccagctgcgctaatccacggccgagagccccttgccaggcgagagcaagcgatggccgagccgccgagcccaccgcccgcgtcggctttgcggcggccactgccctctagtggccggtgccgcgaagccgggcgccgtagtgagcgcggctgaaggaggtttctactccgaagtgaattatctgagatttctttaggcttttaagttaaacattctctagaaagtaagttagcatttgcatgcctgataaacgttcccactctgagcgctcagtgaatgctcctagaatggcaacccagtcatgtaataaagcattttgcaatgcgaattagtgattgcactaagaaaacaggatgcctctgcggaggagctgttcacctacagagcaggctcccttccctcttctgctcaaggagaggagattggcaagaacaaagtaagggccagggaaggtgctgtgattgacaaaattagaagcaaaggatcatgtagagagggaggagctggagagtttccagtacaataaatgctcacacatttattacatgcatgtgtcgcctatcctcccatagatatatgtagtgcggtgaatgagagctcaaacttcggagccaggcttctgaatttcaatctgtgttctgacactacctagctgtatgacctggaacaaggcacttatatcgtacctacctccgggggttgttgtggggattccatcataaagtaatccctattttacagatgaggaaagtgaaacaatatctggcagggtaagcagatttgaagggtttgttgctgcttttgctgctgttactgttatttgggggaagcaaaatccctggcctctttcacaaagggaataggggtactaaactaacaattgcagggtacatgcaccaggaagcgtcccaatgttcacattgccactcctagtaagaggtcagtgaccatccatcca

SEQ ID NO: 9742 - DNA, 1781 bp, Artificial sequence
  DNA replication origin
cggcgaccgcggcctcttcccggcctcctatgtgcaggtgatccgcgcccccgagcctggcccggcgggagacggcggcccgggcgccccggcccgctacgccaatgtgccccccgggggcttcgagcccctgcctgtcgcgccccccgcctccttcaagccgccgcctgacgccttccaggcgctgctgcagccacagcaggcgccgcctccgagcaccttccagccgcccggcgcgggcttcccgtacggcgggggcgccctgcagccgtcgcctcagcagctctacggcggctaccaggccagccaaggcagcgatgatgactgggacgacgagtgggacgacagctccacggtggcggacgagccgggcgctctgggcagcggagcatacccggacctcgacggctcgtcttcggcgggtgtgggcgcagccggccgctaccgcctgtccacgcgctccgacctgtccctgggttcccgcggcggctcggtccccccgcagcaccacccgtcggggcccaagagctcggccaccgtgagccgcaacctcaatcgcttctccaccttcgtcaagtccggcggggaggccttcgtgctgggggaggcgtcaggcttcgtgaaggacggggacaagctgtgcgtggtgctggggccctatggccccgagtggcaggagaacccctacccgttccagtgcaccatcgacgaccccaccaagcagaccaagttcaagggcatgaagagctacatctcctacaagctggtgcccacgcacacgcaggtgccggtgcatcggcgctacaagcacttcgactggctgtacgcgcgcctggcggagaagttcccggtcatctccgtgccccacctgcccgagaagcaggccaccggccgcttcgaggaggacttcatctctaagcgcaggaagggcctgatctggtggatgaaccacatggccagccacccagtgctggcgcagtgcgacgtcttccagcacttcctgacgtgccccagcagcaccgacgagaaagcctggaagcagggcaagaggaaggccgagaaggacgagatggtgggcgccaacttcttcctgacccttagcacgccccccgccgctgcccttgacctgcaggaggtggagagcaagatcgacggcttcaagtgcttcaccaagaagatggacgacagcgcgctgcagctcaaccacacggccaacgagttcgcgcgcaagcaggtgaccggcttcaaaaaggagtatcagaaggtgggccagtccttccgcggcctcagccaggcctttgagctggaccagcaggccttctcggtgggcctgaaccaggctatcgccttcaccggagatgcctatgacgccattggcgagctcttcgcggagcagcccaggcaggacctggatcccgtcatggacctattagcgctgtatcaggggcatctggctaacttcccggacatcatccacgttcagaaaggtaaagcctggcccttagagcaggtgatatggagtgtattgtgcaggctgaaaggggcgactttgacagcagtaccactgtgggtttcagaatcatattctacaggtgaggaagcgagcagagacgtggacgcctgggtcttttccctagagtgtaagttggattgctcgacaggcagcttcctcctcgagtatcttgcattagggaatgagtactctttctcgaaggttcaaagagtacctttgatgacagtgctatcattttagagtttgaatagttgagtaatgagctgct

SEQ ID NO: 9743 - DNA, 1271 bp, Artificial sequence
  DNA replication origin
caggtcctgccctggaggcgccagccgcaccgaccgggagatggaagtttttcgcggcggcgccccagccacttcgcagggccgagcggtctcctccaccggccgcccggctcaggaatgccctgcctgcgagtcaaagtcggggtcgcggcggggcgaacctggcccagcattgcctggggccctcaggagcgccgagggggtctccctgccagcgccctcctccccgctcgcccaccctctccaagcgggctccgcgcggccggggatgggacgaggaggggaagtttggggcgcgtacctcctagcgccccgcagaaccccaggcaggcagccagtaggacgaggcggcgggccccgaaccgccccatcccgccgcggcggccccgcgtcccgcgctcactccccagcggcggccgagctacctgcgccgccgcgacccggagcccggcaagggggcgccgccccccaacatctcgggggcagggccggggcggggagagccatttgcatcctgaagctgttgcgccccttcagcgcaaggagcgggctgggcctttaccccgatccttaccccccgccctccgctggtagcatcaaactggcctggtggcacctaagtaagggggcagagagtaaacggcccctgccccacccggccgaaatctgcgatggagggaagtgtgcatgtccgagcaggtgattgtgacaagtcaagagtgagggcagcaggctggagggttgggaggaggcagaaggattcctggagaaggtaggacagtcatccggccttgaggcaaccgcttcccctgaccagggtgagcttcaggagggcagagggtttgtttctctcatttctatatcctcagtgtctgcctggcgcatagcatcagtaaataggtgttggatgaatatgaatggaaggagagaagacaacctaatcattccttcttaaatgtgagtctgatttttgtttctttgaaagcacggcccctaaattattccactgaatttttgaagcaactctatcagaagacccaagagtccccacccggtggatatcgcccctgagttttggtacgtgatcatagagaagaaaagcctccactcaggtctgcggctactggtaaaaattaacgtaagcagggcctgaagaggatagtgcttgacggggatgcgccagggaccttctagaatctgctcctctgggcaacatttctttcagttgtgttctctgcaacatgggtgtttatcaaaatgccaacacgtgc

SEQ ID NO: 9744 - DNA, 1081 bp, Artificial sequence
  DNA replication origin
cttctgaaaacgaagagctgacgaacacgcctcacatctatagctgacacagcgattaccaacggacagaggccggagagctgtgcacgctcggatcctgcaaaggcagggtgtggttggagaaagagaagtgggtgcagaggaacagggatcagggccgttataaggaaacattcttgtttctgaaaatggaaagatcgtgaactcccagaacccgcttcttcgcccgccaacccctccgcctcctgccgcggtggcagcccccggcgccaggcccagccgcaggcccgccacggctcgcggcaaagcttggcgcccgggtgcgcgcctcggccggaggcggtggcggggcggggcccagagagggccggcaggggcggggccgcggcgcgcgccggggaatcccacccgggctctgacgacaccgcggcgccggccaataagaagccggcgagggggattcccgcgccgactgccgccccgccggctttttaaatggtaccctggggaacaccttgcagcggcggtgggaggagtgggggacctggagggaggtggtgaaatagaatggtcctgggggacgggactccaggggtttgacgattaggcgtcaagactgacttagacctgggaagaaaaccagaggcagtcgagcagagaggccaaacgccaggcagggcgaagtcagccggagatggagtggaaactggagcgcaccgcgcctcggagggtccgcacggaagaggagatgctgtgggtgagtaacacccttttctgcattctccctaactctctaatgcggggccgaaggccccgttcataatatctgtttaggaccaagaggtggtacgaaactctaagccctggtcgtaaatttgagtgatgtaatttagttatattctgaaggtgcctagttgccaaaaaaaaaaaaaaaaaaaaaaaaaagtgtaatctgacaagcacaagatctagaaaaattccacacctgaaattatgattttcctaaatagtttctccctcaatatgttatctgtgttttcaaaggaaagtatcatgcgtgtgctctccaaagacttgaagc

SEQ ID NO: 9745 - DNA, 1200 bp, Artificial sequence
  DNA replication origin
agcagcgcccggcccggcagtgccagcattctgttggggcagatgctgtcgaaggcccgacggccggccgcgccgcccccgcacgcctgcattgtgcctcctgcctccgggtgccgactgctcggaggcggcggcccgggctggggcagcgatccacaccctgcactcccttcagtgcctgcaggctccgaagccagccagaggttggggcaggcgcgtgaccgagaaggagccgaggggctgccgaggaggtgctgagagatggcgggggagggggaggaccgccgcgcgggaggggtggcttgcgcctgagcgccagaggtggcgccttcagcccgggacaatctgcgcgcgggcggaggcgttaaacccaacctggcaaccgggcttcccccgggagccgccagcgcggggccccggcccgccagcgccgtttcggcgagctttggcgccgccgcctcccggacgcgccaggcgaagagagggagaaggaggggcgggcaaacgccggtctccctcgccctgggtaccgtcttcccgcttacagacagggggaatggcaaagttaacgattatttccttttcttcccactccagccacaaggcgcacgaaataaacgtggagtgacacccgccagcgctagactccggcctttgcgctcctgcaggatttagtaaggatgtagaataccggcagggatgccctggaacagcccccttattacagaagccccttccctcaaacctgaaccttatcctgggtcctgacttatggatttccacgtggtctcttttggcctgacgccaagagcccgccccgctccccaagccccgcactcttctcggcagtggcgcgtgagcacagcctttaaaagaccgtccgttaagaaaaagtgacactacgaaccctcctccactttctgaaaacgccacagtggaaagtaccgaatccccgaaaaccctgttcctgtctttcctagtggcctcagcggcccatcgccacgtttggctggtctcttcgcagtcgtagttgccattcccaagccaacacctctccaaggaatgggcattttcctgagtccgaggcatctcctagggaggggcatccttaggcgagggacctttctcagtaccactcatattcatccaatttgaacagtcgtctgaaattggaatctttgtgtacccacccccctatgt

SEQ ID NO: 9746 - DNA, 972 bp, Artificial sequence
  DNA replication origin
gcttccacgtaagtgacctagagcgtacttccagcgcagttgatctaactactgtccaactaaaaaaaaaaagcttgggaaattttgaaggctttttcggaggctagactagaggtgccaaaagagctatttgggactgattacagctattagtctattaggctatttctttggaagccgagtgacaggatttttcgtttgtggagaaattgtgaagttaaggctaagggatatatgcgtatgcaaatgtctgataaaatgagttctgggaacccagcactgaatcgtgcgcgctggaaagacgggcggccagggagtggcgggggagtttggctgcgtccccagatgccgcgtgtacctgtttgataccccaggtacctgtttgcaagcgatgagcaaggaggtgaccccaagcagctggaagcagtctgcagccaccggcgtggtggtgaggaagcggtccagagtgttcaccgtcaggcacagcgactcgaaggagaggccgaattggcggtgcaccgggatcagccagctgagcagcttacagcgggattccgccgtcacctgccgggaaggaggggggaggcgggcccgctgggcttagggtggagagggactgtggaagggaaggaagggccaagaagaatcggggagcttcccaggagaggggcaagaagatttcagaaagagaaacgcaatggaaactgggaaacgcgtgggccgtgctgagccggaacaccgggattgggacctggcgctgtgcagagagcgtcgtacacgttacctcgcgtaatgggctcagcaattcaaaggaaggggaggggttccattttgcagatgaagaaagaagctcaggggtgttaaataacttgcccgagttcggtaggagtccagactcaacccggaaacgaattcctctctaccgtgccccagtagccagcttgggacggggcaagtccctcaagccgtcta

SEQ ID NO: 9747 - DNA, 1402 bp, Artificial sequence
  DNA replication origin
cggcggggctcgaggggctggtgggacagggggtcaccatgatgcggccgggtggccgctttactaccttcaacgcccgggctgcggcgggcagcaaacgcgcactcgaaagtgcgaaggaggccgggctcagaggctggcgcggtcctaagtacccggccggctccttctctctaccacacccccggcctctcactggctgagcccagagcggcaccggagccgcgattttccggctggagaaccactcgcctcagggcgcaggcagcgcgtcgcctccgcggcccgccggggggagggggagctgcagcgcgcgccaggcacccgcctttcgcgcctgcgtcctgcgttacctgggcaaccggagcccgggtcgctgcgggagcccgggtcactgcggagcccgggtcactgcggagcccggtgcacggagtgggagtagggctgcggcgggcgcagccaagcggctccgctgcgccggttaaaacattctcccagggggcatctctctgtccttggccagatggtctcgacacgtgcgggcacctctaacccaggtcggtaattttgtaaaggtctgatcctgagttccaaacgaaagtcgggctagaattctgtcgacacgggaaaagttttcttcagtgacccaaacaagcaatagtgttaattcggttgcgtttgtcggttttgtttcggtgggtaccggagtagccagtgcccttccttccgccagcctcggggagcagagcctcagaagggccgtttgtgctgcggaatagattggagctccaccagccagccacgctttcgcgctcaaaacaaaacggaaaactgccggatcaacctcagtcggcaagcaagtctgcaggccgtgaagactttctcccacacttttcaccccaagccaagcaagctggggctacagcggtttaagaacattgttggaaagttgcatttcgagtttgatcgaattgctcacagcctgttccgttttaggtcattagcttctggccttctgccccgccggcagcccagtccttggtttttccctgcttcctgcgtccgctccttcagggtgataaactcagggaaattaaagctggaatggggacgcccaggccgaccgggcgtggcagtttcctcaaggcgcctcgggtttagtccacagactcccgtcctggtagaagctggagcccttctgtggcctgagtgaatcttcctgagggtctctgaccctataggagaaggggctgcaggagcacaagtagcccataatcaacctcacaggcacttagcaacggcagaaagctcaggtaccctcaaccctggtgttttccagaggcgaggctactgggtgccaaaccaagagcaggttcagccacctaacctcattccagaagaa

SEQ ID NO: 9748 - DNA, 1040 bp, Artificial sequence
  DNA replication origin
ttcttggctgggtgcggtagttcatgcctgtaatctcagcactttgggaggccgaggcaggcagatcacctgaggtcaggagctcaagaccaaactggccaacatggtaaaaccccatctctgctaaaaaaaaatacaaaaattagtctggcatggtagcatgtgcacctgtaatcccagctactcaggaggctgaagcagaattgcttgaacccaggaggtggaggttgcagtgagcagaggtcgtgccactgcactccagcctgggcaacagagagaggctgtctcaaaacgaaggagaggaaggggaggaaggggaggaaggggaggggagggaagaggggatgaaggggaggggagagaggaggggaggagagggggcaggggaagaagtagaggggggaggaagtagaggggggaggaaggggggggaggaatgggagaggagggagggaggggtggttcttaatttcttggggattatggacctccttaagactaatggaacgggtgcggtggctcacacctgtcatctcagcactttgagaggtgggtggattgcctgagatcaggcaattttgtttaaaaacacaaaaattaggccgggtgtggtggctcacgcctataatcccagcactttgggaggctgaggtgggtggatcaggaggtcaggagtttaagaccaggctggccaagatggtgaaaccccgtctctactaataatacaaaaattagccgggtgtggtaccaggtgcctgtaatcccagcaacttaggctgaggcagagaattgcttgaacccaggaggcggaggttgcagtgagcagacagtgtcctactgcactccagcctgggcgacagagactctgtatcaaaaaaaaaaaaaaagccagggatggtggtgcacgcctgttgtcccagctacttgggaggctgaggcaggaggagaagcgcttgaacccaggagatggaggttgcagtgagccgagattgtgccactccactccagtctgggagacagagcaagactccatctcaaaa

SEQ ID NO: 9749 - DNA, 1223 bp, Artificial sequence
  DNA replication origin
cccggcaagggcgatggactgagctgcgggacggcggccgaggcccttgattctcgagcccgggccggggctggcgacggccccgagctacggcccctcccagccggaggaggagagcagccgagggcgggctgagaccgggcggcgctcccaccgccagcaatggcgcccggggccctcccctcacagcccccgcgaacactcggttagtgccgaggcgctcgtgtgccagccgcggcagctctgtagcctcaggacctcctcagccggcacggcctgccccggttgctccccgtccggatcccggcgctctctcccacaggcggggcgtccagactctcgctttaaggatggggaccggcagggaggaggaacgcggggtccagcccctcccgctgagcagcgcaggaccgggcagcgcgcgggttcgcgggcggggggagtgcagcaggggcggggccagggaaaccccaggccgcggcggtcagccaatcagcgccgtcggcctcatccctcccgacctgcggcatccgcccagaagtgcggctctcggcagccgggcggggcgtgggggcggctcccgttccgatccagggggctttgctctggaccgcaattgctcaggtggtctccgaactcggcctcggtacccccactaggcattgctgctttcagagagctaggctccctacccaacgatcctagagcaccggctgcctgccactccccaccccttccatggggatgaggtaataaacaggtcagattgttaccactgagtttaaggggggaaaagaggtcagagtaggcaggaacagagacgctctcctttagtttggtacctctgagccctttctcacttaggcctcaacgttgacctccctgtgtcctggctgagcccaaatgttagcaagaagcatgctaaatcatccatcctcgatacctgatcaccgttgaattcttgatatttaatatcggattagattccttatattacacctttgttgtagaagcccttgacctgcctttagccagaatccctctacccttgatgtctcctcttagtaattttccatccaccgtcacctccctcacagacacggtgcctgttccttggctataaatcccctgctgtctttgctgtattctgagttgagctcaatttctctctcctgttccaatagtcatgacccttattgtaataatcttgaataaattattca

SEQ ID NO: 9750 - DNA, 915 bp, Artificial sequence
  DNA replication origin
gcccgtccgggaggtgaggggcgcctctgcccggccgtctctactgggaagtgaggagcccctctgcccagccagccgccccgtccgtgagggaggtgggggggtcagccccccgcccggtcagccgcccggtccgggagggaggtgggggggtcagccccccacccggccagccgccccgtccgggagggaggtgggggggtcagccccccgcccggccagccgccccgtccgggagggaggtgggggggtcagccccccgcccggccagctgccccgtccgggaggtgaggggcgcctctgcccagccgcccctactgggaagtgaggagcccctctgcccggccagccgccccgtccgggagggaggtgggggggttagccccccgcccggccagccgccccatccgggaggtgaggggcgcctctgcccggccgcccctactgggaagtgaggagcccctctgcccggccaccaccccgtctgggaggtgtgcccaacagctcattgagaacgggccaggatgacaatggcagctttgtggaatagaaaggggggaaaggtggggaaaagattgagaaatcggatggttgccgtgtctgtgtagaaagaagtagacatgggagacttttcattttgttctgtactaagaaaaattcttctgccttgggatcctgttgatctgtgaccttacccccaaccctgtgctctctgaaacatgtgctgtgtccactcagagttaaatggattaagggcggtgcaagatgtgctttgttaaacagatgcttgaaggcagcatgctcattaagagccatcaccactccctaatctcaagtacccagggacacaaccgctgcagaaggccgcagggtcctctgcctaggaaaaccagagacctttgttcacttgtttat

SEQ ID NO: 9751 - DNA, 1140 bp, Artificial sequence
  DNA replication origin
cggacgggcggctggccgggcggggggctgatccccccacctccctcccggactgggcggctggccgggcggggggctgacccccccacctccctcccggacggggcggctggccgggcggggggctgacccccccacctccctcccggacggggcggctggccaggcagaggggctcctcacttcccagtaggggcgggccgggcagaggcgcccctcacctcctggacggggcggctggccgggcggggggctgaccccccccacctccctcccagacggggcggctggccgggcggggggctgaccccctcacctccctcccggacggggcggctggccgggcagaggggctcctcacttcccagtaggggcggccgggcagaggcgcccctcacctcccggacggggcggctggccaggcggggggctgacccccccacctccctcccggacggggtggctgccgggcggagacgctcctcacttcccagacggggtggctgccgggtggagaggctcctcacttctcatacggggcggctgccgggcggagggtctcctctcttctcagacggggcggccgggcagagacgctcctcacctcccagacggggtggcggccgggcagaggcgctcctcacatcccagacgaggcggcggggcagaggcgctccccacatcccagacgatgggcagcggggcagagacgctcctcacttcctagatgtgatggtggccgggaagaggcgctcctcacttcccagatgggatggcggcggggcagagacgctcctcactttccagactgggcagccaggcagaggggctcctcacatcccagacgatgggcggccaggcagagacgctcctcacttcccagacggggtggcggccgggcagaggctgcaatctcggcactttgggaggccaaggcaggcggctgggaggtggaggttgtagcgagccgagatcacgccactgcactccagcctgggcgccattgagcactcaagaccatttctatgtattttattttttcttacattttctcattggaagtctatttatttttgcctgttttgtaagcagctactttattgaattctcttactgtttataatttttttgtggattctt

SEQ ID NO: 9752 - DNA, 888 bp, Artificial sequence
  DNA replication origin
gaacattccgctctttccgcccacagaggggaggtggggggaacccttcgatctagtctgggagaggcgacgcggacgcagccaccggaatccgggacgcgaagagccgcgttacgggaatcgctacccctcggagtcccgccccctcgtcgacaggcggccactggaccaatgcctgggcgcaaagggtctctcaggggccaatcagcgcctaggtcccggtagggggcggggcgcagcgttggccggccgggggcgcagctgggcgggattggggagcgccccgccccgccgcgggactggggtggcgcgctacctctgcggagaaggatctgacagtgttccggagccggggcgagcagccaaaaggcccgcggagtcgcgctgggccgccccggcgcagctgaaccgggggccgcgcctgccaggccgacgggtctggcccagcctggcgccaaggggttcgtgcgctgtggagacgcggagggtcgaggcggcgcggcctgaggtgaggaggggccgggtgctgggtcgcgtagctggagttagagtgtcggtggtttcggacgggctatctggcactcgaggagacctcccttccccctgagagcagcgcccggaacttgtcagcccagcctggaaatccccacattccttccccttcctgctcccggacctccgaattctacttccacaactttgtcacctcgattatcgcagccctgagtacaaacttcacccaggcgcacgcacgcacccctcttaacgcccgccccgcagaacgcccttcaagaacaaacccccctttttgttaccagatcccacgtttttcccaatccccttttcatctcccctgaaattctattcgctccgcacttgtcttcattc

SEQ ID NO: 9753 - DNA, 980 bp, Artificial sequence
  DNA replication origin
cccggccagccgccccatccgggagggaggtgggggggtcagcccccaacccggccagccgccccgtccaggagggaggtgggggtgtcagccccatgtccgggagggaggtgggggggtcagccccccgcccggccagccgccccatccgggaggtgaggggcgcctctgcccagccgcccctactggggagtgaggagcccctctgccgggccagccacgccgtccgggagggaggtggggggctcagccccccgcccggccagccgacccgtccgggaggtgaggggcgcctctgcccggccgcccctactgggaagtgaggagcgcctctgcccagccagccgccccgtccgggagggaggtggggggggtcagccccccgcccggccagccgccccgtccgggagggaggtgggggggtcagccccccgcccggccagccgccccgtccgggaggtgaggggcgcctctgcccggccacccctactaggaagtgaggagcccctctgcccagccaccacctcgtctgggaggtgtacccaacagctcattgagaacgggccgggatgacaatggcggttttgtggaatagaaaggggggaaaggtggggaaaagattgagaaatcggatggttgccatgtctgtgtagaaagaagtagatgtgggagacttttcattttgttctgtactaagataaattcttctgccttgggatcctgttgatcggtgaccttacccccaaccctgtgctctctgaaacatgtgctgtgtccactcagggttaaatggattaagggcggtgcaagatgtgctttgttaaacagatgcttgaaggcagcatgcttgttaagagtcatcaccactccctaatctcaagtacccagggacacaaacactgcggaaggccgcagggtcctctgcctaggaaaaccagagacctttgttcacttgtttatctgccaaccttccctccact

SEQ ID NO: 9754 - DNA, 1849 bp, Artificial sequence
  DNA replication origin
ggcggctggctgggcagaggcgctcctcacttcccagtaggggcggccgggcagaggcgcccctcacctcccggacgggtcggctggccgggcggggggctgagccccccacctccctcccggacggcgtggctggcccggcagaggggctcctcactccccagtaggggcggctgggcagaggcgcccctcacctcccggatggggcggctggccgggcggggggctgacccccccacctccctcccggacatggggctgacacccccacctccctcctggacggggcggctggccgggttgggggctgacccccccacctccctcccggatggggcggctggccgggtggggggctgactcccccacctccctcctggacggggtggctggccaggcagaggggctcctcacttcccagtaggggcggctgggcagaggcgcccctcacctcccggacagggcggctggccgggtggggggctgacccccccacctccctcccggacggggcggctgccgggcagagggactcctcacttctcagacggggcggctgccgggcggaggggctcctcacttctcagatggggcggatgctgggcggagggtctcctcacttctcagacagggcggctgggcagagacgctcctcacctcccagacggggtcgcggccgggcagaggcgctcctcacatcccagacggggcggcggggcagaggcgctccccacatctcagacgatgggcggccgggcagagacgctcctcacttcccagatgggatggctgccgggaagaggcgctcctcacttcctagatgggatggcggccggtcagagacgctcctcactttccagactgggcagccaggcagaggggctcctcacgtcccagacgatgggcggcgaggcagagacgctcctcacttcccagacggggtggtggccgggcagaggctgcaatctcggcactttgggaggccaaggcaggcggctgggagatggaggttgtagcgagctgagatcacgccactgcactccagcctgggcaccattgagcactgagtgaaccagactccgtctgcaatcccggcacctcgggaggccaaggctggcggatcactcgtggttcggagctggacaccagcccggccaacacagcgaaaccccgtctccaccaaaaaagtacgaaaaccagtcaggcgtggtggcgcgtgcctgcaatcgcaggcactcggcaggctgaggcaggagaatcaggcagggaggttgcagtgagccgagatggcagcagtacagtccagcttcggctcggcatcagagggagaccgtggaaagagagggagagggagaccgagagggagaggggagagggagaggcagaggcagaggcagaggcagagccatctaatggttttataaaggggaattcccctacacaagctatcttgcctgctgccatgtaagatgtgactttgctcctcctttatgtgaggcctccccaggcttgtggaactgtgagtgaattaaacctctttcctttataaattacccagtctcaggtatgtttttattagcagtgtgagaacagactaacacagaaggtggtgacaatttgggatggagtagtcagggtaacttttatgaaggagggagtgaataagactttgaaggatgggtgagacttgactaaatgagaagggatgggattgaaagcagaaatgtcagaagagatgatattgtgggagaaggtctagtgcaaagataggttcaaaacaagtgagagtgagcactggtgtgttagtatgctttcagctatttgaagtagaaatggcttaaaccaatta

SEQ ID NO: 9755 - DNA, 1628 bp, Artificial sequence
  DNA replication origin
tattacaattttattttttaaagttttgccagtttgctgttgtttttgtggttgttttcacataggcatactcatttcttgctaggattatttctgtagttttaaatatttttgtattatatttgggcttattactcctattaggttgtttaacttactgatggtatatggaacatttatagattcctggatattttgtatttgatgacactgaagaactttcttaggaattctgaaaggcttgtagttgagccacgctgggttttctgagtacataatccaatcatctggaaaaaacattaatcttttccaaatcattatgtctcttatttctgtttcatgagtatttttagttgctgaaaatgtgtgaaaagtgcactgtctaaagcaatctcttttctgctctcttcactcctacaacaaatacagtgaactgaggatgaggttgggggaggggaagaaggagaggagcagggctggtgcttatctgggaagcgcagaagatgtcttcgggctgcaggcagcagtttctgtagatctaagtgctggccaggggcttcccaaggcagctgtggtctaagctactgatttgctgtatcagcgatctgccaccttccttccccttgttttcttgccctctgcctcagccttgctcctctctccccaacctcccttctcagctctgctcctctctgtctgcttcctcagtagggatatggcagtggccacagcctctgcactgaggagagaacttgtcaacatgttttttgctccagtaggagctcgttcatctgtggccaagatcagaccttggctcagtggcatgggctgcttagtgcacctaccctgatgtaattcctccctctgtccatcttccctgctcccaccttcctttgagccatcatcagctatcaccttgactcctgcaataactttctaaatggctctcctccaatacattcttttcacagggcagtattttaaaaacataaatcagaatacactcccttattaaaaacctttcagtgacttcccatagcacttagaataaacataaactccttaacgtggccctgtgtgattggtctcttccaatctctcgtagcctctttttatttatttatttatttatttatttattttttattgatcattcttgggtgtttctcgcagaggggtatttggcagggtcataggacaatagtggagggaaggtcagcagataaacaagtgaacaaaggttttcctaggcagaggaccctgcggccttccgcagtgtttgtgtccctgggtacttgagattagggagtggtgatgactcttaacgagcatgctgccttcaagcatctgtttaacaaagcacatcttgcaccgcccttaatccatttaaccctgagtggacacagcacatgtttcagagagcacagggttgggggtaaggtcacagatcaacaggatcacaaggcagaagaatttttcttagtacagaacaaaatgaaaagtctcccatgtctacctctttctgcacagacacggcaaccatccgatttctcaatcttttccccatctttcccccctttctattccacaaaaccgccattgtcatcatggcccgttctcaatgagct

SEQ ID NO: 9756 - DNA, 951 bp, Artificial sequence
  DNA replication origin
ggatcacaaggcagaagaatttttcttagtacagaacaaaatgaaaagtctcccatgtctacctctttctgcacagacacggcaaccatccgatttctcaatcttttccccatctttcccccctttctattccacaaaaccgccattgtcatcatggcccgttctcaatgagctgttgggtacacctcccagatggggtggtggccgggcagaggggctcctcacttcccagtaggggcggccgggcagaggcgcccctcacctcccggacgaggcggctggccgggcggggggctgacccccccacctccctcccggacggggcggctggccgggcagaggggctcctcacttcccagtaggggcggctgggcagaggcgcccctcacctcctggatggggcggctggccgggcggggggctgacccccccacctccctcccggacggggcggctggccgggcggggggctgacccccacacctccctcccggacgcggtggctgccgggcggagacgctcctcactttccagactgggcagccaggcagaggggctcctcacgtcccagacgatgggcggccaggcagagacgctcctcacttcccagacggggtggcggccgggcagaggctgcaatctcggcactttgggaggccaaggcaggcgggtgggaggtggagattgtagccagccaagatcacgccactgcgctccagcctgggcaccattgagcactgagtgaaccagactccatctgcaatcccggcacctcgggaggccgaggctggcggatcactcgcggttaggagctggagaccagcccggccaacaaagagaaaccccgtctccaccaaaaaaatacgaaaaccagtcaggcgtggcggcggctgaggcaggagaatcaggcagggaggttgcagtgagccaagatggcagcagtacagtcca

SEQ ID NO: 9757 - DNA, 853 bp, Artificial sequence
  DNA replication origin
tgcaatctcggcactttgggaggccaaggcaggcgggtgggaggtggagattgtagccagccaagatcacgccactgcgctccagcctgggcaccattgagcactgagtgaaccagactccatctgcaatcccggcacctcgggaggccgaggctggcggatcactcgcggttaggagctggagaccagcccggccaacaaagagaaaccccgtctccaccaaaaaaatacgaaaaccagtcaggcgtggcggcggctgaggcaggagaatcaggcagggaggttgcagtgagccaagatggcagcagtacagtccagcttcggctcggcatcagagggagaccgtggaaagagagggagagggagaccgtggggagatgggagagggagagggagaaatagaatcttaattcttttttttttttttgagacaaagtcttgctgtgttgcccaggctggaatgcagtggtgtcgtctcggctcactgcaacctccgcctccagggttcaagcatagaatgtctctcatagcctcttgtaccacctctcctcttgttctctggaacaccgctctgtcttctcttctgtccctggaacataccaagagtgtattcaccctagagcctttggacttgctactcccactgtctggaacatcttctcctagcccttggtgtgtgtgtgcctcctcattattcaggcctcatatgcaatatccatattcccaccctttctgctctcagagtaccctgtttgtgttcttcatggcatttaccataatctgtaatgatcttgtttatttgttcacttatttgtgtctttgccacctggaatgtaaactctatgacagcaga

SEQ ID NO: 9758 - DNA, 1250 bp, Artificial sequence
  DNA replication origin
cacagggttgggggtaaggtcacagatcaacaagatcccaaggcagaagaatttttcttagtacagaacaaaatgaaaagtctcccatgtctacctctttctacacagacacggcaaccatccgatttctcaatcttttccccacctttcccccctttctattccacaaaaccgccactgtcatcatggcctgttctcaatgagctgttgggtacacctcccagacgggttggtggccgggcagaggggctcctcacttcccagtaggggtggccgggcagaggcgcccctcacctcccggacggggcggctggccgggcggggggctgacccccccacctccctcctggacggggcggctggccgggcgggggactgaccccccacctccctcccggacggggtggctgccgggcggagacgctcctcacttcccagactgggtggctgccgggtggaggggctcctcacttcccagacagggcagctgccgggcggaggggctcctcacttctcagacagggcggttgccaggcagagggtctcctcacttctcagacggggcggccgggcagaggcgctcctcacatcccagacgaggcggcggggcagaggcgctccccacttctcagacgatgggcggccgggcagagatgctcctcacttcctagatgggatggcggctgggaagaggcgctcctcacttcctagatgggatggcggtcgggcagagatgctcctcactttccagactgggcagccaggcagaggggctcctcacatcccagatgatgagcggccaggcagagatgctcctcacttcccagacgaggtggcggctgggcagaggctgcaatctcggcactttgggaggccaaggcaggtggctgggaggtggaggttgtagcgagctgagatcatgccactgcactccagcctgggcaccattgagcactgagtgaacgagactccgtctgcaatcccagcacctcgggaggccgaggctggcggatcactcacggttaggagctggagaccagcctggccaacacagcgaaaccccgtctccaccaaaaaaaatacaaaaaccagtcaggcgtggcggcgcacgcctgcaatcgcaggcactcggcaggctgaggcaggaggatcaggcagggaggttgcagtgagccaagatggcagcagcacagtccagcctcggctcagcatcagagggagaccgtggaaagagagggagagggagaccg

SEQ ID NO: 9759 - DNA, 897 bp, Artificial sequence
  DNA replication origin
agcgcctcttcccagccgccatcccatctaggaagtgaggagcatctctgcccggccgcccatcgtctgagaagtggggagcgcctctgccccgccgcctcgtctgggatgtgaggagcgcctctgcccggccgccccgtctgagaagtgaggagaccctctgcctggcaaccgccctgtctgagaagtgaggagcccctccgcccggcagctgccctgtctgggaagtgaggagcccctccacccggcagccacccagtctgggaagtgaggagcgtctccgcccggcagccaccccgtccgggagggaggtggggggtcagtcccccgcccggccagccgccccgtccaggagggaggtgggggggtcagccccccgcccggccagccgccccgtccgggaggtgaggggcgcctctgcccggccacccctactgggaagtgaggagcccctctgcccggccaccaacccgtctgggaggtgtacccaacagctcattgagaacaggccatgatgacagtggcggttttgtggaatagaaaggggggaaaggtggggaaaagattgagaaatcggatggttgccgtgtctgtgtagaaagaggtagacatgggagacttttcattttgttctgtactaagaaaaattcttctgccttgggatcttgttgatctgtgaccttacccccaaccctgtgctctctgaaacatgtgctgtgtccactcagggttaaatggattaagggcagtgcaagatgtgctttgttaaacagatgcttgaaggcagcatgctagttaagagtcatcaccactccctaatctcaagtacccagggacacaaacactggggaaggccacagggtcctctgcctaggaaaaccagagacctttgttcac

SEQ ID NO: 9760 - DNA, 832 bp, Artificial sequence
  DNA replication origin
gaggagggtctctgcccagccgcccatagtctgagatgtggggagcaccactgccccgccgccccgtctgggatgtgaggagtgcctctgcccggctgcgaccccgtctgggaactgaggagtgtctctgcccgaccgccaccccatctgggaggtgagaagcttctcttcccggctgccccgtctgagaactgaggagcccctccgccctgcagccaccccgtctgggaagtgaggagcccctccgcccggcagccgccccgtccgggaggtggggggcagcccccgccaggccagccgccccgtccaggagggaggtgggggcagcccctgcctggccacccggtctgggaactgaggagcccctctgcccggtcgccaccccatctgggaggtgtacccaacagctcattgagaacgggccatgatgacgatggcggttttgtcaaatagaaaagggggaaatgtgaggaaaagaaagagagatcagattgttactgtgtctgtgtagaaagaagtagacatgggagactccattttgttctgtactaagaaaaattcttctgccttgggatgctgttaatctataaccttacccccaaccccgtgctctctgaaacatgtgctgtgtcaactcagggttaaatggattaagggcggtgcaagatgtgctttgttaaacagatgcttgaaggcagcatgctcgttaagagtcatcaccactccctaagctcaagtacccagggacacaaacactgcggaaggccgcagggtcctctgcctaggaaaaccagagacccttgttcacatgtttatcttctgaccttccctt

SEQ ID NO: 9761 - DNA, 1021 bp, Artificial sequence
  DNA replication origin
aacaatctgatctctctttcttttcctcacatttcccccttttctatttgacaaaaccgccatcgtcatcatggcccgttctcaatgagctgttgggtacacctcccagatggggtggcgaccgggcagaggggctcctcagttcccagaccgggtggccaggcaggggctgcccccacctccctcctggacggggcggctggcctggcgggggctgccccccacctcccggacggggcggctgccgggcggaggggctcctcacttcccagacggggtggctgcagggcggaggggctcctcagttctcagacggggcagccgggaagagaagcttctcacctcccagatggggtggcggtcgggcagagacactcctcagttcccagacggggtcgcagccgggcagaggcactcctcacatcccagacggggcggcggggcagtggtgctccccacatctcagactatgggcggctgggcagagaccctcctcacttcctaggtgggatggcggccgggaagaggcgctcctcacttcccagactgggctgctgggcagaggggctcctcacatcccagacgatgggtggccaggcagagatgctcctcacttcccagacggggtggcggatgggcagaggctacaatctcggcactttgggaggccaaggcaggcggctgggaggtggaggttgtagcaagccgagatcacgccactgcactccagcctgggcaacattgagcactgagtgagcgagactccatctgcaatcccggcacctcggaaggccgaggcaggcagatcactcgcggtcaggagctggagaccagcccggccaacacggtgaaaccccgtctccaccaaaatatacaaaaccagtcaggcgtggcggcacgtgcctgcaatcccaggcactgggcaggctgaggcaggagaatcaggcagggaggttgcagtgagcagagatggcggcagtacagtccagcctcgctcggcatcagagggagacagtggaga

SEQ ID NO: 9762 - DNA, 1260 bp, Artificial sequence
  DNA replication origin
gagggctcctccgccgccgcctgcctcagggctcgtagccctggcgcccgggaatcccgacgacgaggcgcgattccccgccgccgccgccattttctctcgcgggctacattcgctcggcccctgcgagggagggagggggcggggagagcgcagggggcgggcactgcgccgccagcgtaaggcctcctgcgccaactgcgtgagcgcggcccgccgggcgcctggcctggactgaccgacgggcgggcgcactgggtccggcctgcggcagaggtgtgggtggagggcggcccggcggccgcaggtgggagggagtgggctgtgctctccgccgggcgagagggcgggcgggcgaggtggactgggaggcggagggggcgggggcggaggcggaggcgtgggctcccgggactctgcgcgctgcacgcgccgcgccgccaggtagtcccggccgcaccggcgacaggaggagccttggcggcagcgctgcgccgcttcctctcggcaatctcggcccggcaccgcggagctcgcgggaggggagttgcaccttccgaaagaaagaattagttccaacttgggtttctggtgcttgaaggggacgcaggcgagagggtttacagtctgtcattcccactgccctttgcagtgggcgtcgggggacccgggcgtggaccagcctcccaccgacgcgcaggtggcgcccgggaccgtcgcctgctgcaaagcgaaagcaagtcaacgttcagcagacaggctgccgcggaccagaaaaataaagttttgtttgtgttttcttttgaaaagaaaacattccttctctattgtcccacccctgtccctgtgctacagataacaaaacttcaaagttttctgtaataccttacatcctgaagctgctgatttgggacaactaccccctaccctcaccaagtccccacagcctctgagaaaccgttggggcgaggaagggaggcgggtgtccccgtcgatctttagtttttccttggctgtctttgggaaaggcagtcccgtacagaaccacatatagcgcgtttggggaggggaccagcgctgtgccaggaagtgctcggtaatgtcaccctcggccaggtcccggccctccccgaatccgatgcttctcgccgcacgtccttcttccctgcagggtcgggccaccggccgggttccctctgtccccactcctgcagggcctggctgcccatcgctgcgttgtgagtcctcctagtccctgga

SEQ ID NO: 9763 - DNA, 804 bp, Artificial sequence
  DNA replication origin
ctgagcaccccccgaccccttcggagtcgggcggcgccccggacccagcctgggggaccggacggggacgtgcggaagagtttgttattgtttgcagacatgtgacaggcgtgcgagcctctctgcggggaaccgttgcgaaaaggtgtagggggccacggctggctttgtgggactcctggaatcggggctctccgaggagcccgggggcggggcacggccctgcggcggcgcccccggacgggtgtccccggggcaaaggcactggggggcgaggcccgagcctgaggcgggcggtggtcggaagaggggcggggtgggtgagaagcccgaggtcgggtgggagactgagaggaccgaagagaaagtagcaggtcccagcggccgtgacaggcagagcccctcggcccgcccgggactcgagtccctaggcagataccgcgggctgggcccggacgcaggcggcgcgcccccagcgccggccgcagggctccaggaggacggctcggtaacgcctgtcaaagccgtgcggcgggaggctgcacactcgcggaggcttgcagtcttttaggaagtgcggtttgtctaattgcagcccccaaggggctttgagtgttcctgggaatgcgaactgcactgctaagtcacttgagtgacttctgtttggagtttgaatttggcctttgaagtttgcatttggcggagtggtgtaagagccaggaccggatgtgtcagccattcagtttcaaagcagtggtgactgctccccgcagcccctccggcttggcccggggactgcggcgc

SEQ ID NO: 9764 - DNA, 1328 bp, Artificial sequence
  DNA replication origin
ctctacgcgcctctcattcagagaggtgaggtcaggaaaggggaaggacgaagccccagagcaacagaagtcaggcggtgccaggaacactgagagcggagccaggggaaggcggccgagcgcggccccctctcctcccgggccggggcgggcccgaggcctcgatccgccttccccgcgccgtcctggtcacggccccgcggggcagccatgcctggccgtctgctgcggggcctgtggcagcgatggcgccgttacaagtaccgcttcgttccctggatcgcactgaacctaagccacaacccgaggtgagagggcgggacggcagaacgaggggcacctgccttcggttcccagacgccaccacggcggcgggacgcaaagcggagagcctgaggctgactgccggcctgagatgggcgggcccgggtgggcagggactgaggtgggcgggccgggtgggcggggactgaggcctcggaggggtttaaggaacgcgggccagaggcgggcggggccgaggttggtggagtccgaggcccgctggaagcctgaagtgggcggtggcttcaggtgggcggggcctatggcctctttcccagtgtccgctgcgctgccgggcccgcgaggccgagctcgccagccggatgtgtcgcctgttcttccctgttgcgttcggcactgactggggagcttgtatctgggcaaaaatggaaactttttaaaaagactgcccttaccgcgtgagagtgcgtggctttttctccaccaggggttaattaggtgcttgaacttcctcagaaaagccaagccagggtttattttcatagttcatacaagtacttcacgtggttaaagaagcccatcccggctgtgagaatagcgtgcagtagctcgcgcgttaagaacgggcagaacgccactcaaaagcacgtcgggatggtgggtttcggattggggtgagtcccgccggcgttattaagggcgcaccagtgatcagctcaacaccgtgctcaccaaagaggccgaccgggcctccctgaagtcagtgtccgacaaatagggaaacaaagcggtttccggaaggttgcatgctagggaaacaggagatcagttgtatcatgactcggaaccgtgaggcgggaattacaacctttttgttcaagtaaaaataatgcagttagtacaaaaagataatgattatggaaataagaggtgcagtcattgaagacgttagtcgtcctggagggagtgtcacaaagtatacgatgttgaatttgtctttgaaactacaaggccatttttaaaaagccattgaatgtgaggtc

SEQ ID NO: 9765 - DNA, 1334 bp, Artificial sequence
  DNA replication origin
gccctgccccagggacgaggcagtgccgtgtccccggtcgctgacgcgggccgccggcgcctccgcgcctcttccccgggcccgggtgggtggaaaccggcggagccccccctccgcggccggatcgcaaagaggggagcgggctgcgccactgccctgcgggagtcgtgcgctgtgcccccggcccaccgggcccgggctgcggcgcgaaggagccgcacgcttcactttgctgggggcgcggagaagagcgggatgcggggccaccgggcttctcagaagagcgggactccccaccccgcagcccgggaggtgcgggagcccctggggttaaagggcagaccgagaccctcgacgccctctccaggagagcggcttgatagctccagttttctctgggctggaggaaggaaggctgggcgagcgaagctgccccggccatgtcccccgggactggtgagctggggggagggggcggtgtggcaggagcccctgggctggagctcgctggggcggggggcgcgctgacggtccagggagggactgaacactctggaaggagccagcatccctggaactgagaggagctgcatctctggactcgagagagaggatggggggctcgcgctttggtttgggggcgagtgtccgattcgagctggcctacgctgcaggggaagagatcggcttcggagttggggctcccgggccccaggggcgaactaggtgctcagaacgcgagttcgttccagaaaagggtgttacgtttcgagttgtttggggcttcggagagccgggtgggatttggaggactccggagatgccagggatgggggactgatggtgccagccgactgctctgggttttgcttctctgcttggaaacttgctgagctccaagaagcgacttggagttgcctctcagactccgggcttcgtcccgggtctgtgagtttgtacacttgggactcggggaggaaggcgaggcagccaagagggggcccgaaaggggccgggagcgattcgagtgaagctacgtcttgcacttttggcagctgcggaggagcgctcgactccgcctcctctgcgccctgttgccggcgctgcctctttccctggctgtgcgatctaacctcacgttttcttctctctctcctaggcttcttttggaagttcgagcccaggtttgtcctattttcttacgtcttcggtggttcccagtgggtaatgtgggctcaaaggtctgttgctaaaggattcccaatagaaatgtatcctgcaggtttttcttcattgatttttaagagtttcagtgtgcatttagtaaagtttgg

SEQ ID NO: 9766 - DNA, 1602 bp, Artificial sequence
  DNA replication origin
cagccccgccacggccagtcgccgccccgcgacccccgcgtcgccacgccgcccctcatggggcagcggaaagagccccggatcccccaggctggctcgggggtcgcggggagccgccgggcgcccgctccagcccggctgctcctgcccggtttccctgctcacctccgccatattggtacctttagggcgaacgagcagcgccgagcccagtccccggatggggcgcctgagccaatcgcagccgccgccgccaccgccgcggtccgcccggcacccgcccggcggcggaggcggcacggccccttatagggcagggcggcccgcgacgcccccggcccgctcgcaagccgacgccgcccggcgcccctcgccgcccccgcgccggccccagccggccagacccgcacccgcgcgcaccgtccttctcctcctggctggtgtaaagttcctgccgaattggaggcaagtgggggacggacggacgcgcgggcgcgggacagacccacgtccagccagtggaggcccaagagccggcgggcgcgtctgggaaccgacccacagacaccgcggcgcgggagggcgtgcgggaggcgggcaggagacttggactggcaggcgatgtgcaggggaactcgacagactcaacttccctaagaggaggaggcgatctatgaaatagacagatgtgggaggaagccctgggaaatgggagaagaggctggtggatggcagagtcagtccagaatgagaggactacagtcaggcactttgccgtttccacgaagggacctgcaggaatgggagatggagaccggtgtacactgctcacggagtggacaatggaagtagacatttgccaaacaggttattgacagcacagaagaaaagacaaaagatcgacagggcagagaaatgatgctgaatatacttgtacagttcaagaagatgcccaaaaaatataaactgtgctgttatccaaaaaaaaaaaaaaaaaaattagaccagttctaggaattgttcatcaccaacgtgtcttaggggatgacccagagatacttgatacatctgttgaaggacaggaacagcatatcaaaggccctgaactgagtctcaaaaattctacccctcacttccctcacttctccaaaaaggccaaacgtttgggtaggatcataaaaggaaactagtcccctgtgcaagtggatgggtgaaagacggagcataaggcttaacaggaatacctgctcgtacatgttccttatgaccatttgctcttcattggaggagattactctccggaaggtccacatccacactgaaagactttgagccaagtacacaaaaatatacactaacgactgattggagagttaggtcctgcaagaagttaaagtaaggtatggagttgccctagcaaatttggaggacacattgtcctaaagtgggaggccaattctatctgtggaaaagaaagtcggctgtaaggtacatgaataagtgagatgcaaataccatcaggaattatagcaggaccctacaggaatttggagagagtgatctcagacaccagagctcttctcccagcttttttctaaaaca

SEQ ID NO: 9767 - DNA, 1014 bp, Artificial sequence
  DNA replication origin
gcagctggagtcggggattaccccctgctgctgacgtgaggacggtgaacaatcgggaacgttcggtggaagggggaattccccgccgctccctgaggagcccctcctcccgcacctccccccgtccggggctgcctcggagtccgggctggtggggctgcgcagagggcgagaggggggtgctgcgccgggaagcggccgcgcaggctcgagtggcgcgcgccgcagcgtcttccccagctctaagctcccgaagctgcgccgcagctcctccgagcttcaagctgcggaagacgctgcggcgcacgcccttcgccgggtaccccgcttgggcctcgcgctcgggcctgggtgaatcggcgctcacacggcgcctatgctcagctctgcgcaggcggaacatctgccgagccggcgccggagcggtagggcacgctgaggggatgctccaccgtggcatgcgaacgcggactgtgtcaggcatgagaacgcgggagccctgcggctgaggaaagcagacgtgcggggagccaagcccagactctcaagagggtagaaatggctactaggtataatcatgctaattatttttctttctactaaatctgcagtaggtgaattatttcaacagccagagtatcagaaccacagagcccattcgagatttttaaaaatcagtattaccgtgttcaaagttgtttctctaattgtgacaccttttcgccttataaccgtagcctcactttaacacctgggaagttggcattctatgaaaaagaaaaatcacatttgtttagagggaaggtggggagaggttgtctcaaagagggaaagtctggaaaataaagatatttggctgttcgccctcccctaagccacaaggacttcataacgtagaaattttatggtagttgtacatgcattatggggtttgtagtttaatggaatgtttctagaagatacctgaaaaacgggtggaacgtaaactcaccaaaatttaccgtccccaacctt

SEQ ID NO: 9768 - DNA, 889 bp, Artificial sequence
  DNA replication origin
cggcgccggctcggcagatgttccgcctgcgcagagctgagcataggcgccgtgtgagcgccgattcacccaggcccgagcgcgaggcccaagcggggtacccggcgaagggcgtgcgccgcagcgtcttccgcagcttgaagctcggaggagctgcggcgcagcttcgggagcttagagctggggaagacgctgcggcgcgcgccactcgagcctgcgcggccgcttcccggcgcagcacccccctctcgccctctgcgcagccccaccagcccggactccgaggcagccccggacggggggaggtgcgggaggaggggctcctcagggagcggcggggaattcccccttccaccgaacgttcccgattgttcaccgtcctcacgtcagcagcagggggtaatccccgactccagctgctcctgacgtcaccgcgtggagccaccgccccccgcgcgcccctgctccggggcctcctcgaagccccgcccccagccttagccacgccttctccccctccccccaggcgcccgacgtagagggcggagcttctttgaccgcggcgtgagcggttgcttgggccagaaggttctctggtggaggcgctcttcctggtgtcccgcccagtaggttcgttcgcaccgcttcttccacactctttctccctccttctcctcgccccgccttccctccctcctcaatccctctagttccttccccgcctcgccactgtgcacgatctcgcgagacttggcccagaacattgcggatcgggtcggcgccattttgggactgagactggttgtgggggagggaaaagcggcaaaaggggattattcaaagtaccgaaaaccttctcccgggatcaggcgcggcggcacccccaggc

SEQ ID NO: 9769 - DNA, 1331 bp, Artificial sequence
  DNA replication origin
gttgggtgctagtcggcaccagaggcaagggtgcgaggaccacggccggctcggacgtgtgaccgcgcctagggggtggcagcgggcagtgcggggcggcaaggcgaccatggagcttttgcggactatcacctaccagccagccgccagcaccaaaatgtgcgagcaggcgctgggcaagggttgcggagcggactcgaagaagaagcggccgccgcagccccccgaggaatcgcagccacctcagtcccaggcgcaagtgcccccggcggcccctcaccaccatcaccaccattcgcactcggggccggagatctcgcggattatcgtcgaccccacgactgggaagcgctactgccggggcaaagtgctgggaaaggtgacaagcggagggcgccgggctgccgggcgggcgggaggtctgtccgggcgaccccaagccgggcaagcccgcggggtccctcgcccgccgcttccgggtttttcgggggtccgatcccagcgcgaggtgggctcctcacctgccctctggcttttgtgcgccggcagcgctggggatcggctttgcattcttagcctcagaactgtgtgtctcccgcagcccagagaaatgcatcttgagtctggaagcgagggctttctacatcagacctctctccctctatctgctcccagggaattttcctgacaagtctcatcagagattatttttcatgtctccccgttccaactccctccataaagctcccctttataaaagaagaagagaaactgtttgaacttgctgtttccagcaatgcatttctcttcatgagggagctttaacgaagtcgaatgcctccctctgtccaccctcctccattcctcaatttttttttttttgcttttctttcttcccatttatttatttatttaaaatatctgccgtccatttttgtgccatcctcaattccgtctcggctttgtttcctttcagggtggctttgcaaaatgttacgagatgacagatttgacaaataacaaagtctacgccgcaaaaattattcctcacagcagagtagctaaacctcatcaaagggaaaaggtgcgtatgactcttgagtaaagtattttctttgtgtgcaaggatggcccttccctgttaggaaaatgtcttctgcatgtgtaatcactggcttttccgaggtgactggaagctaataagccttaccttgctttttcatttagattgacaaagaaatagagcttcacagaattcttcatcataagcatgtagtgcagttttaccactacttcgaggacaaagaaaacatttacattctcttggaata

SEQ ID NO: 9770 - DNA, 2973 bp, Artificial sequence
  DNA replication origin
aaagaaaccaagatgatggttactctggagacgaaagatgagaacatcatagggtggggcaaattggggtttccaaagtagtggtgatttttcaatttctttacctgagtgtacttatttgttattctctaaactatataggtacatttgtatgtgtgtaaatatttgtgtgtatatatataatacacatacaagtgctgcatatgctgtgtgatgtgtatttatgtttagcaccataaagtctattattttagcccaagattactctccaagaataatccctattttttcatttattaataagcaacatttattgaaccccttttacatgatatgacagaccctgataaatcagacagcagtgaacaaaaaagacataacccatcttctcatgaacttagcactaagtttaggagggataagagtaacacaaaatatcaaagtattagatagtgctacaagctattataaaaatggaacaagttggtatgaaagtgagcatcagtgtgtgtggggtaacagggagtgccagcatgtgcagggtgacagtgagagcatgtgcggagatgagagcgacaatgtgtgtaggggtgacgtgtttgtgtgtagggctaactatgataatcggcataggcatgaagtgagagtatgtgtaggggtgacagtgagtggcagtatgtttagaggtgacagtgagtgagtgtgtgtagaggtaacagtgagtggcaatgtgtgtagtggtgacagagcatgtgtagctgtgacagggagtgacagtgtgtgtaaggtggccatgtgtgacaatatatatggggtgacagtgagagacaatttgtgtaggggtgacagtgagagtgtgtgtaggtatgacagtgaatgacagtatatgtagggtgacagtgagtaagagcatgtgtatgggtgacagtcagtgacaatgtgtataggggtgacagtgagagacaatgtgtgtacaactgacagtgcatgagagaatgtgcaggagtgacagcaagtgataatgtgtgtaggagtgacagcatgtgtaggggtgacagtgaggggcagcatgtgtaggggtgacagtgaaggacagcatgtgtaggggtgacagtgagtgacagcctgtgtagaggtgacagtgaaggacagcatgtataggggtgacagtgagtgacagcatgtgtaggggtgacaatgagggatagtatgattagaggtgacagtgaggggcagcatgcatagggatgataatgagggacagcatgtgaaggggtgacagtgaggggcagcctgtgtaggggtgacaggaagtgacagcatgcgtaggggtaacagtgaggggcagcatgtgtaggggtgacaggaagtgacagcatgcgtaggggtaacagtgaggggcagactctataggggtaacagtgagggacagtatgttgggtgacagggagtgacagcatgtgtagaggtgacagtgaggggcagcttatacaggggtgacagagggggcagcatgtgtaggggtgacagtgagtgatagcatgtgtaggagtgacagcgaatgacagcatgtatggggtgacggtgagggacagcatatgtaggagtgaccatgaatgacagcatgtgtaggggtgacagtgagggacagcatgtgtaggggcaacagtcagtgaaaatgtgtaggagtgacagtgaatgacagcatatgtgggatgacagtgagggacagcgtgtataagggtgacagtgacgaccagcatgtgttagggtgatagcaagtgacagcatgtgtagcggtgacagtgagcaaaaacgtgtaggagtgacagtgaatgacagcatgtgtaggggtgacagtgcagggcagcatgtgtaggggtgacagtgagtgaaaacatgtaggagtgacagtgaatgacagcatgtgtaggggtgacagtgcagggcagcatgtgtaggggtgacagtgagtgaaaacatgtagaagtgacagtgaatgacagcatgtgtaggggtgacagtgagggacagtatgtttaggggtgatgataaggggcagcatgtgtaggggtgacaatgagggacagtatgtttagggatgacagggaataatggcatgtgtagaggtgacagtgaggggcagcttaggtaggggtgacagagaggggcagcctgtgtaggcgtgacagtgaatgacagcatgtgtaggggtgacagtgagggacagcatgtatagagatgacagggacagcatatgtgaggtgacagtgagggacagcctgtataagggtgacagtgaggaacagcctgtgtaggaatgatagtgagtgacaccaagtgtaggggtgacagggagggacagcatgtgtaggtttgacagtgaatgacagcatgtatagtggtgacagaggggggcagcctgtgtaggggtgtcagtgagggcatgtgtgtgaaggtgagatggagtgacagcatgtgtagtgataacaatgagagcatgtgtaggaatgataatgtatgtagagttgagagtgagtgacagtctgtgtgtgggtgaccatgacagtgtgtatgggttgatagtgagtgacagcatctgttggggtgcacttcaaactgggcaggtcacggaaatcctcgctggggaggggatatggaagaggaagcctcagtgagaaggatgcaggcatgggaggatttaggagaagagcagcatggtaatgggcatagctagtgcagggcctaaggcaggaaagaactgggcgcacaggaggtgcagagaaaacaagggtcactggaggctagtgacctggggaggacacaggaggaaataatagcaacaggcagccgccagagcatggagagccttatagcctgtattaggggttggggtttaattctaagagtatgagtagccagtaaagggtcttatgcaggggggctgatgtgatctgatttataatttgggaa

SEQ ID NO: 9771 - DNA, 1140 bp, Artificial sequence
  DNA replication origin
ttagtcttcctgctttgctttgagtatcctgcctcctccaaataacctaaaatagttactatctggttccttacagaaaacgtgtgcctagtatgaatgcacatgtgttacccgaaaggggtaaaacggtgggccattggcaagtactcacagttttaacacgaaggaatcacatcgtaatggagtagggtacaggaggatggcgtgctcaggcactagggggatgccggagcagggcgtgcaggcactggctgtgataggcagagccaagatgatccccaggttcccagaaaaatgatttggttgtgggaggcagcagccatagggcagcccttctactgggggcgggggcgggggcgggagcaggggagggggaggggcgggggcgggagcaggggaaggggaggggcgggggcgggcttgctttcagtggcagctgccataaataggcagctagggcgcgctcgcttcagcccaattgctaactacaagtagggtagtctgtcctcagagtgcttgtaaatgcatggcaggactgctactgggccacctgggtccctgtcaatgacttgtgcttcagccttggaggcagcagcaccccgctttcagcagaggatgtctgtggggctccaggtatgcggagttgcaggggttgctgggcctcagggcaggatgtagtctgctggggactgggctctcaaaatggcgtcttgctgtggctgcttagggctcaggggatgtgtgggacctagcgtgagtttccccctggagcaatgccatctgtgatctccaggacgctccctatgttagtcacagggcttgtgtgggtcgaggggctctcgtagggctgggattgcagtagtccatgatgggaatgcagaccgctgtgggtaagtcatttactctttcctcacactggggagcctctccaggctcccagccagtcctggcagactgtctctcttaccgcttgcgctccttcctcacctcaggtgttttctgtcacttctccgttaaatccagtgttctctttttggtggtgtattaaacgtgtgattatgcgctgtttcacttcttgatggaggaggcaaggaccagatgcctctagttagccatcttggagcccctccaaggccctac

SEQ ID NO: 9772 - DNA, 1099 bp, Artificial sequence
  DNA replication origin
gcgttggagccgcgctgcgcctgccgcccgaggagttgagaaagaaaacaggaaacgtggtggccgcgcacccggccgcggctgattcattcacttcaagtgccgtgcagaaggctcggcaggcggggcgggcgtggggccgcggctccgggttggggaccgaggagatccggctgtggaccagacgctcctctgcggggcgggcacccaagcgcgctcgccaccccctcgccatccgctagagccgggctcctggactgggactcgggcccgccgcacagttgaaaagtcgcatagtggtttttccgctcgcgtcgctgtgtgaaagttggctcgccgctctttgcacgccctccctggaggccgacccgagacgccaagctggagagaccgtgcctccccgaggccggccgccccgcgagcacagcctccgcccccgttgcactgccgggctgggcaatatgaaggagcagccctcatgtgccggcaccgggcatccgagcatggcggggtatggcaggatggccccctttgaactcgctagcggacccgtgaagcgcttgagaactgagtccccctttccctgtctcttcgcagaggaggcctaccagaaactggccagcgagaccctggaggagctggactggtgtctggaccagctagagaccctacagaccaggcactccgtcagtgagatggcctccaacaaggtaagccccggttctgctgtcactggtgcccccaggctgctgattcccatgccggcgagccactggtacccatagccccgggaaataaattgagaggttttttaggcttactgcatgttggctattctgctccttagagggaggttcctgtttccttgctttgcctcccctagtcacgccagataaacattttccaaaagcaatttgacgtgctaaatttaagtatctcccaagacacagggttcctaagtaacactgagcccttgcagcagaaacccagtagggtccatgggcattgcatgtttaaaggtgttcttgggattcccggttgaaaataagaattggtggatgtctgtgaaatcacttgaatgtcaccacctagggcactc

SEQ ID NO: 9773 - DNA, 877 bp, Artificial sequence
  DNA replication origin
aagcggcggcggcggcagcagcagcagcagcatcaggaaggcgctcgggccagcgcggtgaacccgggctgggcagcaggtcgcggagccgcgagccaggatggaggcagagggcagcagcgcgccggcccgggcgggcagcggagagggcagcgacagcgccggcggggccacgctcaaagcccccaagcatctctggaggcacgagcagcaccaccagtacccgctccggcagccccagttccgcctcctgcatccccatcaccacctgcccccgccgccgccaccctcgccccagccccagccccagtgtccgctacagccgccgccgccgccccccctgccgccgcccccgccgccgcccggggctgcccgcggccgctacgcctcgagcggggccaccggccgcgtccggcatcgcggctactcggacaccgagcgctacctgtactgtcgcgccatggaccgcacctcctacgcggtggagaccggccaccggcccggcctgaagaaatccaggatgtcctggccctcctcgttccagggactcaggcggtgagtggagagcgccccctcccccattcaggcaaagggtcacctccccttttctcaaatactccatctaagtcggcttatcaccaccaattctagacccagggtaaaatgctagtctggaaattgggggaggacaaacaggggtgtgcctatcctttattgagagtatgctattcaggtgtgtgtaagagaccccccaaaagtactgcataaatgttaactggggccgtgtgtgtgtgtgtgtgtgtgtgtgtgtgtgtgtgtgtgtgtggtgcgcgcgcttcccagttatctgtgccacgcaccagccctctccccaccc

SEQ ID NO: 9774 - DNA, 1395 bp, Artificial sequence
  DNA replication origin
tccgagtagccgcgatgccggacgcggccggtggccccgctcgaggcgtagcggccgcgggcagccccgggcggcggcgggggcggcggcagggggggcggcggcggcggctgtagcggacactggggctggggctggggcgagggtggcggcggcgggggcaggtggtgatggggatgcaggaggcggaactggggctgccggagcgggtactggtggtgctgctcgtgcctccagagatgcttgggggctttgagcgtggccccgccggcgctgtcgctgccctctccgctgcccgcccgggccggcgcgctgctgccctctgcctccatcctggctcgcggctccgcgacctgctgcccagcccgggttcaccgcgctggcccgagcgccttcctgatgctgctgctgctgctgccgccgccgccgcttctgcagcccagcagaggctggtgcttagcttctcacttgaaggcgccagagcctcagggctaccgagagggggccctgccagcgggaggggtcacagaacgcggcagggctccttccaccgaggctatggcagagacacgctcccgggctccccaagtcaccaagactagggtgcgcggtgcccggtttcgccagaggttggtccttcttcctccctttcttcttcccttcctttgggcgccggcggcgagagcagggattgtcagcaactcgggctgcagaagcagcagcaacggcggcggcggcagtggtagccgcctccagggcaccggaaccctgatcccggagctgctgaaaagttggacagctccaggctggcacgcccgagctgtgactttcaccaaaaccactccagccagtcaggagtcagacctgtcctcttgatccttcccctcgccgtgcccgcgcctccctcctccacactgctccccactgccccggagccttcctcttcacctccgcttgcctcagtgctcttagagaaatggagtttggcgattcctggctggttctcagagcttgttgacgatgagccccatgctggtgcttccaaagataaggaatgtgaccaggcaaagttgcctggaatattgtctatgcgcgtcgctgaaaaattggatctgggtgaagatccaatagtaagattaattcagtctctttccctgacataggataaaacattgtgtggctctttcccacagcagggagaatgcccaatgtttcctcttgaagatcttcctccaacttggcctcgggagtggtcctcgctggaaatcaaggcgagtcgtccttagttgcagagccatggctgagcccgctggccagagttaaggttaaggcaccttttcaattacaaacctctgattatcttcggtagtctctatcttcagtgcctgcctgcaa

SEQ ID NO: 9775 - DNA, 903 bp, Artificial sequence
  DNA replication origin
agtgaggagcgcctcttcccgacctccatcccatctaggaagtgaggagcgtctctgcccggccgcccatcgtctgagatgtggggagagcctctgccccgccgccccgtctgggatgtgaggagcgcctctacccggccgcgaacccgtctgggaggtgaggagcgtctctgcccggccgccccatctgagaagtgaggagaccctctgcctggcaaccgccccgtctgagaagtgaggagcccctccgcccggcagctgccccgtctgagaagtgaggagcccctccgcctggcagccaccccgtctgggaagtgaggagcgtctccgcccagcagccaccctgtctgggagggaggtgggggggtcagccccccgcccggccagccaccccatccgggagggaggggtgcctctgcccggccgcccctactgggaagtgaggagcccctctgcccggccaccaccccatctgggaggtgtacccaacagctcattgagaacgggccatgatgacaatggcggttttgtggaatagaaaggggggaaaggtggggaaaagattgagaaatcggatggttgctgtgtctgtgtagaaagaggtagacatgggagacttttcattttgttctgtactaagaaaaattcttctgccttgggatcctgttgatctgtgaccttacccccaaccctgtgctctctgaaacatgtgctgtgtccactcagggttaaatggattaagggcggtgcaagatgtgctttgttaaacagatgcttgaaggcggcatgctcgttaagagtcatcaccactccctaatctcaagtacccagggacgcaaacactgcggaaggccgcagggacctctgcctaggaaaaccagagacctttgttcacttgtttat

SEQ ID NO: 9776 - DNA, 988 bp, Artificial sequence
  DNA replication origin
acaaaaccgccattgtcatcatggcccgttctcaatgagctgttgggtacacctcccagatggggtggtggccgggcagaggggctcctcacttcccagtaggggcggccgggcagaggcacccctccctcccggatggggtggctggccgggcggggggctgacccccccacctccctcccagacagggtggctgctgggcggagacgctcctcacttcccagacggggtggctgccaggcggaggggctcctcacttctcagacggggcagctgccgggcggaggggctcctcacttctcagacggggcggttgccaggcagagggtctcctcacttctcagatggggcggccgggcagagacgctcctcacctcccagacgggttcgcggccgggtagaggcgctcctcacatcccagacggggcggcggggcagaggctctccccacatctcagacgatgggcggccgggcagagacgctcctcacttcctagatgggatggaggtcgggaagaggcgctcctcacttcctagatgggatggcggccgggcagagacgctcctcactttccagagtgggcagccaggcagaggggctcctcacgtcccagacgatgggcggccaggcagagacgctcctcacttcccagacggggtggcagccgggcagaggctgcaatctcgacactttgggaggccaaggcaggcggctgggaggtggaggttgtagcgagccgagatcacaccgctgcactccagcctgggcaccactgagcactgagtgaaccagactccatctgcaatcccagcacctcgggaggccgaggctggcagatcactcgcggttaggagctggagaccagcccggccaacacagcgaaaccccgtctccaccaaaaaaatacgaaaacctgtcaggtgtggcggcgcaggcctgcaatcgcaggcactcgcaggctgaggcaggagaatcaggcagggaggt

SEQ ID NO: 9777 - DNA, 1299 bp, Artificial sequence
  DNA replication origin
gacagcgggggccgctgtgaggagctccgcgctcgcgctgccagtcgccgccctctctcccgcgcgcgcccggcgcttcggctccgctccctgtgcggtgagtgcggggttccaggccggcgggcaggggccaaactttcccggcgcgcggaggagaagagactggggagggaggcagagccgaggggaacggcgtcgggagtggccggatggaggaacttgggcgcggcgcgcgagaagtgggacccgggtgcgggggccccgggagcggggccaggccctccctgggctcgggaggcgcttgggaagttctgtccccgctgcctgcgcgtggggaggaccgaggcccttttcgccggagcgcggggccgcggcgctcacctgcgccttctcgggagcccccacccggcagcatcccgaagggaaggtcgggcccggtgggcgcgctgcggagcggagcctggactggggtcccgcgcggcgctggccctgcggagcggagcgggaggggcagaggtgctcgccggcgggactgggagggagaaggacctgctcgaccttggacgcggaggtcattttcccagctccggggtctggcctcgctagccacccccccaaattccggagcccctttctttctgtttccttccttcccctttgggcgctttttttgctcccgcggccagatgaacttggggcgctgtcccttcggctccccgagccgcatcctgtcttggtggctgctgctggccgggaggaggctgatgaatacagagccgtggaacaggtcgtgccggagatggaaacaggaaagcctgttgttttgtcgtcccaggtatcgttggttctttgggaaatgggctttcccaggttcgttgggaaatgggctttcccaggttcgttgggaaatgggctttcccccttcaagtcagagctgtttcaaacttcacccggtgcggacagagcgctctttggagctccctggggaactcgggacgggaaggagcgggtctttacacctgtcctgctcccagtgtagttagtcccgcgtcgactgaagaacagttttagcgacccgagttcctcgccagtggtcttttccctcttgctacgatctcccctcggaaagcatgttcacttaaccctgtgctctcggattaccctttatttcattcctcacttttattgcttacgtgctccgaaagggtcatcgatacctggtggctgcctctgcgttcttaccacgcacccgcttattcattccctttctttgtagtttctcttcgtactactgatcag

SEQ ID NO: 9778 - DNA, 1316 bp, Artificial sequence
  DNA replication origin
ccccgctcccggggcccccgcacccgggtcccacttctcgcgcgccgcgcccaagttcctccatccggccactcccgacgccgttcccctcggctctgcctccctccccagtctcttctcctccgcgcgccgggaaagtttggcccctgcccgccggcctggaaccccgcactcaccgcacagggagcggagccgaagcgccgggcgcgcgcgggagagagggcggcgactggcagcgcgagcgcggagctcctcacagcggcccccgctgtcccggccgccgactgggttggaaaggggaggaggccgccgggtgtcacctgcccgctatcccacccagccgcgtgacgcgcgcagcgccgccccctgcccgccgccgccaggtgcccgccgagggccggagggaggagccggggcggcgcgagggggagcggccgggagggcggaggccgccccggcctcgcctccgccgcgcgccctgactctcgggactggggcccaccggccgctctgggttagcggggctggtcgtggcaccgatgacctttctttccgagagcagatgccatcacttgggggacatctccaggctgacatagcagagtggaaattgtcgtcatgcgtgactcatttgggaatgagcagtagaaaaatccgaaatgaggaaaacctagctgaggctggaggcggagaaaaaggggactccttgcttctgaaagggtattgggagggttaattcgcatctgaaatggaagccagaccaagaggagaaggccctgggaggggaaggccgacttggttcagctccatcccctgcttataaggaataagaaactagagaattgaggcagcctggggggcatggggagaggacttttagagcaatgaagattagattgtatatcatctaactttgtttctggtaacagcaactgctgcaggaaaaaaagtctagaaaattcatttctcgttacctactgttggattggaaagtgggggtggggatgagcgttcggagtgtgcacctgcgcttggtttatttattttttaaacgtacctggccttgtgtctggtaatgatcctcctaatcgctggtatgatttggatcatcaatagctgaaaggcaaaataggggcctagagaagttccctgcttctgaggcaaaaccaaaggctggtgttgaactgtccagaaacctaaaaaacaataatcatttttagttgcagtcctgacccaaccacctcacaaatgtgggctttgagtttgtattgcgagttctcagcatggaatcaagaaacacaaaaaggggctgggag

SEQ ID NO: 9779 - DNA, 932 bp, Artificial sequence
  DNA replication origin
ggctgtgcccgaaaacacgcagagcgctcggaacgtgcccagcagccgcgcgacccgcgtccggtgccggctgccaccgtcccgccctcgctgcctcagcccctcgggccaggaaaccgacccgcccgctagaagtcgaggagctccggccgcccttgtcgcccccgcggccgcgcggacaaggccccgctccaggccggggtttctccagctcggggtggaacgcagcccgggctgtggggttagcagacacacctttgtgagtacacacgccgcagggcgcgcgcaagccccacgggctcgcgcacacatcgcccagcaggcggcagacggcgtgccaggcggcggacggcggcttcgggcgcacttgggtctgcggcccggctcccaccccggcacccgggtgcgcggcgcccggctgcgcggagtccaggcgctcgggacgcgcgccgcgctctcagtcgccttggcggcgcccgcagggccagtcccctcgggtccgggcagtgtaggggtggaccagggagagcgagtgcagagtgcagctcgctggtgcctggacgcgggcgaaggcggagaagcgagtccctctctgaacctggagccctgcggacattgttcgcgctccacagagctcggtcaaatctgcttccaagccgcagacttaattaccgcgtcggagacaggcttcctcccagccccaccttctgtttttactgtaaacagtggtgctgatccgctcccattgttggagataaactgtatctcctttgacactttcgcatcttttaaggttattggctgctccccacccgcctgccttgcagcctggatttaaagggatagcgcgcttcggcgttttaaagaaaatcgcccattcggggccgaggccctggaaacctcgagctacacagtgggccttcacaagtccc

SEQ ID NO: 9780 - DNA, 1259 bp, Artificial sequence
  DNA replication origin
catgcagatctcccgctcgctgcgggggaaggaccaatagactatgcggcgctgcaccggctccgggatgcgctcaaagcgctcctccacgcgctggaacggccacttctccgccaccctgcgcgccgcgatgtccagcagcgactcggggctctgggtcttgcccggcggcagcaaccccagcgccgcgccgcccccgcacgccgccgccgccgccgcgccacccgcccgcgggcctggccgacaggcagagctgtagccgccacccgcgccgccgccgccgccgctgctgcccccgccgccgccgccgccgcccggccggcagcaaagccgtttcgcgggaggaggctgctgtccgcgctccgccatgaccgcgccgcttctaacccgacagcggaagtgccgggaccctataaacggcactaggaagcgcgacacgcacacgccgtcgcgacgccacgatgccatctagggcccgccgctccttgtatgggcacaagaggtggggcctccgctgtgacgcagaagctggggcggggctctgatagggggaacctagggccgggggcggggcctatgcaaatcgctgggctgaaacataaatagagcgcttggcggacacgggggtggcgggggcgggccgttttggtgcccggtgggttgtgagaatgtcaggctgctgtgacgcgggggagggcggggtcaggcggggttcccgtgggagggggcgggccgccgggccgggcctgaggtgggtgggtctctgcgccccctgcctaccccacttccccctccagttctcagcttctctttgaagtccgagaagtgaggatgcgcctcgtgggtcgcagcgggggaggaaaggggagaagagggggtgagcgaaggggagggttctgagctaaatggagggcggggcccacgggccgatgccccaccccccccgtccccctgcccttcgggggaaaagcctctgggcggaggaggcgctttcaaaacaaagaaatgcggcatggaccccgggggacgcgggtggagaggaaggcggaggaggcgcggccaaacccgagcgcctgccagcttcccctccagccggtccaggggagctctccccaccacccgccgaagctgcagcggggaagggggaggatggctgcgttcggcggcggctttccacttcacttttgcagacctggtgtggaaggagcgcgcccgctctgctaaccccgcgtggctgcagtgcgcccatccccgagccc

SEQ ID NO: 9781 - DNA, 922 bp, Artificial sequence
  DNA replication origin
tgggccggggccccggacaggctggcgcggggttcgggggttctctcctgtctctgacgcctgcccccgaggaggcagagctgggcagccctgggcctccgccgagcccagctttcctaagccgggaagtcgggggttcctgggccgggtgggaactgtcgtccctggaggaccccgcccctgagatccccgccccacatccgggtagcgtgggggcacctggggttcccgagatgagaaccggtgctctgggggcgacaggcttcggcgggatccctgcaagccggcggcccaggcgggtgaaccccccggattccagcaggaacaatcccagtcccccgctccgggaaccaggcactcgatgcaaatggcttcccagccacccgccagccctgcccatgccagcgcctcgcggggtggctcccgcctcggcgcagcccccctggttgctggctgcacatctgcttccgagccacccaggggcaacttgaggcaatgtcggggggggcggggccgggacggtggagggagactgaggcagcagccaatgggctggaaggtccggcaacatttgcagagaaggggccaccttaggttactatgaatcttcaccaagcgcaggagggtcaaaagagtgttttcaggaagaccaaaaggaggaacgaatacccacatgtggccaaaagaggggctgagactggacgtgggggccttgcctgccccgtggagcttcctcaggcaccggctgcctctgtccatacctccactttcctgggtgcagtcttcagggcttggaccagtactggggtctgggacacagagaagagacccagatccctgtaaagatggggactgattgctggatgggcctcgggaaaaggcaggcctccatggggccagtgggggctgacagggcaagacc

SEQ ID NO: 9782 - DNA, 990 bp, Artificial sequence
  DNA replication origin
atagatgaagatgaaagacgttttcttgcaaactagcttcactgttgccccttgaaggctctcagtgacattgccctgagctgaaagagtatatccagaggttactgggactgagtgtgtcttctaacaccacttagacacctggcagagaacaggacactcatgactagactggctcagggatggctttgtagggtggatgtgacagaaggagaagagagtgatagggtttagggctgtggtccctaaactggagtacacacaccctcaggggctgtacaaaatgctccaatgggaatgggcagaaaatactgaaatgcttattatattggccttctaaaatcatgtcatttgtgcctttccattttcgtgatatgttttaaaatgaagaaaatgtcagcccagtagtaaaatgtatgcgatttatgaacatattggggctatgtgctcgattcttttcttgcttcattgctggctgtgcactacgaagcaggttcataggctgttggtttaggaagggggctattgtaaaaaatggggctgaagtgctaggccctggagtgtaggtgggagggggaaggaagcaaaaccaaaagggggggatgagagaatgaggaaatgggaagagcagacatggacgggctcagggagattgaaagtcaggggcagcgggttgaagggaaccgggatctcagtagaggaggctgtgatgaggcttcaggatacaggttgagaatatctcaggtgggaccactctaggccattcgcaggttaggggtgtcaccaggtgagggagggaaagaaagggacggcaagtgtattggatgtgctgcccacagggagggacattaaagtgcccaccctgatggcaagatctaggacagaaaagaagacagtaagttaccaaggtgtgagcggaaggttcaggtggttttgggcaaccaggtggctaagagagggtggggggggtttacatacaggtagaaggac

SEQ ID NO: 9783 - DNA, 1417 bp, Artificial sequence
  DNA replication origin
ccatcacctcatctggagcagcagcagcgggccgagggagggggaccggagggcggaaaaggcggggagggggcggggtaggtgtgggagggggagcggttgcccgcggccgcgccggcccgggcgacagcgtgaacgcaagcggggccgcaaggagcagctgtggggaagcaggcggaggccccgggcctgcaggccggcaggaggacgcgcacgccgggtagtcggggtgaagctagggccggggccgtgagacggcgcggggtagagtgggagggcccgcaccgcccgccggggagccgacgctggggaggcggggcgccgcgcgcctgcgcagagcgcgcctccggcgtctcttcttccttttcggctggcctctccccgctgcctccaggcggccccgcccagctctgcagcggggtgggcggcggccgcggcttacccagccgctggagcgttgagcgctcggcccggcccacagctagccggcgtcgcgtttgatttcagcgcgcggcctagaagacgcgggaagcgtcgcgccgagctttcttgccctctcgcttccgggaattggcgctgttgccggaatgggttaaaggccacgtggtttcaggggctttctagcgggctgagggatgtgaattcaagggccctccgttgacagtacgggatccgggttttcatcggaaggtggcaccccctatttccacttacaggtagctgacccaagcagccctcccaagcacacttggtgtaggtttcccatccagttacgctggaagggaagaaacacccttgaggtgtcacctaccctaaatcgaaatgaagatccacccctttacagtcttgccttatagtttatcacactcagaaagaagctctgtggtggggcgtccttaactgttcaggttatgaggcatccgatgctggtgccctgtttctgctgagggttcaagacttacttgccttggcctgtaaagccaacaactgtgactcaagggaagaaggcagacacataaggttgactagggaatgtgtctttttgcaataatttaattagtctgaccacatcagcaatgtggaaagcaagactctccatcctggcagagcaggaaggccacgtgtaccggggccctggaaactgtatttatagcaccgtgtgaaaacctccaaacgtctaactcctgcttgtagtactggcaattgataggttggaaacaacacttttcatggcctactttccctagtcattgttttttgttgttgttgttttgttttgtttgtttttgagggggagtcttgctctgtcgctcaggctggagtgcagtggcgcgatctccgctcactgcaatctctgcctcctgtgttcaagcgattctcacgcctcagccttccgagtaggtgggattacaggccc

SEQ ID NO: 9784 - DNA, 1011 bp, Artificial sequence
  DNA replication origin
ccgctgctgctgctccagatgaggtgatggcaacggccaacttcggcaagatccagatcgggatttacgtggagatcaagcgcagcgatggtgagccgcgctgccagccccgctggcccgctcggccccgtgttcgggtgtgcacggaggggacgcgggcgccggccgcctcattgattgcttcgccgggctgtgggggtgggaaggcggcggccgcggcgcttttgtgtgtggcgtgtgtgccagtgaggccggcttggggtccgcccgggcgctgctgcagttctccggatcgggccgcgggggagggaagccgggtggggaaagggcccgggtgtcgagggtcgcgtctccgggggtctctgggcgagggccgctcgctcctcctcccgcaatctccagcccccccccggggacaccagcccgggagggagcgggcttcgttagggatgaccctgcctcgcgcttccccttggtctttgcattttaccggcttggcctctgacggggatggggatgggggtgggggagcgggaagaccagcgatttcacatttagagaaccgactgctggtcggaggccgagatggggggaaagagccagttccgtcgccttaaactgccgtctggttgtcaggcctccccggtttcgtcgtcgaccatgctgctttcttttttgccacttcttgggagaaaaatgtggagaatatcgcgctgagccatgaataagggtgggggagcaatgggaagaaatattcgatgggcttctccaaggtgatgagactgtaaagggaatgataggggatgggcagagtcaatgcgaggcactgctgagagagtgggggtgggcgaccggatgttgatattttcacaccctcgggagaggtaactgagaaaagtgtaaggcgaggtgaagacacatgcttcatttttttttttaagagccttaggcttatgtatctttctctaggtttctcttggggaaaatggtttatgacactagcttggggtg

SEQ ID NO: 9785 - DNA, 1237 bp, Artificial sequence
  DNA replication origin
atcaccaggctgatttatgggctctccatgctgaactgctccagttccccaggctgaagtcactcatcggccagtgaagacttgcccaagcccagtgggccgaggcggggagtattccataatccaattgcctgctcaggggctacccacctgagggctgcgctgagcaggcctgagagggcagctctggctgctgtagagactttggggtgtgtggctgggtgtgcagattactggtctccagggggacaccctgaacgatggaagacagggtgggtgacactggcaaaaactgtttgggtagctgctgttgcgaccttctggcatcggctggacctgtgagcaaacttagggggctgaggggtacaaggcagtggtggtggggaggccccaggagtagaggttgagtaaggtaggggcagatgaagaataaagtggaggacgagaggaggagtaggagaaggaagaggaagagggggaggaagagggggaggaggaggagaagtggggggcagggtacttagtgagggctggcccaggaaggtagtaggcagggcatggtgggccaaggaagagggagatagtgaggggagactgtggatgccctgaagatggagctgaggactgctcagggaagtctggagatcgggattgcttagggaggactgcagggatgggtggctgagaggtgaacaaagtcctggggcatcatgacctggacccaagtccaggctcaggccctcactaatgcccaggtgagtcatgatgtgagtcaaattggaggtactgttgcccctattcaggctagagtaggctgtctcctcagggtccggggggtgggcagtgctggcagaaagtacaaattgatgaggtcaggtagggacctcctgccacatccagtcttcatggcaggtgggaggacaggaacattggcaagctggccaggaaatggaaagatattaattccagggacttcattaggaccggggtcaggaggagggtgacgacagcttctaagtatcccatggcttcagcaaatgcttgtcacctaggagaacttctcctcaatagcaggtactttggagtccattttaccaacctgaaatgttggctgggcaggatgctgggaggtgtggggcctgaataagtatcctggggactggggttcatcatacttgtgtgaagggcagagtcagagcttgtcctgttaaatgcagatgctgggcaaaacaggtac

SEQ ID NO: 9786 - DNA, 903 bp, Artificial sequence
  DNA replication origin
ggagggaggtggggggctcagccccccgcccggccagccgccccgtccgggaggtgaggggcgcctctgcccggccgcccctactgggaagtgaggagcccctctgcccagccagccgctccgtccgggagggaggtggggggggggtcagcgccccctcccggccagccgccccgtccgggagggaggtggggggctcagccccccgcccagccagccgccccgtctgggagggaggtgggggggtcagccccacgcccagccagccgccccgtccgggagggaggtgggggggtcagccccccgcccggccacccgccccgtctgggagggagatgggggggtcagcgccccgcctggccagccacccggtccgggagctgaggggcgcctctgcccggccgcccctactgggaagtgaggagcccctctgcccggccaccaccccgtctgggaggtgtacccaacagctcattgagaatgggccatgatgacgatggcggttttctggaatagaaaagggggcaaggtggggaaaagattgagaaatcagatggttgccgtgtctgtgtagaaagaagtagacatgggagacttttcattttgttctgtactaagaaaaattcttctgccttgggatcttgttgatctatgaccttacccccaaccctgtgctctctgaaatatgtgctgtgtccactcagggttaaatggattaagggcggtgcaagatgtgctttgttaaacagatgcttgaaggcagcatgcgcgttaagagtcatcaccactccctaatctcaagtacccagggacacaaacactctgcctaggaaaaccagagacctttgttcacttgtttgtctgctgaccttccctccactagtgtcctatgaccctgccaaa

SEQ ID NO: 9787 - DNA, 1333 bp, Artificial sequence
  DNA replication origin
ggctgacccccccacctccctcccggacggggcggctggctgggcgtggggctgacccccccacctccctcccagacggggcggctggctgggcggggggctgagccccccacctccctcccggacggggcggctggccgggagggggcgctgaccccccccccacctccctcccggacggagcggctggctgggcagaggggctcctcacttcccagtaggggcggccgggcagaggcgcccctcacctcccggacggggcggctggccgggcggggggctgagccccccacctccctcccggacggggcggctggctgggcagacgggctcctggctgggcagagggactcctcacttcccagtaggggcggccgggcagaggcgcccctcacctcccggacagggcggttggccgggcggggggctgagccccccacccccggacggggcggctggccgggtggggggctgacccccacctccctcccggacggggtggctgccaggcggagacgctcctcacttcccagacggggtggcagccaggcggaggggctcctcacttctcagacggggcggttgccaggaggagggtctcctcacttctcagacggggcggccgggcagagacgctcctcacctcccagacggggtcgcggccgggccgaggcgctcctcacatcccagacggggcggcggggcagaggcgctccccacatctcagacgatgggctgccgggcagagacgctcctcacttcctagatgggatgggggccgggacgaggcgctcctcacttcccaggtgggatggcggccgggcagagacgctcctcactttccagactgggcagccaggcagaggggctcctcacatcccagacgatgggcagccaggcagagacgctcctcacttcccagacggggtggcggccgggcaggggctgcaatctctgcactttggggggccaaggcaggcggctgggaggtggaggccatagcgagccgagatcatgccactgcactccagcctgggcaccattgagcactgagtgaatgagactccgtctgcaatcctggcacctcgggaggccgaggctggcggaacactcgcggctaggagctggagaccagtctggccaacacagcgaaaccccgtccccaccaaaaaaacacgaaaaccagtcaggcgtggcggcgcacgcctgcaatcgcaggcacttggcaggctgaggcaggagaatcaggcagggaggctgcagagagccgagatggcagcagtacagtccagctttggcccggcatgagagggagaccgtggaaaggagaggg

SEQ ID NO: 9788 - DNA, 1050 bp, Artificial sequence
  DNA replication origin
agaagaatttttcttagtacagaacaaaatgaaaagtctcccatgtctacttctttctacacagacacagcaaccatctgatttctctatcttttccccacctttcccccttttctattccacaaaaccgccattgtcatcatggcccgttctcaatgagctgttgggtacacctcccagacggggtggtggccgggcagaggggctcctcacttcccagtaggggcggccgggcagaggtgcccctcacctcccagatggggtggctggccgggcgggggctgacccccacctccctcccggacggggtggctgctgggcggagacactcctcatttcccagacggggtggctgccaggcggaggggctcctcacttctcagacggggcagctgccgggcggagggtctcctcacttctcagacggggcggcggggcagaggcgctccccacatctcagactatgggtggccaggcagagacattcctcacttcctagatgggatggcggccaggaagaggcgctcctcacttcctagatgggatggcagccgggcagagatgctcctcactttccagactgggcagccaggcagaggggttcctcacatcccagacgatgggcggccaggcagagacgctcctcacttcccagacggggtggcggccgggcagagggtgcaatctcggcactttgggaggccaaggcaggtggctgggaggtggaggttgtagtgagccgagatcacaccactgcactccagcctgggcaccattgagcactgagtgaacgaaactccgtctgcaatcccggcacctcgggaggccgaggctggcggatcactcgcggttaggagctggagaccagcacggccaacacagcgaaaccccgtctccaccaaaaaaatatgaaaaccagtcaggcgtggcggcacgcgcctgcaatcgcagtcactcggcaggctgaggcaggagaatcaggcagggaggttgcagtgagccgagatggcagcagtaccgtccagcttcggctcggcatcagagggagac

SEQ ID NO: 9789 - DNA, 1362 bp, Artificial sequence
  DNA replication origin
tgcttagaactgtcccaggtgctgaacccagtttctgagattaagagaggctagccggctagcgaaccgggattccaccaagtttcccccagaggtttgcaggctctggtaagaagtgcaaaaggccatgtgaaatgccaggcttcacttagaacacatatgcaaaatatttccatccctgaatttactagccacaaagctatgggaagtggcagtgtcactgaaattacaagtgtagtagtgatggaaaagtgtgtgtgtgtttagaatatatatcacactgagttttgttcttcatttcgagatgcagttgtttacctctccttgtcctttgacacgtcctttataatttcgttctctcccggttccccaacgttaaaaaaaaagtcacaggcaatattctccctgagggagtaaggctggactgttagatgataacggaggtaccgttttgttgttgttgtcgtcgttgttcgtttgtttttggagacggagtctcgctctgtcgcccaggctggagtgcaatggcgcgagaacggaggtagctttttaaaaaggaagacacactcggtcttcttccatcaattagcaataattgggagactgacccaggactgttcaccttcccattcaggctccctatgcttccttttctcatctcctattgccactctgggatgctgacacgatttaagaatttggcagataatatgaggcaaggagtagttggaattccctcccccaagtttttccaaccccagttttgctgggttggaggcggagtttatttgttacaaccttggtctgaccggcagggatctggtgtgtgtaagtgagttctgagtctctgttgacaaaaagagactcgaatgcaaagacgctgagctagagggagaggagggcggggacccagaggaaagaggcactcctcggggttggggaagtattaggaggggagggttagagtgggagggaaggagcctggctttcgaagcgactcacagagggataaataaagggaagtgaggaggaagagggagactgaaagggaaggcaggtggggagaagggggacgaaagaggcagaagagagagaagagaggaggagagagggggagagagggaaggaaggaaatagggagaggagggtcacagagtgaccgtggaggatggggcttctcggttctagatatttctgggattggagactgtttgctagtggggagactccagctccggcagccagttcgggagcggcaaagtaaaatggacagcgacagacagacgttccagccacctctccgccgccgggagatcctggagctgctttcaggccaactccagtttcccagctggagcttct

SEQ ID NO: 9790 - DNA, 977 bp, Artificial sequence
  DNA replication origin
ggcggccaggccagcggcaaccctagcccagccccttggcacgtccccgcctgggccaacgtgggggcccgggccaccgcggctgggtagggcccggccgaggccaggtccctccgagaggcgccgccgccgcgccccgcccgactccgacccgccggcctttacctgtatccacgtcccggagcctccggcttcgcgccccgtcccggcgctcccggccgccagcagccaggctctgaggactcgctgcggctccggcggcggcgatgccggttcggcgagacgggaagcgacaggagccaaaccccgcggaaagcgctcgagctgtgcctgcagccccgaccccgcggcctcggacgtggcgccccggcgctcgcccgccacagccagcggccctgctcgccccacgtctgcgggttcccacccgagccgcgcgtgggcggcgccgggctttgaccccgcgcaggcagacaagcgccgcgggccagacggaaccgtgggaaagtttttctcccttgtcatccccttaccagagccacagaaattatccctgtggtctcccttgtcctcactcggccttttctggagttaagagatccaagccaactactgggtctgttccctgctaaaatcttaggccggcgtcccatccacccatccccatgcctaggacttttaagctggcaacgctacctgggtttagttttcccttcgtatatcactatcttcgttgcttaccttcttgtgcctaaagttccaccgatgtgcaaggagattaaccactaaagtgcacctgacactactcttgacaaattgcagttgggaggtgagttgatgactggcggtaaatcaaaagtgcttatttagggagtgagggggccgcgtgcagtaaatgttgacttgcaggtgcctcatagatgatcaaacgactataaataagattcggaatataaaaagcaagttttattagttggctt

SEQ ID NO: 9791 - DNA, 1097 bp, Artificial sequence
  DNA replication origin
gctgtggcgggcgagcgccggggcgccacgtccgaggccgcggggtcggggctgcaggcacagctcgagcgctttccgcggggtttggctcctgtcgcttcccgtctcgccgaaccggcatcgccgccgccggagccgcagcgagtcctcagagcctggctgctggcggccgggagcgccgggacggggcgcgaagccggaggctccgggacgtggatacaggtaaaggccggcgggtcggagtcgggcggggcgcggcggcggcgcctctcggagggacctggcctcggccgggccctacccagccgcggtggcccgggcccccacgttggcccaggcggggacgtgccaaggggctgggctagggttgccgctggcctggccgcctctcgcccggcgggcctcaggtgacgcggccgcggcttaactttcgcacctgaggctctcggagcggcctcggggcgcgcccacctggaggttggaattacacagggtcgaaaaagctgagtcctggaggcgaggcgctgtaggtgtggcggaggaggccggggaaggtggggtgggtgccaggggtccagtactgaaccctctccaggtctgaggtggggaactgcgtcttgtttaatttcggagcttgtggggaccacacagccccttccacggccgattccctctgcacggttccactttcctttgtctagcccatttcagtatcggcgtcgcagtcgcttttgttgcagccttgggtccggagtgtacgactttctgctaggcagaggtcataagctctgaaatccatcgggcggaggtggggagatggtcctttggtgggaaattactagtgctgttatgaacactaacacatatattccaccttgttttttttcgagatagtgctcattattttcgtagcatctaacagttgtaagtgtatctgtgagagcattcattagttaacttcaaaggagcattatgcggtcgggttactattatcccattttatagaccagacagctgaggcacccaagaggcaaagtgattatatcaaaactaagcagtcaatccttgtggaatctgtgattagaacttgtctgact

SEQ ID NO: 9792 - DNA, 1153 bp, Artificial sequence
  DNA replication origin
ggcggcgaggcgggcggcagcgcctgggcgcccgggagtctcgagccggcctagccgcagaggccacagtggctgcctggccagcgccctcccacgtgcggcagctccacgccggcgcctaccagccccgccccgcgccgtgccccgccccagctcgcgtgtctggccccgccccagccctcgcgtccggccccgccccaggggcggtgctggccagaccctgccgcctgagagagagcacagcctggtgggttctggggtctacggcctaggggccggggaagtttgcgccgccgcgaccagtgctgcgatcccgagccgggctccagccccgaggaccaggggtcgggcgggcctgcctacggaaccccgcgggccagcagcagtcgtctcgcgtcctcctgcttggtaaggggcttctgtctggcaagggtgcgcctcccgccgctccggaccggggcccgcaccggcacccgctgcacaccgggcagggccgaggcgaggccgggtacctgagggaggacggaagggagggggagctcgatgcgctctggggagaggaagggggagaagcctatttccctcttctcaccccttttccccccattctgtttttaccttctgccctggggccttatttagtgcttatgaccccgtggcctagaggctgacatcgcctttaaaataactacacaaataataaacattatagcggcgggtaccacaccctggctttgaattagggaacctggggagcagatggatgatgcgatttggtggaaatcagccatgaatgccgcctggccctgcgccactgtttggatgcgatagtattccatgtgaatgaacatgaccgggagcttccagcttgtccacgagagcacagcctctgcagggagcgccggtcggcttgtagtatccatcgacttgggcagcgatttcctgacatgtctgctgattaaatagaaatgccatttttattaagaacgacactcaccacttgaataacctttcgcgaatgtgtttcctcatcaaataactctcaacctacaaaagtgggtagagtgtacattattaatactttttttagatcccatgaaaaagaggaagatgcttggtatacatcagcttttagtcagcagtatgaaatgcc

SEQ ID NO: 9793 - DNA, 1067 bp, Artificial sequence
  DNA replication origin
cgagctggggcggggcacggcgcggggcggggctggtaggcgccggcgtggagctgccgcacgtgggagggcgctggccaggcagccactgtggcctctgcggctaggccggctcgagactcccgggcgcccaggcgctgccgcccgcctcgccgccccacgccgaaggaccacgcgcccgccgccgccagcctctcagcgctcccatgatcgcccggtgccttttggctgtgcgaagcctccgcaggtacctccagcgcgcgggttaaccttggccgtgggcagggcggggtctttcgccgtgtggtgcctggagcccggacccaccccttcccgaccgcgcctctccgacgctcccgggacgcaccctccccgcggcttgcaaggtggacccctgggggacacctggcgcggccacctggggccacctttcccgcctccgctccctcgggaggacgtccattcctctttgtttgggactgcctcagccgcagtcagcgaggctggtcacagacgcggcccaaaatgaatgcaaatagtttggataagaaaatcatttcacgttcaatcccaatgcagaactacagacctgtcattaaaagtgccgcagctgtggactcagaacaattgtgtttgctcctcgcgcccattattagcattccaatcgtttaacatccacccgagatgaaacctctttggtggtgttgcttgtttccgtccatgctctctgacttccttttttattttcctcctccccataaaacaaacattctgcctcttgccggtgcaaattgacttggcccaaaatggagaaaatgatcgcttggacacggctttgggcagcctgagctgctgttttggattgcttcctagccctctaaccacaccccactgcaacagaccagtagcaagatggtgagggaattaaattctttgcacggatgcgctggttttcggaaacaatgccgccaccatccccgtttccaaatctgcccagaactgtaaatccaaatgaagattcaacagaataaagaaaatgtgtgcttcttgctagctatcaacaaaac

SEQ ID NO: 9794 - DNA, 1215 bp, Artificial sequence
  DNA replication origin
cgccgccgcgccacattcactcgagcgagagacggcgaggggagggaggacggagggagcggagagaaaggaggaggaatggggcaggggcggaggggagttactgcctcacaggccgcggcggcaacagcgccaccgccccggccgcgacgggtgaagaggctgcgcgccgcgactctgcggcgggggcgggggcggggcggcctcccgccggcttcgccccaaccgccaacagccgggcaggaggcctgcgcgggccagtcagcgcgcgggggcggtgcgggccgacgtcggcggctgggggcagcgggccgggggccgggggaggggcagccggcggccgtgggttcgcgtgcaaggcgcgccgtgaggcccactctggcccaggcccctcgaggcctgcccgctgctccctgcccgctccccgaccccgcactcccggactcccgagccccccagggtggggaacgctggcaacgccgaccctgctgtctgctcgcggcccagcgcccagccagagagatagagagcccacaggcctccgccgcgccggccgatggagtttctttgtacgacagtaatcggtgcacaggggttgttggagtccagccctgatttgaaggcagcaggtatctcttgcagctgcagcactccaacttcctctaatggcacggtcaggtcgcaggaaaccacagcggcagcgcggtgcagcttcccacgcccgcccttcgagcttgttccccagcggcgcagctcagcctcctccaagtctcagcctcataccggcggggagacaaagctggcgctgggagtgggaaaagggcccgcgaaatggcctcaagatcgtgcctttgttagaagaaacatgggtacgctccgatgcgacgcaggcttccaaccccagcggttcggtggtggtgcagtcgttgaattgcgctggccctaataattcagcctggcagggttcgcgtttattgcggagagagactcttaagcattctgtcaacacatatggcaaatagaaagcctcaaccataacattgcacagtttttgcagttcttgctttaaatatgttcacagaaaagacggccttgttttacccagagaaggagcgtaatgcggagcgaaccattcgtcacccccattctctgctgcacttaactgtgtacagtgatgataattagcctctgggtccctgaagtccctggttcagt

SEQ ID NO: 9795 - DNA, 983 bp, Artificial sequence
  DNA replication origin
gaggagacggagctgcctcctgctcccgccccctgcgcgtctcggggagccaccgccgctggcgaaggagaacaagcagggcagcggagggacggtggcgggaaaacgggagagggaggagaagagggttcgagggcgagtagggaaagcggggagggacggacggaaggacggacggcccgacggacggcccggggagggggccgctattgagcctgcccgactcctcggctccggctccgggtggcggcggcagcggcgtcgcggacgaagggcgcggcaagcgctatcgagacaataaccctgccgcccggctctgggggcaacggagaggaagcggtggcggcctagcgcggccgaggctcgccgagcgcccgggcagcgtcctcgcccccgccggccgggtgctgctgccgtccggtgtgccgggcgcgccggttgcccggaacccgaggctcccggcggccgtcccctcccctccccctctccggtgcgcgcggagctggttttccgggttcccctggacggagctggatcctgcttctcgccaaggcaggaagtgagtttcgcactgcaattccgggcggtgtcacgagtgaaaagttttgtttttttttttttcggcggagatcctcgttggggctgggaaactcctgcaaaactcgagaccaggaagccagcccgcaccccaacccccaccaaagccacctactcttcttctgtgggaggccagtccacatccgctctcacccgagagagatattcagctggatccaaagtgactgatgaagggaaggaaatcatgtcaagcgaagccttgaaaaagctgccctgagacggtgtcccgccgaaaggtaattttcacgaaaagtgtctctgagtcacaaagttcatgggactttgtgactcggaaaagagatgattctttagtgtttttcactcttctccaagttgccctaaaccctccttttctcatatcgaag

SEQ ID NO: 9796 - DNA, 1252 bp, Artificial sequence
  DNA replication origin
ttgggtacacttcccagacggggtggtggctgggcagaggggctcctcacttcccagtaggggcggccgggcagaggcgcccctcacctcccggacggggcggctggccgggcggggggctgacccccccacctccctcccggaccgggcggctggccgggcggggggctgaccccccacctccctcccggacggggcggctggccgggcagaggggctcctcacttcccagtaggggcggccgggcagaggcgcccctcacctcccggacggggcggctggccgggcagggggctgaccccccccacctccctcccagacggggcggctggccggggggggggggactgacccccccacctccctcccggacggggcagctggccgggcggggggctgacccccccacctccctcccggacgaggtggctgccgggcggagatgctcctcacttcccagacggggtggctgccgggcggaggggctcctcacttctcatatggggcggttgccaggcggagggtctcctcacttctcagacggggcggctgggcagagacgctcctcacctcccagacggggtcacggccgggtagaggcgctcctcacatcccagacggggcggcggggcagaggcgctccccacatcttagacgatgggcggccgggcagagacgctcctcacttcctagatgggatggcggccgggaagaggcgctcctcacttcctagatgggatggcggccgggcagagacgctcctcactttccagactgggtagccaggcagaggggctcctcacgtcccagacgatgggcggccaggcagagacgctcctcacttcccagacggggtggcggccgggcagaggctgcaatcttggcactttgggaggccaaggcaggcggctgggaggtggaggttgtagcgagccgagatcacgccactgcactccagcctgggcaccattgagcactgagtgaaccagactccgtctgcaatcccggcacctcgggaggccgaggctggcggatcactcgcagttcggagctggagaccagcccggccaacacagcgaaaccccgtctccaccaaaaaaataggaaaaccagtcaggcgtggtggcgcacgcctgcaatcgcaggcactcggcaggctgaggcaggagaatcaggcagggaggctgcagtgagccgagatggcagcagtacagtccagcttcggctcggcatcagtgggagaccgtggaaa

SEQ ID NO: 9797 - DNA, 964 bp, Artificial sequence
  DNA replication origin
atatgagaagtgaggagcccctccgcccggcagccaccccgtctgggaagtgaggagcatctccgcccggcagccacctcgtccgggagggaggtgggggggtcagccccccgcccggccagctgccccgtccgggagggaggtgggggggtcagtccccccccccccggccagccgccccgtctgggagggaggtggggggggtcagccccctgcccggccagccgccccgtccgggaggtgaggggcgcctctgcccggccgcccctactgggaagtgaggagcccctctgcccggccagccgccccgtccgggagggaggtggggggtcagccccccgcccggccagccgcccggtccgggagggaggtgggggggtcagccccccgcccggccagccgccccgtccgggaggtgaggggcgcctctgcccggccgcccctactgggaagtgaggagcccctctgcccagccaccaccccgtctgggaagtgtacccaacagctcattgagaacgggccatgatgacaatggcggttttgtggaatagaaaggggggaaaggcggggaaaggattgagaaattggatggttgccatgtctgtgtagaaagaggtagacacgggagacttttcattttgttctgtactaagaaaaattcttctgccttgtgatcctgttgatcggtgaccctacccccaaccctgtgctctctgaaacatgtgctgtgtccactcagggttaaatggattaatggtggtgcaagatgtgctttgttaaacagatgcttgaaggcagcatgctcattaagagtcatcaccactccctaatctcaagtacccagggacacaaacactgtggaaggccgcagggtcctctgcatatgaaaaccagagacctttgttcacttgtttatctgctgaccctccctccactattgtcctatgaccctgccaaatcctcc

SEQ ID NO: 9798 - DNA, 950 bp, Artificial sequence
  DNA replication origin
aagtgccgagattgcagcctctgcccggccgccaccccatctgggaagtgaggagcgtctctgcctggccgcccatcgtctgggatgtgaggagcccctctgcccggctgcccagtctgggaagtgaggagcgcctcttcccggccgccatcccatctaggaagtaaggagcgtctctgccctgccgcccatcgtctgagatgtggggagcgcctctgccccgccaccccgtctgggatgtgaggagcgcctctgcccggccgcgaccccgtctgggaggtgaggagcccctccgcccagcagccgccccatctgagaagtgaggagcccctccgcccggcagccgccccggctgagaagtgaggagtgcctccgcccggcagccgccccgtctgagaagtgaggagcccctccgcccggcagccgccccgtccgggaggtggggtgcgcctctgccctgccgccccttctgggaagtgaggagcccctctgcccggcctccaccccatcttagaggtgtacccaacagctcattgagaacgggccatgatgacgatggcggttttgtcgaatagaaaagggggaaatgtggggaaaggatagagaaatcagattgttgctgtgtctgtgtggaaagaagtagacatgggagactccattttgttctgtactaagaaaaattcttctgccttgggatgctgttgatctatgaccttacccccaacccggtgctctctgaaacgtgctgtgtctactcagggttaaatggattaagggcggtgcaagatgtgctttgttaaacagatgcttgaaggcagcatgctcgttaagagtcatcaccactccctaatctcaagtacccagggatacaaacactgcggaaggccccagggtcctctgcctaggaaaaccagagacctttgttcacttgtttgtctgctgaccttccc

SEQ ID NO: 9799 - DNA, 1137 bp, Artificial sequence
  DNA replication origin
ttgggggtaaggtcatagatcaacagcatcccaaggcagaagaatttttcttagtacagaacaaaatggagtctcccatgtctacttctttccacacagacacagcaacaatctgatttctctatcctttccccacatttcccccttttctattcgacaaaaccgccatcgtcatcatggcccgttctcaatgagctgttgggtacacctctaagatggggtggaggccgggcagaggggctcctcacttcccagaaggggcggcagggcagaggcgcaccccacctcccggacggggcggctgccgggcggaggggctcctcacttctcagacggggcggctgccgggcggaggcactcctcacttctcagccggggcggctgccgggcggaggggctcctcacttctcagatggggcggctgctgggcggaggggctcctcacctcccagacggggtcgcggccgggcagaggcgctcctcacatcccagacggggtggcggggcagaggcgctccccacatctcagacgatgggcggcagggcagagacgctccttacttcctagatgggatggcggccgggaagaggcgctcctcacttcccagactgggcagccgggcagaggggctcctcacatcccagacgatgggcggccaggcagagacgctcctcacttcccagatggggtggcggccgggcagaggctgcaatctcggcactttgggaggccaaggcaggcggctgggaggtggaggttgtcgcaagccgagatcacgccactgcactccagcctgggcaacattgagcactgagtgaacgaggactccatctgcaatcccggcacctcgggaggcggaggctggcagatcactcgcggttaggagctggagaccagcccggccaacacagcgaaaccccgtctccaccaaaaaaatacgaaaaccagtcaggcggggcggtgcgcgcctgcaatcgcaggcactgggcaggctgaggcaggagaatcaggcagggaggttgcagtgagcagaaatggcagcagtacagtccagcttcggctgggcatcagagggagaccgtggaaggagagggagaccgtggggagagggggagagagagggagaccgtgaggga

SEQ ID NO: 9800 - DNA, 949 bp, Artificial sequence
  DNA replication origin
acctctgccctgccgccccgtccgggatgtgaggagcgtctctgcccggccgccccgtctgagaagtgaggagaccctctgcctggcaaccaccccgtccgagaagtgaggagcccctccgcccggcagccgccccgtctgagaagtgaggagcccctccgcccagcagccaccccgtctgggaagtgaggagcatctccgcccggcagccacctcgtccgggagggaggtgggggggtcagccccccgcccggccagccgccccatccgggagggaggtgggggggtcagccccccgcccggccagccgccccatccgggagggaggtgggggggggtcagccccccgcccggccagccgccccgtccgggagggaggtgggggagtcagccccccgcccggccagccgccccgtccgggaggtgaggggcgcctctgcccggccgcccctactgggaagtgaggagcccctctgcccggccaccaccccatctgcgaggtgtacccaacagctcattgagaacgggccatgatgacaatggcggttttgtggaatagaaagaggggaaaggtggggaaaagattgagaaatcggatggctgccgtgtctgtgtagaaagaggtagacatgggagacttttcattttgttctgtattaagaaaaattcttctgccttgggatcctgttgatctgtgaccttacccccaaccctgtgctctctgaaacatgtgctgtatccactcagggttgaatggattaagggcggtgcaagatgtgctttgttaaacagatgcttgaaggcagcatgctccgtaagagtcatcaccactccctaatctcaagtacccagggacacaaacactgcggaaggccgcagggtcctctgcctaggaaaaccagagacctttgttcacttgtttatctgctgaccttcccttcactattgt

SEQ ID NO: 9801 - DNA, 1060 bp, Artificial sequence
  DNA replication origin
tacacagacacggcagccatccgatttctcaatcttttccccacctttcccctctttctattccacaaaaccgccattgtcatcatggcccgttctcaatgagctgttgggtacacctcgcagatggggtggtggccgggcagaggggctcctcacttcccagtaggggcggccgggcagaggcgcccctcacctcccggacggggcggctggccgggcggggggctgactcccccacctccctcccggacggggcggctggccgggcggggggctgacccccccccacctccctcccggatggggcggctggccgggcggggggctgacccccccacctccctcccggatggggcggctggccgggcggggggctgacccccccacctccctcccggacgaggtggctgccgggcggagatgctcctcacttcccagacggggtggctgctgggcggaggggctcctcacttctcagacggggcggctgccgggcggaggggctcctcacttctcggacggggtggttgccaggcagagggtctcctcacttctcagacggggcggccgggcagagacgctcctcacatcccggacggggcggcagggcagaggtgctccccacatctcagacgatgggcggccgggcagagacgctcctcacttcccagatgtgatggcggctgggaagaggcgctcctcacttcctagatgggatggtggccgggcagagacgctcctcactttccagactgggcagccaggcagaggggctcctcacttcccagacgatgggcggccaggcggagacgctcctcacttcccagacggggtggcggccgggcagaggctgcaatctcggcacttcgggaggccaaggcaggcggctgggaggtggaggttgtagcgagccgagatcacgccactgcactccagcctgggcaccattgagcactgagtgaacgagactccgtctgcaatcccggcacctcaggaggccgaggctggcggatcactcgcggttagggagagggttaggggagagggagagggagaggga

SEQ ID NO: 9802 - DNA, 1877 bp, Artificial sequence
  DNA replication origin
cggcagggcagaggtgctccccacatctcagacgatgggcggccgggcagagacgctcctcacttcccagatgtgatggcggctgggaagaggcgctcctcacttcctagatgggatggtggccgggcagagacgctcctcactttccagactgggcagccaggcagaggggctcctcacttcccagacgatgggcggccaggcggagacgctcctcacttcccagacggggtggcggccgggcagaggctgcaatctcggcacttcgggaggccaaggcaggcggctgggaggtggaggttgtagcgagccgagatcacgccactgcactccagcctgggcaccattgagcactgagtgaacgagactccgtctgcaatcccggcacctcaggaggccgaggctggcggatcactcgcggttagggagagggttaggggagagggagagggagagggagagggagcgagaaagctatttctaggttggaaacaatgtcatgatttaatttccctgtcatattaagcaacagctttgtgaatatacatatttgtgatctgtattgtcacaaatgtctttttgcacaccttttattgacctattgttgaaaatagccaagtcaactctatgctaggaacaggtgaaatttacccacagacttccagtctttattttatgcagtttcaccttttccaagtattgctatgagcctatattgagctgtttctttcctcattctctcccaccttttccttcagattatagaatggtctaatgtcagtttttcatggttaattctgtctgagatgtttgcatttgtagtcatatttctaattgtggaatgaacgactttttctgttgaaaaaaaaattgaggctctcttgtttcctaagttacatcagtcctgctacactgagatggaagaggattccacagattcttcaaccttgatctacactttgtaaaatagggctagcaaaaattggtggactcaaggaagccttagtgatctgaatttcagaaataacaagagttctgtgtaggtgaatgtggcagtttgcccgcctgggggcaggtgcctagtatcagtataggcggataatatggagagacattgaagggataggataaaggcattcaagaattaggatccttgaatgacagtgtgggctttagggaagatgtgggactctgacagagcctcaaaggcaaaaatcaaataattaagcatgatgcttgggtctgtccctgttacattttgccaagaagtcgcaggagaggagaggattgaaagcataaagaaatcatgtagtcctgcaaattcaaggagtgcttggaatttgggaccctgttggacttgaatctgaaggtaaactgaaccaaaaaagtatttggaactgcaacccaagcttctactacctcagatttgacaagatcgaaaaggtgactgtgggtcggtgatggggaggttgggatttgggctgattacagatgaattgagtctaattaaagctgctgccagctcaaatggactctactagaaatctgaatttccagcctttatcctgggagaagtagaaggaccttgcactccctgggaaataacacttaaaacaatattatagtggggcgtggtggcttatgcctgtaatcctagcactttgagaggtggaggcaggaggattgctttagcccaggagttcaagaccagcctgggcaacatagtgggaccctgtctccacaaaaaataaaaaactgctgactgtggtggtggtgcatgcctgtagtcccaactatttgggagactgaggttggggattacttgaacctgggaggttgaggctgcagtgagctgaggttgtgccagtgcacttcag

SEQ ID NO: 9803 - DNA, 1859 bp, Artificial sequence
  DNA replication origin
tccctgtctggcccaaagtgcctcccgagcggcgggggcgcggcgcgcactcagcgcctcccggggaagacgcgggctcctgggctcaggctcactggcactgccgctcccgggctgcagggagccccgccagcgactacatggcagtgacggggccgcaggagcccgctgctaagttcacagccgcccgggcccggccgcaaacggaggctcccgcgcgcggggacatgcccgctcgggtccgcgatctgcgctccactgtgctcccgcgctgcacccgagccgcgggtactgcggcttctccttgcaaaacctgcctccgggacggagcaaggagacgggcagcccgcagagccaatggcagggcaggcgcgctggtgggcggaggctgcgacgcctccggccatgagggcctcaggtaggggaggcggggcccgggcgcgggccgtggtcccgctggagcgcctgggcgcaggggacagggaccaggcgggggtccccggagggtgggggcggagcccagaatcggagccaagggctgagactccgaacttagcgggggagtggctgaccgtccttgggacgtcagagggagacggcgagcggatggtgagaccttggagaagaactggactttgtctccaaaaagtggaatcaagaaaacggacaagaaggagggctctatagggaaaaaaggaaccacacacacacagtcacccacgcacacggactcaccagcgtgttggaggaaaaggacagaaacttcgtggtatagtgagcggacccaaaggggagtgacctctaatctctgcttttccgtttaagctctttgggcctcagtttcctcaactgtaaatggctacattactactggtcttggcaggcttagagcaaatatatataatgcatcagcaaagtgcctggcttggatacacggagcgtttttaaaagactatttcctgtctttatttctgtttgtaaactaaaaagttaagtctgagacttgaaccttttgatagggaggaagataaaaaagtatgtccttgtatttaattaggaccaagctctgtagtcctactcaaattgtctgtctcggtatgatcagctaagcagaggatgaaaaggattcactttccaatgtacattctcctagccctgggttgtaaaccaacaggatacaggacaggttgcttcattttccttacctctaagaactaggagaaagaactttcactaaaggtaccaatagagtacccttaagtccttccctggggctggaggatgctgcctgtccggtgactggaatttccttggaagccagcactcagctcagcagtgggaaataaatgattcctctcttgccttcagctctagtcccattctgagctctggcacagtgacctgggatgtaaattcaaccgcctcagttccatgtacgttgatggagatgtgtgccaggtgcaggggatacaaagattaataagtcaggtcccctgcccttgagcagcttatggtcaagcgagagattgatactgcataatatagctcccttatccattttagaagctgtgataagtgatacaggaaaaatgtgtgagggagaagaggaaagagttacagaaaaacagtagcaggtccttgagcatcttagatttctctttgtcagagcagccttgccaaaggtccttaaaaactggaggaccctaattgaaagccccttcagctaatgagcctttcatgctatcatggtatttacaagtgatacatcacacagagggcttcatcatattggacagcaacctttgtcctgatcagtttcctcccctcaagatgaaggggaaggaaatacgttttgtcta

SEQ ID NO: 9804 - DNA, 983 bp, Artificial sequence
  DNA replication origin
ctccctgcagcccgggagcggcagtgccagtgagcctgagcccaggagcccgcgtcttccccgggaggcgctgagtgcgcgccgcgcccccgccgctcgggaggcactttgggccagacagggaaatgggggagaaagtttcggaggcgccagagccggtgccccgcggctgcagtggccacggcagccggactccagcctctgcgctggtcgccgcgtcctctccgggtgcttcctcggccgagtcctcctcgggctcagaaactctgtcggaggaaggggagcccggcggcttctccagagagcatcagccgccgccgccgccgccgttgggaggcaccctgggcgcccgggcgcccgccgcgtgggctccggcaagcgtgctgctggagcgcggagtccttgcgctgccgccgccgcttcccggaggagctgtgccgcccgcgccccggggcagcagcgcgtcccaggaggagcaggacgaggaggtgggcctttccccagcttgcccactctgggttccggcagccgggcgaccgtagtttcccatcctgcgcacaggcagtgggcaggagagcgctgtggcctggagatagggagggaccccaagcgctctgccccgagcacgggacaacgatagttaggagcccccctgtgggttattgacttccctgtggctgttacccccgtgtgtgtgtctcagtgtgctgcctgatggtgtgtttttaaaatgtcagagaagcaaactccttcgtgtttgtatctgacttggttgatctgtgaaaggatgcgatctggacatctggcgtgtccccacaactcacctctgattctccaaagtgggcgttgtttcccaccgaagcgcttgggccgaggggcagggagttgagggggagaaatggtgccttgggggtaagaggcaggagtagggtggggggcagcggtagccgcggagttgcctgcggaggtttcagtggcgccag

SEQ ID NO: 9805 - DNA, 948 bp, Artificial sequence
  DNA replication origin
tctgccccgagcacgggacaacgatagttaggagcccccctgtgggttattgacttccctgtggctgttacccccgtgtgtgtgtctcagtgtgctgcctgatggtgtgtttttaaaatgtcagagaagcaaactccttcgtgtttgtatctgacttggttgatctgtgaaaggatgcgatctggacatctggcgtgtccccacaactcacctctgattctccaaagtgggcgttgtttcccaccgaagcgcttgggccgaggggcagggagttgagggggagaaatggtgccttgggggtaagaggcaggagtagggtggggggcagcggtagccgcggagttgcctgcggaggtttcagtggcgccagccccctgggatcgcccgcgggtggttttggcgcgtccccgcagcgtcggtcctctgggagaagaggactccccgcgctccctcggtggcgctggcgtgcgcgcctgcagctcccgttcagacttgtttccagcttgtccagatgaacgcttgtcaccaaaccgagtacagatcgtcttaccttttgcggggcggagcggggtgggggatctgtatctgcccagtttcctggaaggatgttcctccagaacttgtgggtcgcttcctgacacactgagcataggactctggtgtccttctggctgctctgtccggcttattttctgcttttggaggacagttaaagaagtgtacaattcttcacgtctcagagccagactcagtttaaaaaaaaaaaagattgtttgctttggacgtttcttgtggggaagtcatcttgatcaggcagggccacaaataaaacatcaccttaacatagacttattgtgaaattaattcctgagtgccagtgttgtattttcctcatcttggatggggttagctttagtaaataattgcctttgtcccttagagtaagca

SEQ ID NO: 9806 - DNA, 965 bp, Artificial sequence
  DNA replication origin
agacaagttcagacctccctggaggctggctgcgtctctaatccgagtgtctttcagccaaccccaggctttttcgagcccctagcgccccagcagagtggctggggtggggaggactcggattccagagctcgccaaagcggagaggccctgcaattcctggtctcgccagcactgccttccgagtgggcggaaaacccgcggcacccgcctggcgctccgggggtgaaggaggggtgaaagggtgaaccggagggacgggcgcccgcagcctgccgctggctaactccggcagcctggcaccgccgcctccgggagccaggcggacccgcgagaagggaagagagttttctgagggcgtacgctggctgatggcttctagtcctgagatgacagagcaaatggaggtcactcaggcagaccacgggcccctcggcgttcgcggagtcgggggcggggttggcggggggtggggttggcgcgggcggggggggcggggaagcgcaggtgaattacattgtctcttaaaggtgttagttttgaaatgcatattcttcaagtaataattacctaagttgctccagaaaaatttgatgttggttcaaaccttccactgatggtaagatggaatgccagcaccacgtgtgccactctttcatattaaaacatgtgagaatctgcttcctaaaagctctttccagattctcctttctgcagcttaaagccctgcacccgcccaccctgtttgcctaaagcccttttatagttccctcccagtttccttgcaagaaaactcttaaaaacaaacacacaaaacctaagcacttggcctctgtaaaacgttgaatttggtggtttattcttgtggacgttggaagtagagggaagaacgtcctaaaattcatcgcttatccttaaaaaatatcatttttaaaggtgactcacctaacagaaaagtaagctcc

SEQ ID NO: 9807 - DNA, 1296 bp, Artificial sequence
  DNA replication origin
cagcggcttctccttctgcagagccccgccggggggaagcgggctggccaccggccctccccgcctccggcatctcctggccgccgggcagcactacccccgcgcgcggccggcgtcctgtgagatccccgccatcctgactcccgtttcccccgtcctcctgcgagctggtcctgcacgccgccggtcgcatttgcccccggagttgccgacgagctcgggcttcctcccaccctccgtcaccgcacacttcggagggtccccgctgtcgccttgctgcagttttccggggcccctcaccggaggagagcgccctggccgctgccttcgtgttgcgggaaggagcgctcccttcccccgtggccctccagctgcagccagggtcgctgcccgggcccttcccggggcgggcgaggcggcggtggtccccggagctcgtcccctaacccccgccttccgaagtttgccgccctcctcttccggggtgggggaagtgcgcctcggggcggttggtcgctggggccctaactcagcgtttattgccagccaagcttgggcaggttgttggaggcatatttagtggggtcttggaaccgcccggaaatccagcttttggaacgtggggcgaggcgggagggacctgcccagcaatatggagccggctggggagagccagggagcctgcaacccggagctaaaatatcgtgggcaattctctggaaaccacagctctaacctaagctcagaaactgcccctcagatcacaagacaaagagaacagaaaacctctggccaggcactcctgtacagaaatacactttgataaccagaattggagcctgaaatgcaaggatatatgcagaatggctgttacgtgttgaatgcagaatgtgtgtcaactgggtttgggggaattcttctgtttcccggggcgctattaatatcggaaaggtctcacttccaccgttaatcccttgagctgcagcgctgttggtgtccgagtgtgagtctgctctttatttgggggcttcatgattttaggttttttttcttttttctcttcttttcctctttgtcagccagtgcgaagtaccaatggataaagcagttccgggttttgaatgcaacataagattgtcattttggtgtgatgaggctcaagttttagtaatcaggagggatattcacagagcttattggtcaaggcttgatgtggagttatattttaatgcttcattagttctgttacgttttggcaaccttaaagatggttagatattagctaggaagggttgg

SEQ ID NO: 9808 - DNA, 951 bp, Artificial sequence
  DNA replication origin
gccaccccgtctgggaagtgaggagcgtctctgcctggccgcccatcgtctgggatgtgaggagcccctctgcctggctgcccagtctggaaagtgaggagcgtctctgcccagccgccatcccatctaggaagtgaggagcgcctcttcccggccgccatcccatctgggaagtgaggagcgtctctgcccggccgcccatcttctgagatgtggggagcacctctgccctgccgccccatccaggatgtgaggagcgtctctgcccggccgccccgtctgagaagtgaggagcccctccgcccggcagccgccccgtctgagaagtgaggagcccctccgcccagcagccaccccgtctgagaagtgaggagcgtctccgcccggcagccacctcgtccgggagggaggtgggggggtcagccccccacccggccagccgccccgtccaggaggtgaggggcgcctctgcccggccgcccctactgggaagtgaggagcccctctgcctggccaccaccccgtctgggcggtgtacccaacagctcattgagaatgggccatgatgacaatggcggttttgtggaatagaaaggggggaaaggtggggaaaagattgagaaatcggatggttgccgtgtctgtgtagaaagaggtagacatgggagacttttcattttgttctgtactaagaaaaattcttctgccttgggatcctgttgatctgtgaccttatccccaaccctgtgctctctgaaacatgtgctatatccactcagggttgaatggattaagggcggtgcaagatgtgctttgttaaacagatgcttgaaggcagcatgctccttaagagtcatcaccactccctaatctcaagtacccagggacacaaacactgcggaaggccgcagggtcctctgcctaggaaaaccagagacctttgttcacttg

SEQ ID NO: 9809 - DNA, 983 bp, Artificial sequence
  DNA replication origin
cttagtacagaacaaaatgaaaagtctcccatgtctacctctttctacacagacacggcaaccatccgatttctcaatcttttccccacctttcccccctttctattccacaaaaccgccattgtcatcatggcccattctcaatgagctgttgggtacaccgcccagacggggtggtggccaggcagaggggctcctcacttcccagtaggggcggccgggcagaggcgcccctcacctcctggacggggcggctggccgggtggggggctgacccccccacctccctcccggacgaggtggctgccgggcggagacgctcctcacttctcagacggggtggctgctgggcggaggggctcctcacttctcagacggggcggctgccgggcggaggggctcctcacttctcagacggggcggccgggcagagacgctcctcacatcctggatggggcggcagggcagaggtgctccccacatctcagaagatgggcggccgggcagagacgctcctcacttcccagatgggatggcggccgggaagaggcgctcctcacttcctagatgggatggcggctgggcagagacgctcctcactttccagactgggcagccaggcagaggggctcctcacatcccagacgatgggcggccaggcagagacgctcctcacttcccagacggggtggcggccgggcagaggctgcaatctcggcactttgggaggccaaggcaggcgtctgggaggtggaggttgtagcgagccgagatcacgccactgcactccagccttggcaccattgagcactgagtgaatgagactccgtctgcaatcccggcacctcgggaggccgaggctgcggatcactcgcggttaggagctggagaccagcccggccaacacagcgaaaccccgtctccaccaaaaaaatacgaaaaccagtcagacgtggcggcgcgcgccttcaatcgcaggcatt

SEQ ID NO: 9810 - DNA, 912 bp, Artificial sequence
  DNA replication origin
cctggccgcccattgtctgggatgtgaggagcccctttgcctggctgcccagtatggaaagtgaggagcgtctctgcccggctgccatcctatctaggaagtgaggagcgtctctgcccggccgccccgtctgagaagtgaggagaccctctgcctggcaaccaccccatctgagaagtgaggagcccctccgcccggcagccaccccgtctgggaagtgaggagcgtttccgcccggcagccaccctgtccgggagggaggtggggggtcagcccccgccaggccagccgccccgtcccggagggaggtgggggggtcagtcccccgcccggccagccgccccgtcccggagggaggtgggggggtcagtcccccgcccggccagccgccccgtccgggaggtgaggggcgcctctgcccggccacccctactgggaagtgaggagccccactgcccggccagccgccccgtctgagaggtgtacccaacagctcactgagaacgggccatgatgacaatggcggttttgtggaatagaaaggggggaaaggtggggaagagattgagaaatcggatggttgccgtgtctgtgtagaaagaggtagacatgggagacttttcattttgttctgtactaagaaaaattcttctgccttgggatcctgttgatctgtgaccttacccccaaccctctgctctctgaaacatgtgctgtgtccactcagggttaaatggattaagggcggtgcaagatgtgctttgttaaacagatgcttgaaggcagcatgctcgttaagagtcatcaccactccctaatctcaagtacccagggatacaaacactgcggaaggccgcagggtcctctgcctaggaaaaccagaggcctttgttcacttgtttatctgctgac

SEQ ID NO: 9811 - DNA, 1148 bp, Artificial sequence
  DNA replication origin
acatgtttcagagagcagagggttgggggtaaggtcacagatcaacaggatcccaaggcagaagaatttttcttagtacagaacaaaatgaaaagtctcccatgtctacctctttctacacagacacggcaaccatccgatttctcaatctcttccccacctttcccccctttctattccacaaaaccgccattgtcatcatggcccgttctcagtgagctgttgggtacacctctcagacggggcggctggccgggcagtggggctcctcacttcccagtaggggtggccgggcagaggcgcccctcacctcccggacggggcggctggccgggcgggggactgacccccccacctccctccgggacggggcggctggccgggcgggggactgacccccccacctccctccgggacggggcggctggcctggcgggggctgaccccccacctccctcccggacagggtggctgccgggcggaaacgctcctcacttcccagacggggtggctgccgggcggaggggctcctcacttctcagatggggtggttgccaggcagagggtctcctcacttctcagacggggcggccgggcagagacgctcctcacttcctagataggatggcagccgggcagagacgctcctcactttccatactgggcagccaggcaaaggggctcctcacatcccagacaatgggcggccaggcagagacgctcctcacttcccagaaggggtggcggccgggcagaggctgcaatctcggcactttgggaggccaaggcaggcggctgggaggtggaggttgtagcgagccgagatcacgccactgcactccagcctgggcaccattgagcactgagtgaacgagactccgtctgcaatcccggcacctcgggaggccgaggctggtggatcactcgcggttaggagctggagaccagcccggccaacacagcgaaaccccgtctccaccaaaaaaaatatgaaaaccagtcaggcgtggtggcgcgcgcctgcaatcgcaggcactcggcaggctgaggcaggagaatcaggcagggaggttgcagtgagccgagatggcagcagtacagtccagcttcggctccgcatcagagggagaccgtagaaagagagggag

SEQ ID NO: 9812 - DNA, 1023 bp, Artificial sequence
  DNA replication origin
ccaccctccaactttgcgacggaaatgtgtcatcgaaagccaggtaaccagtgggccgcggctgggccgccggggcaggctaggggcgccgcggtgggcttcggggcctttggggccgtgggcttttgctgccgcccgccccttccggctcctccctgtagagcaaagggcacgtgagcgaggcgcccgaagccgtcgcggcggggaccatgttgcttccgaacatcctgctcaccggtcagggcgcgcggccgggagggactgggctggggcaggctgggggcgcagagtgctctgggcatcgggcgcccaggtgggggcccctcactgccctcttcagaggccggccgagggccacgaggcggttgtcagcgccccgggagccgaccctcgcgggcgttgcgggaggcgagggaggggacgcggaacgttaattccgttggcctgaggctccgggggggggcgggggggggtggagagaggtcggcagatccagctctccagcttggcaacctgcttagtctttctgaatctggtatttcgtttgtaaaatgggttgttgattctttggcagggttggccttgggatttttagcgaaataacgtaaggccatatctgcttcccggtagagtcattaatggtggatgcctcactccttaggcctccgtgggccgtattttattttttctttgcttctgataaacgcctcagattagatttcggtaaacgagttcagatgtttgtgacgtgacgaaattgctgtatgcttttgttgagttacatcaaaggatccccccgccccttaaaaggaaggcatatagagcatttcgggtcgtttctcgcgtaggagtgggtctttgaagccatactcagggtgcatgttatcagtgaagggaattaaaatgctgcataacgactttaacgaatatttttgctagccgtttagtcctgaaagtgtttatcaaattgtaggccattcgtggaaaaatctaatgcatgtagattttattgcaaggtacaga

SEQ ID NO: 9813 - DNA, 950 bp, Artificial sequence
  DNA replication origin
ggctacttcgaatccacttgttgcgagttgtgtgaacccgcgtcgatttaagctggggggcggggagttaatttcgagtgaggctggacttcgagggaagctgctcacgcttcggattctcatccgtgaccaaaagggctgcccccaggggggcggaactgcctccgggcggtgcctgcccggcgaacgtgggcgcgcgctgcctgggagcgcctcggtgcgcacggaagccgggacccgcgcccagccgggccacggagtttggggacctccgggactgggccggccccgcgcgccagccatgttgcctgcgtcggaggaagcgtgcggggagcaggggtcgagggccaagatggcctctgcgcctaggggttgggagcggcgccgagcccctcgcgctcctcgggaagccaccgggcccgagggaaaagccgcggcatccttaggccggacccggggctcgctggccacactgcccgcttggggaattaccctgctcgaggaggaggcggcggctttccaggccagtcagtgtgtggcccttaggcaacaggtgtattattgggatacctggaaaagagaaacgtttcccatgaaggcacttatggtgttttttggtgattcttggtgtgatagaaaactaggcgttcccaagtgtaacaatagtaacagtagttcttttgcactgtacatatgaggtgcttgtgtgtgtgtgtgtgtgtgtttttccgagacggagtctggctctgtcccccagtgcagtggcatcatctgggctcactgcaacctctgcctcccgggttcaagcgattctcctgctcagcctcccgaatagctgggattacaggcacccactagtatgcacagctaatttttgtatttttagtagagacagggttttgccatttggtcaggctggtctcgaactcctgacctcaggtgattcgccc

SEQ ID NO: 9814 - DNA, 1174 bp, Artificial sequence
  DNA replication origin
tcagccccccgcccggccagccgccccgtccgggaggtgaggggcgcctctgcccggccgcccctactgggaagtgaggagcccctctgcccggccagccgccccgtctgggagggaggtaggggggtcagccccctgcccggccagccgccctgtctgggaggtgaggggcccctctgcccggccgcccctactgggaagtgaggagcccctctgcccggccagccgccccatccgggaaggaggtgggggggtcagccccccgcccggccagccgccccatccgggaggttaggggcgcctctgcccggccgcccctactgggaagtgaggagcccctctgcccggccagccgccccgtccgggagggaggtgggggggtcagccccccgcccggccagccgcccggtccaggaggtgaggggcgcctctgcccggccgcccctactgggaagtgaggagcccctctgcccagccaccaccccgtctgggaggtgtacccaacagctcattgagaaagggccatgatgacaatggcggttttgtggaatagaaaggggggaaaggcggggaaaggattgagaaatcggatggttgccatgtctgtgtagaaagtggtagacacgggagacttttcattttgttctgtactaagaaaaattcttctgccttgtgatcctgttgatcggtgaccctacccccaaccctgtgctctctgaaacatgtgctgtgtccactcagggttaaatggattaagagtggtgcaagatgtgctttgttaaacagatgcttgaaggcagtatgctcgttaagagtcatcaccactccctaatctcaagtacccagggacacaaacactgcagaaggccgcagggtcctctgcataggaaaaccagagacctttgttcacttgtttatctgctgaccctccctccactattgtcctatgaccctgccaaatccccctctgtgagaaacacccaagaatgatcaataaaaaaaaaaaaaagtttaaaaggcctgccacctgctattccaaaaacactcttgccaatcttgacccacgagagcacctttggcaatggtttctgtttatctccaaaatgataagcagaaaaataaaagggagtagagggaagaagtagtttttgttttgcaaaggccaagttctttc

SEQ ID NO: 9815 - DNA, 1284 bp, Artificial sequence
  DNA replication origin
gctcctcacttcccagtaggggcggccgggcagaggcgcccctaacctcccggatggggcggctggccgggcggggggctgacccccccacctccttcccggatggggcggctggccgggcagaggggctcctcacttcccagtaggggcggccgggcagaggggcccctcacctcccagacagggcggctggccgggcagggggctgacccccctacctccctcccagacggggcggctggccgggcagaggggctcctcacttcccagtaggggcggccgggcagaggcgcccctcacctcccggacggggcggctggccgggcggggggctgacccccccccacctccctcccggacggggcggctggccgggcggggggctgacccccccacctccctcccggacggggcggctggccgggcggggggctgacccccccacctccctcccggatggggtagctgccgggcagagacgctcctcacttcccagacagagtggctgccgggcggaggggctcctcacttctcatatggggcggttgccaggcggagggtctcctcacttctcagacggggcggctgggcagagacgctcctcacctcccagacggggtcgcggctgggtagaggcgctcctcacatcccagacggggtggcggggcagaggcgctccccacatcttagacgatgggcggccgggcagagacgctcctcacttcctagatggcatgggggccgggaagaggcgctcctcacttcctagatgggatggcggccgggcagagacgctcctcactttccagactgggtagccaggcagaggggctcctcacgtcccagacgatgggcggccaggcagagacgctcctcacttcccagacggggtggcggccgggcagaggctgcaatcttggcactttgggaggccaaggcaggcggctgggaggtggaggttgtagcgagccgagatcacgccactgcactccagcctgggcaccattgagcactgagtgaaccagactccgtctgcaatcccggcaccttgggaggccgaggctggcggatcagtcgcagttcggagctggagaccagcccggccaacacagcgaaaccccgtctccaccaaaaaaataagaaaaccagtcaggcgtggtggcgcgcgcctgcaatcgcaggcactcggcaggctgaggcaggagaatcaggcagggaggctgcagtgagccgagatggcagcagtacagtccagcttcggctcggcatcagtgggagaccgtg

SEQ ID NO: 9816 - DNA, 952 bp, Artificial sequence
  DNA replication origin
cggccagccaccccgtccggaagggaggtgggggggtcagccccccgcccggccagccgccccgtccgggaaggaggttggggggtcagccccccgcccggccagccgccccatccgggagggaggtggggaggtcagccccccgcccggccagccgccccgtccgggagggaggtaggggtgtcagccccccgcccggccagccgccccgtccgggagggaggtggggggtgtcagccccccgcccggccagccgccccgtccgggagggaggtgggggggtcagccccccgcccggccagccgccccatccgggaggtgaggggtgcctctgcccggccgcccctactgggaagtgaggagcccctctgcccggccagccgccccgtccgggagggaggtggggggggtcagccccccgcctggccagccaccccatccgggaggtgaggggcgcctctgcccggccgcccctgctgggaagtgagtagcccctctgcccggccaccaccccgtctgcgaggtgtactcaacagctcattgagaacaggccatgatgacaatggcggttttgtggaatagaaaggggggaacagtggggaaaagattgagaaatcggatggttgccgtgtctgtgtagaaagaggtagacatgggagacttttcattttgttctgtactaagaaaaattcttctgccttgggatcctgttgatctgtgaccttacccccaaccctgtgctctctgaaacatgtgctgtgtccactcagggttgaatggattaagggtggtgcaagatgtgctttgttaaacagatgcttgaaggcagcatgctcgttaagagtcatcgccactccctaatctcaagtacccagggacacaaacactgcggaaggccgcagggtcctctgcctaggaaaaccagagacctttgttcacttgtttatctgct

SEQ ID NO: 9817 - DNA, 1034 bp, Artificial sequence
  DNA replication origin
tggccgggcagaggggctcctcacttcccagtaggggcggccgggcagaggcacccctcacctcccggatggggcggctggccgggcggggggctgacccccccacctccctcccggacggggcggctggccgggcggggggctgacaccccccacctccctcccggacggggcggctggccgggcggggggctgacacccctacctccctcccggacggggcggctggccgggcggggggctgacctccccacctccctcccggatggggcggctggccgggcggggggctgaccccccaacctccttcccggacggggcggctggccgggcggggggctgacccccccacctcccttccggacggggtggctggccgggcggggggctgaccccccacctcccttccggacggggcggctggccaggcggggggctgacccccacctccctcccggacggggtggctgttgggcagagacgctcctcacttcccagacggggtggctgctgggcggaggggctcctcacttctcagacggtgtggctgccgggcggaggggctgctcacttctcagatggggcggttgccaggcagagggtctcctcacttctcagacggggcggccgggcagagacactcctcactttccagactgggcagccaggctgagaggctcctcacatcccagacgatgggcggccaggcagagacgctcctcacttcccagacggggtggcggccgggcagaggctgcaatctcggcactttggggggccaaggcaggcagctgggaggtgggggttgtagcgagccgagatcacgccactgcactccagcctgggcaccattgagcactgagtgaacgcaactccgtctgccatcccggcacctcgggaggccgaggctggcggatcactcgcggttaggagctggagaccagcccagccaacctctgattaatctttcaaacattttggtgttttctggttgatagagaagctagaagggacatacttttttttttttgatt

SEQ ID NO: 9818 - DNA, 932 bp, Artificial sequence
  DNA replication origin
cgtctgagaagtgaggagcccctcctaccggcagccaccccgtctgggaagtgaggagcgtctccgcccggcagccaccccgtccgggagggaggtgggggtcagccctcgccaggccagccgccccgtccgggagggaggtgggggggtcagccccccgcccggccagccgccccgtccgggagggaggtgggggggtcagccccccgcctggccagctgccccgtccgggaggtgaggggcgcctctgtctggctgcccctactgggaagtggggagcccctctgcccggccagccaccccgtctgggagggaggtgggggggtcagcccccctcccggccagccgccccgtccgggaggtgaggggcacctctgcccggccgcccctgctgggaagtgaggggcgcctctgcccggccgcccctgctgggaagtgaagagcccctctgcccggccaccaccccgtctgggaggtgtgcccagcggctcattgagaatgggccatgatgacgtggcggttttgtggaatagaaagggggaaaggtgaggaaaagattgagaaatcggatggttgccgtgtctgtgtagaaagaagtagacatgggagacttttcatttggttctgtactaagaaaaattcttctgccttgggatcctgttgatctgtgaccttacccccaaccctgtgctctctgaaacatgtgctgtgtccactcagggttgaatggattaagggcggtgcaagatgtgcttgttaaacagatgcttgaacgcagtatgctcgttaagagtcatcaccagtccctaatctcaagtacccagggacacaaaaacagcggaaggccgcagggtcctctgcctaggaaaaccagagacctttgttcacttgtttatctgctgaccttccctccactattgtcctatgaccct

SEQ ID NO: 9819 - DNA, 1227 bp, Artificial sequence
  DNA replication origin
tccacaaaaccgccacgtcatcatggcccattctcaatgagccgctgggcacacctcccagacggggtggtggccgggcagaggggctcttcacttcccagcaggggcggccgggcagaggcgcccctcacttcccagcaggggcggccgggcagaggtgcccctcacctcccggacggggcggctggccgggaggggggctgacccccccacctccctcccagacggggtggctggccgggcagaggggctccccacttcccagtaggggcagccagacagaggcgcccctcacctcccggacggggcagctggccaggcggggggctgacccccccacctccctcccggacggggcggctggccgggcggggggctgacccccccacctccctcccggacggggcggctggcctggcgagggctgacccccacctccctcccggacggggtggctgccgggcggagacgctcctcacttcccagacggggtggctgccggtaggaggggctcctcacttctcagacggggcggctgccgggcggaggggctcctcacttctcagatggggcagccgggcagagacgctcctcacctcccagacagggtcgcggccgggcagaggcgctcctcacatcccagacggggcggcggggcagaggcgccccccacatctcagatgatgggcggccgggcagagacgctcctcacttcctagatgggatggtggccgggaagaggcgctcctcacttcctagatgggatggccgccgggcagagacgctcctcactttccagactgggcagccaggcagaggggctcctcacatcccagacgatgggcggccaggcagaggctgcaatctcggcactttgggaggccaaggcaggcggctgggaggtggaggctgtagcgagccgagatcacgccaccgcactccagcctgggcaccattgagcactgagtgaacaagactccgtctgcaatcccggcacgtcgggaggccgaggccggcggatcactcgcggttaggagctggagaccagccccgccaacacagcgaaaccccgtctccaccaaaaaaatacgaaaaccagtcaggtgtggtgtcgcgcgcctgcaatcgcaggcactcggcaggctgaggcaggagaaccaggcagggaggctgcagtgagccgagatggcagcagtacagtccagcttcggctcggcatcagaggga

SEQ ID NO: 9820 - DNA, 1114 bp, Artificial sequence
  DNA replication origin
aagtatgagaggtgacgaggagaggcatgggtgcggggcgcgcgggaggagcgcagtgaccgtcgcgccctgggtggggtcgtgtttgcgcgtctcccagcgcgcgtctctgggggcgcggggccacttaccgagctcgatgttgccgatggcacgccgcaggtgctcctcggtcacgatctcgccgacgaccaccagcaagtagaacttgctgtcaaggaagcggtgcgacaggctaggcgaggtggacgccgccgggttggcgatgctgccggacggctccggctcggtggcttccaccaccacggtcgccatcctgccggctgctgtgcctcggcgaagtgtctcgctccggccgctcctctccactgcggcaggagaaaggattatctccgaaggtactgtctccgctccgccccctgcgtcccccctcctctggcgccgcgcgccgcctccccctccgccctctcccagcgccgcggagagtgcgcggcggagaggagcggggagtgagagagggcggggaggcggcgccgcttttatatggagactaggcagggagccgggaggaggaggaagaggaggaggaaaggaccacccggcacatcctcacgcggtggctgcctccgctcttccagccgttggcccggggctgatgtcatctgcagcaaatcatctcgcccgcggcccggaagctggagggacgaggtgtgcggacaatggtcggggcagggccgcgagccaaggggctggggcgcccgctgagctcctgctgcagccgtgaagggggaagacgctctcaacctacaccacccaccacgtacacacccactgcccactcctcaccctcaccctgtctgtgcatgggaatgggatgagtttccattttcggagtgggggtcttttctcttgttggagttgcactagtcaggcctctgccttgtgtgctgtgtatgatgtagccaggttctcaggaactgggatagccacagtgggcagatgcggggctgtgggtaccccgcctaggaagacggaacctgtcttttctttgaccttgtggctttaagaagacgaatttactgatatttaccaatatcaatatttaccaccttca

SEQ ID NO: 9821 - DNA, 822 bp, Artificial sequence
  DNA replication origin
tggaaaaacccccaagacccacacagctgcagttcaaaccccgcgccagctccacccatttctggccagtcaggcggcgagctccgccgcgcacagagcgccctccacccggcctcccgctcggcctgccacccccacccacggggcgcattgtgtgggcccgggccgctcccgcccgcccgctccctacccccgcggcaggtcagcggcgggcggggacgtggcggcccggcccgcgcacatgtcgcgatcccgggcggcggccgggggcccccgcctcctgcgcgccggaagccggtggccttggcggcgtgagccccacgcggcggcgcccccggcccaggcaccagggccgcgtgcgcgagtcgcccggcaggggcagcggcggcttcccccgcgcccggacccagggaggaggccggtctcggaggatgggggaggggcagaggcggaggcgacgggagcccccggccgccgggggctgggccgcagcgcggggcgagctgcgcgggtggcggccaggcctcggaaaggatacttgttgcacggttctctggatggtggtgtctggggactgggactccttcaacagctgcaggatttgctgaagcccttgctcgtcaggtttccactcatactccatcttggtttgctgcaaataaagccagacacaggaagagacggagcaactgttactcccggtgcacaggcccagaggcttcccgcgcgcagctgacccgttctccccgccaccacaaccccagcgctccccaaacgccgcggacctgcctgaggtgccccgaaggaagtcacggacagtga

SEQ ID NO: 9822 - DNA, 1642 bp, Artificial sequence
  DNA replication origin
tgcgcgggcgcggcggcccggggagggcagggcagggcagtgcaggagcgaccggtgggagctggccgccactgggggcccggggcgcgcccgcgagggaatggagagccaggggcggcttcggaacccagggctggcgggtttggcagcctccgcgctcgtggccgtgcgcgcgaggaatctgggagaaatgggcaccttccacggctgcctggcccgcacacctggcggggccggcgagttgagatgcccccgccggctggcggaactgtgcgccccgcccgccgaggcccgctccccctcgaggcctgaggcccagttctataggggcgcgagagagcggcggcgtggggggcgcggaggaagcgccggcccccgcctccaccgcctccttcgtggttgcggcccaggccgaacagggtaccgtgccccggccgccttggccttggccaccgcgaggtccggggcgactacacccagcagccctgtggccctcctactgctctggagacctggagtggggttacagagggaagcgactcgctgcgagctccccatcgaatatggagccaccaggtcacgggacgacgtgcgctctacagaatgtgagacaagggccctccacacccagccattcaggcctgaggtcctggctccgagactgaggccgagacgcggcaagccccgcgccggaccagctctgcccctcccgcacccacgtgtctgcgcacagccctcctttgcgatagaacccccttcctggttctccaccactaatgatctgccggaattaaactggtaactttccctgcccttgaaccgggagtttcgggatgagtttgccaatccctgtgctatttgtaaccagccccgtgacacgtgatacggatccaactgtgctagtttccacaccaggggtcagggcacggtggaaggtgagtcaagggttctctgcccaagcgcagaggtgccctgagccacggggacttcccagccctgccttctcttctcagcttcctgtctgccttgcctgaaaccctatctagagttaaggccaatggatgaaacttttcaatgtgcaagcaagcactttacctacctgatacaacaagagattcctggtcatgctcactgaaggtaaagtatgaagcaggcttagctaatcatcagaggtgagaagagacttaaagaaccagtcagagaggtaaagaggggagggggttacctgggctttagggttcaccagggaggcagaacggacaagttcttgccattggaatttggtggggcacttgcctgggtggccaaaggtggactttttcatagccagggtgcccgacctctgtaaatccccgccataactaacagccctgattactgtcgaaatgaacaatgccaacactcacgaccccttgctttgtggttctttgctacatctctccagcagttcagaaaaggttggaggcagcaggggacaggagactgagaaaaacagtcatttgtcagttgaggaaactgaggtccaggctgacagaggtaaagtaacctctgcagctggttgacatgcagagaaggcctgagccagatgcagatgcgctgaccattcagtgtttctcccgcagcacacctgtcactcagagaa

SEQ ID NO: 9823 - DNA, 896 bp, Artificial sequence
  DNA replication origin
ccgtggaaggtgcccatttctcccagattcctcgcgcgcacggccacgagcgcggaggctgccaaacccgccagccctgggttccgaagccgcccctggctctccattccctcgcgggcgcgccccgggcccccagtggcggccagctcccaccggtcgctcctgcactgccctgccctgccctccccgggccgccgcgcccgcgcagcaccgcctccttctctaaatactgccgggtccgccctccgcaccaggacgcgcggtgggtagggtgcagggcggccggcgcagccgaggccgcgtgcggaggcggacgccgcgcccagccagtgcccacagcagcgcggtcagccaggcgccggacccagcttcaggtaagctgccccggcccgcgcgcctgcgccggcggcggcgggtcgggcgctgagctgtgcggccaggctgggcgcggggagccgcggcagcgcggaggcgctgggtatccgagcccaacctgcgtccctgcgagcccctccggctgttgcttgcgctcgggctccctaaaagccgcaaaccgatttcgcacagaaggcatttgcctctcgtttcgttccccaaacgcaccatagctttggacgtggagaggtgctgtgaattttggaaatgtcttttggaaaaccaataggagtgttggagaggggagtttggctttggggagtttaagtgtagggtggtgtttggaaaaggtttcattgcgagtgaatgtgggtgtctttgtatccgtttgtgagtgcatctgtgggagaaggagagagagagagtatttccacactattatggatcagaggtgaacactcagccaggtgctccgtccactagtccacggacaagaaactacagattcagttttgggcttc

SEQ ID NO: 9824 - DNA, 1511 bp, Artificial sequence
  DNA replication origin
ccgccgaccagggaggattacggggcctgttccgcggcgggctcgccggcgggacgggcaggctcaaaagaaaaagaataattagggataattgcttgtgtccaaacacaagcattaaggccccctgttcccctttgggactttgtgagccagaatgaaagagacaccccctgttttgacagctggaccagcggcctggatcggtgaccgagggaggaagctttcccggctgctgggaacgcggccgagcagggctgcgggtgggcaggggaccggcccggcccagcgcgggcggggtccacgcgtgggtcaccgcttcggcgacagccctccctgcgctcgggagcgtgcgggtggcgtccccgcccctcgcctgaggcctgcggaagcccgcggaagcccaggagcctggtgcgggctttgggcaacagagggcagcgtcctgcgcacacgcctctcgaagacccaaggggaagcgcggacctggcgccccctgcgagccgctgggacgtctggggccgcaaagccctggccgtgacacccctcgaagttccacaccccgccgcgtgtgatctcttcagccccaccaacactcacaagcgggaatatctgatcccacctcgttcggcgtggggcggcctgagccacatttggagacacccgagtcccagggtggtcccagccacatccgcccttgaagctgaggcgcgagtaggaggcctcccttagtgactggggagtgacgggagaattaaacgcaacgagggcaacggcttaatgcacaccctctggatcaggtcttgcccactgccccgcaatcctgagagtggcttgatgttggggtttggggccagggctttccggaaaggagcctgcacaggccaaggcctccaacctccgggggcccaactgcctgggagcttggctatttgccctgtgtcatgcgaactccaggaagtcacagtgcctgaggtggccaagatattctttgagagatccttgataggggtgcaaaagttggctggtgtcagcgggatgccagcgcctaagcggggatggggaggagggcagagaagggaggaaacctgaaggaaatatgcacttcgagaccaccctgaacacctggaccacccaggctgaggcctggaactgctgagcctcgaggccagcatggccaacaggccagacagttcggaaagggcagtgaatcttccagaaggcctatctgggaggatatcgctctgtctctgggcggcggcccgaagcccagcggcaggcagaaccacctccgcggcaaccccagatgctccaccagctctcctgcctccaaatagagatcacatgcggggctggaggaagagtggggaagcggcgcggtggacacgcgggcatgagtgattaattaaagggaaaccacatccgacaagaaaagagttttctgaaaggagccgagtccaagaagagctcccgaccctgcagctgcagcccagacggatccgccagctgccagg

SEQ ID NO: 9825 - DNA, 1847 bp, Artificial sequence
  DNA replication origin
gcgccgtcgggcaaagaaccagaggcgtggagcgaatgcagcgcccgggagtcagggctgttagtggcgtggcccgccgggcattgagctgtttcctccaacgcccggtcccccgcggcctaggcccagtgtttgcttttgcagatacgtcagagggaacattcaggaggggcgggctcccaggctcccaggagaccgcccggagcctccggagcgcgacgaggcgcggggcctcggagatctggcctgccagattgagggggaggggagggggcctggcccagcagctggacaggcgcgcagtgcccgcagcccgcgagtgggcgcccagctggcttcgcacgggtgaggggctcagcctgcacttccctcctccaccccgaccgccgaacgcgtcccggctggcttcagagtgcgcttctcgtggacgtgctgcgcgcaccctagggagatgcgcggcgtccgcgcgggtcagcgccccagtaccactccccagtgtactccccaggtacacgcttcccttgcgcggcgagtttcaactcaggtcagaacggagctgagcggtgggcggagtggagaaaggtcccggaaattggccaagagggggcggtttcgaggtagtgccttcgaagtgttgtccagaccagcagggagggtcgcctccacctgcggggcctcctccagctccacaaggtagccccgtagggacttgcagatctgccagacctagcagtgagaccactgctcccactgaatggcgccgcctgcgggctggcccaagctctatgcaccggctttatctcattttctcctcaccgttaataactggcaaggcagtgtgatcaccctacttggagaagacatcctgttctaatggcttagcatagcgcccattacttctaggggagtaacacatgccagttcctcccattttataggaggaaggcaccaagagggtaaacagtctcaatagacacaaccagtaggtgcctgagtgtccactggaatgggtctgcgggcagtcacctgatgtctggaccccttttacttcttccactgacctttgggaggccagtgtttcagaaaaactcggggtgggagctgtgggtagaactgggaagatggagggggaggaaggtccttcgcagaaaatcggaaaggcagaaggcccattagaaggctaagttctagttgggcagggagctttgaatcattactatactcaaatgagaagcacttgagtgccaaccacttgtccagtgctgtgctgggcccttcacagatgagctgtgttttccatcttggctgcacatggggattgtttggggaattttaaaaatctgatgcccagagcaattaaatcatcatttctaggagtaggaccaaagcatcattttttttaaagcttcccaaggaattccaatgtgcaaccatgcttgaggacttctgccttggggaaattatcttaatcctcacaactcctccacatagcagataccattacgatgcctatttcatcagtaagaaaagccaaggcttagagaggacctgtatttggtccgagtcagcccagagactagcacaggttaatctggcgtgacacagcagacatccagcctgtctgggctgagtccccttctaactttcacccccaggagtttactgtgctggagagacaacctaaggtcacagcaggaagaggtaggaaggcttctgaagtttcacagcttcaggcagagagctatattcagggtcttgagtacagagggaggcaggatgggaagaaagggaaagtaatagctttggttttctttgggaaaaagtaggttaggttcccagatgaccct

SEQ ID NO: 9826 - DNA, 1261 bp, Artificial sequence
  DNA replication origin
ctctgtttattcttccgtcggggaaattggtttacacgcgcagtaattttggtgcgacacgaaaatagtctcttgaactaatgctacgggtccgacaggctttgtgactgctaacaaccctccattacatctgtcagtagacttttacacagccccaaggtcggtcccaggtttatcatcactatttgtaaaccaattggtctcccgtgatgaccggagacgcggacgcctgagtccgaggaggaggtcgagaggcccaggagtattcgggtcgcagagagcaaagcctcgacgggtcctgcgatccgtgggacacgccaggctgacaatgagcggtccctagcagtttccttccccagccgccctgtcctggcgtttgtgtcttttttctcctcactgtgatcctgagcggtgggcctggctccccaagtaacagagaaagaggtggtcacaagcctgggaccgatgcgtcgctgacccggcgtgttttgcagatcgaagatggaccgatgggctggggggtggaggaggtgggggtggagagagtggcggaggccacctggccgcttggagggcctcatggggacggttcggtactcccccacaggtcaagtccgctcgaggactaggggcgtggaaggtcaggtcagcggagtgaagagctggcaggacgcagtcctggtgggtgttggtgtctttttgtctctcagcgtttgtgggcgctgggcaaggcccaccgagaatggggagcccaggactgtaaggtggctgcgcgggaggcagcgagcgcccagggcggtccaccagctgtgtaatcggagaaattgctccgaaattgcgtaggctgccctggctgagaggcctgtaatcagcccctggcaagtgtgcaaatgctgattttgcgggtgttacctcatccacgctggcggtgaaaagcctcgggctggtggcaggctcgcctctcacagcctgacttctcccggtctagcgggtgggggtgcagaccctgccccgaggtgggttggggtgaagtgtgggagtgtgcatctgaggttgggggcttctttggcccaaagattagggaggctgaaagaaggtgaaaatgaaatcgttgactattgccttaatgcaggttcattgtccccgtgtcctagcaggaatgagccactttctctgcctcccatgcttcgcttggtctttctgtctcttttaagaggaggaaaagttggtggaggagaaaaccagaattatttaccacaca

SEQ ID NO: 9827 - DNA, 1838 bp, Artificial sequence
  DNA replication origin
aaatcctcagggaaaatcccgaggggccaacggtctaggccacagggctgctgggcccgggcctggctcagagcgcattcgggcggggaggccgcacgccgcacccgggcctctcctccgagcccgaggcaggcactgagctccgggccagccaggtgcctcccggctggtgcgagaccccgggcctgctgggaggcgtgggcagggcagggcagggctgaaccccagcgactgaatctcgaaggcaggaggcctcggaggtcatcggcccagctcgcctgaaactgtccctgctcgtgccagggcgcgggcagaggagaaaggacagggcggagcaagcccactgcagaactgcggtcggtggctgcgaagggtccgggtcaccgcgctcccggacgccggaagccgcgctggcggggccgcggggagggaggctgggtaccggggccgtccggccggaggaagcggctccggccgcgctgtccgcgcttgggagccgcgtgcagggttcagccgtgtttcagttgccctctgacctgaccccgggcgcacaaaggcctcccgggtgcgccgccatggcccagtcttccagtcgctgccaaattaatgagcccacgtcaggttgggtttacagctcggccgggaagcagccgagtggaaaatgagctcggggccgctccagaggctcccgcacaactgcagaggctgcccgcgtccctggccgccgcaaaggccgggcgcagcccaggagaccgggagtcgcggcccgcgcggttccgccctcggcttcgactttagctgcctccagagggaacaggcctggtgtagcgaaacctggtatgtgagaaatgtgtctgtcctgctttattaaaacaacacaaaccccacatttaacatccagcagcagcgggcgaggcgtgcttgacatgggtcgttgggttgcgggcttggcgacccttctgtgtccttgcagcgccctactttgccctgggcttcctggctttgggggctcaagttcgtgttcctgggaatccctgcttcttgaccacaaagaatccaggagcctcccagtgagtgtgtaccaaggtggggacagagaatggtggttggctccttccagggcaagggtctgtctggaaggtcaacacccaggagacattttcaatcagctgctgggtgccaagttggaagccaaagattacttgaaataggatttggtgtgtgttttgaataaaagtcgacccgcgagtttatcacaaagcttcccagactggctcctggggctgacggctctgctttcttactgctctttaaatgctgtggggaattcagttcaagaaaaatgactaaacttgaagctgataaagcttaaggcattgatttatattattccttccagatttttcaagtatattaaaagaatgtcttttcatctaaaaacactcaaaaggtcggaagagcaatgctcttgaaaaagccctctccctgcagcttggtttgctgttgagaaccaagaaggttaagtaagaactagaagacactggtgtgactgttgagtctgaatcatgtgtcactcctgcatgccccccacacttactccaaggactgctgcctttcagacgcggagggcttgggtattgacccctgttcttctggggatctaagcaaggagagcactgagtcacctattataacccctcacatttgctcatcaatttcccttgcctggactccacagaggccctcccactgtcctgtgggcacttccaactcttgcagacctggctgccctctctgagcccacatcttcctctgaaatctcgatgttcttagaaggt

SEQ ID NO: 9828 - DNA, 1229 bp, Artificial sequence
  DNA replication origin
aatttttgtaaaaatattagataacttctcatcaacaaaaggaacaaacaacgccctccccacacaaaatctgtagttgcaatatgtctactatttctcttttgcttccctgttatcctgtgtctgcagttctttctaatgagccatgaaaaagacaaagaaaaaatacatctacatataaactatggggacagaatcaacagcttgcctaaggaattgaaccaagtcaggtttaacttcttaagacagatttggagatggacttaagagggaaggaagaagactgaggagtatagtaagaatctgtctgtctagtcacacagtaggtgctccacacacatttcttttaaaaaaaactggtaacaaaaaatacacattatttacgcaagcgaggaactcctacagcataatgtttggccaagatagtgacttcaggatggcacccgacccactttcctctcattcccaaatgcttacttggaaattccatgttgctaaaagtgaggacgaggagagggaggagctggtaagtatgtgagaaatacggaagacagatggagaggaaaatgtgtagcctaccgaatgcaaaaggatgctttccaagacagaaggagggaactaggcgccttttttccactccgctgaccccaacgtctgggctgtgcgttgtaacgcagttggcggggccttcagcttgggatgagggcgaaggggctcgggatgggtgggaaagcaaggaccgggcaacaggtggggaggtggcggacttttgtctcggggaaggaaatcggctgtgctgaaagggcggaaagcagtagcgcacagaactagtgtctgcggggtcccgggcgctctcgccttcgccctgggctcctctaattagagaggggatgcagggtggcattagttcccaaacgttttaatcgagcctcttttcaatggccagggataaatgtagccactgttactctgtgctgaatgggtcgcaaaggcccccgcccggcccccagcgaggccattcaggcgtcttttcacaacccctaagcggttcagtccccgggcctagcgacactccagagcgctcctaattagtctaattagaaaggtggattgatagatggaaagaagacagagttgggttaggaagatgctcaatgctgccaatctcggctgggttgccgcttattctctgcgtaaagaaaaggccgcaaagaaggaagttggagccg

SEQ ID NO: 9829 - DNA, 1003 bp, Artificial sequence
  DNA replication origin
tacggcctgcagctgccgccttacgcgccgccctcggccctcttcgccgccgcagcggccgccgccgccgccgccgccttccacccgcactcgcccccgccgcccccgccaccgcacggcgcggccgccgagctggcccggaccgccttcggctaccggccgcacccgctcggcgccgccctacccggccccctgccggcctccgcggccaaggcgggcggcccgggcgcctcagcgctggcgcgctcgcccttctccatcgagagcatcatcgggggcagcttgggcccggccgccgctgccgccgccgccgcgcaggccgccgccgccgctcaggcctcgccctcgccctcgccggtggcggcgccgccagctcccggatccagcggaggaggctgcgcggcgcaggcggccgtgggcccggcggccgcgctcacccgatccctcgtggccgccgcggccgccgccgcctcctcagtctcctcgtccgccgccttggggactctgcaccaagggactgccctgtccagtgtcgagaactttactgctaggatttccaattgttaataacgctatgttagcgcgctcgaggaagaaggtaggaatcccggctccttttctcgtcttggtggttcggtgttttgttcgctcctccaggcgcggcccctctcgacctcgcgcgcccattttcgccgctgcgaattctcggacaaaactgtcaacagcccgggcgcgccttttggctctgcgggtccctctatttatgcaaagccgacctatgctacagccccccaacccccgacctggggtagggaggaagagggtgccggggaagggagtccgccctgtccaggcactagaggctcccttgacgtttggcagatgaaaaacaactaagcctttttgaggtgtagagattctcaggtccaggcgttaaaaaataatggtcaaaagaataatacaaaaatagtaaaggtcttgaagaatgccagcgaagcaattc

SEQ ID NO: 9830 - DNA, 821 bp, Artificial sequence
  DNA replication origin
cctgcgcggcggcggcggcagcggcggccgggcccaagctgcccccgatgatgctctcgatggagaagggcgagcgcgccagcgctgaggcgcccgggccgcccgccttggccgcggaggccggcagggggccgggtagggcggcgccgagcgggtgcggccggtagccgaaggcggtccgggccagctcggcggccgcgccgtgcggtggcgggggcggcgggggcgagtgcgggtggaaggcggcggcggcggcggcggccgctgcggcggcgaagagggccgagggcggcgcgtaaggcggcagctgcaggccgtagccgcagccgtaggggccgtagccgtaggcatgcgggggcggcgggggcgcgggcgggaagagcgcggcggcggctgccgggtcgcccgcgccccctgcggctcccgcgccgcgcagcagcagagactcggcggccgcggcgttgggtgggagcagcggctgccgcttgaagcgcttcctccggcgcaggaagctgccgttgtcgaacatgtcggcggactccgggtccagcgtccagtagttgcccttgcccgggttgccgggctcgcgggggatcttgacgaagcagtcgttgagcgagaggttgtggcggatgctgttctgccaggcggggaacttctcccggtagtaggggaagcggccgctgatgaactcacagatctcgctcagcgtcagccgcttcttggggctctgcaggatggccatagtgatgagcgcgatatacgagtagggcggcttcaccagcgggttcttggcgccgctacccgcgctcccgccgccg

SEQ ID NO: 9831 - DNA, 875 bp, Artificial sequence
  DNA replication origin
cggggcccgccaccgccgccctcgtcgtcgtcctcctcttcctcgtcttcttcgtcctcgccctcccccaccacgtcgatgtctgtttcctcggcgaggccagaggcatcggacatctcagtgctcagggtcatagctgtggcgcggcggcggcggggcggcgcatgggggcgccgggctccgggctccctctgcgccccagcccgggtcccgggcggcaggcccggccggggggcgccacgctgggggcgctgcgactgcggctgccggagctgcgccggggctgccgggtggcggcggagtctcgcgcgccgactttataactcctgcgccgccgcggtagccgcgcggatgctgcgctccctgggctccgctcgcgcccggcccgggcggaggacttgaccttctcctctcggagcagcttttgccccgtcagctgaggagggggtggcggggcccgggcgggcgaatcagaacgccaggcgcccaggaacgtgcgggacgggtgagagtctaagaacagagctcggcgaggccagggctgagtccaggagagggcggaccttcctcggcttatagcagaagggggcctgtcacatggtgtgcacgtcagagcgctgccgagggaaggaaagcaagcctaggaaatcagcccttctcgggagagaaaattcacccgtaggagggaggcagcagctgagaagagtggggaggagaggggacctcactatttcttgccaaagaggctgatgcccgaattacgcggctgtctgcaccgagggccgctgcacgagttagacttcccagcctcctcaattagtcctccaccctaacctcagaagcacacccgcgacactctggtttgacccctcgac

SEQ ID NO: 9832 - DNA, 996 bp, Artificial sequence
  DNA replication origin
tggcgcagcctctccggctctcacctagcgtaatccacgtgacccccgcgcaggggctcctggagggcccaaaccgctcgtggggggaaaaagcctcagcctgcagtccaaggacctgcctccactaccgcccagtcccgggcccccgcagccggtgggagggacgcccgggagccggctgcccacactcgagaaacacaggctgctgggcgagttccccgcgcgggccgagctcccagggagttgccggcccgggcgcgagggcccgcaggtcgtcgcaccgccgccagggggcaactctgccctacgcaggcaccaccgggacccgccgcccgccactttccgcgtccacgcgagcgggttgcgccggacgggggtcttcgcgtcgcttccccggctcgcctctgggaaaggttttggtcccttgtaccagcttgggggcggggagccgggggagagttaccagctggggccgaaagctgggagcgctgtagagaaggaggcccggggtaggggacgatgggggagacaagggggtcgcgcaagacgtgaatcgcttgagtttccgcgctcggggaatttcgcgactgcggagctaaaggttgcatacaaacatgtagcttaactaagcaaacaaaacaagtggtcacatccacatgtggggcttcagtaaagctcgcctaaatcttagtgacacttctccgtctctgcagcggtccctctgggctgatcttccactctgaccttcagtaagtcctaaaactttccccggagtggccaggagataattcgccacattctgcaaacgtttccagggaagagcctcttaaccctttgggggaagaacttgcggacaaagttacaaacgaacgcagtctatctcccgcgccatgaacggaatgatggctgtaaccggtcatctaaagtcattaatggtctgcgaacaaattcttcctctctgtttcatctttgaataacttcgccacacaccaaccc

SEQ ID NO: 9833 - DNA, 1521 bp, Artificial sequence
  DNA replication origin
tgaaggaagtggccttgtgtcacttccggcctccctttagctgccatcttgcgtccccgcgtgtgtgcgcctaatctcaggtggtccacccgagaccccttgagcaccaaccctagtcccccgcgcggccccttattcgctccgacaaggtacaaaaaggctctggacggcggcgtggtaggaggacgggagcgggggcgggaagttccctgaaggagcgagacagggagggacagggcagaggaggagaggaaggcgatgcgacggacaggcgcacccgctcaggctgactctcgggggcgaggtcgagccaggggcggctgccctgggggcgaggcgacgctgtctcaacctccacctcgcggcggaacccgaggacaggagcctcaggtaccgcgaggcttgcggagagtggccgggccgggcaggccctggctaggccgaggccaggccagggccaggggtggggggtgctggccaggcgtggggtagagcctttcatccgggcctgccaagagcggggagctgtgggggagtggtggggaggcgggtgctctttgggctccctggaaacccaaatttggagctttgcggggtggatttgggatccaggtttcggcctgtgtaggacgtttattttcctgctggtatcttgggaaataacgagcatggaatgctagagtgagctaaacctatccttgctgaggatttcctctttttctagatgaaagaaacaatcatgaaccaggaaaaactcgccaaactgcaggcacaagtgcgcattggtgggaaagtaagttttaatagttcgggtttgtgggttttttttttaaggtttaggtattttaaaaaacatattccttttgcgcttcttatattatcggtgacaaactttgcctatcgagggaaattcacggagctagcaaatctcgaggagcgggggagacgagggttggagacacatcagtgagacgagctaaaaacatcgcctttgtgtaaacatgtttgtgttttcagtgttacagagtgtaagtagaacacaaaagtgtttcctaatttaattagtaaggaaaatgtgtcatttcagttagatcgttgtgcacatcatacccttgacttgttttggcctgagttttctaaagtcagtgcttgtttgtctctcttgtaaattgagacctttctgtactgctttctgaactaaatattctttagggtagttgcatatttcaagggtatttgaagatacgggtacattttggagtttaagagcagtgactattagatttgaaaatataacccaagtaggtatctttcctgttctgactttgtattactgtaaaaatgagggaattaaagtgactgatttttaaatgatcagtttttgattaattgtttttttcctggtggatactgattcacatcaaggggattcttttttgaagctgatttttagattgtcctgtaattaataagaagtccactgtagacagaggtctacctagtttgtattgttagcacatt

SEQ ID NO: 9834 - DNA, 1174 bp, Artificial sequence
  DNA replication origin
cccgctgctggcgcagccagccgggcccgggcgcgcggccgcggctccaccccctaaaccttggcttcagcccggccgccgccaggcgttggcatcgccggggagagccttccggactccgggcggcggctggctgggggcgcgttccgaggcgccctcaggcagggcgcgggggcagagcctcgcctgggttctggaggctgcggggccatcgctccaggtaaatgctctttgggactccatcgtctgcgtttccctgcagctctgggcggaaaagtttgtccacctgagttcgcatccgcagggccactttctccagggtccccagggatgcgagggtcagcagaggtgaccggggaaccgctgcaggcgctgcggcgcgagggctgggcgccgcctcccgctccctcgggagcggcaacaagtggagagggcggcgcagcctcgtgcggcggcggcagctgcggagcgcggggtcgctcgggcgcactgagagccgggggctgggcgggtgaaagccccgccagtgtccttcgggagacagggaaataaacagcactcctgcggtggagaagggagaacgtcgagagttggtgtccgcccttcccatccatgcttcagctccgggactgagggtgcttggcagggccaggaccgcagaatgcagacggaacgcaagctcaggacacacgcactaccacttactcgtgtggaagcatctgctgtgtttcaaaaggcatttatggttaccttggttgggaaaggtggtcagaattatgtgggactccttacgcttattttatggatttgtttccccttaaatacccggggtgtatgtggtggtgccccagccttcccgtgcttaggttttccgaatgacaggccggtgtttggccaagaaagcaccatttgggtcgagggctgtatggaaactgggtgctcaggcggccctggatacccagctttggtttcccagagaccagttagatttctaagaaagaatccatctctataggcccacagcgtccccgcattggttggctgggtgggccgaggaacagtggcaacatctgtgtttgtgcggcttctcccgccttgacccctgcctgggtatccacacatctcctcacaccaggagttatagaggttcaccacggaccacaccaattgggca

SEQ ID NO: 9835 - DNA, 983 bp, Artificial sequence
  DNA replication origin
caaggtccttactcggctggaacttatatttctagaaatagccaaatataaagaaagaaatatgtcaggttgtatcaagtgctatgaagaaaaataagcaggataagggagagagagggtgatggagttgggatcgctctgttttagatagggtggccagggaaggcctctttgatataatgatatgtaagtggacatgaaggaagaaagctaagtggtatcttgagggagagtcttccaggcgtagggaatggccggcacaaaggtcctggtgcatggaagtgccaggctcgcctgaggagcaggcagggggacagcacaggctgagggaagggagggtggggtgagcagtgcaggcgatgagtccagggttcactaggtctcaggttgcatggcgggagagaaggacttggaatttcatcctgagtgggatgggaagcattagagaattttgagtggaggagggacttgacttgtggtttgaaaggtacctcctgactgctgtgtggagaatagacttaagagggtgaagtgcagatgttggtaataacaatgggagatggtggccgaggttgggtgaagggcaaggtcattggagatgagaaagtccagaggatgagaggccagggtggtggaaggactaagtttatagaattgaaaatactgagaattttgacaggattagcgctagtgggagggggagaacttgtgctgtgtgctaactcattcagggaaggcaaacgagtggctgaaggtctatagaggaaaggcaacaatgagcggtagtgagtggttgtaacctgagggcagcggcttcaaggcagaaaggagttgaagggagagatggagataatggtctgaagtgacagtgggacaaagggcttgggagataaaccagccacctcctgagagagtagcaggaaatgctgttgtacagaagaagggctggtaaattacagaccacggactacacacatcccaca

SEQ ID NO: 9836 - DNA, 1156 bp, Artificial sequence
  DNA replication origin
cgcagcgcctgcaacaggtccggggcagtgggggaaacttacagcagtggcgactggccgcaacgcacaactgagttctagcgacggtcacgggcaaggaggcgacgaaccggtcgtctcagcccagggaagcggtggcgaatgccccggagaaaggagggccagccggggagaggactgcgccccgaacgatggctcgcggaccggctaccgatggcgttcgcctccgtctgtcgtccccacgccgcggacccggtgtccaggacccgcagagcgtctccggagcgcgtcacggtagggcagagcaagcctgccactgcaggcgccgcggaaggaggcgggctgtgcgctcgggggagggagctagaaagcgccttgtgtgccggcggccgccaggcgtctggaccgggtctccgcagcgccaccgccgcaccgcctcctctccggctgccagagcagtctgcgccccgccgccgtgcgccccgctataagtggcgcggcggggaggggagggggcgcgtatgcaaagagaccgacaccgggggagggaggaagcgcattagcgcggcctgtggtgtaggaggaggaagaggaggagaaggagtgggaggaggagaggagctagagaagagcgtgtcgggggagttaatcgggagaggaagcgggagaggggggctgcggggagtgcagagagacaaagcggacgcactgtctcagccgctggcagctgcaaccccgggaaccgagaataaaataagttttcccgggttcgagtgtctgcgcctctttgggccagcctggttaatggacagccccggatctgagggacccaccttaggggagcgcagcccggggctgtgcgcttggtgatgccagagcccgcgagatgctctaaaaagggctgcaaggggcgagctgggtatccgcaggacaggccctgggcacgcatagacagcgccttgggtaggacacccagagtggggagagatagtggcaatggacgggcaaaagtctggacagtttagggacactcgggttgagcaagccaggacgtttaagtttcttgctggcagagagccaaagagactccagccccaggcatttcctatgtgtcctccctccccactccccagtgggtgcggcacccccggctgga

SEQ ID NO: 9837 - DNA, 1358 bp, Artificial sequence
  DNA replication origin
aggaaattctcgaggtgacctggacagggcgggctgggcgaggacgctcccggggcctggaggcggagtcgggggcgggcgcgcgcagtcatctgactcggtgactcacccgcggccgcgcttcctctgatccgggccgggcgggaagtcgggtcccgaggctccggctcggcagaccgggcggaaagcagccgagcggccatggagctgtgcgggctggggctgccccggccgcccatgctgctggcgctgctgttggcgacactgctggcggcgatgttggcgctgctgactcaggtggcgctggtggtgcaggtggcggaggcggctcgggccccgagcgtctcggccaagccggggccggcgctgtggcccctgccgctcttggtgaagatgaccccgaacctgctgcatctcgccccggagaacttctacatcagccacagccccaattccacggcgggcccctcctgcaccctgctggaggaagcgtttcgacggtgagcgctcccggcccggccgggagttgtcctgggggaggggagaggcggaccaccccggagcgctgtgcagaccctcaccaccccactgcgcagacgagaaaccgcctgggagctggcaggcgatctgcccagcgccacatggactgaacccacgctcttgcccccaccctcctactgcttcttaagggacaccttgggtgctcaggaaccctggtttgagagccggatagtaagtggaagagggagtttgctctgaggccttgttgggcaaatggcatggacggaggggacaccggagctggggaggaaagtgacagctccttatttgaaggacgtgcaaagggataagttacccgaagggcttagacaagctctcttgagggaccaggaatcccccaaagctgactgtcatttataggccagtttcgccccctcacctctcctcacatctcctggtaacagctcaaatggcagaagtcctcagtttcgagcactgcctaaaactgccctctctcctaaaatctcttccatataaaatgtgacatgtttgcatctgactacgtttctgcggtcagtggttaggcagtatccaactttgtttctcaacaccgatcatgttgcctgctctccctgcttcctcttttacagacccctagatagcgcctctgtctctctcaccctttggctgcagacagggtgagttttgtcatgggagtcagccaatcacaccatagacaaggcaggttcccctggggagatgtttgaagacgccacacactgtcccctcagtgtgagacctgtgtaggtgggactgtcctgaaggcgtatcgtgccctgcagaattgtaatttggtg

SEQ ID NO: 9838 - DNA, 825 bp, Artificial sequence
  DNA replication origin
cgccctggcagccgcgagctgtgcggcctgggaccggccggaggtcgccagcgagcagccgccggctccattcattcgcgcggctccgcctcctttcccgggctcttccagcggctcccggggcgcgtctgaggtgagtgcgctccctctccccggcgcggaccgctgggtgaggccgagacggccgcgccgggccccgcgcccccgccagcaccagacccgcggacaccgagcggcgacgcgggccaccggctgtgggcggcccctgcgggctgggcctggcgcagaccagtgcgggccgcctggacccggggctcgcgtccagctggcggcggtctgcggggatcccgtagggcgtgtggcgcccccaggtgcgccggcctccgcctcggcgccaccattttgtgtgagggaatgcccgtcttcgctcgcctccgccgcgggccggttcgcagctgcggcttgccgccccctcccctcgccctctccccacctggatgcttggcgtgcgagctgattgctttggcttggggagacgcggactcggggaggtgtggaacttcagcgtttagactcggttcacccgaccaggtggcctccagagatgctctgaccgccttcctttacctgtaactacttttggaacagatattgtatgattctccctcctctggaatgctggtcgttgcagttttgtcctaattgtgttctcagctctccattatgccatttttcaagaggcctgtgcctcaggaggtgaagccttgaaccctgggtggtttatggctcgggggtctggattacactgactcccatgactgtcct

SEQ ID NO: 9839 - DNA, 992 bp, Artificial sequence
  DNA replication origin
ggtccgcgccggggagagggagcgcactcacctcagacgcgccccgggagccgctggaagagcccgggaaaggaggcggagccgcgcgaatgaatggagccggcggctgctcgctggcgacctccggccggtcccaggccgcacagctcgcggctgccagggcgagtgcggctgcctcccgctcgccccggacgcccggctcctcgtcgcgggtcggccgcggcccaccgtgccctccgacgacgtgacgcactagcgccgcagcgcctccagccttcgcttccgctccgcgcccgcgcccaccgcgaatccccccgcccgccagcgcggagcggcccctcctcggagcctgggacgccgccctgcctccctccagccccggctttcaggcgccggcccggcaggtgcgggcttggccagcccgggggcgtcacgcggcccccgcctcgccacccgcgccccctctctccgccccggccgccgtcacccggcagcgcgacgcccagctcagggcaatggcctggtattaaagagtgaccttggcttagatataaaaatagatgcggttaagccgcgggggctgcaacgctgattttgcgtattcctttaatgccgaccttcgcaggattctgttcgcatagcccggtggagttctccagccccgcgtaggccctcctgaaatttacccagagtgggcgcggccatcccggcctcgggacaggggtgcagagggcacgggcgaggaccgccggcctccgccccaccactttcatcctaaacctactgccacttaggtgcatgcaagttagaatcgtgggctgctttcacagtctacagaagtcctagagcccggactttcatctggagatgtcagggaaataccacattcctgcgctgaccttttctctttcaccgtttaaccggtacagaataaccctgacccagaaagacaacagggttccatccggctttcctcccgtgcctctcccagc

SEQ ID NO: 9840 - DNA, 756 bp, Artificial sequence
  DNA replication origin
gggtgaatggcatagtcgggcagtcagagttagcactttatggcacctggccaagtgccttcaagataagcaggccataaatacaggtgcttcccaaactgactttgaatgacctatggttgttttctaggaagggagagggagagagagcaggtagagggccctgtacctgacggtgctgtttctgcctcatccttgacccacgggtgctgggagcatgacctggtgacctggggcttatcacagcaccacataggagaggtaaaacggagtcagcttcaggggatttccttcttaggctacaaggcgggaagaaagcagtgagacagtaaaaatgagcaaagcaaggctgaaaagtgagttcttcaggccacctgtgttgagcactggctgtgaaccaggctgtgaactgtcccaatgtgaacagcgcattggctgctgtgaggcgcagatgtgctgcagctcactgcatctgtgctgaggcaggaggccttgctggggagactgaaggtgggctcaaggatgagtgggagctgtgtaaactaagcagccatgggggaggggagaggtgagaaaggggagtattcccatccccgggaatggtgtgtgctgagaccagaggagaggagagcctgagaggtggaagaaaagacaggttcagtatgacctgaggggaggatggagaatggcaccggggaggccagcagataccactgccaggtgatgccaaggggcattgtggcgagtggatcctca

SEQ ID NO: 9841 - DNA, 1358 bp, Artificial sequence
  DNA replication origin
gacgctgtgtccgtccgccgcgcgctctggtggccccggggctcctgcaggcgcggagagaggccggggttcagcccggttccccgcgcggctccgagagggcgcccccgcctgccgcctggagatggacgcggcgccgaagttttccccggcgggaaaacgaaagtcgtgaggagcagagggtcggggcgtcccggcggagacgaggctgagaccgggttaacatctccagccccgggcgaccctcgctcccccgcgtggccaagtcgacttacgagagggagcgggccagccccgaacgcggggtccgtgcggctgcggaggccgccccggcgggggccgagggttgcgctctgggttcccaggctctccgcggcggctcgctctcgccgcgctcctccgtcgccctgctggggagccgctctcgcccggcccggggtgggagagcgctgagcggcccccgtgacgtgcggagaaagtaggagcgcctccgcgctcccgcagagggagctccctgccctgcgctcccagtccccgggccgcgcttcggacaaagttctcaggcgcgcgcggtgatctcggctctccgccgctgcccggagcgtcatccacgttcggttccctcccacattagacaagaaatctgaggtcaggagagctaagtaacttgcccaaagtcgctcacaaggcagtgacgaagcaaactcacatccgcggctccttttttctccttgaacgccgggctctgcggaggctcaggccctgcaggaatcgcccaaccagacagaaggcagctcgctctcatgggtgagacgaggagtgtcccacgcagccgcgagaaatattatcagcagcgtgggaaggtggagctttttgccgaataactagagtgcaaagttgtttttcaaacagtgcctacatgccaaatcggcttgctttttatcctcaagcgagagtgagggtggcggctgtgcggacgccaatcgggatcaccgaataagtgcagtggaaagaaagcacacagccacttaaccaattggccgacatcaaggacttggccttccgagcgggttcttgtgaatatgctaactttgtaaagcgggcgcaccacgctgtgcttgctattcacgcacttccaggagtctcccgcgaggctccacgtcctttcggggccgggggctcccagggcttgcctttcagggcagggagtggcaccagacaagtcaatcccagtcggtttgttcctttatcccttgcgtcaatcagtgttgactgagggcctgcaatgtgcatggctgttgggtggggagctgggtaggacctaggacctaggacccagtgaatctcaaagagggagg

SEQ ID NO: 9842 - DNA, 1054 bp, Artificial sequence
  DNA replication origin
gcactctgggcactttgggaggccaaggcaggcggctgggaggtggaggttgtagccagccgagatcacgccactgcactccaacctgggcaccattgagcactgagtgaaccagacaccgtctgcaatcccggcacctcggaaggccgaggctggtggatcgctcgcggttaggagctggggaccagcccggccaacacggtgaaaccccgtctccaccaaaaaaatacgaaaaccagtcaggcgtggcggcacgcgcctgcaatcgcaggcactcggcaggctgaggcaggagattcaggcagggaggttgcagtgagcggagatggcagcagtacagtccagcttcggcttggcatcagagggagaccgtggaaagagagggagagggagagggagaccgtggggagagggagaccgtggggagagggagaccgtggggagggggagagggagaccgtggggagagggagaccgtggggagagggagaccgtggggagggggagagggagaccgtggggagagggagagggagagggagagggagacggagagggagacggagacggagacggagaccgtggggagagggagaccttggggagagggagagggagagggccatttctattcttttctattttcagcagttgctccaccatatggaactttgtcttgtaaggcagttttgcttgatgtctttacaagttcatgtgacccagactacttgagcttttatcagactttaccaaggacctttatatttaacttttattgaattggacaatactcatcttagtttagcagctgttctgaaattggcccaccattctgtccagtgaatatttcttggctattttatagctttcctgttctcagggctactagaaattccattgttttcctctttttccccctacatacaccctgagaccagacaggtctgtggttgtgcctatcttcaccaacttgtgttttgaggtttgtagagagaccttgtcacctggctgtgttgcaaatgttgccaatgagtttttggttttaacatctact

SEQ ID NO: 9843 - DNA, 1350 bp, Artificial sequence
  DNA replication origin
ccgggcagaggcgcccctcacctcccagacgaggcggctggccgggcagggggctgaccccccaacctctctcccggacggggatgctggccgggcggggggctgacccccccacctccctcccagatggggcggctggccaggcagaggggctcctcacttcccagtaggggcggccgggcagaggcgcccctcacctcccggatggggcggctggccgggcggagggctgaccccccacctccctcccggacggggcggctggccgggcggggggctgaccccccacctccctcccggacgaggcggctggccgggcggggggctgacccccccacctccctcccggacgaggcggctggccgggcggggggctgacccccccacctccctcccggacggggcggctggcctggcgggggctgacccccacctcccttccggacggggcggctgccgggcggagacggtcctcacttcccagacggggtggctgccgggcggaggggctcctcacttctcagacggggcagctgccgggcggaggggctcctcacttctcagacggggcggttgccgggcagagggtctcctcccttctcagatggggcggctgggcagagacgctcctcacctcccagacgaggtcacggccgggcagaggcgctcctcacatcccagacggggcggcggggcaaaggcgctccccacatctcagacgatgggcggccgggcagagatgctcctcacttcctagatgggatggcggccgggaagaggcgctcctcacttcctagatgggatggtggctgggcagagactctcctcactttccagactgggcagccaggcagaggggctcctcacatcccagacgatgggcggccaggcagagacgctcctcacttcctagacggggtggcggccgggcagaggctgcactctgggcactttgggaggccaaggcaggcggctgggaggtggaggttgtagccagccgagatcacgccactgcactccaacctgggcaccattgagcactgagtgaaccagacaccgtctgcaatcccggcacctcggaaggccgaggctggtggatcgctcgcggttaggagctggggaccagcccggccaacacggtgaaaccccgtctccaccaaaaaaatacgaaaaccagtcaggcgtggcggcacgcgcctgcaatcgcaggcactcggcaggctgaggcaggagattcaggcagggaggttgcagtgagcggagatggcagcagtacagtccagcttcggcttggcatcagagggagaccgtggaaagagagggagagggagagggagaccgtggggagag

SEQ ID NO: 9844 - DNA, 970 bp, Artificial sequence
  DNA replication origin
ccgcccggccagccgcccgtccgggaggtgaggggcgcctctgcccggccgcccctactgggaagtgaggagcccctctgcccggccagccgccccatccgggagggaggtggggggtcagccccccgcccagccagccgccccgtccgggagggaggtgggggggtcagccccccgcccggccagccgccccgtccgggaggtgaggggcgcctctgcccggccgcccctactgggaagtgaggagcccctctgcccggccagccaccctgtccgggagggaggtggggtggtcagccccccacccggccagccgccccatccgggagggaggtgggggggtcagccccccgcccggccagccgccccgtcctggagggaggtgggggggtcagcccctcgcccggccagccgccccgtcccggaggtgaggggcgcctctgcccggccgcccctactgggaagtgaggagcccctctgcccggccaccaccccgtctgggaggtgtgcccaacagctcactgagaacgggccatgatgacaatggtggttttgtggaatagaaagcggggaaaggtggggaaaagattgagaaatcggatggttgccgtgtctgtgtggaaagaagtagacatgggagacttttcattttgttctgtactaagaaaaattcttctgccttgggatcctgttgatctgtgaccttaccccccaaccctgtgctctgtgaaacatgtgctgtgtccactcagggttaaatggattaagggcggtgcaagatgtgctttgttaaacagatgcttgaaggcagcatgctcgttaagagtcatcaccactccctaatctcaagtacccagggacacaaacactgcggtaggccgcagggtcctctgcctaggaaaaccagagacctttgttcacttgtttatctgctgaccttccctccactattgtcctatgaccctaccaa

SEQ ID NO: 9845 - DNA, 1048 bp, Artificial sequence
  DNA replication origin
ggggtcacggcgacggcggcggcggctgacggctggaagggtaggcttccttcaccgctcgtcctccttcctcgctccgctcggtgtcaggcgcggcggcggcgcggcgggcggacttcgtccctcctcctgctcccccccacaccggagcgggcactcttcgcttcgccatcccccgacccttcaccccgaggactgggcgcctcctccggcgcagctgagggagcgggggccggtctcctgctcggttgtcgagcctccatgtcggataatcagagctggaactcgtcgggctcggaggaggatccagagacggagtctgggccgcctgtggagcgctgcggggtcctcagtaaggtgagcaacccctggtgccaagggacccctggccagactcacctgcagcgaggcaatccgctgaggcggtggggtggggctggcgggaggcgcggaacgtgccggggtgcgaggctgagtgttgctgcagcgactagggatgaggcggggatataggggcactgtccttgttgcccgggggctcgtcgggggcagccgaggaccagggaaagggtgtataaacctgagatccagtttgggaggccagatgcgcgccgtgacttgggacttagggcggcagctgtcccgggtgtaaggaatccgggttgggcttcagcggtgtccgaacgactgggcatgggagcggttcaagtcggacctcttaaaagaggttggtctctctgaggatgccaagccgagtaggttggggggcactgcggacgcaactctttcgacagaagctggagcgactcagcttggtgttgaaatttgaggtgttgaattctgctaggttagatgtagtgagacagatgaatgtggaggactttctccctcaccctgtaccttagttcagaatagagatattgaatcggcacatgatgggtacaggaaatattcatagtaacttggaacatgtgagaatggagactgatctttagtccaggaagagcattacttaataataaaatatttttgcggtaaggggtcgagg

SEQ ID NO: 9846 - DNA, 1294 bp, Artificial sequence
  DNA replication origin
cgcttccccgggggcaggcggggcaaagttgcgcttccgaaaggctgcaaaaacttccccaggctgcagcgcccggccaccagtcgggaagagaaatccagcagcgggggaaagtctccccgcggatgcccgcttcacctcccccactcaccgctccagccgtcggacacccttgccctgagtggtgtcagcactgcagccgcctcagtgcgggcgccgctccggctcgcttccccgggctgcctccgtctgccactctcgcctgcagcgcgcggagtggtgactcctctgagcgtgtcagcggcgagaggaggggcgggaaagtggctcccggcttgcacgctgcggtcctcctcctctcctccgcctgcctcctccccctggtgctgcagtgccgggcggcggcgtggcgagagtaccagcggtgcgcagggagtcacggcgcgcgggggaggcgggacccgcgcgccactcgcggtgctccggcaagtcgcggtgctgaggcgctgctgcggtgtgggactggggcagggggcggggaaggagagccacctccaagtggtaggtacttctggagaagtcagggctctgagtttgtagcaggtgaaggagaggggcggcagtccttaattagtcaccaactgtgactgtgcgttgcgcacttggcggcgccccgggtcaggtccagcgtgagacgcgagggagttctgactgctggactctgttagcaccggacaaaaagagggtttgtattctatttccgggcctgggactgacttgttcacttcgacttggcttccagggagcaaccaggcagagctaggttgcctacttcccccagcccccaccccgacgctggaagacaagtccagaggaaacttgggcacagcaagagcaaacagaagaaaacttcgctgggttaagtctactgtctccccaatgctacatagggccagacagctgggctcacaggcagatattgaaagtggccccttagaggggaaacaaccaaatatgagggggggggggtggagagagagatagagagagagagaggaggaggaggaagaaagaaagaaagaaagaaaaagagaaagaaagaaaggaggaggagggagaaagagagaggagagaagagagagagagagggagagagagagagaattttgcttgtgttgttagaaacaaacatttctccccttggcgtgcaggagagagaattttgcttgtgttgtcagaaacaaacatttctccccttggcgtgcaggagaccccaactcgagcttcactgttc

SEQ ID NO: 9847 - DNA, 1412 bp, Artificial sequence
  DNA replication origin
caacgcacagtcacagttggtgactaattaaggactgccgcccctctccttcacctgctacaaactcagagccctgacttctccagaagtacctaccacttggaggtggctctccttccccgccccctgccccagtcccacaccgcagcagcgcctcagcaccgcgacttgccggagcaccgcgagtggcgcgcgggtcccgcctcccccgcgcgccgtgactccctgcgcaccgctggtactctcgccacgccgccgcccggcactgcagcaccagggggaggaggcaggcggaggagaggaggaggaccgcagcgtgcaagccgggagccactttcccgcccctcctctcgccgctgacacgctcagaggagtcaccactccgcgcgctgcaggcgagagtggcagacggaggcagcccggggaagcgagccggagcggcgcccgcactgaggcggctgcagtgctgacaccactcagggcaagggtgtccgacggctggagcggtgagtgggggaggtgaagcgggcatccgcggggagactttcccccgctgctggatttctcttcccgactggtggccgggcgctgcagcctggggaagtttttgcagcctttcggaagcgcaactttgccccgcctgcccccggggaagcggctgcaggtgcccgctgctttgtaggcgcctttgttggagagggaccaggaaagtaggggtaaaatagatgcagtgaccccagggttcgctagggtaggtctggggactgggtcgcactttatctgggattcccagaggaggtgggtgggcagcagcggggatgcaggggccgcatctgcagcgaccgccacgctcttttttgcttgtgtggtttgaccggcagggataggcagattcaaatctagcagcctagagccccgggctgggtacctggacctataccttcatagctgccttaggctcaacttttcggcggggatccctctgcagacgtgcaggtggcgggagagcagaggtagccgcagtaagtgctgagagagcctgaaagaaacaccatgaattttcaaactctcccacatacattcccgaagcgcctgtctggcgtctaagagagagcaagagagggctggagagcaggggagcccgcggggctgaggctctttgtcagcgcctgcacttcctacgttacaacgccttcattcagcaaaaaccttttgggcgcctgctgtgcgccaggccaggcgaagcagacccgaggctgtgaagctcagaggggagagggaccaatcgcagtaaataagctaccgaggtaatcttagatggcgatgagggcagcaaaagccatcagccgaccctctgaccctttctcttagtgggcttttccccttccgcctgggttctagaactgggaaga

SEQ ID NO: 9848 - DNA, 1267 bp, Artificial sequence
  DNA replication origin
gtcgcggggagcgccccgggctgggcccacggggactgcggaatacggggatgaacttggcttggggcagccagcaccccacggcagatgaacaatcgggagcagatctgtgggcgtgcggggaccttaggcggcgcgcgggggcggggggaggggctgagccacgggggctagaggtgccgcctggacggcctgagctgggggcgctcgcgtcaccttctacgtgtgcgagtgatgcaaatgcagacccgcgaggggcgggcgggggtggcgggcgggggcaggcgacggagtctccgtctgggagcgcgcgtgtgtgcgtcaaaagctctgggttgatggatgccccgcggcgcgcctggcgcggagagcggcgacccggcggggcagaggggggcgggaggactgcggcggcgcggggcggcgaggaaagccccgcacggcctgggctggcgggcaggcggctccgcagtgcgccgcagtgccgggaaggagccgcagctaccgggcgctccccgggggaccgaggagatgaggcgtcttttaaggctcatgagagccttaaggagatgagaccgggatgccgtgatggtctcctctcccgctgaacctaatcccttcatacttagctgactgctagcgcggtagcttccgtttaattcttatccttaattctgaagaatgtggcattaatctctcaggcgttcactcattttccatggcaagttccgaaaggcctcgtgctcgtgggaagttttcatgtgaacgcctaggtgttgaggttcgtgaggttctgtagtgccaacccgttgcgccaccattctgcaggatttttggcaggaggcctggcctctaagtgaggtttaagaatgtcttacaaaacaatatgccgcattcctctttcatggcataaaaatacgcgttaaaaaacactactgataacgcattctctggtggaaaataataaatcaaatccacgatccattttattcttttttttaaagaccactttctggaaacccagtgacaaagtttttctactggctttactgaaggagcccaaatctgcagtatgtaggcaaaatgaatgaaaggggacggggttgggaaaaaagaaagaaaggaagggagggaggaagaaaagcaattatcaaggaacccagagacacagatgctagtcaccatttccccaaatattgtgttatgtcaccttgggcaggttactcaccctcttgggttcatcttccacctctgagaattgtgaaaa

SEQ ID NO: 9849 - DNA, 926 bp, Artificial sequence
  DNA replication origin
aggagcccctctgcccggccagccgccctgtccgggagggaggtgggggggtcagccctccgcccggccagccgccccgtctgagaggtgaggggcgcctctgcccggccgcccctactgggaagtgaggagcccctctgcccggccagccgccccgtccgggagggaggtgggggggtcggccccccgcccggccagccgccccgtccgggagggaggtgggggggggggtcagcccccccgcccagccagccgccctgtccgggaggtgaggggcgcctctgcccggccgcccctactgggaagtgaggagcccctctgcccggccagccgccccgtccgggagggaggtggggggggtcagcccccccgcccagccagccgccctgtccgggaggtgaggggcgcctctgcccggccgcccctactgggaagtgaggagcccctctgcccggccaccaccccgtctgggaggtgtgcccaacagctcattgagaacgggccaggatgacaatggcggctttgtggaatagaaaggcgggaaaggtggggaaaagattgagaaatcggatggttgccgtgtctgtgtagaaagaagtagacatgggagacttttcattttgttctgcactaagaaaaattcctctgccttgggatcctgttgatctgtgaccttacccccaaccctgtgctctctgaaacatgtgctgtgtccactcagggttaaatggattaagggcggtgcaagatgtgctttgttaaacagatgcttgaaggcagcatgctcgttaagagtcatcaccaatccctaatctcaagtacccagggacacaaacactgcggaaggcctcagggtcctctgcctaggaaaaccagagacctttgttcacttgtttatctgctgaccttccctccactattgtccc

SEQ ID NO: 9850 - DNA, 1255 bp, Artificial sequence
  DNA replication origin
tcattatattttccttatacagaccttcataaaacttacaaacactgtctagtttacatcttcattttgctctcacaaggccaaaaaacttgttaaacagacttaatgaacgagttcctcttgatcggggttgtaagtttctaaaattgcatttgaacttctacctgcctctagctgaatgaaaattgcctccagacatctgaagtctttttcttcctttcattttgcttaatctacctctgtatcaaagcacatttccattttgtttaggccagttgtcagactctaggcatttgcagattttagaaacctgcacaggtgttctgatgtgccgtaaacttccagagccactgaattcagcaaagaaattccttgatgttcctacttattaatcttattaattaacatatatcttatatattaatctttatacttattgttgtcactggggctaaatagtctctatagctcgtggtggggggctgtagtgtatgtgtgtgtgtgtgtgtgtgtgtgtgtagtgtgtgtgtggtatctgtatggtgtgtagtgtgtgtgtggtatctgtatggtgtgtgtactacatggttgtatgtgttggggtgtggggggtgcgtgtagtatgtgtggggtagtgtggtatggtttgtgtgtgggtaatgtgcagtatatgggtgtgtgtagtgtgggggatagcggtgtgtatgggtgtgtgggagtgtcctgtgtgtgagggtggtgtgtggtgtggtgtatgagcgtgtggtgtatgagtctgtggtttgtgtatgtgtggggggacatggatatgtgtggtatggggtgtctatagtgtcagcagatggtagtgtgtgtgggtgtgggtatgtaggtgtagtgtgcatggaagtgtggcgtgtgtgtggtgtggtgtgtggtatgtataggtgtgtaggtaggtgtatgtgtgtgtatgagtgtgtagtgtgttgggtgtggacgcatgtagtgtgtggtatatgggtgtatgtagtatagatggtgtgtctatggtgtgtaatatatgggtatatgtagtatggatggtgtgtgtggtaggtgtatgtggtgtgtgtgtgcagtgtgtggggtttgaacatgtgtggtgtgatatatgggtgtgtgtggtgtgtgtatgtgtatgtgtgtggtgtatgtgtagtgtgtggggtataaacgtgtggtgtgtgataaatgggtgtatgtagtatggggtgtgtgtgtagtgtgtggggtg

SEQ ID NO: 9851 - DNA, 1531 bp, Artificial sequence
  DNA replication origin
aacgggccatgatgacaatggcagttttgtggaatagaaaggggggaaaggccgagaaaggattgagaaatcggatggttgccatgtctgtgtagaaagaggtagacacgggagacttttcattttgttctgtactaagaaaaattcttctgccttgtgatcctgttgatctgtgaccctacccccaaccctgtgctctctgaaacatgtgctgtgtccactcagggttaaatggattaagggtggtgcaagatgtgctttgttaaacagatgcttgaaggcagcatgctcgttaagagtcatcaccactccctaatctcaagcacccagggacacaaacactgcggagggccgcagggtcctctgcctaggaaaaccagagacctttgttcacttgtttatctgctgaccttccctccactattgtcctatgaccctgccaaatccccctctgtgagaaacacccaagaatgatcaataaaaaaaaaaaaaaaaaaaaaaaaaaggaaaatgtgtgactgtagcttttcttaaataaggaatagggcctacatctggaggagtggaaagctggacaaagggttaagatctatatagagcgatgggctgggtatcagaaaagggggaaagaaattgctacagcaaagaaggaggatctagctgggggagagaacctggaagaagtgagagctggttccaagagaaggaacagcctgcagaggggtgtgaatgcacaactagtaggatagcactagccagtagcacttttggtgatgatgggatattctatgttttcagtgttcaatatggtagcctctggtcacatgtggcaatcaagcatctgaaatgtggctaagtgtaactaaggaactgaattcttggttttagttaagtttaaatataaatagctacatgtggctatcatattagacagcatggttctagagctcagacacagcccactgttgcttgcttacccagcagttacctgcctttttccttgcttacaaaccccccattttgttcaggcagtcaggagccatgtgcttcaggagagactgggccccttacagctatagggggagaggtgactcttgattagtctaagccagttatggtaattatgttcctcttgctcgtgattggtttaggagttggcagatgatgcaaatccagccaatgagacataatggggagtctgctggaggattccgagaatgttctccttgatcttaaaaaggggtcaaaaagagggactagttctccttctggcgcttagatgtgtgaagatgtgatgcttagagttgcagccaccatctcatgcccatagggggacaaaagccagtatgatgaggatggctgatctaaaagatggaaaaagaatctgggtctccaatgatgttatcaagccacatcagaaccaaccttgggatggccccatcctctttgttagtaaagacagtttattaggaaattaaaggaataaaagaataaaagaagacttgtgtcttctgttaaatgcagtcacggg

SEQ ID NO: 9852 - DNA, 888 bp, Artificial sequence
  DNA replication origin
gggagcccctctgcctggctgcccagtctggagggtgaggagcgtctctgccaggccgccatcccatctaggaagtgaggagcgcctcttcccagccgccatcccctctgggaggtgaggagcgtctctgcccggccgccccgtctgagaggtggggagaccctccgcctggcagccgccccatatgagaagtgaggagcccctccgcccggcagccaccccgtctgggaagtgaggagcgtctctgcccggcagccaccccatccgggagggaggtgggggtcagcccccgccaggccagccgccccgtccgggagggaggtggggggggtcagacccccgcccggccagccgccccgtccgggagggaggtgggggggtcagccccccgcccggctagccgccccctccgggaggtgaggggcgcctctgcccggccgcccctactgggaagtgaggagcccctctgcccagccaccaccctgtctgggaggtgtacccaacagctcattgagaacgggccatgatgacaatggcagttttgtggaatagaaaggggggaaaggccgagaaaggattgagaaatcggatggttgccatgtctgtgtagaaagaggtagacacgggagacttttcattttgttctgtactaagaaaaattcttctgccttgtgatcctgttgatctgtgaccctacccccaaccctgtgctctctgaaacatgtgctgtgtccactcagggttaaatggattaagggtggtgcaagatgtgctttgttaaacagatgcttgaaggcagcatgctcgttaagagtcatcaccactccctaatctcaagcacccagggacacaaacactgcggagggccgcagggtcctctgcctagga

SEQ ID NO: 9853 - DNA, 805 bp, Artificial sequence
  DNA replication origin
tctgtagaaaaggaagattagaaagactcagcgatgcttggggttggtactgaggggacaggtgggagggaaagaaggaagatttgggacgagttgcactgggcacagagactaggaagggactgatgtgtaaaagaatgcctggacgtcaggcacctaagaccgtttgcctgttttacaagaattacttagattttgcaggatggaaaaattcaaagtgccattttctggctatttggaactactgtcgagtttgtattggggtcaagtggcattgcagaagaaaataaggtatttaggttttaggtcagatgtgagttgaagaggttttaagtttttgagaacacaggccaagggagtagaaggaggaatggagggtggaaggttgcccatagtgaaggaagcaagccgagagaaaagagtagagaaacggagggaaggagttcgggggttcttaccttccagaaaagtgggaaaaggggttggggcgcagagataagaggtcggggcacggaaataagggattggggtgcagagatataagaggttggggtgcggaaataaaggattggggcgcagagataggttggggcacggaaataagggattggggcacagggataagaggtcgaggcgtggaaataagggattggggcgcagagatacaagaggttggggcgcggaaataagggattgggggttcttgccccgtagaaaagcgggacttgccgctaagggtgaaggagaaggggttgaggggtacttgcccctcactcagaaaagcagagaaggggtaaagaaaagg

SEQ ID NO: 9854 - DNA, 1715 bp, Artificial sequence
  DNA replication origin
gccccagctgcagggggtcccggcccagcgtccctctcggccccttccctctcccccgggggagaaggggcgggtccacgcggcctgggcgctgcgcccgacacgcggtaggggtcgctgcgtctcggcgcgcgctcccaccgcggtgaataacggggcctggctggaggagaaaggaaacctgctgcgggaggcggcggcgaccggccagggagcgagggaggagagttcacttttacttcagtgtcagcgcgcggcggccgtggctggctctggcgagagagcaccgagggagtgggtcgcagatcttcgggcggctaggggaaatcggcgagaggcgggatccgagcgcgccggcggggcgcagagcccgcgagcctggccagcgagggtagccgcggggggcgcgccccgggcgggcccccggagacgcgcaggatgccacacgaagagctgccgtcgctgcagagaccccgctatggctgtaagtgcgccgggcgcgcggggttcctgctggccttggggagctccctccccgaggacggcgttggagaagccgagggagccggttgcgcggcgcagaggaaattggaaggcagcaactgcgcggctggcaaagttgggagctggagttgcaaagggcagtgaatcgcgtccccccgctcctcccgccccccaattcctaatatccagctggcaacccagaccctccactccgcatacccaaacggggtgcgcgggcagtgcggggattgcgctctgggacagaccaggttgggattttaggggtatcaggtgaggagtccgcggagctccgggtcgccgccggcttgggccagggggtggcgtaaggcaccggattcttccaacccagaaggggaggaaagtttgtttgctgtggctacaggtgggcaccgcaagtagggcgccggcgcactctgctagtgcaaagccggcttgactggaagggcgggagtctcctcctgtcccgcgccctcgaacttcacctgacccgctagagccattggcctcacaggtgtaagtccctcccctctgaaaccccccaacccctttcccccccgctcccctcgcgcgggaggattgctgtgtggagaggacgcggcactaggctccggggaatccggcgggagcccgcgtgacttgaacgagatggtgtcgattacccagccaggggctgccctcggaaataggttgctttggccgatcgtgagtggatggagccagattaacaccaaccacgtggcttcatgtgcagagttcagagtcctaaacatgtgccaggaagcatttcctttaaaacaaacagaaagttggcctgctgtctctccaaggtggccctgtcagtgaacccaaggccgaagaccacaggttaatctttgcccaggctggccttggtggcagaggtaccaggtttgggttaaggtggtgataccttcagcagggtgttttgtttgtgtgtgtgtgtggttttggatggtgcgtaaggccactgacttgcttaactgaaaaagggctcctcaacttgtgtaggttctttcccctcctccccgctggcgtgtcaaagatgggaggttatctttcctgtgttacccttgcagtgagggggaggcctgaggactacagcctctgtactctaatgcattcagcagttgactgagacccagctttttgccttttggtaaaccacacagaca

SEQ ID NO: 9855 - DNA, 1152 bp, Artificial sequence
  DNA replication origin
catgtttcagagagcacggggttgggggtagggtcaccgatcaacaggatcacaaggcagaagaatttttcttagtacagaacaaaatggagtctcccatgtctacttctttctacacagacacagtaacaatctgatctctctttcttttccccacatttcccccttttctatttgacaaaaccgccatcgtcatcatggcccgttctcaatgagctgttgggtacacctcctagacggggtggcggccgggcagaggggctcctcacttcccacacggggcggccaggcagaggcgcccctcacctccctcccggatggggcgactggccgggcgggggctgccccccacctccctcccggacgggggtggctggccgggcagagaggctcctcacttcccggacggggtggctgccgggcggaggggctcctcacttcccagacggggcggctgcggggcggaggggctcctcacttctcagatggggcggccgggcagagacgctcctcacctcccagacggggtggcggtcgggcagagacgctcctcacctcccagacggggtcggggccgggcagaggcaatcctcacatccctcacatcccagacggggcggcggggcagaggcgctccccacatctcagatgatgggcggccgggcagagatgctcctcacttcctagatgggatggcagctgggaagaggcactcctcacttcccagactgggcggccgggcagaggggctcctcacatcccagatgatgggcggccaggcagagacactcctcacttcccagacagggtggcggccgggcagaggctgcaatctcggcactttgggaggccaaggcaggcggctgggaggtggaggttgtagcgagccgagatcacgtcactgcactccagcctgggcaacattgagcactgagtgagcgagactccgtctgcaatcccggcacctcgggaggccgaggcaggcagatcactcgcggtccagagctggagaccagcccagccaacacggcgaaaccccgtctccaccaaaaaatgcaaaaaccagtcaggcgtggctgcgcgtgcctgcaatcccaggcactctgcaggctgaggcaggagaatcaggcagggaggttgcagtgagccgag

SEQ ID NO: 9856 - DNA, 885 bp, Artificial sequence
  DNA replication origin
aatctcggcactttgggaggccaaggcaggcggctgggaggtggaggttgtagcgagccgagatcacgtcactgcactccagcctgggcaacattgagcactgagtgagcgagactccgtctgcaatcccggcacctcgggaggccgaggcaggcagatcactcgcggtccagagctggagaccagcccagccaacacggcgaaaccccgtctccaccaaaaaatgcaaaaaccagtcaggcgtggctgcgcgtgcctgcaatcccaggcactctgcaggctgaggcaggagaatcaggcagggaggttgcagtgagccgagatggcggcagtacagtccagcctccgctgggcatcagagggagaccttgcaaagagggagacgggagagggagacggagagggggagggggaggggagggggaggggagggggagggagaggactggcagaatttcttcaaggccccaggtggcagccttgcttttgaggccttggacaatgacagcctcaccctctcacactgagacagagagagcctcaccctttgaaatggaagagagccttcctcgcccctgggcctgaacactttcgttgtggggtgagagtagtagctttagggaccattcttcctttttcttgaaggataatacatgctcacacccagagccagatagatctattgtcccatcctgtagcatctcagaagcctgctgctgttgtgtcctgtctctgtcccctttagtccaagtcagcagtgtttctgctactggtagaaccccgtctctattcctggcttctgttgagatggccaattagatctgtgagtcccactgtcactctttagggagtgattgtccagtcacactgttggtgccctctcca

SEQ ID NO: 9857 - DNA, 1241 bp, Artificial sequence
  DNA replication origin
gtggccggcggccagggccccccagtagggcagggcggggcggggcggggcgcacagagccagaggggcttgcgagcggcggctgagggaccgcggggagggggcgccgagcggctccagcgcagagactctcactgcacgccggagggcgcccttcctcgctcgcgcccgcgcgaccgcgcgccccagtcccgccccgccccgctaaccgccccagacacagcgctcgccgagggtcgcttggaccctgatcttacccgtgggcaccctgcgctctgcctgccgcgaagaccggctccccgacccgcagaagtcaggagagagggtgaagcggagcagcccgaggcggggcagcctcccggagcagcgccgcgcagagcccgggacaatggggccgcggcggctgctgctggtggccgcctgcttcagtctgtgcggcccgctgttgtctgcccgcacccgggcccgcaggccaggtgagagatgcacgggaatggggtgcgcgggcggagggacgccgaggggagactgcgggggtcactgttgcgccttctcctcacccctgcctcagtttcctccgaaagccaaactggcatttgggctgagatctggagttttttccagtcacgtttaggtggggcgtgccacccccttcgcgggcccagccgatgcccctttggactcgatcttggagggtgcagcccgcctgccacggggtgttggatatggaggaggatggagcggaagccccctgggggagcctgcagtcctgcgttgcacttgtcattgtgtttctcccaggaccacccccaaaaagaaaagctctcacgttgctccaccaataaacgtttcgatctttaaaatataaagtggcgaaccgctgccgctgaagttttgctttgttggaagtttttttcttgcacattttacaggcgagaaaagtgatgtagagaaaagcccaggcagtcccttggcatgtttagcagagaatcagtaccagcagcccccggcccggccttgtgtccaggaggtgcgcagggtgcgagatatatggtgacaatagcagaggctccgcgtggtggcgggggaggggacatggagaggattttgttgttacctagaacccattccttctaagtgagttgaagagagagatccctccccaggaccgggctccctcgaacactgtgggatcccagtatttcttaacgagatttctgatccactgcaagaaggttgct

SEQ ID NO: 9858 - DNA, 1321 bp, Artificial sequence
  DNA replication origin
acttcccagacggggtggcggccgggcagaggctgcactctcggcactttgggaggccaaggcaggtggctgggaggtggaggttgtagcgagccgagatcacgccactgcattccagcctgggcaccattgagcactgattgaaccagacaccgtctgcaatcccggcacctccggaggccgaggctggcggatcactcgcggttaggagctggagactagcccggccaacacagcgaaaccccatctccaccaaaaaaatacgaaaaccagtcaggcgtggcggcgcgtgcctgcaatggcaggcactctgcaggctgaggcaggagaatcaggcggggaggttgcagtgagccgagatggcagcagtacagtccagcttcggctgggcatcagagggagaccctggaaagagagggagagggagaccgtggggagagggagagggggagggggagggggagagggagaggcgagaaatatttttaaggaaaagagttatgaagactttcaaactggggctggaattgtggctgggtgatgtgtcactgggacatgtgtagacagagagttagtcatgacatcatgggaaatgcagccacaatagcaatctcaccttctgaaaaatgatactgctctagggtgcagaactggcacctcgcccctcatgaagagtcaggcgacagcatatgtgctagcgattacttaatgaaataagtacatgatgggctgaggtgtggagagtagtcattatgccacatgctaattaaagagatgggaaaggttgatctgcaggggctgagatgcccacataagtagctgtagtggtaggattgcaccctcctactctccccattttcccctttctatttcttccacctacaactgagacagccaggtggaagaaactccaaccagcctgcccaatgagatgaagcttcgagaagtttgcagcagggaggagcatggcccttcctcttcctgtgtggaaactgggattcaaagggctaggcgggaagctctgtagcagggactctggccttgcgagaatccctgtttcccccttttcttccttttcacccaataaaaccccatcttactgactattcaaattgtctgcgagcccggattttcatggccatggaacaaagaacctgtctttagctgaactaaagataagtcctgcaacacaacttctacctgattgattccttttcttgtcatagaaaggtcatccttccaaccaccaacctcagtgacatgcaggtagagttaagaataaatgggccgggcgtggtggctcacgcctgtaatcctagca

SEQ ID NO: 9859 - DNA, 1321 bp, Artificial sequence
  DNA replication origin
ctgacccccctaactccctcccggacgtggcggctggccaggcggggggctgacccccccacctccctcccggacggggcggctggccgggcagaggggctcctcacttcccagtaggggtggccgggcagaggcgcccctcacctcccggacgaggcggctggccgggcggggggctgacccccccacctccctcccggacggggcggctggccggtctgacccccccacctccctcccggacggagcggctggccgggtagaggggttcctcacttcccagtaggggcggctgagcagaggcgcccctcacctcccagacggggcggctagccgggcggggggctggcccccccaccttcctcccggacggggcggctggccgggcagggggctgatccccccccacctccctcccggacggggcggctggcctggtgggggctgacccccacctccctcccggacggggtggctgcctggcggagacgctcctcacgtcccagacggggtgactgccgggtggaagggctcctcacttctgagacggggcggttgccgggcggagggtctcctcccttctcagacggggcggctgggcagagacgctcctcacctcccagacggggtcgcggcctggcagaggcgctcctcacatcccagacagggcggtggggcaaaggcgctccccacatctcagaagaagggcggccaggcagagatgctcctcacttcctagatgggatggcggccgggaagaggcgctcctcacttcctagatgggatggcgaccgggcagagacgctcctcactttccagactgggcagccacgcagaggggctcctcacgtcccagacgataggcggccaggcagagacgctcctcacttcccagacggggtggcggccgggcagaggctgcactctcggcactttgggaggccaaggcaggtggctgggaggtggaggttgtagcgagccgagatcacgccactgcattccagcctgggcaccattgagcactgattgaaccagacaccgtctgcaatcccggcacctccggaggccgaggctggcggatcactcgcggttaggagctggagactagcccggccaacacagcgaaaccccatctccaccaaaaaaatacgaaaaccagtcaggcgtggcggcgcgtgcctgcaatggcaggcactctgcaggctgaggcaggagaatcaggcggggaggttgcagtgagccgagatggcagcagtacagtccagcttcggctgggcatcagagggagaccctggaaagagagggagagggagaccgtggg

SEQ ID NO: 9860 - DNA, 973 bp, Artificial sequence
  DNA replication origin
ccgctccgtccgggagggaggtgggggggtcagaccggccagccgccccgtccgggagggaggtgggggggtcagccccccgcccggccagccgcctcgtccgggaggtgaggggcgcctctgcccggccacccctactgggaagtgaggagcccctctgcccggccagccgccccgtccgggagggaggtgggggggtcagccccccgcctggccagccgccacgtccgggagggagttaggggggtcagccccctgcccagccagccccctcgtcccggggggtgaggggcgcctctgccgggccgcccctactgggaagtgaggagcccctctgcccggccagccgccccgtccgggagggaggtggggggggtcagccccccgcccggccagctgcctcgtccgggaggtgaggggcgcctctgcccggccgcccctactgggaagtgaggagcccctctgcccggccaccaccccgtctgggaggtgtacccaacagctcattgagaaccggccatgatgacaatggcggttttgtggaatagaaaggggggaaatgtggggaaaagattgagaaatcggatggttgccgtgtctgtgtggaaagaagtagacatgggagacttttcattttgttctgtactaagaaaaattcttctgccttgggatcctgttgatctgtgaccttacctccaaccctgtgctctctgaaacaggtgctgtgtccactcagggttaaatggattaagggtggtgcaagatgtgctttgttaaacagatgcttgaaggcagcatgctcgttaagagtcatcaccactccctaatctcaagtacccggggacacaaacactgaggaaggccgcagggtcctctgcctaggaaatccagagacctttgttcacttgtttatctgctgaccttccctccactattgtcctatgaccctgccaaatccccctctgtgagaaac

SEQ ID NO: 9861 - DNA, 1526 bp, Artificial sequence
  DNA replication origin
cttttttatccccagcccttgaacttttccggactgacctatgtttcttgccagctgagggaagcggcggactacgatcctttcctgctcttcagcgccaacctgaagcgggagctggctggggagcagccgtaccgccgcgctctgcgtgagtcgaggctgcccggctcgcgggcgcccgggacgcggggaaggtgggactctgtgcggggggcagagggctcgcggacatctcggggaaggggctggccggaaccgccaggggcgcggtccccttagctaaggatcggtccgcggaggcgcgccaggagcgggagagggtggcgcgcccggggcgcaggaacccagcgcagcctaggctggaagtcggggcgctgggcactacagagcccgggaatggggcgcgcggagagcggccgcccgaggacggcgctgcggcggctgcagcccgggacttattgccccatgccctcctcccccagggtgcctggacatgctgagcctccagggccagttcaccttcaccgccgaccggccgcagctgcactgcgcagccttcttcatcagcgagcccgaggagttcattaccatccactacgaccaggtctccatcgactgtcagggcggcgacttcctgaaggtgaggcgcccacggccagccaacctagccggagggcggcacgggagggttggaaagggctggggcgctgcacccagcgtggggctgctgagcgtaggtagccagtggcacttcttagacacttcgctggtgcccgagtcggagaggcgcgttcgaggacccccacacggcgagaatctcgcccttacccgaagacctcgacccacacacatccagtggggctggggccggtgcctctggacgctgccatggtttaaattcccttctgggcgctttcgaggccctaggaacttctaaagacttgaactcgcagcgcggaactctgacgcaatccagggccgaggaaaaatgattaaaacccaacaagctcgagtgctggggtccaccaagcgggccgtcttggttagaaggcccgccccacacgtctcacatctgagcccgcctcgctcctgctggtccacgctcggcagagccgttccgagagcacagaggctgtcttcagtgcgcgggtgacccgattttggagcagtaggggactggctgccgagggggcatctagattgagataggtgggagggcaggacaagacccctaagctcactgcctcctcgattccagtcgtcagactccataagtataacagggcagcatgggatggctgatggagctctactgtccaattaaaataatcatgattaacatctccaaagtaggattattttggaacctgtcacatgcgttagaaataatttgtagctgggttgttggtaattttgctaatgtggactagattggactcgttaaactggagacctgtggtgattttgagggtcaagtcaatagactctgaccctttgttcaactgcaaactttaacaagtgaagga

SEQ ID NO: 9862 - DNA, 857 bp, Artificial sequence
  DNA replication origin
gtcagccccccgcccggcgagccgccccgtctgggagggaggtggggggggtcagccccccgcccagccagccgccctgttcgggaggtgaggggcgcctctgcccggccgcccctactgggaagtgaggagcccctctgcccggccagccgccccgtccgggagggaggtggggggtcagcccccccgcccggccagccgccccgtccgggagggaggtgggggggtcagccccccgcccggccagccgccccgtccgggagggaggtgggggggacagcccccccgccaggcgagacgccttgtccgggagggaggtagggggtcagccccctgcccggccagccgcccggtccgggaggtgaggggcgcctctgcccggccgcccctactgggaagtgaggagcccctctgcccggccaccaccccgtctgggaggtgtacccaacagctcattgagaacgggccatgatgacaatggcggttttgtggaatagaaaagggggaaaggtggggaaaagattgagaaatcggatggttgctgtgtctgtgtagaaagaagtagacatgggagacttttcattttgttctgtactaagaaaaattcttctgccttgggatcctgttgatctatgaccttacccccaaccctgtgctctctgaaagatgtgctgtgtccactcagggttaaatggattaagggcggtgcaagatgtgctttgttaaacagatgcttgaaggcagcatgctcgttaagagtcatcaccactccctaatctcaagtacccagggacacacacactctgcctaggaaaaccagagacctttgttcacttgtttatctgctgaccttccct

SEQ ID NO: 9863 - DNA, 1141 bp, Artificial sequence
  DNA replication origin
cggggggctgacccccccacctccctcccggacggggcggcttgcctggcggggggctgacccccccacccccctcccggatggggcggctggccgggcggggggctgacccccccacctccctcccggacggggcggctggccgggtggggtgctgactcccccacctccctcccggacggggcggctggccgggcagaggggctcctcacttcccagtaggggcggctgggcagaggcgcccctcacctcccggacggggtggctggccgggtggggggctgaccccccacctccctcccggacggggcggctggcctggcgggggctgacccccacctcccttccggacggggtggctgccgggcggagacgctcctcacttctcagatggggcagttgccaggtggagggtctcctcacttctcagacggggcggccgggcagagacgctcctcacctcccagacggggtcgcggccgggccgaggcgctcctcacatcccagacggggcggcggggcagaggcgctccccacatctcagacgatgggcggccgggcagagatgctcctcacttcctagatgggatggcggccgggcagagacgctcctcactttccagactgggcagccaggcagaggggctcctcacatcccagacgatgcgcggccaggcagagacgctcctcacttcccagacggggtagccgccgggcagaggctgcaatctcggcactttggggggccaaggcaggcggctgggaggtgggggttgtagccgagatcacgccactgcactccagcctgggcaccattgagcactgagttaacgagactccgtctgcaatcccggcacctcgggaggccgaggctggcggatcactcgcggttaggagctggagaccagcccggccaacacagcgaaaccccgtctccaccaaaaaaatacgaaaacccgtcaggcgtggcggcgcgcgcctgcaatcgcaggctctgggcaggctgaggcaggagaatcaggcagggaggttgcagtgagccgagatggcagcagcacagtccagcttcggctcggcatgagagggagaccgtggaaagagagggagagggagagggagaccgtggaaagagagggagagg

SEQ ID NO: 9864 - DNA, 933 bp, Artificial sequence
  DNA replication origin
ccccgcccggccagccgccccgtccgggagggaggtggggggggtcagcccccctgcccggccagccgccccgtccgggaggtgaggggcgcctctgcccggccgcccctactgggaagtgaggagcccctctgcccagccagccgccccgtccgggatggaggtgggggggtcagccccccgcccggccagccgccacgtccgggagggaggtgggggggggtcagcccccccgcccggccagccgccccgtccgggaggtgaggggcgcctctgcccggccagccgccccgtccgggagggaggtggggggggtcagccccccgcccggccagccgccccgtccgggagggaggtggggggggtcagcccccccgcccagccagccgccctgtccgggaggtgaggggcgcctctgcccggccgcccctactgggaagtgaggagcccctctgcccggccaccaccccgtctgggaggtgtgcccaacagctcattgagaacgggccaggatgacaatggcggctttgtggaatagaaaggcgggaaaggtggggaaaagattgagaaatcggatggttgccgtgtctgtgtagaaagaagtagacatgggagacttcattttgttctgcactaagaaaaattcctctgccttgggatcctgttgatctgtgaccttacccccaaccctgtgctctctgaaacatgtgctgtgtccactcagggttaaaaggattaagggtggtgcaagatgtgctttgttaaacagatgcttgaaggcagcatgctcgttaagagtcatcaccactccctaatctcaagtacccagggacacaaacactgcggaaggccgcagggtcctctgcctaggaaaaccagagacctttgttcacttgtttatctgctgaccttccctccactattgtcccatga

SEQ ID NO: 9865 - DNA, 1326 bp, Artificial sequence
  DNA replication origin
cttcccagtaggggcggccgggcagaggcgcccctcacctcccagacggggcggctggccgggcggagggctgacccccccacctccctcccggacagggcggctggccgggcgggggtctgacccccccacctccctcccggacggggcggctggccgggcagaggggctcctcacttcccagtaggggcggccgggcagaggcgcccctcacctcccagacggggcggttggccgggcggagggctgacccccccacctccctcccggacggggcggctggccgggcggggggctgacccccccacctccctcccggacggcacggctggccaggcggggggctgacccccccccccccggatggcacggctggccgggcgggggggctgaccccccacctccctcccggatggggcggctggccgggcggggggctgatcccccccacctccctcccggacggggtggctgccgggcggagacgctcctcacttcccagatggggtggctgccgggcggagaggctcctcacttctcagagtgggcagctgccgggcggaggggctcctcacttctcagacggggtggttgccaggcagagggtctcctcacttctcagacggggcggccgggcagagacgctcgtcacctcccagacggggtctcggccgggcagaggcgctcctcacatcccagatggggcggcggggcagaggcgctccccacatctcagacaatgggcggccgggcagagacgctcctcacttcctagatgtgatggcggctgggaagagacgctcctcacttcctagatgggatggcggccgggcggagacgctcctcactttccagactgggcagccaggcagaggggctcctcacatcccagacgatgggcggccaggcagagacactcctcacttcccagacagggtggcggccgggcagaggctgcaatctcggcactttgggaggccagggcaggcggctgggaggtgtaggttgtagtgagccgagatcacgccactgcactccagcctgggcaccattgagcactcgacaagaacttttaagaaaaatcctgttggaattttgagaatttcctgaggattctaaaaggtacctgtgaggccaagagagtatcttcatctgttttctttatttttaaagatatttttgagcctcactttttgtaggtgaaggttatgtggaaggaagacagtaggggagataggagtaaataatttgaaatatacatatgtgcctcagtgcccataaataagccctcctttcttttcacttaatgactatctaatgttctgt

SEQ ID NO: 9866 - DNA, 1208 bp, Artificial sequence
  DNA replication origin
agcctccctctgcctgctaaacaccatctcagaatctgcttctaggaggacccaacctgtgcagaaattttatgagcaatttgcctgtccattaaaaaatacagcatagactttttccaggttagctggagatggagtttttttgtatcaaaaaaagagagctaaactgagaagagaagcaaaggtagaagaataaggttagactctccctgtataactgaatttgggattgggaatgatatcttgcttctctatgaaatttagaaactgtcttttgaagtcttcatccagtcacatccaagagtggtccaggaagaaaaaggaaaataagaatgaaaaaaaaacaaaaaacaaaccttaaaattggatacttctttgtgccttgcattaagcctctatgttactgcccttgtccgtataagcaactctagataaaatcctttcttagaccatctaatttatctccccgtgccattgtgaaaatcgggcaggaattactgcgggaaccagtgactgaatgggcagtggtgtctcgcagctgtaactcagagtttacaagggaaggatgaacagcagccatccttctaaaggcattcttcctctcctccagcacagctcagtctgtgcatgcctcaccaaggagaatgagggaaggccttgttgactgcccagcccagagtgtgaggaacagcagttgacatgggcggctggacgggatagaaaccagcatgaacatttagtgacacctaaggaagaggtgaaaatgggggagaaagccaagaaccatcagacagcttctttctgttcttgccttggatcttaggggaacgtatgtgttcaagggtgccttcctccgcagggcctcccatcccttggcacaaacttccaaacgatgagtagacatggaatgggcttcttctgaagactgggtcaccatccaactcagccttcggagtaggcggtggggctgggggaagaggacggaaccatgaggtctctccatcacttcccgggtgtgttgagaggcaagcaaatgcggtgggtgggcctgggctgtagggcccctgccatttcgggaggggcctcctggtgtttagctctgggatgtgtgaaaatgtgttggtgaaaagcgagaggcttacacagcccttcaggggaagaggggctggggcgctgggggcggcgtcgggatgagtgcagaagagacg

SEQ ID NO: 9867 - DNA, 1312 bp, Artificial sequence
  DNA replication origin
actgcaggtggcagcgggtgcgctgggtcccggcggccgcgggcgcgggcgggcgcgcgggggagcccggccgagggatgggctgcgcccccagcatccatgtctcgcagagcggcgtgatctactgccgggactcggacgagtccagctcgccccgccagaccaccagcgtgtcgcagggcccggcggcacccctgcccggcctcttcgtccagaccgacgccgccgacgccatccccccgagccgcgcgtcgggaccccccagcgtagcccgcgtccgcagggcccgcaccgagctgggcagcggtagcagcgcgggttccgcagcccccgccgcgaccaccagcaggggccggaggcgccactgctgcagcagcgccgaggccgagactcagacctgctacaccagcgtgaaggtaaatgccccgcgctggcacacgccgtgggggccgtccgccccgtcggcggggctcgcacgggtagggggctccggcggagttgggtgaccgtgaggcggttggtttggagaggttgtcactaaggaggagtttacttttcatttgtggagatgatgggagcccaggaaatgtggtcagaaaaaggcccctggaggggtcctggaagcgtccttagctggtcctgggggactgggcggggaagggagcgcagaaggaagcaggtgggctggcctgttcctccttgagggcaggaaggctgtggcttggtttatgcaggaagaggggtggggaccattgagagcattcggtggccagtcctgttgaatgaaatctgagcactgagctggatttgcgtgccttgtaggtgactggtgcagttgcagcaccaggatagatagtgccccatattccgatttttacctgggattaccagccaggctggagtctcagcacaggaaccgagcgtagggatttgtgaatgaatgagtgttcgtgttttaagagatgtgggaacggagcagagtggaacctgttgtttgtcactgtaacgtttctctgggttggctgcatcctagacagaattgagagaaccgggccatgagttcggagtgtcagcagagccaccgtgaggggacgtggtttccagtgcagtacagctgtctgaggatgattctgcacatacaactgatcttcccagagagtgggattttgaggaagtggaaaaaattgtttagatggttaaagcagtcgctaaatatttatttcttaaagacagaagaaaaataattatttaaatagtgtcctcccgtatgttctcaaagtaccgttaaatccaagaggcttttcattgtgta

SEQ ID NO: 9868 - DNA, 1393 bp, Artificial sequence
  DNA replication origin
ggaaaagtcaaataatatgctttatattagctcaaacatttattaagaaaaccgaattccataaataaacacagacattaagttaaaacatatcacaaattgaccagtatgtaacaagaatgctttatctacacaaaacatcctatttcacatatttgttcattcttagaaagcgcttctgttctctgggtttggatttgaccagcacatgcagaaagagctgattgtgtttctctgtacaaagttgcagggttgtagatgtccgagtgcccccatcggctgccagcaggtggccgaggggcacgagggacgacaggaccaccacaaaacaaccaagggcacagagcagcgagaagacagaaacagaaaaggaagcaaacaaaccccagtcctgaaggatccagaaaagagatgtggcttttgcttttacaaaagaaaattttgcttacacgtttattttattcttccttataaagacttatcaaaatgggtcagatcacctcttcctcgtcacatgactgctttagtctactccagccacccaatccactgtcacgttcctcctgagaagccttcccttctacactctcacacagttgtgcttaagaaaatgaaaataagataaaataaaaataaaagcgttatcttgcaagccaagagagggctgcacggatgtgactgggtggactgggcaagggtagcgtggtgggagaggaaagaaagacaggagcttggagagtacaaggataaatcaaatcatatcagttgggccctcagatgaggcggttggtagcaatgcttgtcctcctttaagacaaaaatccctaacattgtgctgtcccttgaacacgtccgtgtgtgacctaggtgcaccgtgtctgtgcgcgcgcgtgtgtagcgtctgagcgtgagcgagagtgcgagtgtgtgtgtttctgcccacaaaccagtccattggtgtctgatttcagatcctgagtcgactccctggtacgtaaaatggcgggaaggatactttttgccgggcgcgggaggagggtcgcgaagtgtggggaaagaggggaccggaggggaggcggcgggcgaggggggtcgtaggcgtcgcgtcgaaggtgtgggtgggaacgccgcccgtcagaaggccaggaggagggcgcgagcacggccagcgcaagcagggaggccagggtggcgggaagggtgggctgaggcgctggagaccgagccgagggcgcagctgggtgggaagggaagaggggcggccgggagacgggggaccgcgggcgatcgaaatcaggcggaggggaggcctcgcgggctggggcttggggtgagcccgagcgagtggaggagagaggcgaggacgaaacgagacggggcgaaggccggggcg

SEQ ID NO: 9869 - DNA, 1024 bp, Artificial sequence
  DNA replication origin
cgccccctgggggccgggcggggcgggcccgagtcccctctgggaccgcggcacctccggaccgctggaaggcgacgcggcggccacttcgggcggacgggcccggcctgcagaggagttgggctattttgtaactgcaccatccacccaagcctcattaccacctcttaatgagacccctttactccgtgacgtgcaaccgctccatctcattaaggaaatcgctcttcaatgctgattattttatttgcagccataattatatttctttcggctaaatcacggtttaatcgagcccacatggagggcagcagcactaattacggcgggggatgcggcgacggcggcggcggcgcgggccggctggggggtgcggtagggggtgcccgggcggcgggcgcggccgaggggcccccgggcggggaggggcgcgggcggggggcgggggcccgggctcaaacacaacaacttattacttctaattccccaactgtcaccaaatcacctgcacgaaacaagaatctaatttgttaagctggcatgtctgcagatggaagatcgatcttctctgtagatttctctaattgagtgaatatagacgcccggaattagccgcactcgggttgcggggaggggacgagggtctgggaagcgggggagaaaaaaaagggggaggaagggagaagacagaagagagggagggaaggagaaaaaggggagagagaaagggaaaggagcgaaaaggggaaagagagacggatgggaggaccgatggaaaagagaatgagaggaaggagtggaggacggaaagggagaaaaagagaaaggaggaaggaggaaaaggagcaaacagagaaaaggaagagagcataaagagaagggggaaagagagagaaagggaagagggaaagggaagagaaagggtaggagatgcaaggaggaaaagatagggagatgaaatcctatttgagaaaggctcttcacccatagatgcaactccctcctccaccccaccccccgaagc

SEQ ID NO: 9870 - DNA, 756 bp, Artificial sequence
  DNA replication origin
tgcgcgtcgccctccacggttaccccggctctccgcccctccttctcgcggcgctcgagggaccatggccgatcctcgcgtgagacagatcaagatcaagaccggcgtggtgaagcggtaaggagccgggagcggcgccctgcacctcctcttcgtcacctcatggcggcccgcgaggctgagcggagcgcaggcccgaggaggcccgaggcgggctccgaactccaggccgcacccggggctccgcagttggctgggactggcagggacccagcggggcgcgctgacgcccgagcccgccagcctcgcacgccgcttcccgtccctctccgctcactggccgctctgatttgccggaagagtcggcggtggcccggtttctcggcgcccgcggtgggaaggtggtgggccgcggcctgcgagggcgggccgggccctgatcccgtgcctcctgtgtgcgcgcgccggcctctccttgctgaacttggcccggggaagcgggatcccagctgtgctctcaaatgggcttgaaagcaggctctgaagtttagggggatgcggaggatctgggcctcgtcaaaaaagaccgtagtggagccgtgtgacctaacatggctggcgtgactggcaggctttgagaactgggcctgaacttctagcacactcagcaaacttatgtggcctcactttctccagtcagattccccgaagctcgccccagaggctgtgagatgctgtttaaataacttgtgaacc

SEQ ID NO: 9871 - DNA, 1231 bp, Artificial sequence
  DNA replication origin
cggacggggtggctggccgggcggggggctgacccccccacctccctcccggacggggtggctggccgggcagaggggctcctcacttcccagtaggggcagctgggcagaggcgcccctcacctcccggacggggcggctggccgggtggggggctgaccccctacctccctcccggacggggcggctggccgggcggggggctgaccccccaacctccctcccggacggggcggctggccgggcggggggctgacccccccacctccctcccggacagggcggctggccgggcagagggactcctcacttcccagtaggggcggctgggcagaggcgcccctcacctcccggacagggcggctggccgggcggggggctgaccccctacctccctcccggacggggcggctggcctggcgggggctgagccccccctccctcccggacggggcggctgccgggcggagacgctcctcacttcccagacggggcggctgccgggcggaggggctcctcacttctcagacggggcagttgccgggtggagggtctcctcccttctcagatggggcggctgggcagagacgctcctcacctcccagacggagtcgcggccgggcagaggcgctcctcacatcccagatggggcggcggggcaaaggcgctccccacatctcagacgatgggcggccgggcagagacgctcctcacttcctagatgggatggtggccgggcagagacgctcctcactttccagactgggcagccaggcagaggggctcctcacatcccagacgatgggcggccaggcagagacgctcctcacttcctagacggggtggcggccgggcagaggctgcactctggacgctttgggaggccaaggcaggtggctgggaggtggaggttgtagcgagccaagatcatgccactgcactccagcctgggcaccattgagcactaagtgaaccagacactgtctgcaatcccggcacctctggaggccaaggctggcggatcactcgcggttaggagctggagatcagcccggccaacacagcgaaaccccgtctccaccaaaaaaatacgaaaaccagccaggcatggcggcgcgcgcctgccatcgcaggcactcggcaggctgaggcaggagaatcaggcagggaggttgcagtgagccgagatggcagcagtacagtccagcttcagctcggcatcagagggaga

SEQ ID NO: 9872 - DNA, 1013 bp, Artificial sequence
  DNA replication origin
caccccgtccgggagggaggtgggggggtcagccccccgcccggccagccaccccgtccgggagggaggtgggggggtcagccccccgcccggccagcagccccgtccgggagggaggtgggggggtcagccccctgcccggccagccgccctgtccgggagggaggtagggggtcagccccccgcccggccagccgcctcgtccgggaggtgaggggtgcctctgcccggccgcccctactgggaagtgaggagcccctctgcccggccagccgccccgtccgggagggaggtgggggggtcagccccccgcccggccagccgccccgtccgggagggaggtagggggtcagccccccgcccggccagccgccccgtccgggagggaggtgggggggtcagccccctgcccggccagccgccccgtccgggagggaggtgggggggtcagccccccgcccggccagccgcctcgtccaggaggtgaggggcgcctctgccaggccgcccctactgggaagtgaggagcccctctgcccggccaccaccccgtctgggaggtgtgcccaacagctcattgagaacgggccatgatgacaatggtggttttgtggaatagaaagcggggaaaggtggggaaaagattgagaaatcggatggttgcggtgtctgtgtagaaagaggtagacatgggagacttttcattttgttctgtactaagaaaaattcttctgccttgggatcctgttgatcctgtgaccttaccccccaaccctgtgctctctgaaacatgtgctgtgtccactcagggttaaatggattaagggcggtgcaagatgtgctttgttaaacagatgcttgaaggcagcatgctcgttaagagtcatcaccactccctaatctcaagtacccggggacacaaacactgcggaaggccgcagggtcctctgcctaggaaaaccagagacctttgttcacttgtttatctgctgaccttccctccactattgtcc

SEQ ID NO: 9873 - DNA, 1774 bp, Artificial sequence
  DNA replication origin
gttgagatccgggtcggcaaacgggttactgtcgaaatccgacatctctctggctctcggcgtcacccacccgacccaggcgcagagagagagacgaggcgaggccgccgcccccctgcgcgctcacgtcgccgccgccgagcagatccgggtgcagctcgcgggccacccagccggccgcgccactgagcatgcccggtgcggcgggctcctggccgcggcgcagctcgcgttcgccatcccgttcctccgggcccggatcccacgctccgggctttagctgcgaccgagtaggcagtcggggcgaaggaaacgggaactgaaagcgatgaaaagcgttccacacgccacgagcccgcgggatcctcggagagtatggaacccttcccctccgctctcagccggaggccagctgcgtccagccgggctcggtcttctgaacaccgatttcaaatcaggtcctcggggcccagcgtcacttagggaagtggtggcattttgtggtaaggacgcacacttgtcaggttgggggaggcagcctgagtcgtgggccgcgcaccccgggagcagtgccgttagaccgtgggacgcgggcactggagaggctactgcaccgccctccgcaaattacctccccggggcgggggcgcggccgctgctaaggatttttgcatacccctgaccccacctgagaatcccggcctcccatcttccggtctctctgactctaggttgctgctaaatcacggagagcagccttggcgctgccggtcccaacttgatccaaggagccttgagaaggagatgagattcagtaccaggggccggccgtggctcccatcctccggaatctgcaaaatggctacttcttcagaaataatggggagagggatggcaagaggccagagatcaaggccctcgagtattaacttgagcatttgggcacaaaatagacacttttggattttcccgtcttttccaacaccaaggatgagattatcaaaagatgtgttaaattaatttgtaccggccgggcgcggtggcttacgcctgtaatcccaacactttgggaggccgaggcgggcgaatcacaaggtcatgagttcgaaaccagcctggccaatatggtgaaacccccgtctctactaaaaatacagaaattagccgggagtggtggcgtacgcctgtagtcccagctactctggaggctaaggcaggagaatcgcttgaatccgggaggtggaggtcgcagtgagccgagaccgggccactgcactccagcctgggagacagagcgagactctgtctcaagaaaaaaaaaaaatcaatttgtaccattccttgccccaccctgccgaacttattgaaagagcatcgctttcctcacttttctcctctaacagaaaagcacttagatgaagctacagggagccagaattcttttgacttggtgggtaccggaggattggaagaatctagattgagtattccttggcctttggggagcttgctctatgcaaagtcacccaggaaatgatactccccccactgtgaaacactagctagagatgatagacaaaaagcacatttgttgtaatctccctttgacgggattcaggttgggatagatgtcgaagcagctgcttctaggtagtcaacgaagatgtcaactagtaaatgacaacagacaaggatgagcacagcagagctgtacgattctagatatcaaaaagagcaagcagtctgttgtactcaccatcgcatcctcagcagc

SEQ ID NO: 9874 - DNA, 1070 bp, Artificial sequence
  DNA replication origin
ccgacccggatctcaacaatcccttcaaggtgagcttcggccccagcatctcctgccgccgcgacgcgtcgttgtttgtgaaaacggacgagttccttcgcgcccactgcgtctgcccctcggctccccttagcagcccagagaggggcgcggggccgccgtcctccatttggggtcgcgccccggccccgtgtcactcctttgggttttggggcttgggggtggaacctcctcagctcgtgcccggtcgcccttccacacgtccccgactggtgagggtcgtgtctgcagccgggactgggcccgcgcgcccggaggggtcctggcccgcctctcaggagagaaagccgagggcaggtagagtcgccccttgccaagcaagtgtggctggcagggccgggagtcggcggaggggggcccgccctggggtggggttgtcatggggacccgaggtggcggcggcggagagctgcgtggggtgatggcagaggtgtggaggaggagagaggtgagggcaccgagtatgctgcaattaaaaaaaaaaaggttatgtttttattttttaaacttgtgttgcacccaaataccaccagtggcgctgccatcccccctctttctgttaggttgaggttgaggttattgataccaaagcaaaacttaaaaataaacatatctggaaaacaatagtgcacgtggacgacctcttccctacccagctgcttctagcaaggtaaacgatgggatattttccaagctcctagtgcgtcaccggttctctgggctatgtgaggataccatttcctacttgagctgcttttcttcttggagtcgaccttatcaaccccggcttcggaagggcttggcacagaatcctgcaaaggaaggcggctgagatattcatcgtctgcgtttaaatgaatgcaacatctaaataactctctctttgaaagtattctgaatttcctaatgagtgtaactgttagcacgtgtaatttgtttccaactgttggttgaagttgtttctcaatccccccggccatgtgcagtagtaactttaatttgcagtcaca

SEQ ID NO: 9875 - DNA, 869 bp, Artificial sequence
  DNA replication origin
gcctctgcccggccgccaccccgtgtgggaagtgaggagcgtctctgcctggccacccatcgtctgagaagtgaagagcccctccgcccggcagccaccccgtctgggaagtgaggagcgtctccgccctgcagccaccccatccgggagggaggtgggggtcagcccccgccaggccagccgccctgtccgggagggaggtgggggggtcagccccccgccaggccagccgccccgtccgggaggtgaggggcgcctctgcccggccgcccctactgggaagtgaggagcccctctgcccggccagccgccccgtccgggagggaggtgggggggtcagccccccgcccggccagctgccccgtccgggaggtgaggggcgcctctgcccggccgcccctactgggaagtgaggagcccctctgcccggccaccaccccgtctgggaggtgtacccaacagctcattgagaacgggccatgatgacaatggcggttttgtggagtggaaaggggggaaaggtggggaaaagattgagaaatcggatggttgccatgtctgtgtagaaagaagtagacatgggagacttttcattttgttctgtactaagaaaaattcttctgccttgggatcctgttgatctgtgaccttacccccaaccctgtgctctctgaaacatgtgctgtgtccactcagggttaaatggattaagggcggtgcaagatgtgctttgttaaacagatgcttgaaggcagcatgctcgttaagagtcatcaccactccctaatctcaagcacccagggacacaaacactgcggaaggccgcagggtcctctgcctaggaaaaccagagacctttgttcacttgt

SEQ ID NO: 9876 - DNA, 1032 bp, Artificial sequence
  DNA replication origin
ggcagaagaatttttcttagtacagaacaaaatgaaaagtctcccatgtctacttctttctacacagacatggcaaccatccgatttctcaatcttttccccacctttcccccctttccactccacaaaaccgccattgtcatcatggcccgttctcaatgagctgttgggtacacctcccagacggggtggtggccgggcagaggggctcctcacttcccagtaggggcggccgggcagaggcgcccctcacctcccggacggggcagctggccgggcggggggctgacccccccacctccctcccggacggggcggctggccgggcagaggggctcctcacttcccagtaggggcggccgggcagaggcgcccctcacctcccggacggggcggctggcctggcggggggctgacccccccacctccctcccggacagggcggctggcctggcgggggctgacccccacctccctcccggatggggtggctgcagggcggagacgctcctcacttcccagacggggtggctgccgggcggaggggctcttcacttctcagacgatgggtggccaggcagagacgctcctcacttcccacacggggtggcggccgggcagaggctgcactcccggcactttgggaggccaaggcaggcggctgggaggtggaggttgtagcgagccgagatcacgccaccgcactccagcctgggcgccattgagcactgagtgaaccagactctgtctgcaatcccggcacctcagaaggccgaggctggcggatcacttgcggttaggagctggagaccagcctggccaacacagcaaaaccccgtctccaccaaaaaaatacaaaaactggtcaggcgtggcggcgcgcgcctgcaatcgcaggcactcggcaggctgaggcaggagaatcaggcagggaggttgcagtgagccgagatggcagcagtacagtccagcttcggcttggcatcagagggagaccgtggaaagagagggagagggagagggagagagagg

SEQ ID NO: 9877 - DNA, 773 bp, Artificial sequence
  DNA replication origin
ctggtggtcttcatagaagaaaggccaggaatacctctgcacaggtgtcccacacgccatgtgactcccatgtccccatggagaatgcctaggtccccgtagggcataaacagttattctgatgctcagaactctgagactggggggctcccacttgtgattttgatactaacctatagattgttatgagttcgtgtcagagtccggcacctgttgtcatgtgaaatgttgaggtcaggtctgggaggagccacagcctgcccttccccaaggtgttccccctgccgtaaggaagctacagccatgcggcagtgtcggggctagataggagctccagaggcgcccccagccacaggcttggtggggagtgggtctcagcctcacccacctactgcagcatcagcattggggtgggagctgagctagcaggtggagcaggcttgggaggagacagcgctgggggctgacggtgagggaggggccttctctctcctggcccctttagtgtcccctggctgctctggctttgtgtggctctggtgggagagggggtcctaggtcgtctttgctctcctttattcctcccctcacactagccatcgtggacaatcccctcttccctttgggaggcactgagagatgaggcaggcagcagggggtgagatgggaagggaggcagctccagatctggggaatctgaggggggtctgtctgtcagtgtctgtgtctgtcctccctgatttgctcagggaggaggtgggtggaaggccagg

SEQ ID NO: 9878 - DNA, 1228 bp, Artificial sequence
  DNA replication origin
ggagccggagacgccgagctggggccgggtgagtggcaggcgtcgggcccgcgcgcgctgcgggaggggagagccggtgggcccggccaggtgggcgccccgcgcgggcgcatggggagccgttgcggccggccgagccctggctgcttgagccgcggctggcgcgggaacttcgcttcggcgccctgggagaccgcgccgagcggtcggaggtgctgcgggatgggcgttgggtgctgggaatgggaagggaacagctgcttctcagcgccgccggcggccgcagaagtggaaaaaagttgtgccgggaacagcgtctcctcgggaagccggcgcgagccctgctctctgggcgtcgctggcgggcttcggacggcggcgcgtgggtcccaggcgcagctgggcgccgggttccagcgcgcctggcaccgctccctgggggccgccccgtggtcgcccctgctgtccctggtccgtggcgtgtgggtcactctggccacagacgtcagctgcttctcaaatctggactgcatttttgtgggcagctcagtgatttggggtgcgggctggaagaggtgggcgtggagtggggaagaccgcatctgggatgggcggcttgagcccacgggctgggcaaaggactggggagactctgcgtgtgtttctggatgtttttaggcacacagtttttttttttcttttcccttccattcagcggcccagtgttcttcgaacttagaaaagcaaaggattttcttcaatcccgttcgacttttctgttatttcaggatggtcatgagttccatgaaagtccatgtgcttgtttcaatgggagcaacaccagagtaaagacaaagtcctatccccacccccgtcctcgcctccacccgggccatttcctgtatgtcccattttctctgttgtgattgtgcgagtgtgtttgtgcatgtaggttaccatcggtgggtgacctacgtggaaaggagaactctttgaaattgcaacgcggccgctatggaaagtgtgtgctggagccgagggaggaaagattccggcgagccagagctgttagaggctcaccccagagaggtaaaccggagtaactgagcttgaagggacatttataacctgcacattgcttttgccttaccccttggccagagagctccactcctgctaggtttaagagaggatcagatactgacttctttgatgttgacttttgctg

SEQ ID NO: 9879 - DNA, 1489 bp, Artificial sequence
  DNA replication origin
tgacctctctaccttggaaggatttgtgggatgtgggttgggggacaggacagagagttctcctcttatttgtacattttgtgtttatctcaagtcagcagcctcaaacaactccccttcaacagttatcttcatctttttataaaagtaaagtcgtatatttacatgtactatagtatttattaggaatttaacacagttcattagctctactggtattttttttggaatggttagtttttgttagtgctgtggttacaatgttacatagattctgagtcattttctaaccctactttccccacaagccctgttatttctagtgtgtgatttcacaaaatggaaagagcacatatatccttttagagcaaaaatgtggtactgcaaacttcattttcaatgaagataagtggaatttggctgcgggagaagatgaaagagagcattccagctctgggaagagcatcagcaactctcgtgtagatacaggcatggatctttctcggggggaggggaggatccccatctaaagagagtcccaggctctgagaagtgcgtatggaggtgcagttgttgtatggttttgaactgatgatttttaaggaattcagaatgttctctggcaaagtgcctcagaaagcttctagaacaggaagtggcctgcctgaggggtattctagagccattcacctgtaggcctgcgcatatggatgcaagtgtagagaggaccccagcagagaaccggtaggaggccgctcacgccatccagtgccagatagcgagaaccagaaaggcggcagtgggcttgaaaggacatggcacctggaaaggcattaaaaatgaagaactaatgggactggctaccgggagtggaggagcgaggcccaaaattgactgctaatctgaatctgggcgactggtggatagaggtgtcccagacaaggggctgagaaactgggaatgggagcatttgactgggcggggggcgggggggtggcgaggggtggaatacaagatgggtttgcctagagaggtgccacgtcctaacagttcaatcacaaacaatactggcacctgaattcatggccatttaactctgttctttgctcccagccctgggggcggagctggggagttaaagcatcccctctctggacaagaatgccttttcaggctgttcctaaagcgcctccgaaaatcatcctgaaaccgtaattttgagggcagggaagctgaggacaccaagcattctatttaggaataatctttgtgactgttggaattgagtttccacacctagatattcagagggcacgggaacttatgtccggagcctcctctccggaagagggcggcgaggatgggggtccaggcgccccttggcccctttcccgtttcggactctccggggtcaccagacggccgttctttccgcttgggcccgggtctgggggaactgctcctagcgccccggggcccgctctccgcc

SEQ ID NO: 9880 - DNA, 1350 bp, Artificial sequence
  DNA replication origin
ctcgagtcggactgggtggctgtgcggccccatgtgttcgacgagcgcgagaaacacaaattcgtctttattgtggcctggaacgagattgagggcaagtttgccataacctgccacaaccggacggcccagaggcagaggagcggctcccgggagcaagcgggggcgcgagggggcgccgaggccggcggagctgcgtccgacgggagccgcgggcccggcagcccggcgggcaggggtcggcccgaggccactgcctctgcaactctggttaggagccccgggccccggcggagctcggcctgggcggagggcggctctcctcggagcactcgcagccttctgggggacccgcggctgcggagtcctggcagcaaaggggcggagagtcgtcttaggagcccagtgcgggccaaacccatcccgggtcagaaaacatctgaagccgacgatgcggcgggggcagccgctgcagcagcccggccggcgcccagagaggcccaggtgtcctctgtacggatagtgagcgcctctgggacggtctccgaggagatagaggtgctggaaatggtgaaggaggacgaggcacctctggcgctctcggacgcggagcagccgccgcccgccaccgagctggagtctccggccgaagagtgcagctgggccggactgttttctttccaggacctgcgcgccgtgcaccagcagctgtgctcggtgaactcgcagttggagccgtgcctgccggtgttccccgaggaaccttcgggcatgtggactgtgctgtttgggggcgcccccgagatgaccgagcaggaaatcgacactctgtgttaccagctccaggtctacctgggccacggcctggacacctgcggctggaagatcctctcccaggtgctcttcaccgagaccgatgatcccgaggagtattacgaaagcctcagcgagctgcggcagaagggctacgaagaagtgcttcagcgggccaggaagcgcatccaggaggtgagtgagtgagctcctagtctgggctctactggtcgcttttggtttactggccaaaccaaaggctggagcctcggtgtcgggtgtgcgcagtaggacggttgtttttctggacaagcggaaaccaagaggggttcctgatctaccttgcccttcatccctctcggtggctgcttaattgactctctgaaggaccttcgtctttatttcctcccccatttatcaaaagtagtaagtgcgctctgtgtactactcagtactggtaatgcgcaattaaagccactaagaaaagtgttctgtaagcatgggctacctgagcatttttctacccctaaagctctt

SEQ ID NO: 9881 - DNA, 1202 bp, Artificial sequence
  DNA replication origin
gcccgagccaaggcgggaggctaagcccgcgttggggccaggagagctgggctcgaagccgaagcgcagccgccgctccagcgcccccacccctactcctcgtctctcacgctccgcgccgccgccacgcgccgcctcacattccccgggccccgccgccgcctcttcacacttccatcagcgcccgcctccggctaccgccgggcagagcagcgccagccccggcggcctgaagcctgccgctgcctccgcctccgccggccggccggctggcagagaagagggtgctgctttcccggtcagcgccgccggcgtgaagctagcgcggcggcagagtgggctgcggggggcgggaagggggcggagagaacggggagcgagggcggtccctccctctgctcgcgggaagggacgggaggcggtggccgccgcggagccgcggccgggggctggggcgcggactggtcccgggagcccgacgggccttgcgagcagcgggccgcgggagaaagcagcagccgcaaggcggcggagaggctgatggtggggggccgagcggccctcgtggggagctgggccggcggcaggccctcagtccgttcgtccttcttttcccccctcccctagaggctggcggctggctggccgtgcgctctgctcctcctctggctcttggccccgctcccgaccgccacagcctcctccgcgccccacaccaggtgctcgcgctgtgtctccatcctccccgcaggaggacctttaaatagcaacgtcagcgcgcttctctccgcacacacgtcacccgcagctcacgtcaccgaggtgcgggggatgatgtcacgcggccggaagtactgctaaattagggaaggagcagggggaggaggactcggcgagctcctgtgtgcccacctgctctcacttctccttaaaggccaaagcacaggagacagcccgagaggagctcgaacaaggaagcggcgggaggaggagatttccttgcaacaaatgtgccaaacctgagtgaatcattcgtagcaaaagtgcagtgtcaagcgggtaatagcctatctcccactcccaccgctattgcagcagcacccccgggcttctcttgtcctgactagcagggaaatgtgggagggagagcctgatcacactgctggtagatgtgcttccaacaggacttcggaaaaatcacc

SEQ ID NO: 9882 - DNA, 1543 bp, Artificial sequence
  DNA replication origin
gggtattgtttgggataaagggtccagaaagtagctcagctcaaaaccgaaaagactcactctggaggaaataagagacggggctaggttgcctttcctcctttgaaccccctggtgcagccggagcccgcgccccttaaagtgatctccagttgtccgaaaggcccgccagggatctggcgaaacgggggcgggggagggctcagggaagaggagaagctgagcccgggccccagaagctcggtggcgaaactttgacgccttctatttaaagtcgcggggctcgcccgcccccggcgccgggaacccgagccgcccccgcaggggcagggctggggagggcaggggccagagcagtcggagggagaacaccaggcgcggcgcgggcggctccggctccggccccggcccaggcccgggagaggcgatggcgagccgcgatagcaaccacgctggcgagagctttctcggctccgacggggacgaggaggcgacccgggagctggagaccgaggaggagtcggagggcgaggaggacgagacggcggcggagtcggaggaggagccggactccaggtagcgcgagcctctctcctcggcccagggcctgcagggcagctagcagcacccttgcttgtttgctttaagtttttaagctctggggttcgtttgcctcgagctaggcactttctctctgggtgcactgtcgtttaaaagaacttgaaggtgaaggtgctcgctgtcagctggagtgacaggcccgcctgcagcagagttcattacccccgcccccagctccttgtgactcgctgctcttgtttattcctgaggatttacttaggtcctgcataactgccgaaatgtgctggaacacgtacatctggcccgaggcacaggaacaatcgcgaaatcctgcgctagaggagaagggggtggggtggaggcggtgaaggcgcactggtaccttccgatgaatggcggtctccccgggggcctagcagtaggctaggctgcaataaggtgaccttattttgatacaaaggcccataaattctttgggggaaaagaagcatgagtttcagtaatccctgttcttcaagtcctggtcccaaatcccaaatatcagtttccgtgaatgcgatgaagtaatactatgtacaaaagatgcacctcccacccttcgatctcccaccctccgtccctttaagaaggccctaaaatgagaataatagaaatcatctaatgtctatttggattagcttctaccttcacttgttttccttgagtatgagttttgggttttttcctgactgtgtgtcagtcagtgatgtctcttcctcagtctgttcataacagtagaaaggctttgaaggtggcaggtgggtgtgtaccatctcagaacgcccagcttacctaatcaaagccagcagagccgatgttgaagaagtagcccatagaggggcattgaggaggatggatggtcagacaagaagtcctgaatgtatgtcacctgtttatcaaacagctgccaagtgggaagcaa

SEQ ID NO: 9883 - DNA, 864 bp, Artificial sequence
  DNA replication origin
tcccagtctacattctcaagaagctcaacgcttggaaaggaagagataattgtaaatgaataaattatggggagaaggaatacgtcatgattccaaggtttcagagcgggaagttacaacaatgagaagctgatattaagccagagctatcacagaagacagaatgatgaaatcagtctgagtgtacaaggaaaggcttttcaggggaggtggtacctgagctgggttttgtagaatgaatgggagctcattttaggaagcaagatggggaaagcagtgccaggcaaaagcaaacattccttaagaggttcacagacgcgtactgctacagggaaaactccagaggatgggaagagtaggcagggaggcctgtgtgatatgctgaggggtgtggggcaggggcagtgaagggtttttaggtcagtgcaaggcaatgtcagattagcgtgctagaagaacctctctggactcagtctggagggaagcctgggggagaccgaggggccagttcagaggatgtgttgatagtcatgtaaaggagtgaccaagtccagcacaaagaaggcggggacagggaagaggggaaagagtgagaggagcaccaggagaggggagagcccgtaagacagtgagagggaggcaagctttgaagacaggtgatggggctgagggcaggaggaaatgcatccctggagagggtgacgccagaggtgcaggtgggaaacgggtaatgggaggaggcagagaaggtgggctcaggcatgggtggaggcggagagaggccaagcagtcagagaggaggaaagatggagaatatggataagaacccagggcaagagtgagagaggcaggagaacagttgaa

SEQ ID NO: 9884 - DNA, 1197 bp, Artificial sequence
  DNA replication origin
tgggcccgggagggacagagaggggctgagcaaggccacaggagcacagggccgagcaagtccctccactcactcagcagatggggcacccggtgcccggcgctcccaggcccgacccgaacccacttaccctggggggtggcctgggcgcctgccgctagccaccgctgcaggaccaggtgcagcaggaggacggcggctccgcgcggggccagcatgttggctcttcctgctccccgcgaggccgggggcgacggcggcgttggccccgcctgggggtccccgggccgtgcgttgaacctcggtcggcgcccgggccggcgccgcaggtgacccgtgctcggcgtccgggctgccgtcgggggcgcgctcgcgtccccgccgtgcggtgctggggagctggctgctgggctccgcggcagcggccgggcgctttatggtgcggccgggcgggggagggccggggcgggggcggcccccttggcgggatcccctgtcctgggaagagctgggcagctggagcagcgagccggggccgcagggagaaaggcgcgggtgtgaggatgggaaggagcctggacggaccaggtcctggggtgggtgtagacacggccccgacgcgcgagggtaggggcgaagatgggcagtcggggctggagagaaaggggtgctgagcagagaccacaggggagaaaggagcgggaggaaaggggcgaaagggaggaagaaagtgacactgacccactagctttgggcaccttcagtcccctactccttgcgctccttttgttttctaaaaagaagaatatcctttggatcggctttgaatgcccaccttgggttcccttgcgaatgaatcctgaagttctccaggaacgctctgcctcctaaagtggcccagagagcagcgagtttcttttatttcttcaagcttttcttgaatacttgaaaggctgaatttttttctctatcattttgagacacagtgaaagtttgaaagttgttgtgtttttaatggagataaaacacatctcaaggaatccatccagacagagccatttctaggctggtgaatctgtgctttatggataattcgttttcagtatggtttccaaacgccctgcttgcccacctctattcctctgtcaccaaagattccgtgtgacagtttaaaggtacgggagtagaacttgaaag

SEQ ID NO: 9885 - DNA, 1051 bp, Artificial sequence
  DNA replication origin
ctttcctcttctactcctaagctgcccaagacactcctttgccagagctctgtctggaaacgagtccctctaaggtcaagccttgcgtcatgtgccaggggatcagacgagtggattccaggcccagttttacttcctcaactttgctgtgaggctttgggcaagttatttaacctctctgggcttcagttgcctcaccgctaaaatgggtacggtaatgcttatttgaaagagcaaagggattggcgcaaaaatcgcactaacagaaatatcttcattccggcagggcgcggtggctcacgcctgtaatcccagcactttgggaggccgaggcgggcggatcacctgaggtcaggagttcgagaccagcctggccaagatggtgaaaccccgtctctactaaaaatacaaaaaattagccgggcgtggtggcaggcgcctgtaatcccagctactcgggaggcagaggttgcagtgagccgagatcgcgtcactgcactccagcctgggcgacagagtgaagctccgtctcagagaaaaaaaagaaaaaaaaaaaagaaataccttcattcctcttggggaggtggctgtgaggacagcagatctgagtgggagaaaacctagagacggcctccctgccttctgtatggaacaagcaattattgggcaccctctttttagtgaggaagcagggacggaaaatgagtccttgggccagcgcaggaggagaggctggaaaacatatcaatattcaggaaggcacggaaagggctctcaatggatctctcaccaagtgccatcagggcagaacagtcaagggcccagggattcgaggaagcttgggaggcgcggagagcccaaaagttgaaagttttcttggcagatgagggaaggaaagggatttcaggaacaaggatctcgtgggtgggctgtcccagtcggcgcgcggcagagcgcagaccagcacccggcggtctggtctgtgcaggaaaggcaggaaccgcttactaaggctccaaccttttagaggcagcaacaagctctttctctg

SEQ ID NO: 9886 - DNA, 1231 bp, Artificial sequence
  DNA replication origin
ttccacaaaaccgccattgtcatcatggcccattctcaatgagctgctgggcacacctcccagacggggtggcagccgggcagaggggctcctcacttcccagtaggggcagctgggcagaggcgcccctcacctccctgacggggcgactggccgggcggggggctgacccccccacctccctcccggacggggcggctggccgggcagaggggctcctcacttcccagtaggggcggccgggcagaggcgcccctcacctcccggacagggcggttggccgggcgggggcctgacccgccccacctccctcccggccccacctccctcccggacagggcggctggccggtcggggggctgacccccccacctccctcccggacggggcggctggctgaccccccgacctccctcccggacggggtggctgccgggcggagacgctcctcacttcccagacggggtggctgccgggcagaggggctcctcacttctctgacagggcggctgccgggtggaggggctcctcacttctcagacggggcggttgccaggcggagggtctcctcacttctcagacggggcggccgggcagagacgctcctcacctcccagacggggtcgcggccgggtagaggcgctcctcacatcccagacggggtggcggggcagaggtgctccccacatctcagacgatgggcggccgggcagagacgctcctcacttcctagatgggatggcggtcgggaagaggcgctcctcacttcctatatgggatggcggccgggcagagacgctcctcattttccagactgggcagccaggcagaggggctcctcacatcccagacgatgggcagctaggcagagacgctcctcacttcccagacggggtggcgaccgggcagaggctgcaatctcgtcactttggggggccaaggcaggcggctgggaggtggaggtggtagcaagccgagatcacgccactgcactccagcctgggcaccattgagcgctgagtgaaccagactccgtctgcaatcccggcacctcgggaggccgaggctggcggatcactcgcggttaggagctggagaccagcccggccaacacagcgaaaccccgtctccaccaaaaaaatacgaaaaccagtcaggcgtggcggcgcgcgcctgcaatcgcaggcactcggcaggctgaggcaggagaatcaggcagggaggttgcagt

SEQ ID NO: 9887 - DNA, 1067 bp, Artificial sequence
  DNA replication origin
gcaaccgccccgtctgagaagtgaggagcccctccacccggcagccgccctgtcagagaagtgaggagcccctctgcccggcagccaccccgtctgggaagtgaggagcgtctccgcccggcagccaccccgtccgggagggaggtcggggggtcagccagccgccccgtccgggagggaggtgggggggtcagccccccgaccggccagccgccctgtccgggagggaggtggggccgggagggaggtggggcgggtcaggcccccgcccggccaaccgccctgtccgggaggtgaggggcgcctctgcccggccgcccctactgggaagtgaggagcccctctgcccggccagccgccccgtccgggagggaggtgggggggtcagccccccgcccggccagtcgccccgtcagggaggtgaggggcgcctctgcccagctgcccctactgggaagtgaggagcccctctgcccggctgccaccccgtctgggaggtgtgcccagcagctcattgagaatgggccatgatgacaatggcggttttgtggaatagaaaggggggaaaggtggggaaaagattgagaggttggatggttgctgtgtttgtgtggaaagaggtagacatgggagacttctcattttgttctgtactaagaaaaattattctgccttgggatcctgttgatctgtgaccttacccccaaccctgtgctctctgaaacatgtgctgtgtccactcagggttaaatggattaagggcggtgcaagatgtgctttcttaaacagatgcttgaaggcagcatgctcgttaaaagtcatcaccactccctaatctcaagtaccccgcgacacaaacactgcggaaggccgcagggtcctctgcctaggaaaaccagagacctttgttcacttgtttatctgctgaccttccctccactattgtcctatgaccctgccgaatccccctctgcgagaaacacccaagaatgatcaataaaaaaaaataaaaaaataaaaataaaaaataaaaaaaaaaaaagaaactatccaatcctcagcctgct

SEQ ID NO: 9888 - DNA, 772 bp, Artificial sequence
  DNA replication origin
ctccgtccgctggggtctctcccccaggagcgccgaacactccggcggcccgggagcggggaaccgggcaaacagccgccgtgattgccctcccggtccagtccggtctggcccttcaggctccaggaggggacatcagattggagggccagggttccccggccagctccgggggctcggaaaaggaatcggtcggggcccaggctctgtccccagaggaagagggccagacccagcgcccaggtcggcgggtccagcggtcaccccgcccccctgtgggaacagcagggctgaggggaggccgagacgaccggtcacggggggctcttacctccctacagcccctgcggagctttttgggaactcgacacgacgtcgcgctgaggagtgaagagctaccccggccgggagtcctgggagtgccagatcccggctcagggcttctttccccgccccaccgggcagcgcagagagcgcaggcgcagaggacgctttcctcttcggctcacacgccccctccctcggcatccgcggccgtctccaggcccggggcgcttgcgcactacgacgcaggttccgagccaagggcactagatttcttaccggaagtgcctgagtgggttgttgggtgacggggacgcctgatgattcgaccttaggtcgggactcggttctccactcgactgcgggatcgggaggccactcgcgtcagtgtctgacttcctttacccttcgctaacctagaggcagcttccccggctccagccttagc

SEQ ID NO: 9889 - DNA, 1111 bp, Artificial sequence
  DNA replication origin
gacttgcggtctgcgctggcaggaagggtgggcccgactggattccccttttctgctgcgcgggaggcccagttgctgatttctgcccggattctgctgcccggtgaggtctttgccctgcggcgccctcgcccagggcaaagtcccagccctggagaaaacacctcacccctacccacagcgctccgtttgtcaggtgccttagagctcgagcccaagggataatgtttcgagtaacgctgtttctctaacttgtaggaatgaattcagatatttccagagaatgaccacaacctcttcagtagaaggtaatgtgggattaagtagggtcttgcttgatgaagtttaccagtgcaaatgttagttaaatggaaagttttccgtgttaatctgggaccttttctcttattatggatctgtatgatctgtatgcagttcccaaggttcatttaccattattaaaaaatttttgtcttagaaattttatgtatgtcaacgcacgagcaaattatcaggcatggggcagaattggcagctgggtggaggcttcggtggaggtgagcactccgaaaggaaaacagagtaggcctttggaacagctgctggaagagataaggcctgaacaagggcagtggagaagagagggtaaaaattttttaaggttacatgaccctggattttggagatctcgaatttaaaggtgatgcaccagggatgaacgctcagattttcagtttgaaagctggcgtgacatgtaaaggagtggagaataatgtaccattgtaatgatgaggcgcctctaggacatctaggataatttcaggcgtggggatctaggtgaattgaactgttggagggaagggaataaccaaggaaaagaatgtgggggttgagagatgccccgtttaaaacctaagagacctggatatttatggttgtaagaggaggcatggcagaggaaatggaaacagtaagaaaggagcagatgctgcatctctttaatgggacagatacaaggcatttgggtttgacacttaggtcactggtagagatgatgacaagagcccgtagctaaagaattgataaaagccagtctcaaaaatcccaatat

SEQ ID NO: 9890 - DNA, 983 bp, Artificial sequence
  DNA replication origin
ctcgtccccatttgtgcaggcgaggccccgcccccccgccccggcgcacgcagggtcgcggcgtgctcgcgcccgcagacgcctgggaactgcggccgcgggctcgcgctcctcgccaggccctgccgccgggctgccatccttgccctgccatgtctcgccggaagcctgcgtcgggcggcctcgctgcctccagctcagcccctgcgaggcaagcggttttgagccgattcttccagtctacgggaagcctgaaatccacctcctcctccacaggtgcagccgaccaggtggaccctggcgctgcagcggctgcagcggccgcagcggccgcagcgcccccagcgcccccagctcccgccttcccgccccagctgccgccgcacatagtaggttctgtctgggactgggcagggccatcggggctgggggggcggggcttgtgggtaaggcgggcggaggcggggaccctccgcccgatgatagggctggaggaggaaggggcgggctgaagaaggggaaggtgggaagagcccagccggggctacaaattgggtgaagcgctgaggttttagtacttccgtttgaggagataggcaaaggttatgcaggtttttaatggcaggcctgagacaggaactcaggtctcctgactcccattctgatgagggggcttgtgggcaaggggtgcgtcttttaacctccatcctttttttttttccttggtggtcgaagagttttactgattttttaaaaaagtgctggattgggtgactagaagaaagctgcccttaggtctccagtttttaagactgcaacagcatggctcaatatttgaaatcactacggttaaaagcagtcatattgtgcagttccccagtgaactctttttgtagtttagattataaagtctgaaatacagtttgggtggataaagtttcttaggatggtatagatgtgactaatcatggagtccttcctgt

SEQ ID NO: 9891 - DNA, 1155 bp, Artificial sequence
  DNA replication origin
aaaaaatgtgtatagcagaatcaaatataggccctccccgggggtttcactggctttctctcacagctgctggctacattatttcttttccacttacatttttacagcatggggttggggcgggggggtggctcttggttttctggttgtacctgtcagatttgttaatcaaatgaatccagtcctacaaacgatgagcctgtgacagctggcctttggggttggattctgccctgggcagcaaagtgtcccttatttgggtatttttttccaggttgaaaactcggcacttaaaatttagcatcttaccactgtgaaataacaggcattccgaaagaacttcggcatctgatgcctttccgggaacacttgggccactctccttaacctttaccggcagttttaaatactacaatgcaggtacaagcagaaaagccaaggatgcgggctatgcaaagccactctgtgactctacctactgccatgggaacgtacttatggatgtggcatgtgagtgtgtgtgtatgtgtgagtgggtttgtgaaagtgtgtggattcgtgcgaatacgtgtgtgagtgctttgtgtgtatttttggatgaatttgtgaatgtacatgtgtgttcatctgtgtgtgtgtttgattatctgcttatgagtctgtatgattgtgaacgtgtgagtatatgtgtgctgtttgtgtgactgtatgagtgtaatgtgtgtatgaatgtatgtttgaatgtgggtttgagtgaatgtgtgggttgtgtgtgaatgtgtgtgtaagtgagcatatcactgcgtgcatgtgtgtagctccttaagtgtgtatctgaatgtgggttttatttttgtgcgcgggaacgcacattgtgggtgtatttgtctatatgcatttgtgcgttgtgactgtgtgttgagtgtgagcgttgtgagaatgtgtatttgtgtgtcatgagtgtgtgcgcgtgtgtttttgtgcatatgtgcgcgcattgtgtttgtgtgcatttgtgagtgtatttttgtgcgtctgagtgtgtgcattgtggatctgggtgaatgtactggtctgcgtgtgtgtgggtgtgcgtgtgtgtgtgcgcgcgttgtgcgcgagtgtgcgagcgcgtgtgagcgggtgtgtggtgcg

SEQ ID NO: 9892 - DNA, 1036 bp, Artificial sequence
  DNA replication origin
cccctgccaccgcgcgccgcggcctcccgaaagcgggcggggtgccctgcgcgcggcgtggggaaagggggcgcccttcgccggccgggacctgagcggtcgcgccctcgagggagccagctgggccatggccgcgaggcaggggtgagaccggcggccacccgtgagccctccgcacccgcaccatgcagaagagcgtgcgctacaacgaggggcacgccctgtacctggcctttctggcgcgcaaggagggcaccaagcgcggcttcctgagtaagaagacggccgaggcgagccgctggcacgagaagtggttcgccctctaccagaatgtgctcttctacttcgagggcgagcagagctgccgcccggcgggcatgtacctcctggagggctgcagctgcgaacgaacgcccgcgccacccagggccggcgccgggcagggaggcgtccgagacgcgctggacaagcaggtaccgcgcgccttctctccgcggtctcccagccttgatcgccgcactcccttgccgtcctaatccggggatcaggggtcgggggtcgtgaaagagtgcggggactatgctccgaaatccccccgcgtcaccagtggcgggacatctccacgctccttccgatcttcatccagggattctcccatctccatacccctccaccccactgccaagtgatcagtcagaatagtggcccgacttgctttcattaccctggtagaggtcgagtcgtttcagcttctctgccaaccatctattgcttctctagacctggctcgccagatttttgtctggtgacatgtattgacacctgttgggtgtagattggcaagacggaactaacttatttggaaaagtttgatttctgccatacccggctggcgcgtgtagatttctttgcctgcagatgtttgaccactggttgggctgggaacaagcggggctcccaagccggacagacactttctgttggtcattttcaatcagtctttgtgatttcggtcagttggccttgctaacatttg

SEQ ID NO: 9893 - DNA, 1010 bp, Artificial sequence
  DNA replication origin
ataaataataaatcatacaagtgctattattatctataagcaaataaataaggtaaattccaatattgaacagaaaaagggtgactaggcccatgtgagagaaagggcacattagctagctcgggctggggaaggcctttctaaggagaaacacaggagttgggacatgaatgaagagaaagacagagtcatgtggagatttggaggaagagtgtttcaagcagaaggagcagtgattgaaaaggctgggacagctctgcttgatggagggatgggaagcagcccagtatggctgcagcccaggaatcatgggaacaggaaaagggaggtaaagtcagagagtagacaaaatcaccaagcttcttttaagccagtttaaatagctgaattttattctctggtattgggaagccatcagcgggttttgcccaagggaatcatattgtctgatttacattttagaaaggttactctggctgccatgtgcagtgtgcactggaggggggcaaagtggaacgaggagaggccaagagtgaggtagtgatgcaggtgatgcagatactgtaggtggtgcaggtgatacaggtggtgcaggtgataacagtggtgcagggagtgcaggtgctgcaagtgatgcaggtggtgcaggtgatgcaggtggtgcaggtgatgctggtggtatgggtgatacatgtggtgcgggtgatgcaggtggtgtggatgataacagtggtgcagggagtgcaggtgatgcaagtgatgcaggtggtgcaggtggtgcaggtgatgcaggtgatgcaggtggtatgggtgatacaggtggtacaggtgatgcaggtggtatgggtgatacaggtggtacaggtgatgcaggtgacgcaggtggtatgggtgatacaggtggtgcaggtgatgcaggtggtatgggtgatacaggtggtgcaggtgatgcaagtgatgcaggtgatgcaggtggtgcaggtgatgcaggtggtgcaggtttgggcaaa

SEQ ID NO: 9894 - DNA, 898 bp, Artificial sequence
  DNA replication origin
tcccagctactcgggaggctgaggcaggagaatttcttgaacctgggaggtagaggttgcagcgagccaagattgtgctactgtactccagcctgggcgacagagcgagactctgagtccgggagggaggtgggggggtcagcccccgcccggccagctgccccgtccgggagggaggtgggggagtcagccccccgcccggccagccgccccgtccgggaggtgaggggcgcctctgcctggccacccctactgggaagtgaggagcccctctgcccggccagccaccccgtccgggagggaggtggggggggtcagccccccgcccagccagccgccccgtccgggagggaggtggggggggtcagactcccgcccggccagccgccccttccgggaggtgaggggcgcctctgcccggccgcccctactgggaagtgaggagcccctctgcctggccaccaccccgtctgggaggtgtacccaacagctcattgagaacgggccatgatgacaatggcggttttgtggaatagaaaagggggaaaggtggggaaaagattgagaaatcggatggttgctgtgtctgtgtggaaagaagtagacatgggagacttttcattttgttctatactaagaaaaattcttctgccttgggatcctgttgatctatgaccttacccccaaccctgtgctctctgaaacatgtgcggtgtccactcagggttaaatggattaagggcggtgcaagatgtgctttgttaaacagatgcttgaaggcagcatgctcgttaagagtcatcaccactccttaatctcaagtacccagggacacaaacactctgcctaggaaaaccagagacctttgttcacttgtttatctgctgaccttccctcc

SEQ ID NO: 9895 - DNA, 1386 bp, Artificial sequence
  DNA replication origin
cgaggatggaaacttgtttgggtgattgagggaaataacccgcgggttcaccttccaaagtaactttagagctggggtccggggctccggggacctggggagccgccgggggtggcgggaggggcagctgcgtggaggaaggcgcgcagtgggaatgtgggtgtttggcgggccggccggggtcggggccggggtcggggcgggcagcgcggggagcgcggcggcgggggcctgggcgctggggcttagggccgcgagcgcggggcgaggcgaggcgagggcggcggtgccgggcgcgcggcgggcggaagccgggcgtggagcggccgagcggggccccgcggggcgcggagacgcgcgcggggcgcggagggcgtgtgcgggttgggcgtccgggctttcctgggccagctacggacgcggcgcccgcagtcccccgcgcatcgcggggctggggctggggctggggcgggggcgggggcgggtgggcgccggagacgccgccgaagtttgggagtcggagagggaccgagttcccggggagctaaagtgtgttggcgaggagcgggatccgctggaggaggctggcgtttctgcctctcgcagcggacccaactccgcggcggcggctggcgaactttttgtgaggctggcagcccccgagcggcgggaggggcgggcccggcggggcggtggtcgggggcgcgcggaggggagttgtgggagccgccgggggcgcccgaggagggcagctgtggcggggagggccagtggtccgaaaaggggtttgtgggaggggagaagcgttcaggtgggaaggagccgcttggttacagttgtggggagatacaggtgttaacttcggtgggagcccaagaggcggctggcgagaacagagcccctcccggcccgggatgccactgtcacggcacactgcaaagcaaagcggtttgctgctattcttgtgtacttgtaacggtgatttggttgttactaaaaatgagaacgaatagtgactgtgatcactgaggaagaaccccccccttttttttttaaactgtgcaacagatcagtgattcccagtaaccacttaaactctgagggtcagagttatccttgtcgttgaacgcaccctgtctttctgagggggttcagaccagagaaaaagtctgagagcatctctcaaaggtactttggttaccttgcgcacagaaatagctgcgtaaataaaaaccgaatgcgcaggcgactgagtttccctccttggtttaggcagttagtctccccctgaaagttttgtgtgccctagggatgggaacatttcctaatctttgtgttggcagcaacacactcaattcccataggatttagaggtatcaggccttg

SEQ ID NO: 9896 - DNA, 1125 bp, Artificial sequence
  DNA replication origin
aacagggcgggggcgacaccccagggagtagggctgaggaccgcaaaaatcaatcgtgggtaccggcgcggggtcacgcataggagaggagcgggagaggggctggtgggggccccagggcggctgaggccgtggctctgtcgtggactcggcgggcgccccgaagtctggggccgccacggctccagctccgccggctccggccggagactccaggccgcagtttctcctcctcccggcgccttctctccagtgaggagctgagcgcgggcggcgcggggggaggggtggcggcggagagaacagccagttgtttaaaatccttctagagcagtttctaattccccccttgcgcccgggttcggaggggggagggggaaggagagcgggtggagggaggagagcggagagggaaggcgggagggagggagtcggggagggagggaaggagggaggagactgccgctgaggcttagccgccaccgcgcgcttcggaaggccagagggagggggaggcctgtcagtctcgcgcgttgcctgggcgaagggggcggagctttggcgtggggcggccaatagtgggggtggctgcgtgggtcgccatggggacggggctgttcccggggaggctgtgatgggttgacaggtgcgtgacagtgggagctgctctcggcacaagcatgtacggcaaaggcaagagtaacagcagcgccgtcccgtccgacagccaggcccgggagaagtaagtgtctccgcttctcacccacctccgccttcacacgcgcgcacactcacgcacgcactcgcacactctgggagacacagacactctccgcccggggagcgccgggggtgggctggcagggggaggggtgccgcgatgggggcgtgtggtgcggggagctgcgctttcccgggaggtgcgggcgctgggcgggcggccgcagggggctgtcggcgggagggaccgggtgtgttgaggggcggcggtggtgctggtggcgaggatggaaacttgtttgggtgattgagggaaataacccgcgggttcaccttccaaagtaactttagagctggggtccggggctccggggacctggggagccgccgggggtggcgggaggg

SEQ ID NO: 9897 - DNA, 944 bp, Artificial sequence
  DNA replication origin
tcagccgccctggggcccccaccagcccctctcccgctcctctcctatgcgtgaccccgcgccggtacccacgattgatttttgcggtcctcagccctactccctggggtgtcgcccccgccctgttcccagagggccggctggcgagggacacccgcgcggttccctcgaccttctggctgagcgaccgacagcgactcgccttctctcctggggaaaggctgcacctccggccctcggcgccgctgcggtggcggcgcccggggccgcgccctgcgccccaggggagcacccggcctggggtcggcctcctctgtaagaggtgagcggacctcccgaggaggcccggtgactcctgcggccgcagcggcccctgccccaaccccttcttgcacggagccccgcggcgccctggacaccccgccagatctgccgcagaagagggccccaggcttccccacccggcctggtttaacagtttgggtcagtgatgcctattcatcctgacccctggagtggaaaaggccagaaaaggtcttgaaagacttccctgtccttgcccgttagaataggccccagcgcgctccaaggtgtacaaagctgtgccagggctgaaaggctgcccgagaatgtttctgtatccaaatccctaatcccatttcagtaaacgcgcaaaagtttcagaaacacacacaatctggttcccagtagaactctgcatcatttatcttattgaagtccttgactgtaaaatcagacgggtgcaaatggggttagaaagaagatgggcttcacacggggaagaaggggacagatggggtgggacagggcgacatctggaaaggatgaatagacaagaagtagctatgggaggagagggaaatcggattcgcgtggaggaaggtaccgttctattccacacacacacagctttaagcatttag

SEQ ID NO: 9898 - DNA, 1341 bp, Artificial sequence
  DNA replication origin
ggagccgtagctcgactacagtaattccccagctcgggcggcttgaaactgctcgggctgaatagcatttgctgttccgtcctgcggccgcctcccgccgcggctgccgcgctccctgcaaagcagctctcattatcccggaagttgtgctgacacagtctcgctgccaccagaagtttgtcaacatcaaacttctcctgtgtggggtacgttcaccttccacgagtatttaatcgagccaacaagcaaacaaacaaacccaaataaacctgcccgtgatgttgtggtcttttttttttttttttttttttttttttttgctttcctggaaagctggagctgttaggaatgtgctggtggggtctgagagtgcctgtggggtgggcgggggggtgggcggatggagataagggagacggccccccgggtggggagtgaggaaggggcagcggaggcggcaggcgggcagctagagctgggggcgggaaggcggctggggctgggggccggcgagtgggtcctgcagcctcttggctgctgcttgtttggaggatgtacggacaggggcgaaggtggctttgggtcccccgaccccgcaacaaaggttatatggaagtgatggcgaggcaaagctgggagggccgggacgcccactgtgctctccacactcctgcaggacatttctgcagacatctcacggcatctttcggaataaagggcattggggtcataaaatgtattctgagacttaaattgcaacattaaaaaaaattccataggattggagggcagggatgcaccatcatttctgtctttgagaggtctcttctggtatccttgattaagaccatttggtctaaacttaactgacttcctcagccaggtctcggcgtttagttcaagttgcagcaacacagtttgatgtttgtggtttccagttgctcccctgctgagacgctccaggtgctccaccagcgcctggggactctgattaacactttccattccatagttttacccggacagggtcaatcctgctcagatgatggagaggacaaggtcggccttgcagagttgagacacaggcattcatgaaggggtgctacttgggggccacaggcttttgtggaggggctggaacttcagacactgataataactttgtatctgcttcggaaagccactagtactgcactcaaacaggggagaacagaaagggggttgcggtaataccccacgtggtgtccaggcagatggggcggctgagagagttcagtatctgtccacctgtgggtgcagccacattcttctctactcttcaaaaataagtcggagtgagta

SEQ ID NO: 9899 - DNA, 1173 bp, Artificial sequence
  DNA replication origin
aaagactcagcaacgcttggggttggggctgaggggacaggtgagagggaaagaaggaagattttggatgagttgcagtgggaacagagactagagagggacccatgtgtaaaagaatgcctggacgtcaggcacctcagaccatttgcccattttacgacaagaattatttagatcttgtaggatggaaaaattgaaagtgccgttttccggctatttggaactactgtcgagtttgtattggggtcaagcagtattgaagaagaaaataagacgcttagattttaggtcaggtgagagttgaagaagttttaagttcttaagaacacaggctaagggagaagaaggaggaatggaaggtggaagcttgcccatagtgaaggaggcaagcccagagaaaagagtagagacacggagaaggggtgggagggttcttgccctccagaaaagcagagaaggggtcggggcgcagagatacgaggttggggtggggaaataagggatcggggtgcagagatataagaggttggggtgtggaaataagggatcggagcgcagagatataagaggttgtggcgtggaaataagggattggggtgcagagatataagaggtcggggagtggaaataagggattggggcacacagatacgaggttggagtacttgccccttccccagaaaagcgggacttgccgctaagggtgaaggagaaggggttgggggtttcttgtcccccagaaaggcggagaaggggtagagacacggagagaaggggttggagtacttgcccctcccccagaaaagcgggacttgccgctaagggtgaaggaccaaggcaggcatccctgcgtggtctgacacctctgaaacctgggtgaataatcagagaggcgtccctgccttcccgagtccgtgaccagcgctggggttttgggtccacggataaaacatgtctcctttgtctctactagaaaatgaaaggaattgaaattaagagaagggagagattgaagtgtggcaccaagattgaaaggagaaagaggttgagagatagggagattggagaagagagtaaaaagaggccgcttaccggatttgaaattggtgagatgtttcttgggctggtccatctgaggacttgaggtcgtaggtggacctttctcatggatca

SEQ ID NO: 9900 - DNA, 1314 bp, Artificial sequence
  DNA replication origin
ggcaagggctgtggggaatactcacccctctccgctcggcccctgaccccgcagcccagcccggcgagggcggggcgacggggccagggggaggagagctggggagagggacccagcgccctgcgaggccactgccgcgccggtgaccctacggaactgaatgatgggactgcgggggcctcgagggcggaggaagagccgagccagcgcgccccgaggccaaccagaagtggccgtggcctccttcagtcaggtccgcggcctccttcagtcaggtccgccacggccgagtcggagcgtgcgcactgcgccttcccgcgccgtgggggccgcctagcgcaggccggtgacgtgatcggccgcgcgctctgggcagggcggggctgagacccaggccgggactgggagcgggtggagaggagggaagcgagacctccccgccgcccgcgaccacccccgccaaggccccgcccctcgcctggcgggcagctctcccccgccaacccccacctccaacccaacgcaggcggtgccctccgcggagcacaaaggcggctcgttgacgggggagcgggttactagcatccccctaagaggttggggaaccatgccagcatgcttacgctacaaaaagtcctgtaaacaccacaattaagcacaagcacggctaccccttgaaaacttacggatggagggagaagttaggaattcgaatattgacaatagtaccatctgtggcacatatcccagaggagaaaaaaaaaaaactagcagcaaaattaaattggggcgaaacgatggggataaagactagaaaaaatgtaggagtaacaggggtaatcgaactgaaatagcagacatctgaaagaaaactagcatctgctccttctaacaacagagttaaatttgttggaaatgaaaggagaaaatgcaggcgaagaagtgaaaggaaaacctgccttcaaactacatgacatagttttttgatcttgtactacagttgtgtaagatgtcaccattggaggaaactaggtgataggtacacgggactctaggtgctgtagtatttttgcaatttcctgtgtctataattatttccaaataataagtgtttttaaaaggagagaatactgatcagtggcgaccagggcaaagggctggaggaagggggtgactgaaaaggagcttgagagcttctataccgtgattgtgttggtgactaaaccactgtttgacaaaacccataagaggtataaattttactgcatgtgaaatagtttaaaactcaaaatgatgcgactaataaaaatgaac

SEQ ID NO: 9901 - DNA, 825 bp, Artificial sequence
  DNA replication origin
gccagcggccccatccgggagggaggtggggggggtcagccccccgcccggccagctgccccgtccgggagggaggtggggggggtcagacccccgcccggccagccaccccgtccgggagggaggtgggggagtcagccccccgcctggccagccaccccgtccgggaggtgaggggcacctctgcccggccgcccctactgggaagtgaggagcccctctgcccagtcagctgccccgtccgggaaggaggtgggggggtcagccccccgcccagccagccaccccgtccaggagggaggtgggggggggggtcagcccccagcccggccagtcgccccgtccgggagggaggtggggggatcagtcccccgcccggccagccgccccgtccaggaggtgaggggcacctctgtccggccgcccctactgggaagtgaggagcccctctgcctggccaccaccccgtctgggaggtgtacccaacagctcattgagaatgggccatgatgacaatggcggttttgtggaatagaaaggggggaaaggtggggaaaagactgagaaatgggatggttgccgtgtctgtgtagaaagaggtagacatgggagacttttcattttgttctgtactaagaaaaattcttatcctgttgatctgtgaccctacccccaaccctgtgctctctgaaacatgtgctgtgtccactcggggttaaatggattaagggcggtgcaagatgtgctttgttaaacagatgcttgagggcagcatgctcattaagagtcatcaccactccctaatctcaagtaatcagggacaca

SEQ ID NO: 9902 - DNA, 1291 bp, Artificial sequence
  DNA replication origin
cgggggactgatccccccacctccctcccggacggggcgactggccgggctgggggctgacccccccccccacctccctcctggacggggtggctggctgggcggggggctgacccccccacctccttcccggacggggcagctgactgggcagaggggctcctcacttcccagtaggggcggccgggcagaggtgcccctcacctcccggacggggtggctggccaggcggggggctgactcccccacctccctcccggacggggtggctggccgggcgggggtctgaccccccccacctccctcccggacggggcagctggccgggcggggggctgaccccccccacctccctcccggatggggccgctggccgggcagaggggctcctcacttcccagtaggggcggccgggcagaggcgcccctcacctccccggacggggcggctggccgggcgggggggctgaccctcccacctccctcccggacggggtggctgccgggcggagacgctcctcacttcccagatggggtggctgccgggcgtaggggcttctcacttctcagacagggcggctgctgggcggagggtctcctcacttctcagatggggcggccaggcagagacgctcctcacctcccagacggggtcgtggccaggcagagacgctcctcacatcccagacggggcagcggggcagaggcgctccccacatctcagactatgggcggccgggcagagacactcctcacttcctagatgggatggcggccgggaagaggcgctcctcacttcctagatgggatggcggccgggcagagacgctcctcactttccagacggggtggcagccaggcagaggctgcaatctcggcactttgggaggccaaggcaggcggctgggaggtggaggctgcagcgagccgagatcacgccactgcactccagcctgggcaccattgagcactgaatgaaccagactccgtctgcaatcccggcacctcgggaggccgaggctggcggatcactcgcggttaggagctggagaccagcccggccaacacagcgaaaccccgtctccaccaaaaaaatacgaaaaccagtcaggcctggcggcgcgcgcctgcaatcgcaggcactccgcaggctgaggcaggagaatcaggcagggaggttgcagtgagctgagatggcagcagtacagtccagcttcggctcagcatcagagggagaccgtggggagagggagagggagagggagagggcgagagattcattgtttaggatc

SEQ ID NO: 9903 - DNA, 1377 bp, Artificial sequence
  DNA replication origin
gccgaggttggcggatcactcgcggttaggggctggagaccggcccggccaacacagcgaaaccccgtctccaccaaaaccagtcaggcgtggcggcgcgtgcctgcgatcgcaggcatttggcagactgaggcaggagaatcaggcagggaggttgcagtgagccgagatggcagcagtacagtccagcttcggctccgcatgagagggagagggagagggggagggggagggggagggggagggggagggggagggagagctcgactttcaatcttcattagatagcttcaaattttgttcttaccaaaacaaattccaaaatttaaatagtaataatgttattgatactactttctataaatatgtcaaaaatatttttaactgctaaatatactaaaaagaatccatggatccccgggcaagatggtcaaatggaaacagctccagtctgctgctcccagcaagaccaacgcaataggcaggtgatttctgcatttccaactgaggtacccagttcatctcattgggactcgttagagagtgggtgcagcccacacagggcaaggcagggtaaggcatcacctgacccgggaagcacaaggggttggggaactcactcccctagccaaggaaagccatgaggaacagtgccttgaagaagggtgcactctggcccagatactatgctcttcccaccgtctttataacccacagaccaggagactcgcttgagtgcctacgacaccagggccctgggtttgaagcacaaaacagagtggccatttgggcagacaccaaggtagctgcaggagtttttttttcataccccagtggctcctggaacaccagtgagacagaatcattcactcccctggaaagggggctgaagccagggagccaagtggtttagctctgcagatcccacccctggggagcccagcaagctaagatccactggcttgaaattctcgctcccagcacagcagtctgaagtcaacctgggacactcaagcttgctggggacaggggcgtccaccattactgagtcttgactaggtgattttcccctcacagtataaacaaagcctctgggaagttcaaattgggtgaagcccaccacagctcagcaaagacactctagccagactacctctctggattcctcctctctgggcagggcatctgtgaaagaaaggcagcttaactataagcccagtgaggggcttagagacaaaactcccatctctctgggacagaacacctgggggaagaggtggcagtgggcgaagcttcagcagatttaaacgttcctgcctgtcagctctctgaagagagaagcggatctcccagcacagcactcgagctctgctaaga

SEQ ID NO: 9904 - DNA, 1218 bp, Artificial sequence
  DNA replication origin
gcggccgggcagaggcgcccctcacctcccagacggggcggctggccgggtggagggctgaccctcccacctccctcccggacggggcggctggccgggcagaggggctcctcacttcccagtaggggcggccgggcagaggcgcccctcacctccctgacggggcggctggccgggcggagggctgacccccccacctccctcccggatggggcggctggccaggcggggggctgacccccccacctccctcccggacggggcggctggccgggtgggggggctgacccccccatctccctcccggatggggtggctggccgggctgaggggctcctcacttcccagtaggggcggccgggcagaggcgcccctcgcctcccggacggggcggctggccgggcagggggctgacccccccccacctccctcccggacggggtggctgccgggcggagacgctcctcacttcccagatggggtggctgctgggcggagacgctcctcacttcccagatggggtggctgccgggcggagaggctcctcacttctcagacggggcggccgggcagagacgctcctcacctcccagacggggtctcggccgggcagaggcgctcctcacatcccagatggggcggcggggcagaggcgctccccacatctcagacgatgggcggccgggcagagacgctcctcacttcctagatgtgatggcggctgggaagaggcgctcctcacttcctagatgggatgggggccgggcggagacgctcctcactttccagactgggcagccaggcagaggggctcctcacatcccagacaatgggcggccaggcagagacactcctcacttcccagacggggtggtggcccggcagaggctgcaatctcggcactttgggaggccaaggcaggcggctgggaggtgtaggttgtagtgagccgagatcacgccactgcactccagcctgggcaccattgagcactgagtgaacgagactccgtctgcaatcccggcacctcgggaggccgaggttggcggatcactcgcggttaggggctggagaccggcccggccaacacagcgaaaccccgtctccaccaaaaccagtcaggcgtggcggcgcgtgcctgcgatcgcaggcatttggcagactgaggcaggagaatcaggcagggaggttgcagtgagccgagatggcagcagtaca

SEQ ID NO: 9905 - DNA, 955 bp, Artificial sequence
  DNA replication origin
tgggggggggtcagcccccctgcccggccagccgccctgtccgggaggtgaggggcgcctctgcccggccgcccctactgggaagtgaggagcccctctgcccggccagccgccccgtccgggagggaggtgggggtgtcagccccccgcccggccagccgccccgtccgggagggaggtgggggggtcagcccccccgcccggccagccaccccgtccgggaggtgaggggcgcctctgcccggccacccctactgggaagtgaggagcccctctgcccggccagccgcccgtccgggagggaggtgggggggtcagccccccgcccggccagccgcccctccgggagggaggtggggggggggtcagcccccctgcccggccagccgccccgtccgggaggtgaggggcgcctctgcccggccgcccctactgggaagtgaggagcccctctgcccggccaccaccccgtctgggaggtgtacccaacagctcattgagaacgggccaggatgacaatggcggctttgtggaatagaaaggcgggaaaggtggggaaaagattgagaaatcggatggttgccgtgtctgtgtggaaagaagtagacatgggagacttttcattttgttctacactaagaaaaattcctctgccttgggatcctgttgatctgtgaccttacccccaaccctgtgctctctgaaacatgtgctgtgtccactcagggttaaatggattaagggcggtgcaagatgtgctttgttaaacagatgcttgaaggcagcatgctcgttaagagtcatcaccaatccctaatctcaagtaatcagggacacaaacactgcggaaggccgcagggtcctctgcctaggaaaaccagagacctttgttcacttgtttatctgctgaccttccctccactattgtcccatgaccctgccaaatacccctctg

SEQ ID NO: 9906 - DNA, 796 bp, Artificial sequence
  DNA replication origin
attcagacaaaagaaacccagggtggggtggggggtaaaatgactaacggaattgggggaagggagggaataaattgtaaagaaatcatagaaaagtggtgggttcttgagctggagagaagagagggacctttggcactttgatttttttgttgttgttgttcttaacacgctcgaggcaaaagtttgaatggggactaccaagacttgccacagacaagtccccgaagccgccttggtgcaggccacctggtttcccagcccctggtgtgtggtcagtgcctggtgttcctggaaagccactcccgggcagctcctgacagtgcgacccggcgcccaagcagcctgggaccttgcgcggacctgaccccttcagaccgcaggcagtctgggaggaggtccggccgggggaggtgcaggatccccgccgtgtctctttgacgacttggggactgtcacggttctctcccggcgcccctgggttcttttgtcctgcacgcggtgcgaaggggccagcagggaaggagcagaggatggggggtggggttgttggagccccgcggaggtctgggaggcccctgggcgggaaaagcctgttctgaatcggcagggatgtgcaacaatttttctcaccctgaagagtgaaatagggtctgtcgctcccatctcaacaagcaaaccggcacccagagcgcactgcagacaaaggtggctcggggacccgaatcaggggcctctgggtcagtcctctcgcccagactacaggagtcctccgtttccttacatattccccacc

SEQ ID NO: 9907 - DNA, 947 bp, Artificial sequence
  DNA replication origin
ctctcccagcctctgttctctctctctagcttctgcgtcccctcccccacagctgacaaatgaatggctagtgtgaaatccctgcctttcccgtgctccaaggcagcagggagggaggagcgagggaggcggtgcgctccttcggatctgcccccagttcagctcacaagacttgcagaacctagatgtctaggaattgggagttttgcggcgggtgtgggcgccccctgatggagaagtcccgcacaggcggagaaaaacaagccccccagaccaagcgagcatctttcacaaccttgtgttcaaggatggaaggccctagttttcccttaagtcattcattttgcactccacaatctgcggcgtacatctaggagtttggaggaccctgaaaaaaggtcttggtctgtgcaaagtgcagagatgccttctcgcgagtcggctggaacgcacgcggcgccctgggtccagttcgccgcttagtggacgaacgcacatggccagggtggagccaggtttcggaggtctagacgcgccaccctgggcgtctttaagaaagataatacacataccgtgctctcaaaacccatgaccacttgaacccaacgctagggccccgccccaggatattgcaaaagaagggctcctaatccaaaacttaaacttcctcaacttcagggcgggcgtcggacgggaaagtggagagaaggcgggcagtgggaggaaaaaagaaagggaaggaagggaagtggaaggaaagaggaccgtggaggggaggaaaaggagaaaggaacggagatggggcagatggcattcaaacagccaggaacggaccggaagggttcgtttcggggtttgggtctgaatttcgagactcgttttaggatactcttttccctttcccagcggcaacaaatgtgactgcagaggcgtgccgggatggaagg

SEQ ID NO: 9908 - DNA, 1600 bp, Artificial sequence
  DNA replication origin
cacacacacacacacacacacacagacacacacacccctgaaataaccagtggggaagatgctgggacacgcgggaaaacgcctcctgaacaaatagacgtttatttataacttctgggagagtatataggtccattgattcccgccttgagtaaccaagggttttggagaggaaatggcttcatatttcaataacagagccacctttgatggagtctaggaaggggaaaaaagaaacacaccgcaggaagcaaacggctgttggagcagccgggaggagggagcggggctggccctgggactgaggacaagcaaacaagctcgaggggcccgcggccagggtggaggcgagacgcaggccgtccccgagttgcagcgagcagggcccggtgtcgcggagcgctggggacgtgcggggattcgcggccgtgctcccggctccaacctccggccccggcggggcggcgcgggcgggactgcgggcttcttaaggccgccgccgccgctcgggctgtggcgcgggttggggagagggttccgtgggccgtagggactgagggagtcgtaagtcgatgagctagtggggcaggaggatgggcgggtccagggcgtcctggaggtgcaaggtgggatgggaggacctgaggggcagccaagctgctggggaagccgccgggacgggggctctggccgacaatgcaggtggccggtgtgcagatgagccagcgcgcggggtgcggccgccgggatgcccgatccgagtcgcgcgggtggcggcgagcggcgctattgtcttaaagataaagcctaagccacggggactgcctcctcctggactctggagagaggcgggagagattgcaggggaaaaaaggcttcttcccgcgtcttctgagagatttcaccagttcttgcctctgggctcccccttgccattctgtctttggtaaatcaacacgtgcctcttggaaaggtttcatttcaaagacaaacggaacactcacacaccctccctaaatgaagacagttatattcaaaatgaattcttcatcaggcgttcaacacctttcttggaattccaaaacctgggtgagggcgcttctcttatttttctgtttcccctcccgcacagggaacaggttttgcagttttatgtccctaatctagtggctattgaggcagctgttatataggcctctacattaactgccaataaaaataagatacatctcggcttttcaactatgcaaagggtttttatgctattcatatttcttgtaaacgttcagggtggtgtgtattttaaagaacataaacgaattagacttataaacaaatatccaatttttatattaaagcaccataaaggtggtaaggctggtggtgtgtggctatgatatcatataaagacagtttaaataccgatcttgttccctcagcttaacaacctaatttctggcgattgcctggagcgtaaatcaaatcagctggctcatggctggcacttgttcccctattttgtggtctgctctatacacttattccggcacaacattaagataatttaatgtattctcttctgaaattgtttaataaccac

SEQ ID NO: 9909 - DNA, 921 bp, Artificial sequence
  DNA replication origin
tgggggagtcagccccccgccaggccagccacccctgtccgggagggaggtgggggggtcagccccctgcccggccagccgccctgtccgggaggtgaggagcgcctctgcccggccgcccctactgggaagtgaggagcccctctgcccggccagccgccccgtccgggagggtggtgggggagtcagccccccgcccggccagccgccccgtccgggagggaggtgggggggtcagccccccacccggccagccgccccgtcggggagggaggtgggggggtcagcccccgcccggccagctgccccgtccgggagggaggtgggggggtcagccccccacccggccagccgccccgtcggggagggaggtgggggggtcagcccccgcccggccagctgcccggtccgggaggtgaggggcgcctctgcccggccgcccctactgggaagtgaggagccccgctgcccagccaccaccccgtctgggaggtgtacccaacagctcattgagaacgggccatgatgacaatggcggttttgtggaatagaaagtggggaaaggcggggaaaggattgagaaatcggatggttgccatgtctgtgtagaaagaggtagacacgggagacttttcattttgttctgtactaagaaaaattcttctgccttgtgatcctgttgatgggtgaccctacccccaaccctgtgctctctgaaacatgtgctgtgtccactcagggttaaatggattaagggtggtgcaagatgtgctttgttaaacagatgcttgacggcagcatgctcgttaagagtcatcaccactccctaatctcaagtacccagggacacaaacactgcggaaggccgcagggtcctctgcataggaaaaccagagacctttgttcacttgtttatctgct

SEQ ID NO: 9910 - DNA, 1487 bp, Artificial sequence
  DNA replication origin
gcagcggagggctgagcccgccggcggctccccggagctcacccacctccgcgcgccggagcgcaggcaaaaggggaggaaaggctcctctctttagtcaccactctcgccctctccaagaatttgtttaacaaagcgctgaggaaagagaacgtcttcttgaattctttagtaggggcggagtctgctgctgccctgcgctgccacctcggctacactgccctccgcgacgacccctgaccagccggggtcacgtccgggagacgggatcatgaagcgctcggtagccgtctggctcttggtcgggctcagcctcggtgtcccccagttcggcaaaggtaaggcgtcgggacccggacagctgggtgagggatgggctgggagtcccctgagaaacgccgcgcagggggccggaggcggtccctccggcgtgccaagggtggcgagcgccgctggcggcgcggaggaggcgtcgagtcctgggtgccccgagaaagtgcttgtaaagtctgagcagagtgcgcggggccgagcggggagaagggtgcggggtaccggggtgagatacaggaaagaggaggacggtggggagcggtagaagacagcgtccccaggaccagcgactctgtggctcactcggccactgggtctcggcgcaaaccctccctaggcagtgcgggcgatgctgactgcagacgtcgggcagggctttcgtgcgggcgggagcgggggaagccagtgcgcccgggcgtcagctagttgatgcgggaagaggctggggagctgcagggccgtccgcccccgggtgcggtgctctggcgcagggcctgggctgagccgttcgcaaacccagacccggcgctgggcgttttggccgcgggtgaggtggagaggagtctcacaggtcacttcagctttctcctgcctccccatcccagaggagcagcatcgattacagcaaaccccaggaacccgcctctcctagtctgaccccaggggcctggagcttagctgcgcaccccctccgagtaccagtgttaactcttggtaatggggaatagtgcggggcaagccacccctcgcgtccccgcacaggagcggaaaagttgtgagagcttgtagggtgatgccttctgtgaattgcacgaaaaaataaaaacagaaaaataaaaatcaaattaaattaaaaagaaaaaagcatttaaaagaaaacgcaggacttcgacgagtgtcctgctggagtagtttaggcgacttccaggtcccctgcgaggtgcagcttgtccatacaaacccttgtgctgacctgggtctcaccgctggccggggctgaagtagtcgccggaaaagggcagcgggggcagcagggtgtgtggggaggcgagtgggagctgtgcctgggggagctgtgccactcctgcgctcacagatgcgggcggccccttgtgagggatccgcgggtaatagaatcctctgcaggcagcttc

SEQ ID NO: 9911 - DNA, 1450 bp, Artificial sequence
  DNA replication origin
gtcccgacgccttacctttgccgaactgggggacaccgaggctgagcccgaccaagagccagacggctaccgagcgcttcatgatcccgtctcccggacgtgaccccggctggtcaggggtcgtcgcggagggcagtgtagccgaggtggcagcgcagggcagcagcagactccgcccctactaaagaattcaagaagacgttctctttcctcagcgctttgttaaacaaattcttggagagggcgagagtggtgactaaagagaggagcctttcctccccttttgcctgcgctccggcgcgcggaggtgggtgagctccggggagccgccggcgggctcagccctccgctgcgggtgggtcccggcagaggcgcggcgggcggggcgcgggctcccgcggccgccccgggtctgctgcgcgggcaggcagacccaccggcagacaggcggaccgggcgctcggctgtcgctgttctccgcgcggcggctgcggggcttctgacttggagaacaatgaagcgtgagctggaggggagcgagcgggccgccgggagcgcactgtgtacaaacagaggcggcgtgcgtgtgagtctgagcctggcaggcgcgctccccactcccccggcgcccgcccgccctccgcccgccctgttattcactccccgggtctccccctcctctctctctcttttgctctctctctctgtctctcttttgctctctctctccttcctccctcctcccctcctctttcagctccttctgctataagagaaaagggagacaactgcagccacaccctagcacctagcacctgccaccacctctgaagttcctgcattgcctgtaccttctccgcacatgctggagactgtggggttaagagctgcacccttgctgcctgagagtcccttggattccagcactgactttataattaaccacgttaaggattcccctgaacttcctttctcagtataaccaggaacagaagttaagagattttgaaaagtgactcttggggcacaaaactgcatgagagacagaaccctgcaaagtgaattgccccgtatttctcaggaactgcaacgtagtcagcaaccagaccctaatcagctaagacagggctgctctgctgctctgtctacaatttagttagctccagggctggggagagagggttgtgggctcatctgttcacgggggcaaaagggtggaagtgagtaggagacatgcatctcgttaagcaggacatctgtttcagagaagaagtggggcaagtttgggaactgtgcaagaacataaaggcaaagacagacccttgaagcatcactaaggtggatcaaattttctttctatccgccaaaataaatggactggtttttgcagtggaagtgattgaaccaaaaatacagctcatggcttacaattgtgctttcttctctgttt

SEQ ID NO: 9912 - DNA, 1090 bp, Artificial sequence
  DNA replication origin
tgagtatagctgaaggagccaggaagcagaaagtatatgcgtcagatatgaggaagaaaatagattttggaagttatgagaactgtagagagtgagttgagcatagtttgtgattttgagggcctctaaaagtcttaatgcagcggcagccgctgcacgcagacatgagggctaggctaaaacagtaaggtcaagttgtttggacagaaaagctacagggtgtggtcctggctcttgtgtaagaattctgaccacgctaaccatgcctaggaaggaaaggagttgttgttttgtagaaggtgctggggtttgagagatcagtcagacacgattggcagggagagcatgtgtgtttttatgagaattatgctgagataggtaacagatgaggaagaaatttgggcttgattgaagtaatgggggctgtctgtgaagctttgcaacagtacagcctaggtaatttgctgagcttgatgagtgtcagggtcagtccaagtgaaagcgaagagaggctgggattaagggtgcaaaggaatagtaaagaaagcatgtttgagatccagaacagaataatgggttgtagaggcaggtattgaggataggagagtatatgggtttggcaccacggggtggataagcaaaacaatttggttgataaggcgaagatcctgaactaacttgtaaggcttgtctgattttaggacaggtaaaatgggggaatggtaaggagagtttacaggctttaaaaggccatgctgtagcaggcgagtgataacaggctttaatctttttaaagcatgctgcgggatgggatactggctttgagtggggtaagggtgattaggttttaatgagatggtaaggggtgcatgatcggtcgccaaggagggagtagaggtatcttatacttgtgggttaaggtggggggatacaagaggaggacgcaaaggaggctttggattgggaagaagggcggcaatgagatatagctgtagtccaggaatggtcagggaagcggataatttagttaaagtgtctcagcctaataagggaactgggcaagtggggataactaaaaaggagtgcttaa

SEQ ID NO: 9913 - DNA, 1156 bp, Artificial sequence
  DNA replication origin
aaagaggctgaggctgctaccgctccttcagccgccaccaccgcttcttcaccaccccagttccggccacccacaccgcagccaccgccggtgccgctgctgaggctggggccactgcagccgcttcatcctccaccaggcagatgagaggggtgggggggcaagagaaaggggggcggggtaacgaggaaatcgactgaactgctcactacctggagctctcagtgagtgaaacgggagagagagaaaggaaggcggggcaggggaggagggacggagggaaggaagggcggagaagggagagggcagcttgtgcgcaggcgcgttcccggagcgggggcggggggccgggccgggaggaaaaggaagagtccagagggaaggaagcggcggggacgcgcggtgcgtggtcgcgcttgctgtcctcctccggttccaagcgtgtggcggcgcggccgcatctcctgttggcgtggccggcggcgcgcgcctgtctcccggggctttgtttgatgggcgggagaagagggaagggtacctgagcacgcgggtgcttggcgctgttaaagccggagagaccagagggggaccaggaggcggtggagaggaaggagggggaaagggaaaggaaaatgcccagaaactagttccgtacttcctgaccagtggaaaaaacagccttaaccagcagcgcagaaaccgggcaggggtcaggtagctttgaagatcggggcagtactattaatgttttctttttcgttgcatgctataaatcactatgactatctcacacacacacagttaaaatagattctgaaactccaaaacgaaataaagggcaccatatgagaagggtgaagaatttgagtagaaatagtggttatgaagtaagatttctaccagtatttgcatacgtttttctttatcaactgtctcatatacttacctatgccattataagtctgttggatactgatgaagaggaggaggtgccacagaaaacactaatcaatgcacttttgtcctggtttgtgtgcaaaagactgcaggacgtgatccacaatgcaagcaccttcaacaagtcaaatgtcaagaatgtcccagaatgctagttataattatatatcgtttcaaaagtagcaataaactgaaaact

SEQ ID NO: 9914 - DNA, 1258 bp, Artificial sequence
  DNA replication origin
ggtcacagatcaacaggatcccaaggcagaagaatttttcttagtacagaacaaaatgaaaagtctcccatgtctacctctttctacacagacacggcaaccatccgatttctcaatcttttccccacccttcccccctttctattccacaaaaccgccatcgtcatcatggcccgttctcaatgagctgttgggtacacctcccagacggggtggtggccgggcagaggggctcctcacttcccagtaggggcggctgggcagaggcacccctcacctcccagatggggcggctggccgggcggggggctgacccccccccacctccctcccggacggggcggccggccaggcagaggggctcctcacttcccagtaggggcggccgggcagaggcgcccctcacctcccggacggggcggctggccgggcggggggctgacccccccacctccctgccggacgaggtggctgccgggcggagacgctcctcacttcccagacggggtggctgctgggcggaggggcttctcacttctcagatggcgcggctgctgggcggaggggctcctcacttctcagacggggcggttgccaggcggaggggctcctcacttctcagacggggcggttgccaggcagagggtctcctcacttctcagacggggcggccgggcagagacgctcctcacatcccggacggggcggcagggcagaggtgctccccacatctcagacgatgggcggctgggcagagacgctcctcacttcccagatgggatggcggccgggaagaggcgctcctcacttcctagatgggatggcggccgggcagagacgctcctcacttcccagacggggtggcggccgggcagaggctgcaatctcggcactttgggaggccaaggcaggctgctgggaggtgaaggttgtagcgagccgagatcacgccactgcactccagcctgggcaccattgagcactgagtgaacgagactccgtctgcaatcccggcaccttgggaggccgaggctggcggatcactcgcggttaggagctggagaccagcccagccaacacagcgaaaccccgtctccaccaaaaaaatacgaaaaccagtcaggcgtggcggcacgcgcctgcaatcgcaggcagtcggcaggctgaggcaggagaatcaggcagcagtaccgtccagcttcagctcggcatcagagggagactgtggagagagggagagggagaccgtggggagagg

SEQ ID NO: 9915 - DNA, 934 bp, Artificial sequence
  DNA replication origin
cccggccgccccgtctgagaagtgaggagaccctctgcctggcaaccgccccgtctgagaagtgaggagcccctccgcctggcaaccgccccgtctgagaagtgaggagcccctccgcccagcagccgcgccatctgagaagtgagaagcccctccgcccagcagccaccccgtctgggaagtgaggagcgtctccgcccggcagccacctcgtccggcagggaggtgggggggtcagccccccgcccggccagccgccccgtccgggaggtgaggggcgcctctgcccggccgcccctactgggaagtgaggagcccctctgcctggccggccgccccgtccgggagggaggtgggggggggtcagccccccgcccggccagccgccccatctgggaggtgaggggtgcctctgcccagccgcccctactgggaagtgaggagcccctctgcccggccaccaccccgtctgggaggtgtacccaacagctcattgagaacgggccatgatgacgatggcggttttgtggaatagaaaggggggaagggtggggaaaagattgagaaatcggatggttgccgtgtctgtgtagaaagaggtagacatgggagacttttcattttgttctgtactaagaaaaattcttctgccttgggatcctgttgatctgtgaccttacccccaaccctgtgctatctgaaacatgtgctgtatccactcagggttgaatggattaagggcggtgcaagatgtgctttgttaaacagatgcttgaaggcagcatgctccttaagagtcatcaccactccctaatctcaagtacccagggacacaaacactgcggaaggccgcagggtcctctgcctaggaaaaccagagacctttgttcacttgtttatctgctgaccttccctccactattgtcctgtgacc

SEQ ID NO: 9916 - DNA, 1260 bp, Artificial sequence
  DNA replication origin
cctctaacctgttcttctccgagccgggcagccggcggtcctcagccgcccacagaacaggagccgaaacaaccgttctcgaaggctacagcgtttatttttctcttttggggggttttggcggttgtttcaggggctcgccaactggcccctttaattaaaagcttcaataaaaggcgatcgcgccaggaatgcacccgctcctcttcgcgcaggatttgcatatttttttaatgccctaatttccttgatgtatgtaaatgtagccggacgtagagggagacagggagctgacgtcaatggacgtgacctcgcagctaaaccttgaacgtgaagccgggatgggggaaaacacggagcggcagccggcggagcccgagagcgcgggcggcggcggcagtagccgagcccaggccggggtgccaagggaccagtgccggccccgggggaggacaagccgccgccttctttctgcaccgcgcggctctcagactcgccagccttccggccgcacacgcagactcttgccctgagcttccagccccaccacacacacgttcttttgcttccctcagaaaagcaacactccccaaaacaacaaaccaaaatcaacagataaaacagatgttttagaccaatgctcgggtagcttatcagaaagaagactctgaccacggaacatatatattttttggcttctctccacaagaagaggagcgagagaccacagacaacagcaaatcactcctaaaacacgataactacaagtgctccctgtagggagaggtaaatcgcccagccgactggtgaagtcttctggtttcggtacctatttacctgtgcactcattatgcgcctcggcttcattaacggcaggatcatgagcgcgcgttttaatgtgatgggagtgctgtgttgtgtgtgtgtgtgtatgtatgtatgtgtgttgggaggtgcttgcgctagtgagcaccgaggcaggcgctctgagcagagagagatcagtctttccatggccacgtctgggactcatctgcggagccatctaggccagggctcctagattggggttcgacttcaccccatgtaaaaagagaggccagcaaaggcttcccctgaacagccaggtccttcccatcggattgtttgaggaaggaggcttgaagtgtgagccattctgtagccgccgccttgccggatttggcctggtgttttgcacttgaaactcagcggcctcagcgcggaggtagtgcctctccg

SEQ ID NO: 9917 - DNA, 719 bp, Artificial sequence
  DNA replication origin
gcctctagtttgagcaactcactccgctgagttattgattgcaggcagcaacaatccctccggttgatttgtgtgaaaagtgaatccgctctggctgggcgttcagcagaggcgcaacagctgcaacgccatccaattattgccgatcctcccctccaacactgctctcatcacctatatactcttctctctgcccgtctctgcttccccccccttccccccccccttttctcccggccgacggagctgaaggggcgggggttccttccttggagtgtttctagagctcggaggctgctggtagggggtgagtgcgccacgtgcgtgcgccacgggcgagcaggaggcaggctctgggccctcctggggacctgctggacctgctggacctgggtgcgacgagtgggcggccacgctggtttggcgcggggaaggaagggggtgtgccgacttgtatttagttgggggttgtggaagtcacggctgggggaaaagcgtccggtggtttgttggtaaagagggtgcgtgatgggctctggggaatggaggagggcgcaacggctgtgggtggactgtggaaacgggcggtggcagtgccggggtagttgtcctgctggtctggttttgggatcctgggctggagaaatgcgatccaaaagagctcgggatgggctcagagcgacccacgaaaataccaggggccaagtaaaatgaaccca

SEQ ID NO: 9918 - DNA, 867 bp, Artificial sequence
  DNA replication origin
cggccagccgccccgtccgggaaggaggtgggggggtcagccccccgcccggccagccgcccagtccgggagggaggtgggggggtcagccccccacccggccagccgccccgtccgggagggaggtgggggggtcagccccccgcccggccagccgccccgtctgggaggtgaggggcgcctctgcccggccgcccctactgggaagtgaggagcccctctgcccggccagccgccccgtccgggaaggaggtgggggggtcagccccccgcccggccagccgcccagtccgggagggaggtgggggggtcagccccccacccggccagccgccccgtccgggagggaggtgggggggtcagccccccgcccggccagctgccccgtccgggaggtgaggggcgcctctgcccggccgcccctactgggaagtgaggagcccctctgcccggccaccaccccgtctgggaggtgtgcccaacagctcattgagaacgggccaggatgacaatggcggctttgtggaatagaaaggggggaaaggtggggaaaagattgagaaatcggatggttgccgtgtctgtgtagaaagaagtagacatgggagacttttcattttcttctgtactaagaaaaattcttctgccttgggatcctgttgatctgtgaccttacccccaaccctgtgctctctgaaacatgtgctgtgtccactcagagttaaatggattaagggcagtgcaagatgtgctttgttaaactgatgcttgaaggcagcatgctcattaagagtcatcaccactccctaatctcaagtacccagggacacaaacgctgtggaaggccgcagggtcctctgcctagga

SEQ ID NO: 9919 - DNA, 1368 bp, Artificial sequence
  DNA replication origin
tggccgggcggggggctgacccccccacctccttcccggacggggcggctggccgggcagaggggctcctcacttcccagtaggggcggccgggcagaggcgcccctcacctcctggacggggcggctggccgggcggggggctgaccccccaacctccctcccagatggggcggctggccgggcggggggctgacccccccacctccctcccggacggggcggctggccgggcggggaactgacccccccacctccctcccggacggggcggctggccaggcagaggggctcctcacttcccagtaggggcggccgggcagaggcgcccctcacctcccggacggggtggctggccgggcgggaggctgacccccccacctccctcccggacggggcagctggccgggtgggcggctgacgcccccacctccctcccggacggggcggctggcctggcggggggctgaccccccccacctccctcccggatggggtggctgccgggcggagacgctcctcacttcccagacggggtggctgccgggcggagaggctcctcacttttcagacggggcggctgccgggcggagaggctcctcacttctcatacggggtggctgccgggcggagggtctcctcacttctcagacggggcggccgggcagagacgctcctcaactcccagatggggtggcggccgggcagaggcgctcctcacatcccagacagggcggcggggcagaggcgctccccacatcccagacgatgggcggccgggcagagacgctcctcacttcctagatgtgatggcggccgggaagaggcgctcctcacttcccagataggatggccgccgggcagagacgctcctcactttccagactgggcaaccaggcagaggggctcctcacatcccagacgatgggcggccaggcagagacgctcctcacttcccagacggggtggcggccgggcagaggctgcaatctcggcactttgggaggccaaggcaggcggctgggaggtggaggttgtagcgagccgagatcacgccactgcactccagcctgggcaccattgagcactgagtgaaccagactccgtctgcaatccccgcacctcgggaggcagaggctggcggatcactcgtggttaggagctggagaccagcccggccaacacagcgaaaccccgtctccaccaaaaaaatacgaaaaccagtcaggcgtggcggcgcgcgcctgcaattgcaggcactccgcaggctgaggcaggagaatcaggcagggcggttgcagtgagccgagatggcagcagtacagtccagcttccgctcggcatcagagggtgaccgtggaaagagagg

SEQ ID NO: 9920 - DNA, 1346 bp, Artificial sequence
  DNA replication origin
gtctgcaatccccgcacctcgggaggcagaggctggcggatcactcgtggttaggagctggagaccagcccggccaacacagcgaaaccccgtctccaccaaaaaaatacgaaaaccagtcaggcgtggcggcgcgcgcctgcaattgcaggcactccgcaggctgaggcaggagaatcaggcagggcggttgcagtgagccgagatggcagcagtacagtccagcttccgctcggcatcagagggtgaccgtggaaagagagggagagggagaccatggggagagggcgagggcgagggagagggcgagggagagggagagcgagagggagagggagagtgagagctctggcagttctttatagcaatatgagaacagactaaacacacttcttaaaacaaaaacaaaaagagtggtgggtggtctttttagttataagacaaagaataatattacaggtgatttataagagagatatgatcaactcatcttcactatgtggacacaggacagaggcagagggtagttgggaggttacacttagttttggtttgatacatgtttgagggactggtaggacatttgtttggagatgtgtagaagtcagttgaaagtgtgagcaggattggggatttatttctttaacaagaattattgccactataatcaaaagtttgccagaaacttcgaggtagctcagtggaagtgttttgatagctgacaatatgagtgttgttctgcaggatgtaaatatcaatggggaaagttgttctgtggccattatagattttggaaatattgaataaaagttgtattcttttaggcctacttagggtttgttatagactttagtaagtattttgaatatttaagaaggttatttagtatctgcacaaatgtatttcctaaatgtatttctaacagaattctttcatctgatcaaaatgtgggcataacattgcatagaccacactggggaatattggttggaacttaaatgaaaggataagagttgcactgggagacttttacagggaccaggcaaagctgagattgctcagaggacagggttaaatctgatattgaagggaaggagggagttgaagtggaagcttgaagaggaaaccaggctgagaatgggaagttgtttgtaggtaagaagagtgcattcgtgggatgaggagcaaaggagagagagaaagagggagagagaagagaagagaggaagaagagaagaggaagataaattaagaggtaaaatcttaaacatgaaagaatgaggtcagaagcatagatggtgggttattcttagagaagagtatgcatgttccatttttggagacag

SEQ ID NO: 9921 - DNA, 1040 bp, Artificial sequence
  DNA replication origin
ctggtgaggaggggagaggtcagatgggtctgtagaaaaggaagattagaaagactcagcgatgcttggggttgggactgaggggacaggtgggagggaaagaaggaagatttgggacgagttgcactgggcacagagactaggaagggactgatgtgtaaaagaatgcctggacatcaggcacctcagaccatttgcccattttacgacaagaattatttagatcttgtaggatggaaaaattgaaagcgccgttttctggctatttggaactactgtcaagtttgtattggggtcaagcggcatagcagaagaaaataagacacttagattttaggtcaggtgagagttgaagaggttttaagtttttaagaacacatgctaagggagaaagaggaatggaaggtggaagcttgcccatagtgaaggaggcaagcccagagaaaagagtagagacacagagaaggggtgggggtttcttgccctccagaaaagcagagaaggggtcggggtgcagagatacgagttcggggcatggaaataagggattggggcacagagatacgaggttggggtacttgcctctcctccagaaaagcaaagaaggggtagagacatggaaagaaggggttgggatacttgcctctcccctagaaaagtgggacttgccgctgaggggtaggagaaagggttgaggggttcttgcccttgccccagaaaatcagagaaggggtagagacacagagagaaagggttggggtacttgcccctcccccagaaaagcaggacttgccgctaagggtgaaggagaaggggttgaggggtacttgcctctccctcagaaaagcagagaaggggtagagacatggagagaaagggttgggttacttgccccttccccagaaaagtaggacttgccgctaagggtgaaggagaaggggttgaggggtacttgcccctcccccagaaaagcagagaaggggtagagacacggagagaaggggttggggtacttatccctcccccagaaaagcgggact

SEQ ID NO: 9922 - DNA, 1893 bp, Artificial sequence
  DNA replication origin
tgggaaatctaaaaatgtaagtgacttcctttattacggtggttcggtaccaaatctgcagtatttctgaggtatgcctgtatttgaagagctgactagagaaaagtttctgagaaacacaaagccacaatagaagtgagacagcctaatttaataaaattaaaagaaacctctaaaaagcactatgcctttgctcaaaaaagccatttgtttgctagtgtgagttctgataaagaccaaatcctgtctcaagtacatgtttggggcttgtgttgaagttctctaagggcagtttaaccgcggtaagagatcacatcttgcattccaatttgtattaattaatatacaattcttaaaatgatgggatagtcagatgtttggtctagatcttcccagttgctcgtgattttatgttcctgcaaatataatctgcactcttctgaaaaaggaaaatgaaagaggatgggtgactctcagtcaatccatgtgacttctggatgaggacctgtgaaatggagaaaattggatttccagaactggcccttccaccactcccttcagatccagattgagcatatgtgttacttggtgcaattattgttataaacatgattcttgcttgttaaataaatgaatagaatgttataaagatgattctagcttgttagttacagaaaactagacaatgtaaactgtacatgtataaataagttattgccctttaaatgtcaaataccccatttctccttctcttgttttttgagctttccctaattagacagactcatagttttcattaagaagttcagtaaataaatatttgggctatctactatgtgtaaactgtcacaaaaacttttagaaacaagccagaaatccatatggatgagaagaaagggaggtggtaatgacggtggtggtggtggtggtcatggtgatgatgggagtggtggtggtggtagtggtgataggggtagtggcggtggcagtggtggtggtcttggtaatggtggtgttgatggtcattgtggttatggtggcagtggtggtggtggtcatggtggtgatgggagtggtggtggtggtggtgatggtggtggtggcggtggcagtggtggtggtggtggtggtggttgttcctggtaatggtgttgatggtggttgtagtcatggtggtgatgggagtggtgctggtggtagtgatagcaatggtggtggtggttgttcctggtaatggtggcattgatggtggttgtagtcatgctggtgatgagagtggtggtggtagtcctggtaatggtggtatttatggtggttgtggttatggtagtggtggtggtggtggtgcagtggtggtggttgacttggtaatggtggtgttgatagtcattgtggttgtggtagtggtggtggtgatgggagtggtggtgatggtggtggtgggagtggtggtggtggtggtggttgttcctggtaatggtgttgacggtggttatagtcatggtggtgatgggagtggtggtggtggtagtgatagctgtggtggtggtggtggcggtggtggtcgttcctggtaatagtggtgttgatggtggttgtagtcatgctggtgatgagagtggtggtggtggtagtcccggtaatggtggtgtttatggtggttgtggttatggtagtggtggtggtggcagtggtggtggttgttcccggtaatggtggtattgatggaggttgtagttatggtggtagtggtggtcgtggtggtggtggtggtcatggtggtgataagagtggtagtgttggtggtggtagttgtcctggtaatggtggtattgatgaaggttgtggttatggtggtagtggtgatggtgggggggtggtggtgctggtggt

SEQ ID NO: 9923 - DNA, 1512 bp, Artificial sequence
  DNA replication origin
cttgtgcccgcgccttgcctggttacggcctgaacctggcgagcttggctgcagccgcccacctgcggacgccgtttgtaacgccatcccctaatgtaacgcgatcgatggctgcctgtctgatgtgggcgatagtgtcagcggattaaaagggacatcgagccgctctcccgagcagacaacctgcggcggcggcgagagagcaccgggattcgcagcctagcagccgagccagactccctgcgccgctgccagccggctgggggcggggagggggtcgcctcccaggggtggggacagagggggtgtgttgaaaggaagaggctcaattaaaaccaacaagagcgctttcctccgtgcggggcaggggcgtgcgtttgcgtcagagggcgcgcggggggcgggggcagccgatgctggggactgcacccgggggctggggggtctcggaagcgaggaggccttgcctagctgggctggcccggggtcaggccctgtaggtgagggccaaggcgagacgggatgacagctgagcctgcccgggagcagaggcgcccacccatccttactgtgggctctccgtgcccccacagagctttcaaacttgaaagaggcccctgggacccggcgtgaccctagcggtggggagaagttgggcccgcgaggcctcaggcgaagccgcgggctcctccggaaggaaggaggagggtgaagtcccctgtcctagtcccaggggtgggagtgggaagctgttggtggtgatgcccggagcagcggaagcccgcggcttttcggaggaggggagcggctcgcactcctacggggcatccttgccaactttctgtcacaagagggggcggggagaaaccaaggcttttcgaggagggcgctgtccccctctggaactcgtccggcctgagtggcacttagagctcagtttctcttcggaagcctgtgctccccgaccgcggttgcacacccacagggcgccccacttgtgctcatagccctgcctccagcaaaaatgtcttccctagaggcactgagaggtcagcttagttcctgggaagccctttctttctttcttcaaggctctcttttgatactggtcccaattggcacacttgtcctgggcctaatgcgacccacactcaaccaggaaataatgatatctgttgttgtggggtagggtacctaatagaaaactgatcatagttttcgagagtacttagatcccccaattgggaaatcctacatacttgtccaggcacgctcagctgcaggagcagaaaacgcagttgtagtgtccacgtttctttcacccaccccctcttcttcagatctctctccctcccttctaggccaggcctttcacctcggaaccttaagctgagtctggacgtggttcttggactcggaccgctgtggctcttgcctcagcatcctacccgaggcctccagccaggcccacaggggctcagccctctccagggtctctctttcggtttggcg

SEQ ID NO: 9924 - DNA, 1241 bp, Artificial sequence
  DNA replication origin
gagagagagagagagagagagagagagagagagagagagagagagagagagagagaccgagaccccgattcctgaatcctgaaggtgattggtcgcgggaggaggggcaggcgggaggagcgggtcccgcggcggggcttgcaggaatcgctggctccggctgccacctagcggacgggagccgctcccgggcggcacacagccgagtccctcctcccctccccgcaggcagcctgtgccttttctccaaacgaagacagcactttgaaaattctttcaatggatttttttttccttgaaagatcgtactgggggaaaatgatacttctattagttacatattctccaatcgcatactcgcacccccctcgttttgagatcgctcccctaggcaggctcaggcgggcgcggagccgcgcggagtgacaaagccgccgctgccgccgccgggggtgggagccgcgctcgcccgcccgcccctcgactcgcgagggcgtaaaagtttgtctcagctcgagcattcctagcgccaacacgccctcaggtaaaggtggaagtaaatggccacgctgtattgacagaggtagggtttgttttttaatactcgttctcactttaagtctcaccagggaggggtttgggaagcactgcgtgtttgggggacgttttgcgcttcctggtctctccagcctacaagtcgggagtcggcgaccgcttagtgacgagcgatgattttaaagagcagaataaaaggttttcccgtgcctgccccacagcccctccagctcgaataatggagaactgtcaatgcactccgcgagcggtggcccattgtacgcagctgatggcgaggaggcgactgggggtagcaggggctccttgccctcgtccctatgcccaaataaacgcgcaaacgcgctcccgtcttctggtcagttaaaaggtgaaacgaacacgattaaaatagaccaaaagaaaagaaagaaaagaaaacctttctatgtacagattctaaatcgtactccccatacagtcagaggcagggagtcgagggcagaggcagcaggcggagagagggagatagggcgagggaaggagaacgcggagagagacgaagggagtgggagaccagcgacagcgagcgccagggcaccgcaggcacactggatgcccagtccgccggcccagccgccctcggaccctggaccgtgcgtcgtgggcaccagaaacgagactcggcc

SEQ ID NO: 9925 - DNA, 1287 bp, Artificial sequence
  DNA replication origin
atggcacaggcggcagccgggagcggcgcggggcgcagcgccgggggcggcgggcatgggccacggcgcgcgcacacactcgccctccgcctcgcccgcacccccgcgcacacacacactcgcacacacagtcgctcacccgcgccgggcgcccgcccgccggccgctcgggctacgcgcagcgcgcgggctgagccgacatagaggaagccggcgagggcggaggcggcggcggcggcggaggaggaggaggtcgcggctgcaggcgccgctggagctgccgccggagctgctgcggcgagcgccgctggaggagccgggacccgggccggagtccgagcaggagtcggggccgcagccggagcgcgagcggaggccggggccgcccgcggcgccgccgctgtcccggcgggagccctcgccgggctcgggagtgcggggagcgcggtgagccgagcagggcgctgggcgaggctgccgccggcgatcagggcgcgcgggtgtcggggggccaggtccagggccggacgcagccagccattcaggaaggcagcgctggagagcgggaggcagccggcgaggaagatcacacactttgctctttttgttgtgccggtggcgccgggctctcgctgccttcttctttcgggaggtgacggaagggggagaaaaatacgggataattcacgccggcgacgaaatcacagcgaaatagaaaaaataaaaatcagaagaaaataattgccaaaaaaaggaaaaaggaaaagcgagagagacatccaaagtaggtcgaataaataatcctcttcttttcctctttcttgctccttcttctgcttcttctgctataacacacagagctagttaaaaaaaccctggagatcgcccaaaaatgttctttttttagtattttaaataagtgctcttcagccggcaaccaacaccctccctccaaaaaaaatcatatatgtataaaataacgataagaagaatacgaagggggtgcctcctcctcctcctcctccttttttttttctttaagtttagccctctctcttctgcaggaatggagtaaaagagacaaggaggagggagaaaaaggagagaaaggagaagaagaaggggaaaacaactagtagaatatgtaagaaaagagaaagagaagagaggttcagagaagagaggagagagagaggagaggagggagagaggggggagaaagaggagagagagagaggagagagagagagagagagaagagaagaagagagagagagagagagagag

SEQ ID NO: 9926 - DNA, 819 bp, Artificial sequence
  DNA replication origin
cccccttcccccctaattagacctacaagtgcaataaatctcactcctctttttccgagctaagcttccaaaaggatgatggcagcaatgaatctatggttcagggtactccagcccccagccctcccccattttaaataaagggtatgaagaggtggagggaaaagtggaatgaaaaaaaaccacagaaacagagttttctgggggaaataagcacccctccccaagttcatgccagcacagccccaagcagcctcacgcacacgcgggaaagagacacacaccgagcacatccaagacagagggaagaaggggattttaagccacagctcacgatctcagggacacaatcctgagcaggcagcgggcggggtgggggagccggggagatgagcgcaggccgggagggggaggcagcggcagcgagctggggagggcggggggagacgccgggggaggaaggcagccgggagaaggaaagctgggacgggccgggaccacaggagccccagccccacacagcaaccacccgggcgagaaagaaagaaagagccagggaggcgggcgaagcgcggggagagaagcagagaagaaatattcaccttcccgcctcatgcccactttgaggcacttcttgaggcggcagtattggcactggttgcggtggtgctggtcgatgggacagttcctgttggcacggcatgtgtaagttaagttcctgcggacgctcctcttgaagaaacttttgcagccctcgcaggtgaattggccgtagtgcttgccgctcgacttgtccccgcacaccacgcactcgatgtg

SEQ ID NO: 9927 - DNA, 1320 bp, Artificial sequence
  DNA replication origin
ccgcgccgcctcggttcccgcaccgccgcgctcccaagatggcagcggcgcggccagccggtcaccgcgcgggggtcacagacccgggccaggctcagtgtccagcgagggcccggcccgccccgcaccggccgcgcgggaggctccgaaggccaggcccgggcggcgcggggcctgcgctcgctgccggcgcggcctgccctccccgcgaccgcagcctcacctgacgtgaacagcacgatggctttgaggcagctgtactcggctgagtcgacgtgtagcgccttgagcttctccacctgctcctggaagatgcggatgtggtccatgaaggccacgacgcggtcggcagacatgggcgaggcatgcaggccggcggcggccagcaacggcgccacgtgcagcggcatagagcactgggccgcgttgagcacgaacagctcgctccaggtgaggcgtagcagggacacctggtcggtgatctgcagatccgggaagaaggggatgttgcgggcccactcgacggcgctgaagagcaggcgcgcggccagctcgcagatgttctcgatgcccataatgttgttgggctgcatgcactggctgccgtagcgcgacgtggggtagggctcggcgcgcagcagcagcgagatgtagccggacaggtagcagtggccgttgagggggtccccgttggtgagtgcgtactggcctggattgggctgggttggaggcattcttcctcgctgaaccgctgacaaaaagaaagagagaaaagaggcaatgtgcatccagggagcttgcgaacattgccgcgccgcagcgtacccaacacaatgcagaagctcttcccgcagccacacgcgccccgcgcatcttctccggctcgctctcacagtccacaccgctaggagatctggggtgaggccctccagctccacagctcagtgtgtccagccactgcctgagcccctggccacgtcagccccgccggagctaggcctgactccagggccccaaccctggcaaggtcaagaaagtgtcatccaacccctaagccaccacgggggaacacacagataaatgaaaccccactcacccctccagaatggaaaaaaaaaatcagggttaaaaaaaggcgaaaccggagaaaggttgtggttctaggcaaatgcctagcggcctcctcatttgcaagcaagcagcgttttgctgataaaatgtttccacattctcttaaaatgctatagaataattcttaaaatagacacaagttacatatcctactaaccacttacaacttttgagtagagaacaagtatc

SEQ ID NO: 9928 - DNA, 891 bp, Artificial sequence
  DNA replication origin
gccggcctgcatgcctcgcccatgtctgccgaccgcgtcgtggccttcatggaccacatccgcatcttccaggagcaggtggagaagctcaaggcgctacacgtcgactcagccgagtacagctgcctcaaagccatcgtgctgttcacgtcaggtgaggctgcggtcgcggggagggcaggccgcgccggcagcgagcgcaggccccgcgccgcccgggcctggccttcggagcctcccgcgcggccggtgcggggcgggccgggccctcgctggacactgagcctggcccgggtctgtgacccccgcgcggtgaccggctggccgcgccgctgccatcttgggagcgcggcggtgcgggaaccgaggcggcgcgggtgcggccggcgggcggccgggcctagtcgcccggacccctacgtggggccgcggctgccgagggtgtgtgtctgaggcgggggggcggtgctgtggatccgtctggctgcgcgcgcgcgcgcgcgtgtgtgtgtgtgtgtgtgtctctgtgtgtgtgtctgtgtgtggtgcgtgttatgtgtgagccagagctcagcgtttctgggggaggcgagggaaggaagagaacgtgggaatgtggcttcttaccctgtgtggcactctccttgaatgaatttcccgacacagagagacacagagagaggtggaaagagaagaatacgcacaaataaatcataataatcccgctttatcgctgcctgattttcccttatcggaaaccattcatgtttgcagttggtgaggttattgagggtcgtaaaaaacggattcgatctaaacaagaaagataaaaaacaaaagcaatgctgtagaacccgcaagtatgggaggattccccgcctgaagatgaat

SEQ ID NO: 9929 - DNA, 1490 bp, Artificial sequence
  DNA replication origin
tccccacacttcccccttttccattagacagaaccgccatcgtcatcatggcccgttctcaatgagctgttgggtacacctcccaaacggggtggcagccgggcagaggggctcctcacttcccagacgtggcggccgggcagaggggcccccccaccccccagatggggcagccgggcagaggcgccccccacctcccagagggggcagctgccgggcgggggcgcccctcacctaccagacacggtggctgccgggcgggggcgccccccacctcccagatggggcggctgctgggcgggggcgccccccacctcccagatggggcggctgctgggtggaggggctcctcacttctcagaccgggcagccgggcagaggggctcctcagttcccagacggggtcgcggccaggcagaggcgctcctcacttcccagactgggtggcggccgggcagaggcgctcctcacctcccagacggggtggcggcagggtagagacgctcctcacctcccagacggggcggccgggcagaggcgctcctcacatcccagacgggtggccaggcagaggcgctccccacatcccagacgataggcggccaggcagagacgctcctcacttcctagatgggatgacggccgggaagaggcgctcctcacttcccagactgggtggccgggcagaggggctcctcatatcccagatgatgggcggccaggcagagacgctcctcacttcccagacggggtggcggcggggcagaggctgcaatctcagcactttgggaggccaaggcaggcggctgggaggtggaggttgtagccagccgagatcacgccactgcactccagcctgggcaacattgagtactgagtgagcgagactccgtctgcaatcccggcacctcgggaggccgaggcgggcagatcaccagaggtcaggagcaggagaccagcccggccaacagggcgaaaccccgtctccaccaaaaaatacaaaatccagtcaggcgtggcggcgcgcgcctgcaatcccaggcactcggcaggctgaggcaggagaatcaggcagggaggttgcagtgagtggagatcgcggcaatacagtccagcctcggtaatagagggagaccgtggaaagcgggagatggagaagagggagagggggagaccgtggaaagagggagagggggagaccatggaaagagggagagggagagagagagggagagggcatgtttttcttagtgaatatttttgagaagcattaagtaacttaaaaattgattgattaaaccatgatagatccacacaatggaatgttgctatgactagtaaaaaagaatgaagacaatctctattactgacaggggagttcaccagggtaaatttttaggtgataaagtaacacagcacatttagtctgctataagaaagaggggataataagactacactgtgcaacacagagtgtttagtgtactgtc

SEQ ID NO: 9930 - DNA, 1143 bp, Artificial sequence
  DNA replication origin
ccggagcccctggagcccggcggcgccggcagagccgagcaggggtccacgctacgccgccggatccgcgagcatttgctccccgccgtaaaggggcccgcggcggcctcgggagcagcgggagggacgcctcctggcggacgctcccccgactcagctccttcctcttcctccgcctcatcctccctgtcctcctcgccccagcctcccccgaggggggaccgcgcccgagatgagggtgcacggcgtcagggccccggggcgcacttgtgccaccagaagagctcctctctgccgggcaccgcctgcctggagcagctgctggagccgccgcctcctcccgcagagccggcgcggagtcccgcggagtctcgggccccggagacgggcgaggagcacggcagcagccaggtgagtgccggtggcgcggccggagacaaggtgcgcgggaccacgcctccctcttcaggcgttcaccacccggggagcggggggcgggggccgggaggcgggaggagaaatgctattaattctaagtagatgaaacagtcgaaagaaaacatctcgctctggtttagcaaagatgaaagagttctgacttgcacccggactttacttttggtagaaatgatacctgtcaccagaagctttctgagtagtcaatgaaaagttagacctaaagtgggtactttttagagttctcctgaaaggagatgtccagccaaatctcatcttggcaaaagaaaaaactaacccaataacttaaaaacaattacgatcacgtgtggtggtgtggagaggtaccattggaagcaaatggctggcgggaagaaatagaaacgtggagaggtaaattatggcacatgtgaggtcctgtgccagggaaagcatcatctcaggcctgcatccggcacccctttcttaaaccttcctgctgcaattggatcaccgcccttcaagtggacagcgggagcgtctcctcccagttagtcaaatgcatatgttcctatgagccttgtgaagttttaatagtcacctgaagcacttgctttttaaagtatgctgctttatacatcatgttgattgctcagacaagagtcaaggtttgtaaaagtgcttttactagaaattttatgtgtggga

SEQ ID NO: 9931 - DNA, 972 bp, Artificial sequence
  DNA replication origin
aggctctctggcctcgggactccggcgctgcctcttcctcccgcacctgctggggtgggctggagccgtaaccgaatcccggccgcggcgcctgcaaagtttttccctcgaagctccgcggctccagtccactggcgtcccccaggccgcgccctggctccctcttctctctgaccgagctcgggaagctgcacgcaccggggcgtgcgcgtccagctgcgccagggaccgcacccggcgccctctgggcagcacctgtcagcggcgggggcggctgcctccaaattgggcgcgcacgcggctcacacaacaaggcgcgtctggctggagactccggggaccagcagtccccctggggcgccccgggaccatcctccagctcctaggtgggagggccggtaggagccgggtggagctaggtagggcccgaagccagcttgctccctaggatccggccacagttgcccaggcagctcgctgtgcgctggccgctggccgcgctggcgatcgtctgggtcggatgaagcgagctggagtggaaactatgtgccctcgatgggtctcgtgggggcgccgatcgtccacactgagcgatgaacccgacggagttctaaagctgaagacgtctgcccccgccccgttgcgctccctgggtccaagacgagagtttaatttcttctgtcttgacttcatccccatccacccctcccttttctttatttgcctctgcactggtctcttatgatcaggttctagcatttccggagtctgacgataaagccagcccttaagttgcagggagtttacggtggacgaagatgggtgatgcgcactgcctttgatccgattcggcacgcacagaatcttgttcttttcattcaagcgcattttttctttggttacttcatttgcttgttgcaaggcaaacggaaaaggctttttagctcattcagactttgcttctcccaaagc

SEQ ID NO: 9932 - DNA, 1066 bp, Artificial sequence
  DNA replication origin
gcagcggcgagggggagtccccgcgcaccacgaaggccgggggcagcgccagcagcagtgccagcagccagcccagggcggcgagggcacgcgcgggcagcggccggccgtgcggaagacgcaccgcgcgccggcgctcgagggcgatgagcaccacgaggtgggccgaggcgccccgcccggatgcctgcagcagctgcaggaagcggcacgccaggtcccccgtggccgcgcggggctcgcccagcagttcccaggccagctgtgacagcgccgtgcccccgcacgcgtacaggtccgccagggccagctgcaccagcaggaagtccatcttgcgacgcttggggcccgcccagggcccgccgccgccgcacaggcggcacagcactgtggtgttgcctgccaccgccaccaccaggatgacccccaggaacaccaggcggacgcggcggctgggcggcccagaggcaggggctccttgccccaaggtcaggttgagaccccagcccagcaagatgggcacggaaatgttgggcgccggcggcagaattgaggggctaaagagatcctccatccttgtcccggaggaagaggaggcaccgaagagggcgggcaggacgcgggaaaccaaagtggaggcgaggcggcgcggggagcgacgctgggtctatacgagttcccaaagttagttgaaaaggcacacgcacagagagggagatggattcgggcggctttgcgcttagttgtttttgtcgattgtcctcgtgatttgtcactcaaatgtgggttgtacactcgaggaacacacatgattcctattctccaccttccccgcgtcttccctcccattcccggcgggtactcttccaatctctgcagcggcccccgacgctaccctcgcggaagccgcggacccctgggcgctgagaacctcatccattctctatttacgtgtaaagcacagcaggacagaatgtcgctttgcttggccattgtatacggccagtgttatgccagcacccacacaagagaggacctcttgactgagattgtaccacacgccccc

SEQ ID NO: 9933 - DNA, 794 bp, Artificial sequence
  DNA replication origin
cgcttgcggccacctactctccgtctggtggcggcaccggccgcaggcccccgcggctgcagcgccctggtcggcgagcccaggtcgagcccctgcgcccagcgcgctgccccgcgccaaggtgcagagcctgaagatgagcctgctgctggcgctgctgttcgtgggctgcgagctgccctactttgccgcccggctggcggccgcgtggtcgtccgggcccgcgggagactgggagggagagggcctgtcggcggcgctgcgcgtggtggcgatggccaacagcgctctcaatcccttcgtctacctcttcttccaggcgggcgactgccggctccggcgacagctgcggaagcggctgggctctctgtgctgcgcgccgcagggaggcgcggaggacgaggaggggccccggggccaccaggcgctctaccgccaacgctggccccaccctcattatcaccatgctcggcgggaaccgctggacgagggcggcttgcgcccaccccctccgcgccccagacccctgccttgctcctgcgaaagtgccttctaggtgcttggtggtcagagacgggtcatctgtcgctaaggcgcaacctccagggaactcgaggcctgccagggtctgtccagatcacaaggggcaggagagtctgtgagagagtgacactgaagttgtccccttcctccactctcctattcccttctcatgtttacatttccctatgctcttccagtttctcttcttccctacagttcctctcatatctccccatttggagacagtgagc

SEQ ID NO: 9934 - DNA, 1077 bp, Artificial sequence
  DNA replication origin
attaatttatattccgcggcgccccgcgcgggcggctcctttgtgtccagccgccgccaccggagctcccggggcctccgcggggagcgcgtcccccgcatccgcccgacccccggggctggcacgtgctgcgcccggtccgctgagggggcggaggccccgatctccccgaccccccttctctgcttagaggaggaggagcagcggcagcggcagcaggaggcgacagctgccagccgaggaggcgcggcggagaggggactgcggtcagctgcgtccacttggggctgtgcggcggtcccgcgcccggcgatgttcccgggcactccctgagtagcggcagcttatcccccgcccgctagcccgccctggtccccggctcgctcgctggctggcgcggccccggccccgctctgcgtcggccccgccgcggtggaggcgcgcgagggggacgcggccggggatgagcggattgcgggtgaactcgccgcccgggggccccgcgaagccgtgagccgctgcttttctccgagtcgccgccctgcccttggatttgagatcatgtacgtacgcgccgccgtcctgccattgtctctctccagcgcgtgccgtgcgccccagggacaggggctggtgcccatcctcgccgcgcgctgtcccccgcacttcctgttccgaggagagacccgcgcgctgaccgtgcttcccttctcccctcgccccctctgtccgtgcaggtccatccacatcgtggcgctggggaacgagggggacacattccaccaggacaaccggccgtcggggcttatccgcacttacctggggagaagccctctggtctccggggacgagagcagcttgttgctgaacgcggccagcacggtcgcgcgtccggtgttcaccgagtatcaggccagtgcgtttgggaatgtcaagctggtggtccacgactgtcccgtctgggtaaggaagagcagctgctccgcgctgaggctgaagaagcttttctttccttttttttccccctcccccttctgcccacttccgtgagtgtggagtgtccgcgttacatgggtc

SEQ ID NO: 9935 - DNA, 2463 bp, Artificial sequence
  DNA replication origin
tgcagaagcccaagcagccgcggccgcagtggaggctagagccggagcggcggcggcggcggcaccccggggagtttaagatggcggcgggggggacagggggcctgcgggaggagcagcgctatgggctgtcgtgcggacggctggggcaggacaacatcaccgtactgcatgtgaagctcaccgagacggcgatccgggcgctcgagacttaccagagccacaaggtgagcgggccggccggcaggctgggctcagagaggcagagcgcacccctcacggcctggccgcgcccgggtgcggggccggcggagccgtggctggcagctgctaccgtcagcgcccgcagcggccaggcagggcagggccgggcagggtggctgacgccgcggtcccgggctagcctgggcgttggggaagcgggcagtcgggcggcccctggcggcggggccgaggcagccgcagccctgggtcggctgcgctgccgctgcgggactttccgacggcccccgaggatttcctggcttgttgggtcccaaggagggagagaggccccgataagagaagtgagatgaccacgctaccctcggcggggaaggagggtagcgagcagcgtatgggcaaggaaccagggacgactcgcgggcaccagctgcccgcgttttccagttacataggcacggtggatcctcagagacaggacacaggcgctccgcgtgtgggggtgggaccttgtattcccagggacttggggacacaggcgctccacgtatcaggggacacactgtgtgctcgaagggatggggactcgggcgcatggtgaggggcacacggtgtactcatagagatagggacttaggcagtccgtgtaagggggcggcgcacactggaacggcggggacactggcgcttcgcgtacggggggggaggggacacacctgcattcccagggactccgggacaccggcgcatcgcgttactggagacgcgccgcgtccaggacggacacaaaccaacacagtgccctggggagagacctgaggactcacgcacacttagcgctccccgggagcaagacatcgggttctggagagagaggttcacggacgctcaacgtacccgaaaaagctcccggcgtcttgggctgactctgggaagtgtaaacggggaacgagccagagccagaaggtgtggggaggatacaatgcatcccgggcagagactcgggcctctcacccctcgttttcgagagaagcccatggacacacacacacacatatacacacacacccctccagtacagagagaggctcagataggcgcacatacactgtaattggactacaaatccagacgctttcatgttggaaaaaaaatgggagagacagggaagcaccgagaagggacgcggtaaccagggtgcatggggaaacagtttatggacatgcagtactgtgggagaccggagtggatacatcgcgtgagggagggatatgccatatgggggaacctgtaacgttttacaggagaggagagagtcggaagggagatagaacccacggggcatcttacaaatagcccgttcggtactgaggaacacactccaaccggtctcgtacaacagacagaggggcagaaggacaccgagacacagattcacatagttattcagctaaaagtggggaaaagaattgacatctgttgagctcccactagtgccaggcactttaaatacatagagcgaaggcagagtctgaggcagagcggcaggagaggtgtgaaccctggtttactgggagtgtattcagagagcccccccaccccataagtgtgcacacagaggaaggcattagttgtgcacgctttggatagaaaatgaactcacatgatagggtatttgtaaacagcagtggaggctcagaggtgagtgtattgttaggaaggtactcacagaattgggtggacacatgaatgtacgtgctaggacacttgtgttactaaccagagaagcatatggtgaaaaggactcacagactttgtgtggtggggtgagggggcgtcagggaggagtgcatgcacagggagaaaggtaccgtcctacatacagtgaaatctcgagagaaaatctcaagaatggctgggagagatacaagaaatagaaaactgcatgtgccaatagctactcttagataggtgcacctgcagtgaagagaccagcatcagacggagtgggaggcccatatgggggaagccagaaacacaggcagagggacagaagcagacagtggagagaaactctggagagaaactcagccttgcaagatggaaagataagcttgcctgttccaagggaagggcgtgggaaggaatggcagtgggaagaaggtaggtctggggatgtgaagagaaaacccagaggcccagagaaaaagaagtcagcaggaggcggccagcccctattca

SEQ ID NO: 9936 - DNA, 1182 bp, Artificial sequence
  DNA replication origin
cgctgccaggcaggtggctgcaggtggcttcggttccccggccgggtccagtgcgctgggcgtggcgttggccgggtagagtggagggggggacgcgtcaagaaaagttggctggtaagacgtgggtgaatgaggatgaggatgaacggggaatgaggttcactcaggacccccgagtgagtggggtggtttcactggacagcgggatgtagtcttccgcgctaaggccgggccgcagggcgtggctgcctggagacgcagagcctcttccctaaccagcctcgagccaaattgggcgggcgaggaggggcggggcctgcgccgggccccacccccagggttctgcccacctggcagccgccttgggatgtgcggagctcagtgccagcccggtcccggccaagcggagtgtgagcccggcgcctccaacgcaacaccccgcgccctcgccggctcccccgccgtgcggatcggagccagccggttgttgccatggcattcgccagctggtggtacaagacggtaaataggagcggttgtgcctgggcaggacccggaagggagtgtgttggaagggagtgtgtttgctttgcccttctgggcgtgcggatgaagcgttgtccggggtttggcggggaaggggtgcggaccgggtgcgacctcctcgcagaccttcaggttaggctcggggagaggcaggggactcaccctcttgtggtatgtatgagcgcgcccgagcgtgcgcggcgcatgcacctctctcgccccgatgtcaagcactatgctctgctggcgctcacaagtgggatggaactggaattgttgctggaggaattctgtctaggaggtggattcctgaatgcactaggacgcagctcgcaagagctttgatctagagttcttttttaacccctaagtaaagttcaaaacttttagagggcgattgttggacgtacattcgccgacgcaaaggagaggcagctgcaatgtgaggcaaggagaaaatcccaaacatcaaggggcagaagcaactgagatctgagaccaagacccttggagagagcggtggaggggtggaggaaagaaagcgagaaagtgagagagggagggagagagagacagcgcgcacaaaagcgagcttctctgcactttattactttggatgagggacaagaacattcc

SEQ ID NO: 9937 - DNA, 985 bp, Artificial sequence
  DNA replication origin
ggcggcagtggtggtggcggcggcgcaagggtgagggcggccccagaaccccaggtacagcgcgctcgagccgcgggtaggggactgcgggccgggaggagagcgcggcacccgccccttccctgcgcccgtcaagtggggggctgagggcctggggcacgggaggagggagacggggcacgggaggagggagacggggcgcgggaggaaggcgacggggcgcgggaggaaggcgacggggcgcgagacagggcgcgggaagggcggggggagtcgctggctaggcccgagtccgcggggtgcccggcgggttggcggcgggcccacccctgccggtccctgtccctgtccctccgggcgcgtggccggtgcgcctgcttcacgggtctccccgctgttcggccggcgggagcctccctcagcgctccgcctggcgcctggatgcctgccagtcctgcaggccaccgacgcccgcgcgaggccaaaaggcggggtggggcgggcagctggctcgggctgaggagggcacctgcccatagctgctagagaaacccagaggctttgggttaaagactctggtggggtgggatgcgcgggccgtgtgtgttcttaaggtcacttccctccctgcttctcctgttcttctggtcagcaattctctctctccccttcgctctggctctggctgggttttattcagataaagcacctctgttgacgcaaattaaaagtttcctatctgggtgcctcactggccaggtggtcctacaaagttaattccatgaggggaagggggagagcacacacttcctcacgcttttggatttctttgtgtaggctaggttcagaaagaaattatctgtttcctattaaacacccagaggattcgctctgaactcaggacgtggtcaacaattaacaaaacaacaaaacaaaacaaaacaaaacaaaaaacttgaaaattgggcacagttgtctcttgcct

SEQ ID NO: 9938 - DNA, 1027 bp, Artificial sequence
  DNA replication origin
gccagccccgggtcccgcactggccgccgcccgccccccgaacctccctgcctcccccagatcccctctccctgcctccctcagccctcgtgggaagcccgcggtgttgggggagacggctgcagcccgaccccgcgtgtcacgactgcccacgaccctcagggctccggagagcccgggtcccggcgcctcggcagcccactcaccattggtgaagggctccattttccccccgccgcggctccttacagccggagcgcccgagcttcctactccgagagctgaggcggcccagctgactgagcatgcccagcgcggcctccaagggctgccagggaggtgccgcgaggggcggcgccgctccgccgttccgggttttcgtggcagctgcagaaagagcgagggaagcaagagggaaaagcacagtcaaaccccctgctgctccgtggacaggcgaggtgggagcgggttcgcgctgggggcggggcctaggcggggccgggaaagcccagcccctacctgaagtggacccggctgcggcgctctccccggccgggaacggtgttcagtcactcaacaaatgtggagccctactgcgacccgcccgatcccggacgccgagacacccgcactgcgccagaaaatcatggtcccagtcccaggagcggacattccagaaacagaccataaataaacacagaagacacacgagtgtaaagtcagtgccccgctgcgaattaaatcggggtgatgtgatggcgagtgagtgggtagttaattcggatggcttggttagacgaggcctcgctgagcaggtgccactgaagccgaagtctgaaggcagagcaggaacctgcgggcgaaggtcgctatctgaaccgcgaatcgctggtttccctggggaggttggccgcggagggatcactgctcgaaggaccgagggagcgggcgctgtaggtgttttcggcagagatgcccgcccgcatcagagtgcctcaggagggcggtgaggaggagacggaagaga

SEQ ID NO: 9939 - DNA, 1464 bp, Artificial sequence
  DNA replication origin
acccgctcccacctcgcctgtccacggagcagcagggggtttgactgtgcttttccctcttgcttccctcgctctttctgcagctgccacgaaaacccggaacggcggagcggcgccgcccctcgcggcacctccctggcagcccttggaggccgcgctgggcatgctcagtcagctgggccgcctcagctctcggagtaggaagctcgggcgctccggctgtaaggagccgcggcggggggaaaatggagcccttcaccaatggtgagtgggctgccgaggcgccgggacccgggctctccggagccctgagggtcgtgggcagtcgtgacacgcggggtcgggctgcagccgtctcccccaacaccgcgggcttcccacgagggctgagggaggcagggagaggggatctgggggaggcagggaggttcggggggcgggcggcggccagtgcgggacccggggctggcttgaaggtcagcgccgccgccgctcgcccggggtgcggccggtgggcaaacagcaaagtttgggctgctgtgcgcagaggagtgggcagtgggaaagttggcagctcaggtttgcccccggaggaggcggtgtcggcccgactctcctgtaggagcgttaagttgtggcagctgccgagcccaacttttgtggggcgccaggagctgtccccctgcccttcagtgagctgccggcgtgacttttcctaatagggcggggtgggggtgggaggcttggcaggttaatgttgtggaaggaagggaaacttcaggaaaggcttgctcacctcgctcggtgccgcggaggtgcctggccacagtgccaccctcctgaccctgccgaggtactcggcagggccaccacgcatcccctcactggctgcagatcacatcagtttttcagtcaaagacttgttaatgtcaagggtccgtcacggtggtgataccactgtgtgacaggaagcgagagtcaacgcagggagcctgcaccctgcaaacagccacagcccttcactgaacggggagcataaatcccaccctagttagaaccatggcttttgtgcggaccagaagtgccagagccacaatataggggtgagatgtcttaccgttttgcggtgttgagtgtgtggattcccttttaagatagaaagtaggaaaactgccagtaagggagacgactcactaaaagaggattcagtctctggttgacatgttttgctgagtgtggttggttacttcaggtacagtatcacattaataggggccacagtctatatccctgtttagtttgttagttaccactcaagagcagacagatattgtccactttatcccaaatcccagccagactttgttgtatgctgtgcttcattcatggggctgtgaactactgattatattctccctattcctaatgtagaatgctttattctactgccatctttctgtctgc

SEQ ID NO: 9940 - DNA, 1902 bp, Artificial sequence
  DNA replication origin
tcagtcccgtgccttgtgcgctggtactcctcagcccttgggcagttgatcggaccgtggcgcagagcaggggtcattgctagtcggggaggctgccgctgtgcaggagcccagggtcgcgggggaggctcaggcatggcaggctgcaggtcccagccctgccccgcagggaggcagctgaggcccagcgagaagcagcgccagtgggctggccggcactgctggaggacccagcgcaccctctgcagctgctggcccgggtgctgagcccctcactgtccgggccggcggctccgagtgcggggccgcggagcccacgcccacccggaactcgtgcttgcccgcaagggcgcgcagccccagttcctgcccacacctctccctccacacctccccgcaagctgagggagccgggtccggcctcggccagcccagaaaggggctcccacagtgcagcggcgggctgaagggctcctcaagcgccgccagagtgggcacagaggccgaggagacgtcgggagcaggggagggctgccagcacgctgtcacctctcactgacacaccaacaccatgccacttcagccccctggggactttgaacaccgacaagtgtgggggggaggccagggtggcttggtgtgggtctgtgggcgcccctcagaagggacagtgtgggtgctgtgaatggcatgttaatggcaggggaatgcagacaggttcccatgtggaaaggggagggtacttggtgaaaccccactttcaagccagggatcacctgaagcctgggtgccaggctgcccattagggtggagcccacaaccgggagcgagaacttccttgatgccttttggccaatcaagtggtgttttttccaggcctgccgatgggcacccatgcaccaatcagcacacacttccttctgcccatagactaataagcatgcacttcttccactctgagcccatagaaatccaggactcagccagactcagacactcccaggatgacctgcttgtgaataggagctagccatttcactgagagctattctgttgctcaataaagctcctctctgccttgctcactctccagttgtccacataacttcatttttcctagatgcaggaaaacaagaactcaggacctgccgaacggtgggagctaaaggggctgtaacatgttcgtggctggctcaccaagctgtgggcttggtgagtggtggacagtgggagtgaagagtggtgatccttctgggggcccagaccttaggattcccgaagccagagctgctgtaacactatggtcttcctaccctctgccagagcccagcagcagcccccacacaacaggaagcagctccggggctgggccaacccaggagccatggaccgaagcagggcagtgggaccgaaagagctgtaaaacaaatgggctaaaacacgtgcccgcgaaacacatcccccaagtcgccacactgcaggcaacaagaaggagagaagagctgcagcccttctgggagcccaaacctaggtttccctgagccagggctgtgacatgctgtaacacccgtttgggggctctgcagttcctggcatctctgagctttcaggcatcaccactttccccttgtccaaacactgtgcccatagcagaagccgtttttggtacgtctggtccagctgcagcctcccacagagctggcgcctgtgggagcacctggagctgtctatcccactgcagcaaatggcatgcacagtggccagaccctggactttctcgctcacacacccctcactgctccgacctggttcctctttggcaggtgtgttatctcggccaagcacaagccaagtacagcctgccaggccaaatgggcaaaatgagcccagtgggtgtgagca

SEQ ID NO: 9941 - DNA, 1301 bp, Artificial sequence
  DNA replication origin
agcagcagcagcagctccagcggcggggggcagagcccggggctgcggcgctgctcaacctcggcggcggcagcggcggcgctggaaggtgctgctctcaagcccatgcccgtccatgcaggtctcgtgggctccggcgagggcggcggcgcgggcgccgtggcgggtctgggcccgtggctgcggcatgggccggggggcgcgcttcgcttcctcttcttccttcttcaggcccgtgtagcagatggggcgccaccaccgccgcagcaagcagcgcgcagccggcgcagccagtccgcggcggcagcagcggggcgcaggggcatcgtggcggccggaggcggcaggcagggaaaggggcggaagagaagacacaaagaccgtgagcgactgctgagacgagtcccgagcgcgccggcaccccggccccagccagcgtgggctcggcgggcgtggacctccaagaggctggcccagccctagcgaccacccaccggcggcccggatatctctgcgcggcagcccccgcggtcgatcaatctcagtcccgcactgccgtcccgccccgccctgtgcccgccaatccacgacgccataatcccccgccgtgtccctcccttcctccccattggttgtgaccgcacgtcagcccgactcagcctgccaatcgcaggacccagagggccctctcccccgcccgctcagtgtaattcgagttccctgtccatcgactccaagtcctctctcctgcgccgcatgctgcctcgcgctccctttccttccccctctacccccttccgcgatttactgtttcctcgcgcccaacagaaatgggcgaccgcaagtcttactctcgccggcgttacaaaggtaccggcctttgacctctccttgaattaatgtgatccgattcatcttccctccaagttttttttttaatttaattacccctccctgccctggccctgccagcttcagctccacctccttggaggaagcaggcgcttttacagagcgccgcgcggcaggtcccctttcagccaatcacatctgcggaaccgcgttccgagtcgtttgagggtgtctggtaaagcaagctcggggcggtgttggaaatctgaatgtcacccgcggtccggagcagataggatgggctgggaaggtacccgcgaactgccgccggaattcgctggcagctgtgcgaggctcaggtgttctagtttgacatttcccttcctgaaagcggcaaggagaggtctaagagtgggcaaacttcaacgttcggttacagtgtaattaat

SEQ ID NO: 9942 - DNA, 911 bp, Artificial sequence
  DNA replication origin
agcccacgagacctgcatggacgggcatgggcttgagagcagcaccttccagcgccgccgctgccgccgccgaggttgagcagcgccgcagccccgggctctgccccccgccgctggagctgctgctgctgctgctgttcagcctcgggctgctccacgcaggtaggacgggagcgcgcgaggggagccagccccggggcctagggctttgttcccaaatagccccaggtctcgaaggcgctcgccggggcggaagggcggcgtggcgcaacgggaaaggcctcccgagcccctgacacgcacctctgtcgggctccgggccacagtaacgcagccacccaccgggcggccgccgggcgcagagacgagccttctctccaccctccccgccttcggctcggaccgctgacaaatctcccctccgacagccgcttatcaaacatttagcgggcgggggccgcgcgcccgagacaaatgttccggatgctttattgctctctgcgctggtgtttactgaaagtcaggctcggatcaggtttccgccgtcgcagccgcctcggagggagacaaggagccttgtgctgcttttctggagttgggggtggcggcgaggcgaaggaagtacaccagatggaaagatttttaccagattttgcaaacctgggagttaatctcgaagtaacgtcaacttttttgagcagggatttctttcgttttggcaaaagctgcgtttgttcagcgatcagcctcccgggaaaagctcgtgttttgtgactagccgggtgtcttcgggctccgtgaggggttgacagataaccatgctgccttctggaggtcggcgcttccccagccttgaggcgtatgttccaagggaagtaagcctgcaaatgagccttctaccatgtgatacc

SEQ ID NO: 9943 - DNA, 1217 bp, Artificial sequence
  DNA replication origin
tgcgggggagggggaaggggacagacgcggaggggaaggggaagccccggtccgcagcaccaacgcgcgatcccctgcggagtggagctaacaattcattattgaagcaccaagggcgagggcagcaagagctataagtaaccagtcgtcgccgccgccgccgccgccgtcgcgcgcgcgctcccgctccctccgcttatctgcccccggcagccgccatgacgccgagaaagcaagcgagcgcaaccgtctccgtcgtagccgccgccgccaccgaggtcgccgtcgcctccgcctcccgcgcgacgtaagcgcctctgctcactccccttcccgacagagcgcgaggcgggcgggcgcgcgcacgccgaagcctttctgctcgcgcgcgggaggcgggagggactacgttgaagggtcgtgggcgtaggaaaaaagcgattggtgctggggcggggcggggggggcgagtgcgcgcacgcgcacgaatgggagtgcgcacggcggatgcgcagaggctgtcggactctgactgcgcggagaccgctggactctggtcgcggccttagtccgctgatcctcgcttgggtgcccgcccttagcggcccggcgttgaattccgggaagtgggagcttcaggctcgctccgtgcgggtatgggcgctaatgtcacttgggatggttgcgcaaggacatcgcggcggacactgacaaggaaccggggaggaacgggggtggggagagactgcgatgggactcgggaagccgggaagggccgcgctgaataagcctaaggggccgggtcgcaaggagtgtcgggtagcacaggcctcggctcagtcggagcgccaggcctcagggtccgggcgggggctgctgcgtcacaccaggcagcctgggaacgcaactgttgggcaaccgtggtggcctctcgccacctcttacgcttgggcgatctgcgattgacgcatcctgggagctgatgtcccgcacgggcggggcgccggaggaggagagaaaatagagacccggttgttgacagcctgtgatgccgcttgattcatgtgtgggtggcctggtttagaaatgtaccacccttcctttctaggttcctccccggagggcggggtgacgggtgcggcgccgaatcgcaacaaaaaacgctgctcgagggatgttagtaactgtctcagcttaagttgctgccttttagctta

SEQ ID NO: 9944 - DNA, 1183 bp, Artificial sequence
  DNA replication origin
cggaaatcctccctgttccggtttggaggcgtcctctatcagaaactacacaccagcagagatgcctgcccagtttatatttttctctgacattgattaaaacaaagaaaacagcccttgcgtgtgtgtgtatgtgtgtgtgagagagagagagatgggactgctaacacacacacatgctcttaaacttcctgcactccatttcttaatattcctgctccctaggtaataagcatttatttaagcgagcaagatgcaggttgatccttacagaaggacttgctattctgtagaaaaccaggaaaacagtagcacagtcaaagcggactggaagagaatgaaaaagctagcaaggaatgggctggaatggtcgtcatgcatcaacgaatctatacatggtctattctgagggggtaaaaaagaccggtatgaggtcgtttacacaagactgggtggcttgaaaatccaatctagctcagttgttagaaaagcaggactttgggcaggggcgtgggcatcccttgcagacctgtgcttgccaggcagacaaaggggtctttagaaaggtgatgaatgggcgcatggggctccgatgagaggcagaggctagagcttgagggtcgaggctctttgttccctcccgggccgtgggctaggaggataagcctgatcccagacaaagcggccaaggctcactaggactccgagggttcgggcccttggctgggaccctggagagcaggagtgggcggagcgagtgagaagagggtcgccagatactgccgaggtgtccatctccgagcctccctaaaccgtggccaggaaaaggagcgcacctcgagtccctgcggggaagcggagccgggacactccgcattgcacgggtgtcatttctcctgtggccctttcctggacgttgccggctggtgggcgcagccctaggcgttaaggaagaggaggcgggcactggcgcggcggttgagctagtcgggctgggcttttgcccgcatccttttcaagctgaagcagtttcctcccagcttgactgagaaggcgttggggcaggcgcttgagtaaaccaaacaggaagagaggcgcgcaccggggttatcccctgctgccagagcgccggcggcgagggggaaagaatgagtgagaagatagggggaaacctttattgcag

SEQ ID NO: 9945 - DNA, 828 bp, Artificial sequence
  DNA replication origin
ttagcttggcctggcgaggagcagcccggggaggaggggcgaggtcagatgtgtctgtagaaaaggaagattagaaagacttagcaacacttggggttgggactgaggggacaggtgggagggaaagaaggaagattgggacaagttgcattgggcacagagactaggaagggattgatgtgtaaaagaatgcctggacgtcaggcacctcagaccgtttgcctattttacgacaagaattatttagatcttgcaggatggaaaaattgaaagtgccgttttctggctatttggaactactgtcgagtttgtattggggtcaagcggcattgcagaagaaaataagatgcttagattttaggtcaggtgagagttgaagaggttttaagttcttaagaacacaggctaagggagaagaaggaggaatggaaggtggaagctttcccatagtgaaggaggcaagcccagagaaaagagtagagacacggagaaggggtgggggggttcttgctctctagaaaagcagagaaggggtaggggcacagagatacgaggtcggggcatggaaataagggatcagggtgcagagatataagaggttggggcatggaaataagggatcagggtgcagagatataagaggttggggcgtggaaataagggatcggggtgcagagatacgaggttggggtacttgcccctcctccagaaaagcgggacttgccgctaagggcaaaggactaaggcaggcatccctgcttggtctgatacctctgaaacgtgggttaataatcagagaggtgtccctgcaatgattaaacaccaacg

SEQ ID NO: 9946 - DNA, 1616 bp, Artificial sequence
  DNA replication origin
aagaaagaaaacaaagagaaacaaaacaccatagcctagaactcctgcccctccacattttcttctctctctcacaccacaaactttctctctgtgacacacacacacacacacacacagaggagagacgtatttgagggagggtctcaagtgcttgctttccttaacaacccagaccaggaggaagagataaagtgacttaggagatgcctaaagatgaagaacagcccgggatccgtaaacagactcagctcggtgtcttctcgcaccttctcagaatcaagtttccaaaatgagggtcatccgcctgccttggaatttgggttgggaagtggatggagttcctggacacatgctctaggccctgaccagtctggccactgctcactaggaattctgttgggagggtgtacaacagattttccaactggtctacagcgagcatcggtagtttccctatggagaaaatgattttctttctgggaatccccctatagcctgaaggctttgcctcatttcccatagctcctctccggtgtaccccttcggttcgcactttcctaccttcttcccagtccactggcttctccttctttatcttcctcagtgtcccttctcacaacctccctgctaccacaccagattctgaaggggaggagttgtctggaaagaccagagctgggtgctggggatctggagcagctcgggacccgcgctgcagggagctgggatgggagaggtgagggagaggaggatgggactctgggagaaagagagggggctgggctggcgctggggatggaagaggcgaggtgaacgcactcaagcggttacctgcagacagggagagacagtggcaaatacctgccttcaattaaacgcatatcaatttgtgtgtggggtcagtactgcacatcatcaagcctcttgggtataaaaccttcctactggaactctccagccccgcccccaccaccccacgcgcggctccctgctttctcttgctttggggtgaggctggggatgtgggtggctccagagttccctgcccgcagtttaggggcgaagtgatcggtgtgtgcgcgctgggcactctgcgggttaaaaaggtttagcagaaagggatgcagatggaggcgggaagccaggctaagaaagggataccgacctccctcctcgggtcggaggtgtgaactgggaagcactgcgcagacctgagcgaggtggcctgaatccaggggccgggcaagggggtggtgtgaatagaaatagcacatttcccaggctttcagccccggtactctgccatccttccagttccatgcactcagccaggtctccaggctggagcaagggctgggggtcaatgggtccttccttctctcgggaaacgttcttctggcgcgaagctgggcggagggagagtcggacattttcctctgcttctctcagggcagctggcgtggccacctcgcaaggctgcttctagggacacgagactcgggagggtcagagactttcaggccgggccttcactcccttccccggggcacttgggcaagagttccagctcttggctacctctggcccgcgcgtgagttcagacacccagcaca

SEQ ID NO: 9947 - DNA, 1464 bp, Artificial sequence
  DNA replication origin
gcaatcgctggggactcgccagggctccacttcccaagctccgcgccccctgcgcccaaagaggcagggcggagcagaggccgccggcgtggaggaggcgagcgcggggctggcccgggagccgcccccggggagggactgagacctgccccaggagtcgagggcgagcggcggacccggctgggcccggcgcacgccgaggagagggagcccccgccaccgccgctgcctccgcgtgctcagcctgtccccgcccagggagccggagcctccaactaactccgcccgccgctccgccgcccgcaggctccggcttccgtcccggacagagcccgtggtcgcgcaggttggtgttgttgccgctgctgccgccactgcgaggcggtcagggcaagggtgagggtgggggcgcggaagggggcctgggctcgggatcctgctgccaccaattcctggtgccccaggaggttgttgctttttctcccgggctgcccgggtcgggggtggggggatggggcggggatccagcgatgcggccagggaggattttggggactgagctattctcgcatttcccaaacctctctcacgacccttcatcaccattattaagtccctggccagtttgtgaggggtcgtcctcccctccggtccttctcacctccgcacttctccttgtgccctctccctagggggtacaatttgttcattcgccttttctgcccccaacttggagaactctccgtgacgcctagaaagcctcctcggttctccgcccgcccttcagtctagtttggggaagtagaggccgccgcggagtagcaacctggggtgtggagtgggggcgagtgccgggaagcagtggaaattccttcccctctttctttcccgtccttgcccagctttgctctcttcctgccgttttgccagcctccgaatgtaatacgcgggcgaagggcgatctccaaggcagaatgggaagtatccaccacttgggatactagttaagtctaggttcagtcaccttcccagctctgtggccttgggacccgccccatcggaacctgtatgttgtcatctgcaaaatatgcgtcagctctgcctgccgctgagggtagttgtggggctcccttgggatgacttagggtattacgtgattttgagcacggtctcttgtctcgtgcagctgcctgatggcaggtcctgtgttctgatcgtctgagttcaggtcctttggctgagatgtgattatctctctgggtgatttggtcagtagctttgcggggctaaaaggcatgtgttcctggagctggtcattggggttcagagttgaaatcgtgtcgtccccaccaatccctgtgtacaaagctatggaccttacatcctgtgcctttgtggtcatagaaattcaagtagaaggaagatcttattggactttgtttgcttcagatgttttacattctt

SEQ ID NO: 9948 - DNA, 992 bp, Artificial sequence
  DNA replication origin
gtaaactgggtggggcccgcgcggggtgcggggagcttgcggttccctggcacaggggtggggccgcagacgccgtgagtgtgcagcgcgtgtgagtgtgcgggggcgtgcgcccccgtgtgcgcgcgtcgtgcgctcgctggggaggtgcggggactcggcgacccggagcgcctctcccgcggtgccgcggtgcggaagtcggggcgcgttggcgcgcacgctcgctcgctccctcccttggccgctgttcccgcaccgcggggcagcgggcctggaggcccctttgagaagtagctttccccggccggcggcacctttggctgcgtgcccggccgcgctcagggtgcgactgcccgggtcagatagcacctcagggcgagccccggcggtctgatctcgccgaccctcctcgtcctggttgcaacccgcgtgcgaggccgcccgcgccctccgagtgtctgccggtgcagtgggggtggactggccggctgtggccgtgtgtgcgcgtgtggattggggcccggtccgagccagaagcttaagcggcagatgtcgggcattgccaccctcgccccacctgtcgcgggtggactttggggcaggtgggaagcggaggagaggggtttcgaggcgggtggcagtcagacctccagcaacgcggccccattgtgaagctgccaaactctctctagtggtggaatctgcaggtctccgccagaaaggagatgggaacgcgaagggaatgatggccccgtccttttccccttgctagtgttccacacgcttagggactccctgcctctccttccacctcagttttcaacccagtgggttactgatttgggtggaaccaagatttccgtgtgtgtgtgtgtgtgtgtgtgtgtttgtgtgtgtgtggtgcacaggtaaagctggagctgggaactttttatttgagcaggaagaatggaggcattttacagtgtgcttgccgctcctagctgaaa

SEQ ID NO: 9949 - DNA, 1140 bp, Artificial sequence
  DNA replication origin
tacatgtactctgattatgccttcagctccagccacctctctaagaggaaattgttgggcaggtggggaagagctagttgcggaactaaactgtaagcccgaccggatgtgaggaggggaggtgatagaaagattatagggtggaggagcggaggctgaggaagaattgggacttagctcagcctggtgatgagcagcctggggaggaggggaaaggtcagatgggtctgtagaaaaggaagactggaaagactcagcaacgcttggggttgggactgaggggacaggcgggagggaaaggaggaggatctgggaggaatcgcattgggaacagaggctagggagggaacgaaatgtgaaaaatgcctggatgtaaggtacctcagaccatttgcccatttttcgacaaaaattatttaggtcttataggatggagaaatcgaaagtgccgttttctggccatttagagccattgtcaagtttgtattggggccaagcggtgttgcagaagaaaataaggcatttaggttttaggtcaggtgtgagttgaagaggttttaagtttttgagaacacaggccaagggagtagaaggaggaatggagggtggaaggttgcccatagtgaaggaagcaagcctagagaaaggagagagtagagaaatggagggaaggggttgggggggttcttaccttccagaaaagtggaaaaaggggttggggtgcagagataagaggttggggcatggaaataagggattggggcacagagatataagaggttggggcacagaaataagggattagggtgcagagatatgaggttggggcacggaaataagggattggggcacacagataagaggtcggggtacggaaataagggattggggcacagagataagaggttggggcatggaaataagggattggggcacagagataagaggttggggcacagaaataagggattgggagttcttgccctcgaaaagagggacttgccactaagggtgaaggagaaggggttgaggggtacttgcccctctcccagaaaagtgggacttgccactaacggtgaaggagaaggggttgaggggtacttgcccctctcccagaaaagcagagaaggggtagagata

SEQ ID NO: 9950 - DNA, 1001 bp, Artificial sequence
  DNA replication origin
agagagctcggggttgggggtaaggttatagattaacagcatcccaaggcagaagaatttttcttagtacagaacaaaatggagtctcctatgtctacttctttctacacagacacagcaacaatctgatttctctatctttttcccacatttcccccttttctattagacaaaactgccatcgtcatcatggcccgttctcaatgagctgttgggtacacctcccacacggggtggcggctgggcagagaggctcctcacttcccagaaggggcggccgggcagaggcgccccccacctcccgtacggggaggcggccgggtggaggcgccccctacctccctcccagacggggcggctggctgggcgggggctgcccaccacctcccggacggggcggctgccgggcggaggggctcctcacttctcagacggggcggccgggcagagatgctccttacctcccagacggggtcgcggccgggcagaggtgctcctcacatcccagacggggtggcggggcagaggcactccccacatctcagacgatgggcggccgggcagagacgctcctcactcctagacggggttgcggccgggcagaggctgcaatctcggcactttgggaggtcaaggcaggcggctgggaggtggaggttgtagcgagcctagatcacgccactgcagtccagcctgggcaacattgagcactgagtgaacgagactccgtctgcaatcccggcacctcaggaggccgaggctgtcagatcacttgcagttaggagctggagaccagcccagccaacacagcgaaaccctgtctccaccaaaaaaatacgaaaaccagtcaggcgtggcggcgtgcacctgcaatcccacgcactcggcaggctgaggcaggagaatcaggcaggtaggttgcagtgagcccagatggcggcagtacagtccagcttcggctcagcatgagagggagaccgtggagagagagggagagggag

SEQ ID NO: 9951 - DNA, 1283 bp, Artificial sequence
  DNA replication origin
actgaggggacaggcgggagggaaagaaggaagatttgggatgagttgcactgggcacagagactaggaagggacttatgtgtaaaagaatgcctggacgtcaggcacctcagaccgtttgcctattttacaacaagaactctttagttcttgcaggatggaaaaattcaaagtgccattttctgggtatttggaagtacagtcgagtttgtattggggtcaagcggcattgcagaagaaaataaggcatttaggttttaggtcaggtgtgagttgaagaggttttaagttttggagaacacaggccaagggagtaggaggaatggagggtggaaggttgcccatagtgaaggaagcaagcctagagaaaagagtgagtagagaaacggagggaaagggttcaggggttcttaccttccagaaaagtgggaaaaggggttggggtgcggaaataagggatggggtgcagaaataaggggtcgggggtggaaataagggattggggctcagagatataagaggttggggcgcggaaataagggattggggcgcagagatatgaggttggggtatttgcccctcctctagaaaagcgggacttgctgctaagagtgaagaaggggaccggcgccggagttttgggtccacggataaaacgtgtctcctttatctctcccagaaaatgaaaggaattgaaattaagagaagggagagattgaagaatggaaaggagaaagtggttgagggacagtgagagaggttggagaagagagtaagaagaggctgcttacctgatttaaaattggtgagatgttccttgggctggttggtctgaggacctgaggtcgtaggtggatctttctcacagagcaaagaacaggaggacaggggattgatctcccaagggaggtcccctgatccgagtcacagcaccaaatttcatgcgcgtccgtgtgaagagaccaccaaacgggctttgtatgagcaacatgactttatttcacctgggtgcaggcgggctgagtcggaaaagagagtcagcgatgggagataaggatggggccgttttgtaggatttgggtaggtaaaggaaaattacagtcaaagggggtttgttctctggtgggcaggagtgggggttgcaaggtgctcagtggggttgctttttgagccaagatgagccaggaaaaggactttcacaaggtaatgtcatcacttaaggcaaggaccggccatttacacttcttttgtggtggaatgtcatcagttaaggtggggcaggg

SEQ ID NO: 9952 - DNA, 951 bp, Artificial sequence
  DNA replication origin
tctctgcgcgcaccgggaaaagagaagggaaaattaaaattaaaaaaaaaaaaaaaaaaaaaaaaactttgggggatgtttggcgggttctctccgcagtccctgcggacccacgctccaggaaggagctcccggctgcgcacactgggggctccccgcgccgggaaccggatgccagccagatgccggggctgggaagcagagaagtccctactccccggctcccgcccttttccgagtctcccggcgccccgcagaagcagttggtctaggcagccccggggactcccaggggtacctggcctttccgcggcggcttaacaaagaggggcgcgacgcgagcgcttcccgccgacgcctcaagccatcagcgcccgggcgacgcaggctccgagggtgcgcgccgccagcggttggtgcgcgccgatccccgccgccgctccttccgcagggccccgaggcccgggtagccctggctctccgcctgttatcggcttacctggggttgctgctgttccagtagacagcgtagcggtcggcgacggccttggagcccgggtcctggctgaacacacacatccagagcaccagaaacaccagcgtcaacatctccacgtgcaacatcacgcctggccagcggcggagcccccgacgcgccactccggggagagagcggggatccggagggagggaggcaggcaaagggacagagagagagcgggcgccaaataaatatgaataaataaaaatgaaagtgggcgagaaaggaaagaggcgcccaccaagctggggaggggtaggagagcgagaagaaaagaaggcggtgggatggggggtgataaagacaaactcgcacccccactggagggttcaggaggaaaaaggaatcacaagatggagagaagcgtgcgtgtgtgtggtggcggcggcgagggcgggggaagaggtgcc

SEQ ID NO: 9953 - DNA, 1563 bp, Artificial sequence
  DNA replication origin
gacagagagagagcgggcgccaaataaatatgaataaataaaaatgaaagtgggcgagaaaggaaagaggcgcccaccaagctggggaggggtaggagagcgagaagaaaagaaggcggtgggatggggggtgataaagacaaactcgcacccccactggagggttcaggaggaaaaaggaatcacaagatggagagaagcgtgcgtgtgtgtggtggcggcggcgagggcgggggaagaggtgccaagctgtgtctcgggcggcggcggcaggccggtcaccccgggagagggaggtgcgcgccgggccgggcggctgcagcgcgggtcggggcaggcggcggcgcgcgctgcacagtcaccgggagttgcgcgccgcagccgcggggagacatacaccggcccgccgggcccggctcagcgtcggcgcagcaggctacgcacggctccgccaccgcccggggccctcgcactgcgccacgcttcgctccaagttactttggcggccggtgggaaactgcaggagaagggcgacgtgctgatagagggcttcgcgcttgtggtcccgggagtctgagaacccctttcctcagcctcctctgtgccttagcggggcgacccccagaaatctcagaggagtcgtaagtgctgcggtaccgggcggtgcgccgagaagggtggggatccggagccgcaacccagccttgtcggtgtcctggaactggttaagcggcagctgcgccggctttcgaagcggtcttgcctcgaaaacctcaaagaaaagtttggctcttcgcgtcttccggcaggtcccccagcagagtcggaacgcggcggtagcggaagagggcaccccgggggctggccgagcctcggggatttctcgcgcgtgctttccttggctgggtgtgggtgcaccacagtgaatgaagagcagaggttaagaccagccggcctggcagagctgggattcctaaacctgcaagacgacgccaacccaactgttcggctggagagcgggaggggaaacaatcactttcaaatggatccctccaactcctggatgggccgatgtcagtctccgatcgccttccgagagggagactgagcccccacacgcggtgccaagagcccggggtgagctctcagaagtgtccctgcgactccagcgggtccaagcctagcaacttgtagagatgcatcaatcagtttgaaatgggaaaagaggaaaaaaaaaaagcgcacgagcgagtggcacctccccgatgactacatcagaaaaccttcccgatcctcccgcagctgctcctctttccctccttaggcacagcagcaacagaggtgaaaaccacaaaccgaatcctaaaacccctacccaggcgggaaaataaataaacttgagtgcagcagcagcagcacgagcagcccaggaggaattgaaacgactggcaagaagtggaaagggttttgtaaaagtcagttttgcaaaagagggggaaaaaaagagagcgagagaaaaaatgctttatgggaaaaaaaatctcctcgggcacgccccctcgt

SEQ ID NO: 9954 - DNA, 1543 bp, Artificial sequence
  DNA replication origin
gtcgcccttcctgcgcacacacacgcacacacgggcacacacgcgacggtggggggtgggcgtcagctgcgggccgccggagtgcccgacgggggctacatgctttgcccagggaagccgggagaacgatgggcgcgagctttggggacgcgagggagggagcgagcgagcctgccggctaggcgaccagtccgggcccggccagccggctcagtcagtcagcggagcggccggggaaaggccgggtcccgctcggaccattttaactgcggatccgccgccggcgcgcgcacccgcgactctgctcggagccgcaggagcgcgcggcccgttccggcagggggcggagccagttgcggtggcgcgctcgtggcggggacgccggcacccggctgctcacccgggacggccgtcacaccggcactacgggaagaagccggccggctagggcacggagctctgggcttgcggggtgcggcgcacgcccctccctcccaccgcctaaggtttttccgaagctgctgggcgtgcgccgcgtttctgaggcgggaggagacacttccgagccagctgtgtgacatccgtttacacagccgcgctgacgtctcgaggtgtaagttcaagagctgccattggccgggagccgctgggctcttcccctcaccttccacccctgtcaccacccctgactcggaaaccgaggccacttcgaagccgcgaggcgggttccgccggaagggccagtgtgggcgctgaccgcgcttcgggcagagtggcagatgcggcccctgggtgatgcgcaccgaagtcatgtgaggggttgattggttgtgcggcaccactgtttacccacttgtgttttcttaattgttgcgtactactgcctttccacaactttatttcagaatgaaagcatatatcaaattacctgtgcacagcagaaagataacagcttccccacccagtgagccattcaacacccaggctacaaactgtagatcactttattgtctacaccctcggaatcctgtctagccgtctgttgtatattttaaacatgacggtgcagtgcctgctatatgacaaacgttggtgatccagatgagaaagaggaaacagctatgcaggcagtcctttagaaggtttgactatatcgaggctaaagagctagggcagctgctagagcggtacctggtgcggagaggttagctttcacaagcgaaaaattagaggaggcaaataccatgggaatgagccactctagtgagagaaataagaggagaaggtggaatggagagtgctttaggaaggatactttcttcattgtgattacagagaatgaggaaaggtagataaaggacggatacagagaggtggatgtttctagcaggaaggtgaaagagttcctttctgttggtttctgttttgcttcagatagagcttggttacctgctgaagggtggaagagaagtggcaggtgtttaaaaaaaaatctgctaaggataacttgagagagctgactgaggaagaagtattgcaatat

SEQ ID NO: 9955 - DNA, 880 bp, Artificial sequence
  DNA replication origin
gggaagtgaggagcgtctccgcccggcagccaccccgtccgggagggagatgggggggtcagccccccgcctggccagccgccccgtccaggagggaggtggggggatcagcccccccccccggccagccgccccctccgggaggtgaggggcgcctctgcccagccgcccctactgggaagtgaggatcccctctgcccggccagccgccccgtccgggagggaggtgggggggtcagaccccgcccggccagccaccccgtctgagaggtgaggggcgcctctgcccggccgcccctactgggaagtgaagagcccctctgcccggccagccgccccgtccaggagggaggtgggggggtcagccccctgcccggccagccaccccatccgggaggtgagggtcgcctctgcccggccgcccctactgggaagtgaggagcccctctgcccggccaccaccccgtctgggaggtgtacccaacagctcattgagaacgggccatgatgacaatggcagttttgtggaatagaaaggggggaaaggtggggaaaagattgagaaatcggatggttgccgtgtctgtgtagaaagaggtagacatgggagacttttcattttgttctgtactaagaaaaattcttctgccttgggatcctgttgatctgtgaccttacccccaaccctgtgctctctgaaacatgtgctgtgtccactcagggttaaatggattaagggcggtgcaagatgtgctttgttaaacagacgcttgaaggcagcatgctcattaagagtcatcaccactccctaatctcaagtacccagggacacaaacgctgcggaaggccgcagggtcctctgcctaggaaaaccagagac

SEQ ID NO: 9956 - DNA, 1237 bp, Artificial sequence
  DNA replication origin
gcccgttctcaatgagctgttgggtacacctcccagacggggtggtggccgggcagaggggctcctcacttcccagtaggggcggccgggcagaggcgaccctcacctcccggatggggtggctggccgggcagggggctgacccccccacctccctcctggacggggcggctggccgggcagaggggctcttcacttcccagtaggggcggccgggcagaggcgcccctcacctctcagacggggtggctggccgggcggggtctgacccccccacctccctcccggacggggcggctggccgggcagaggggatcctcacttcccagtaggggcggctgggcagaggcgcccctcacctcccggagggggcggctggccgggggggggggctgatccccccacctccctcctggacggggcggctggccaggcggggggctgacccccccatctccctcccggacggggtggctgccgggcggagacgctcctcacttcccagacggggtggctgccgggcggaggggctcctcacttctcagacagggcggttgccaggcagagggtctcctcacttctcagacagggcggctgggcagagacgctcctcacatcccggacggggcgacagggcagaggcgctccccacatctcagacgatgggcggccgggcagagacgctcctcacttcctagatgggatggcggccgggaagaggcgctcctcacttcctagatgggatggcggctgggcagagatgctcctcactttcctgactgggcagccaggcagaggggctcctcacatcccagacgatgggtggccaggcagagacgctcctcacttcccagacagggtggcagccgggcagaggctgcaatctcggcactttgggaggccaaggcaggctgctgggaggtggatgttgtagcgagccgagatcatgccactgcactccagcctgggcaccattgagcactgagtgaaggagactccgtctgcaatcccggcacctcgggaggccgaggctggcggatcactcgcggttaggagctggagaccagcccggccaacacagcgaaatcccgtctccacccaaaaaatacgaaaaccagtcagtcgtggcggcgcgtgcctgcaatcgcaggcactccgcaggctgaggcaggagaatcaggcagggaggttgcagtgagccgagatggcagcagtacagtccagcttcagctcggca

SEQ ID NO: 9957 - DNA, 1330 bp, Artificial sequence
  DNA replication origin
ttgcccatttttcgacaaaaattatttaggtcttgtaggatggagaaatcgaaagtgccattttctggccatttagagccattgtcaagtttgtattggggccaagcagtgttgcagaagaaaataaggcatttaggttttaggtcaggtgtgagttgaagaggttttaagtttttgagaacacacactaagggagaagagggaggaaggaagggtggaaggttgcccatagtgaaggaggcaagcccaggaaaaagagagagtagagacatgcagagaaggggttgggggtttcttgccctccagaaaagtggagaaggggtagagacatggagagaaggggtggggtggggggttcttgccctccagaaaagtggagaaggggtagggacgcagagagcaggggtcagggggttcttgccctccagaaaagcagagaaggggtagagacacggagagaaggggtggggtggggggttcttgccctccagaaaagcagacgaggggtagagacacggagagaaggggtcagggggttcttgccctccagaaaagcgggcaaggggtagacacacagagagaaggggtcagggggtttttgctctccagaaaagtggacaaggggtagagacacggagagaaggggttggggggttcttgccttccagaaaagcagagaaggggtacagacatggagagaaggggtcagggggttcttgcccccagaaaagcggtacttgccactaagggtgaaggaccaagacaggcgtccctgcatggtcagacacctctgaaacatgagtgaataatcaggcaggcatccctgcatgattaaacaccaagggaagactgtcttcctgagtctgtgaccagtgccagagttttgggtctgtggataaaacacatctcctttgtctctaccagaaaaggaaaggaactgaaattaagagaagggagagattgaagtgtggcaccaagattgaaaggagaaagaggttgagggatagtgagagaggttggagaagagagtaaaaatgttactgggggtccttgctcctagagctcctaagatggtggtgggcaacttctaaaatggcagtgggccacttccaagatggtggcaagcctcgtgttctttcacctggggttcttggcctcacggattccaaggaatggaatcttgggccatgtggtgagtgttgtggctctattagaagttgtgggtcacggaagagaaccgtggaacccagtgactagtgttcagctcgattaggatgaacccaggcactcagtcgtgcaggaacaatgacaagcctttagcctgatcggg

SEQ ID NO: 9958 - DNA, 857 bp, Artificial sequence
  DNA replication origin
ctctgcctggcaaccgccccgtctgagaagtgaggagcccctccgcccggcagccaccccgtctgggaagtgaggagcgtctccgcccagcagccaccccatccgggagggaggtgggggtcagcccccgccaggccagccgccccgtccgggagggaggtggggtggtcagccccccgcccggccagccgccccatctgggaggtaaggggcgcctctgcccagccacccctactgggaagtgaggagcccctctgcccggccagctgccccgtccgggagggaggtggggggtcagccccccgcccggccagccaccccgtccgggaggtgaggggcgcctctgccctgccgcccctactgggaagtgaggagcccctctgcctggccaccaccccgtctgggaggtgtacccaacagctcattgagaacgggccatgatgacaatggcggttttgtagaatagaaagggggtaaaggtggggaaaagattgagaaatcggatgattgccgtgtctgtgtaggaagaagtagacatgggagacttttcattttgttctgtactagaaaaattcttctgccttgggatcctgtagatctgtgaccttacccccaaccctgtgctctctgaaacatgtgctgtgtccactcagggttaaatggattaagggcggtgcaagatgtgctttgttaaacagatgcttgaaggcagcatgctcgttaagagtcatcaccactccctaacctcaagtacccagggacacaaacactgcggaaggccgcagggtcctctgcctaggaaaaccagagacctttgttcacttgtttatctgttgaccttccctccactattgtcc

SEQ ID NO: 9959 - DNA, 1321 bp, Artificial sequence
  DNA replication origin
cagaagaatttttctagtacagaacaaaatgaaaagtctcccatgtctacttcttcctacacagacacggcaatcatccgatttctcaatcttttccccacctttaccccctttctattctacaaaaccgccattgtcatcatggcccgttctcaatgagctgttgggtacacctcccagacggggtggtggccaggcagaggggctcctcacttcccagtaggggcggcagggcagaggcgcccctcacctcccggacggggtggctggccgggcggggggctgaccccccacctccctcccggacggggcagctggccgggcagaggggctcctcacttcccagtaggggtggctgggcagaggcgccccttacctcccagatggggcggctggccgggcggggggctgaccaccccacctccctcccggacggggcggctggcctggcgggggctgacccccacctccctcccggatggggtggctgctgggcggagacgctcctcacttcccagacggggtggctgccgggcggaggggctcctcacttctcagacggggcggttgccaggcagagggtctcctcacttctcagacagggcggccgggcagagacactcctcacctcccagacggggtcgcggccaggcagaggcgctcctcacatcccagacggggcggcggggcagagacgcttcccacatctccgacgatgggcggccgggcagagacgctcctcacttcctagatgggatggcggccgggaagaggcgctcctcacttcctagatgggatggcggccgggcagagacgctcctcactttccagactgggcagccaggcagaggggctcctcacctcccagacgatgggcggccaagcagagaggctcctcacttcccagacggggtggcggccgggcagaggctgcaatctcagcactttgggaggccaaggcaggcggctgggaggtggaggttgtggcgagctgagatcacgccactgcactctagcctgggcaccattgagcactgagtgaacgagactctgtctgcaatcccggcacctcgggaggccgaggctggcggatcactcgcggttaggagctagagaccagcccggccaacacagcgaaaccccgtctccaccaaaaaaatacgaaaaccagtcaggcgtggccgcgcgcgcctgcaatcgcaggcactcgccaggctgaggcaggagaatcaggcagggaggatgcagtgagccgagatggcagcagtacagtccagcttcggctcggcatcagagggagactgtggaaagagagggagag

SEQ ID NO: 9960 - DNA, 813 bp, Artificial sequence
  DNA replication origin
aatcttggcactttgggaggccaaggcaggcggctgggaggtgtaggttgtagtgagccgagatcacgccactgcactccagcctgggcaccattgagcactgagtgaacgagactccgtctgcaatcccggcacctcgggaggtcgaggttggcggatcactcgcggttaggggctggagaccggcccggccaacacagcgaaaccccatctccaccaaaaccagtcaggtgtggcggcgcgagcctgcaatcgcaggcactgggcaggctgaggcaggagaatcaggcagggaggttgcagtgagccgagatggcagcagtacagtccagctgcggctccgcatgagagggagaccgtggggagagggagggggagggggagggggagggggagggggagggggagggggagggggagggacccaataaatcttaagcatatttgaattatttaaataaaggaagtgttttatttcagtcttctctgtgaactctgtttttgcataaaggatatttaccatccagttcactaggaattcccaagtcactttcccaaattatctacttaggaatacaactccctttcttccctataaaccagtgctttttttctccttcccttttcccattcctttccttccttccgtctttccttttcctttctttgctgttcctctatttctatttgccactttgttcttctcaaaattccacttaaaatctctgaaatccagtttagaaatgttcactgttcttttataaaatatctctgtatgagataacccatagtgcctgtcaggtagtaagtgcc

SEQ ID NO: 9961 - DNA, 1249 bp, Artificial sequence
  DNA replication origin
ggacggggcggctggccgggcagaggggctcctcacttcccagtaggggcggccgggcagaggcgcccctcacctcccagacggggcggctggccgggcggagggctcacccccccacctccctcccggacggggcggctggccaggcggggggctgacccccccacctccctcccggacggggcggctggccgggcggggggccgacccccccacctccctcccggacggggcggctggccgggcagaggggctcctcacttcccagtaggggcggccaggcagaggcgcccctcacctcccagacggggcggctggccgggcggagggctcacccccccacctccctcccggacggggcggctggccaggcggggggctgacccccccacctccctcccggacggggcggctggccgggcggggggctgacccccccccacctccctcccggacggggtggctgccgggcggagacgctcctcacttcccagatggggtggctgccgggcggagaggctcctcacttctcagacggggcagctgccgggcggaggggctcctcacttctcagacggggtggttgcccggcagagggtctcctcacttctcagacggggcggccgggcagagatgctcctcacctcccagacggggtctcggccgggcagaggcgctcctcacatcccagatggggcggcggggcagaggcgctccccacatctcagaggatgggcggccgggcagagatgctcctcacttcctagatgtgatggcggctgggaagaggcgctcctcacttcctagatgggatggcggccgggcggagacgctcctcactttccagactgggcagccaggcagaggggctcctcacatcccagacgatgggtggccaggcagagacgctcctcacttcccagacggggtggcagccgggcagaggctgcaatcttggcactttgggaggccaaggcaggcggctgggaggtgtaggttgtagtgagccgagatcacgccactgcactccagcctgggcaccattgagcactgagtgaacgagactccgtctgcaatcccggcacctcgggaggtcgaggttggcggatcactcgcggttaggggctggagaccggcccggccaacacagcgaaaccccatctccaccaaaaccagtcaggtgtggcggcgcgagcctgcaatcgcaggcactgggcaggctgaggcaggagaatcaggcagggaggtt

SEQ ID NO: 9962 - DNA, 824 bp, Artificial sequence
  DNA replication origin
tccgggagggaggtggggggggtcagctcccccacccggccagccgccccgtccgggaggtgaggggcgcctctgcccggccgcccctactgggaagtgaggagcccctctgcccggccagccgccccgtccgggagggaggtgggggtgtcagccccccgcctggccagccgccccgtccgggagggaggtggggggagtcagcccccccgcccggccagccgccccgtccgggaggtgaggggcgcctctgcccggccgcccctactgggaagtgaggagcccctctgcccggccagccgccccgtccgggagggaggttggggggtcagccccccgcccggccagccgccccgtccgggagggaggtggggggggggtcagcccccctgcccggccagccgccccgtccgggaggtgaggggcgcctctgcccggccacccctactgggaggtgaggagcccctctgcccggccaccaccccgtctgggaggtgtgcccaacagctcattgagaacgggccaggatgacaatggcggctttgtggaatagaaaggcgggaaaggtggggaaaagattgagaaatcggatggttgccgtgtctgtgtagaaagaagtagacatgggagacttttcattttgttctgcactaagaaaaattcctctctcttgggatcctgttgatctgtgaccttacccccaaccctgtgctctctgaaacatgtgctgtgtccactcaggattaaatggattaagggcggtgcaaaaaaaaaaaaaaaaaaagaaagaaagaaagaaagaaaaaaagaaaatatgtaaataa

SEQ ID NO: 9963 - DNA, 853 bp, Artificial sequence
  DNA replication origin
ctatgggggaggggcttgcgtactctcctccttcgcctccaccgcggcgcaaggggcgggactcaccgccaccgcctctgcttccgccgccgccaccgccgccgccgccgccacagccgccagccgcttcgcgttcggcgggggaggagttggaggcggagaagaaggcggtggtggcgggtggaggttcgagcgctgttctcgctccggagccgctgcacatttcggtgagggtttttttttttttttttcagtctggcttgttccgctgtcgggagtgtgggggtcggggcgaggaaattgctgcgttcagctcctcagtttctctgtctctagcttcggaaggagcggggcttgtccctggcctgctgcgccggccatggtgggtggggttgatggctgtgggaggccttcttcgcctcctgggccctgtccagcccggacccgggccgcgctcctatccgggacggtcgcgcccgccgccccccgacagatgacattggttggtatcggggtcttcgctgccgctctttactgctgcctcttctgctgtccttggtgacttggccaaggagcccgctggctttcccctacactcgccactgtacaagagtttgccccccaaccaacacctcacacccaccttctgcggtttcccgtcaccccgcgtagagcggaaccatcttacgccacaggcctgcagcacccctcccccgaggagccttctgttgccgtcgttttgctgggcgtctgcattttccccgattgtcagtgaggctcggcacgcagacaccccgctcgagccgcagcagtcgctctactcccgggatcagcacctttccgccagggctgc

SEQ ID NO: 9964 - DNA, 1505 bp, Artificial sequence
  DNA replication origin
gggccgatgtgcaccccggactccggggctcacggattgatgagtttcctcagagctagcgtccgctcgccagactctcccgccccccgccgcccctaccttccccctcccggacccaggctccgcggggaggcgcagggggcgggcggcggcaacgcggaaagaaggaaaaggagagcagggaggaaaggaccgtccccggagagaagcccgctccagctgcagccgctagccccctccctctttcccgccccacaaacgcggagatggcggcggaagcggcgaaaggaagcgccggttctccagcgccacttggcgctccagcaccgcccgccacgagcaggaggagacagcggcggcgcagcagccgctgggtcaataggcgcccgcagcgcctgagccgagcgggcggctggccccgccccctcccgacgctccgagatgagggggcgggccccacggcgcccaatcacagcgcgtcgcccggcggacccgccccgcgcctgcctcccagtgtcccggcgataggaagacctcacagggctcttgtgacctggcaggcagctttctgggagttgaggccttcgggggcgttcaggcgccagcacccccacgtccaacaggggttgagcttacaccccacttccctttgttgctcaggtttcctatcctaggacactcgggcctggcgtgcctggaagagtacttggtgacgggctggaggaaatgcaagagaagagggcttgcacattctcttcgggctcactatttcctcctttggtgacagcctgttaaaacctgggggaaaggagactgacaaagggccgtccaggcacatgtagaaacatctgactacgaaatccatgagtgtaatctgagaagtgatgcttctgccagttattgatttattgcctctcagctccaaattcgccctttttgactgcactgtaaaaacggatctgagccttttaaacagtttttcgtttgccttctgggactgaagctttatcagcagagggcgctgaagagacattacagaaaaaaaggattttgcttcctgatttctgtgtattgataagcttttgcagcatacctggctttctccactgccaaggtcctatagtgctcagtaactagcaatttcctctcacatgcccaactctaggagctttgtagaggaggtgagacactaccccatgaataacttccctggcaccctagaggcatttgcagcaagttgcagagggcacatcttccacaagctttgcagacgtagcccaatggtgacttctctgccattcagtgagccaggtcatgccctctccaaaaacgtctagatcttagccctgggaggaattggggaggttcttcattgggcactctgtctctcaacccaagagttagttataaggttagctccttatagctgctgttgctatattctttaaagttctcttcttgctagtgaatccttcattactctaatcctctattatagttaacaa

SEQ ID NO: 9965 - DNA, 847 bp, Artificial sequence
  DNA replication origin
ggagtccggggtgcacatcggcccagccgcagcgtcggcggcggcggcggcagcagcacgaaggggctcagtcggggtaggcgggggcggtgccggtgccgcgggggcgggcccgaccgtcccgcccagaagttgtagggcttggctcctcgcgatcttgttcctttcccctccgcttctctgacctagctgcgcggccccggcccgggagctgccgaacccgcgcctcccctgggtgaggaggacacgcctgccctcgtcgagaaaacttttcctgccgactcagttggggcggcggtggcaggaagtgcgggcagcgacctctcctccgcctgccccgcgcgccctgccggaggtcggcgctgagcttgcgatcaagtttgtgggggccccccttcccagttgccggcgagtctcgcctcgagaggggcgcccgaccccggggagggcggcaggccagggcgaaggccaagggcgtgtggtggcgccggagactaggtgcggagcaaggcggggactcgcacccgcatccgagagcgcggaggtcgcgcagcccgggagaagggagcctccggcggctgcttcctagagtccacagtgcgctgtctcctttggctgaggagagtgtcctggccccgagtctatcgaggaaaatgaagttaagccgccagttcaccgtgttcggcagtgcgatcttctgtgtggtgattttctcgctctacctgatgctggaccggggtcacttagactaccccaggaacccgcgccgcgagggctccttccctcaggtaagcacctgggaagggggcgcggggctccgaggggccaggcgtgcgggcccctggtt

SEQ ID NO: 9966 - DNA, 1037 bp, Artificial sequence
  DNA replication origin
tctgtgtggtgattttctcgctctacctgatgctggaccggggtcacttagactaccccaggaacccgcgccgcgagggctccttccctcaggtaagcacctgggaagggggcgcggggctccgaggggccaggcgtgcgggcccctggttagcggctgctacccaacctcttcctcccgccgcggccccacacccgtgctgggcgaggccaggggctctgtagctctcggacggcaatgatcacctcctgggagccacctcgcccgggcgcgccaagttaacaaagtgctgggcggcgtgcggcggcggcggcggcatcatcccgctcaggaaagtggccatgttccggcattcgcacccggcctgttggggtggcttcgggcacctgctggcgggggaacgggcgcggcgtgaggcaccccccgccagcccggggcccgcgtatcccggtggggtcgttctcggctctcacagggttaagccgcccgcaccagcccagagcccctgagcgcacggagtcgcggaaatggatcaaaccgaacccacctaggcttttttttctttttcttccccgctgcctctgaagagagagaagtttatttcgtgttgcggcccttttagatgtgaatctctaggttgattttagtgtcgtcattcttcagctattacatctggtttgtttgtggcagacagggggaaccgagtggggaagcgcgtgttatactccggccgaaagctgtggggcgctcagtcctgcgtccagtggttaaattggtaaatgagttgggaagacgacccatccaaagtcttatttaaagttaccaaaaataagcaaagcggacacagtctgttccctttggaagggtatccaccgcgcggcatgtgcgagttcagtttcaagttacttgccaatataacccgtgcacttcagaaattgcggtgaaactgggtattgtgtagtgtgtagtgtgctctgtaacgaatgaacctgaagaactcaaaccctgacagggcaatctaactattcctacttgac

SEQ ID NO: 9967 - DNA, 1032 bp, Artificial sequence
  DNA replication origin
ccccttccactcgacaaaaccgccatcgtcatcatggcccgttctcaatgagctgctaggtacacctcccagacagggtggcggccgggcagaggggcccccccacttccctcccggatggggcggctggccgggccggggctgccccccacctccctcccggacggggcggctggctgggtgggggctgtcccccacctcctggagggggcggctgccgggcggaggggctcctcacttcccagacggggcggctgccgggcggaggggctcctcacttctcagatggggcggcagggcagagacgctcctcacctcccagacggggtggcggtcgggcacagacactcctcagttcccagatggggtcacggccgggcagaggcgctcctcacatcccagatggggcggcagggcagaggcgctccccacatctcagacgatgggtggcggggcagaggcgctccccatatctcagacgatgggtggccgggcagagacgctcctcacttcccagaggggatggcggctgggaagagacgctcctcacttcccagactgggcggccgggcagaggggctcctcacatcccagacgatgggcggccaggcagagacgctcctcgcttcccagacagggtggcggccgggcagaggctgcaatctcggcactttgggaggccaaggcaggcggctgggaggtggaggttgtagcgagccgagatcacgccactgcactccagcctgggcaacattgagcactgagtgagcgagactccatctgcaatcccggcacctcaggaggccgaggctagcagatcactcgtggttaggagctggagaccagcccggccaacacggcaaaaccccgtctccaccaaaaaaatccgaaaaccagtcaggcgtggaggcgtgcgcctgcaatcccaggcactcggcaggctgaagcaggagaatcaggcatggaggttgcagtgagccgagatggcagcactacagtccggcctctgctcggcatcagagggagacggtg

SEQ ID NO: 9968 - DNA, 1235 bp, Artificial sequence
  DNA replication origin
agccgccgccgccgccgccgccgctgcccgagcgagaagccggccgccagccgccgcctgcgaacgcaggagcgagagagaggcggcgtccttcacgcgcgcacacgcccaccgccgccgcccgcgctcgcagggacggtgggcggggaagggggcgagcctctgcgagagggcgcgagggggaacccggagtcgccgcccgctggagggagactagctgcaccgctgaggagagaggctccctccccctcgctccttccctcctcacccgccctcctcccgcgccgagcctttcccgccgccctccctctttcctttctctctcccaggctgtggctgccgcggtgccggctagggcggctccggatgctggagcttggggaaggcacaaggacccgcgcatcatcccacgcgccctcccgcggggaccggagctggagggagaccgtgcgcagcgggacgctgctctgggatggcgggcgccaggcgtaccctggcagcacctgggtccgggcggccccgccggatagcgagagagggacctaggtggtggtggcgcaactcatccctccttgagcgcgtctccgtggcgagtccctcccacctaacaccagctaaccagccatcctctgtcaaagcttatattggtggccggggagggagtactgtggtcgccgatccctcagggctcctgtgcctggacccagtgagagctggaggaaaaggaagcgcccaggtccacactgacctgactcacctttgagtgaagtcttcagttggaataaatgctgtcgtcgctgctggtggcactgcctcctcggcactgctggagctcctaaaagaggagatacttggctgtgtcgagttcaatctcagcatctgaagtggctcagaattacagttctagaagggccttgtggaagccaactagtaaaccctctgccttaaggcaggacctgtcctcattcatgacagggaagactgctacatgtaaaagccctttttctcttcccaagagatgtatcccatgataagcattcttatgtcctgtccatcagctgtcatggctcttcttctcagtattaaacatacatcacttaaactacccttgaacttttttcttttcagatttcagcaaagacgaacaacaattagtcatgttctgatacatatctatgacagttattataccacaactcatttctggctaaatagctccaggcgctttcacctta

SEQ ID NO: 9969 - DNA, 1210 bp, Artificial sequence
  DNA replication origin
tatctaacaagtcatcactctgacaactcagtgacttgtaatgtaaaattattcattgtaattcatttaatattattgtttctctgtgctgcaaaaatcatagcaatcgagatgtaatttattactctccctcccacctccggcatcttgtgctaatccttctgccctgcggacctcccccgactctttactatgcgtgtcaactgccatcaacttccttgcttgctggggactggggccgcgagggcatacccccgaggggtacggggctagggctaggcaggctgtgcggttgggcggggccctgtgccccactgcggagtgcgggtcgggaagcggagagagaagcagctgtgtaatccgctggatgcggaccagggcgctccccattcccgtcgggagcccgccgattggctgggtgtgggcgcacgtgaccgacatgtggctgtattggtgcagcccgccagggtgtcactggagacagaatggaggtgctgccggactcggaaatggggtaggtgctggagccaccatggccaggcttgctgcggggggaggggggaaggtggttttccctcgcactgtcttaaaccgatggcctttccttggcacagggtccactgcagcatgccaaacgaggaggcaggggcgtcgtccccccgccccccactgcagcactggagatggatttcctgtacttcggatccagggtttttgacagaagaggaagaagggggaggggtagaagtgttaaggggagtctgctgagaaaagctgtttttgaagccagaaggggtttttgtttttataatgccatttgacagagtggaataacagtatctaaggaaacgggtagaggacaacaaagaatggagcatattcatggcgaggagcaaaagctctaccccattgaaaggcttcttttcctccctggcgacaaggacacatgcattggtggccaaaagagagaggagacaaaaccgctgcagatggctgatgtgaatctagtggaaagagctactggggatgagagaaagaggaggaggcaggtactgcagagcgtgagtggtggtgttggttggtgaaatactggtcaccagtagtgtgcctgcttttgtaaaacatctaagtaaactccctgtgaacagggtggcaaacagataccagtgtctttgttagttacaaaatgcagtggtagtggctttttgcg

SEQ ID NO: 9970 - DNA, 1114 bp, Artificial sequence
  DNA replication origin
gagtcggagacagacgggacaagcagcatattcagggatcaggctggcctcccggaaagcgtgggcatcggaggaccccgcgggggctgcccaggctgagggtcgcggggctggagggcagctgcggcgccgggcgctggcagctggaagggccagcgctgacgtatgtctgccccgcggcccggcgccctattcctgctgtcctgcgcggtgggcgcggacggcggggcccctgcgggcgggcgcgttgacggaggtacccggtcctacccgaccctccgtggagctccgcccggagagggcgcctctcgggtgggcgggggctgctactgcagcgtgtgcgggagtccgggcctctcgggacgctccccgctgagcgcagcttcccaggctggagcgctgcccagcaggccctgcgagagggcggaagcgggtgcctgggaccgtcccgggcgccgggggttgctgcgcaaagcgccggggccccctgcgggaggtaggagaggcacaatggtggggctgcctggtatccccagacttcaaggcatagcccagcggacgcgcaggcccagctttcgtgtggtttgtttttctcgctcctttaatcgagtcgagaggaaaactcctacaacaggcccagcctcgcggtgtgggcggcggctgtcccgcgtgaacggctctcatgctgcccgacccacttctctccttgtggtccccaggtgtcatcggactggtggccttgtacctggtgttcggttatggagcctctctcctctgcaacctgataggatttggctacccagcctacatctcgtaagtgacacaccctgcagccgtccccttcccttcctccattcctccccgcagggctgctgcagtagactgcacatccgcaattcccgggagaaaagtgaaagctcggcggggagggatgaggttggacataaggggtggggatagtattcaccattttggaaccttaacttaatccctatctcttgacgattagcccagaggtattttcattagattatcctggtgaccagtgtcccctctctttggcacactaacaggaaagcgctaccactctgtcgtcctccctttactggtggga

SEQ ID NO: 9971 - DNA, 1085 bp, Artificial sequence
  DNA replication origin
cgccattgtcatcctggcccgttctcaatgagctgttgggtacacctcccagacggggtggtggccgggcagaggggctcctcacttcccagtaggggcggccgggcagaggcgcccctcacctcccggacggggcggctggccgggcggggggctgacccccccacctccctcccggacggggcggctggccgggcagggggctgaccccccccacctccctcccggacggggtagctgccgggcggagacgctcctcacttcccagacggggcggctgccgggcggagaggctcctcacttctcagacggggtggctgccgggcggagaggctcctcacttctcatacggggcggccgccgggcggagggtctcctcacttctcagacggggcggccgggcagagacgctcctcacctcccagacggggtggcggccgggcagaggcgctcctcacatcccagacggggcgacagggcagaggcgctccccacatcccagacgatgggcggccgggcagagatgctcctcacttcctagatgtgatggcggccgggaagaggcgctcctcacttcccagatgggatggcggccgggcagagacgctcctcactttccagactgggcagccaggcagaggggctcctcacatcccagacgatgggcggccaggcagagacgctccttacttcccagacggggtggcggccgggcagaggctgcaatctcggcactttgggaggccaaggcaggcggctgggaggtggaggttgtagcgagccgagatcacgccactgctctccagcctgggcgccattgagcactgagtgaaccagactccgtctgcaatcccggcacctcgggaggccgaggctggcggatcactcgcggttaggagctggagaccagcccggccaacacagcgaaaccccgtctccaccaaaaaaatacgaaaaccagtcaggcgtggcagcgcgcacctgcaattgcaggcactccgcaggctgaggcaggagaatcaggcagggaggttgcagtgagccgagatggcagcagtatagtccggcttcggctcggcatgaga

SEQ ID NO: 9972 - DNA, 869 bp, Artificial sequence
  DNA replication origin
ggccgcccatcgtctgggatgtggggagcgcctctgccctgtcgccccgtctgggatgtgaggagcgcctctgcccggccgccaccccgtctgggaggtgaggagcgtctctgcccggccgccccgtctgagaagtgaggagaccctccgcccggcggccgccccgtatgagaagtgaggagcctctccgcccggcagccaccccgtctgagaagtgaggagcctctccgcccggcagccgccccgtctgggaagtgaggagcgtctccgcccggcagctaccccgtccgggagggaggtggggggggtcagccccctgcccggccagccgccccgtccgggagggaggtgggggggtcagccccccgcccggccagccgccccgtccgggaggtgaggggcgcctctgcccggccgcccctactgggaagtgaggagcccctctgcccggccaccaccccgtctgggaggtgtacccaacagctcattgagaacgggccaggatgacaatggcggctttgtggaatagaatggggggaaaggtggggaaaagattgagaaatcggatggttgccgtgtctgtgtagaaagaagtagacatgggagacttttcattttgttctgtaccaagaaaaattcttctgccttgggatcctgttgatctgtgaccttacccccaaccctgtgctctctgaaacatgtgctgtgtccactcagagttaaatggattaagggcggtgcaagatgtgctttgtaaaacagatgcttgaagtcagcatgctcattaagagtcatcaccactccctaatctcaagtacccagggacacaaacgctgcggaaggccgcagggtcctctgcctaggaaaac

SEQ ID NO: 9973 - DNA, 1656 bp, Artificial sequence
  DNA replication origin
ctccatgctttagatagggaagagcttgttggggagatagcatttgagctgagagctgaacaatatgtagaaatttggttggccaggcatggtggctcatgtcaattatctcaggactttggaagcctgtggcaggaggattgcttatggccaaaagtttgagacaggcaacatagaccctgtgtctacacaaaaataaaaatatgagctgattgtggtcatgtgtacctgtagtcccagcatcttgggaggctgaggtgggacgataggttgaacccaagagtttaaagctttagtgagctaggattgtacccctgcctgtactccacaggattgtactccagcctatgcaacagagcaagaccctgtctctaaaaaggttgtattttttttttaattaaaattttaaaaaatcagcctagacaaaggaaacagcaaaggaaaggaacctgtggagcagacaggagtttggcatattccagggggaaaaaagaaggccaggagtgtgaatggagcatagtgaatgaggggaaggagtgtgaatggggcatagtgaatgaggggaaggagtgtgaatggggcatagtgaatgaggggaaggagtgtgaatggggcatagtgaatgaggggaaggagtgtgaatggggcatagtgaatgaggggaaggagtgtgaatggggcatagtgaatgaggggaaggagtgtgaatggggcatagtgaatgaggggaaggagtgtgaatggggcatagtgaatgaggggaaggagtgtgaatggggcatagtgaatgaggggaaggagtgtgaatggggcatagtgaacaggggaaggtggatgggtgaggcaagatcagatcagtggttctcactctgactgcacgttagaattacctgaggaacctaaagttgccattgtgcaagcccaacccccagagattgtgatttaattggtctggggtggggcctgggcatccgtagtttataaaagctccccagggacatggtgcagcctgaactgagcacatcagtcttgatcatgcagagttttacaggctctggtaaggagttgggactttatatgaatgttgatgggaagccattagacagtttgaactaggaaaataacttgttctgatttgcgcttttaggaggcccactttggtgaccgcgtggagagtagaggcaggagattgttacagtggtccagttgagagatgatgatggtttagagcaggatggtgtcagtagagatggtaataagaggtcagtttgaggataagttttggaggttgtggtcacaagatgaattggatttagtatgtcagacaaaggcatagaaggttgcctcagagctcacctgagtaactgggtggataggggtgccattcatggagatgggagagatcggggaggaacaggtttgagaagtaggtagactagttgtgtgtattggttggagtgaaagccttaggctgatctctctagatttaggtaatttacaaatagaggcaaccagatgaggttgactaaaacattctgagaagtcctgttcctgttgtgccaagagttttcttgaagtcttccaaaggtaagtcccaaaagcagttaaccattttagtacatggaacctgtggtgagaagcatgcaggagagaaga

SEQ ID NO: 9974 - DNA, 1206 bp, Artificial sequence
  DNA replication origin
ccttcgtggccgagccggctacgcgctctcggagtcgcggccaacttttcccgcgagcttctgagcaacttgccgcaagttggggcgagggggcagagcaggggtcaagggcgcgcggagggactgatctcgctcctgtcggtttcctcgtacctccccgcgtacctgctgatgtatccgtccccgtcgccgtcgcacgtctggaagaggcgccgcatcctctcctcctcgccggtgctggacgtgtcgctgctgctgctgctgctgccgctgccgccgccgccgccgccgctgctggagctccccgcagccgctgccgccgcggccgccatcatgcgcccgctccctacttgggaggaggagtacgcgcgaccgcagctggaatccgcgcggcgcgcaagctgcctgcagccccgaacttgcctgacaacggagcatgcccagtggccgccggggcgctccgggcgagggattccacctctccgggttttgcccggactgggaagatgggcgctctggaatcgcccgaggaggcacctcagggaagagggaggaggggaaggtggctggaagagtcagggagctaagggtggcaacgggaacacaagaggaggcagaatacactggaagcccccgggaagggtgtcagcattgtgcatccggcaacgacgcgggcccgggacacttggggacgcttcaggcagagggcaggtgtactcccggcagaccttctccgaccgcccggagtcatggcttccttttccagagaagctatataaacactctccttctgcaaactcaaaacggtgcttgtaatcccactctccaggattgttccgggttctgtacccatagccaccaatgagaaccggaatgactggcctttttatgaaattttgacacctgtcaagaaacctggccctcgcagccctcatcttggctcccactctgtactgggaagagtctgcacgctgtgtggcattgtgtacgttgggtcaatttctggaaacggctcactctactggccaggcatcactagaatttcccccaacagctttaataatgccaagagcgaacataatagatggtctcatttgatccacactacagacctggaagatgcctcttttattatcaatcctacgacttaggaagtattaatagataagtacctcatagagttatcttacatataaaaggagagca

SEQ ID NO: 9975 - DNA, 1392 bp, Artificial sequence
  DNA replication origin
cctgcagctgctcatggctatttcggtgaaggggttgctctcgcggcgcgcctggggctggtggtgctggtggtgcgccgggtgcgggtggtggtggtggtgcgagagcgggggcccggagcccagactgccgaggctgcccgtggggctggcggcgggctgcaggctgtggcactggtggtactgggaggcggacgccgactgctgcgcggactgctgcgcgtactgctgccggagcgcactggcatggctggacggcgtcagctcgctcacattgagctggctgccccggcgcgacgagcagcagcagcagcagcaggacgagcccgacagcggcgaggaggtgcgggtccggaaggcgccgccgggcgaggaggtgcggagcagcagggacaggttatctcccgcccccgccgccggggcaccggaggaggcgcagctgttgcaccggaggcatgggctgctgccgccgctggccggctgctggtgcgcgaggtgcgggtggtggtgagggtgcgggaggggcgcgaagggcgggcacggcttgtcctggctctgttgctgctgctggcaatgcaggtgtgaggagcgcggcggcggcggcggctgctctgggaagaagccgcgctggaactgcaatggggtttccatgtcagggctgttaaagctgcagggagaccaagcggtggtgcaccctgcgcaatgcgttatggtcgggagcggggactcctgctgctggtgcgaggaagggcccatgccggctccggtagaatccaggcggcgagtccgattggttgggcgcaccaaaacaatgggcatgacatcacctgcggggaccgagactgagtttgcggcgcgcgcggcttagggaagcgtgtgtggcagagaaagatggggaggggaatctgcaggacaaaccctaggggggtgcagtccagagccagggcgctccagggcagggattccgcctgctgattgcgtggagatggagagcccccacgcagtgcagctgggctgcagggggaggagaaaagagaaaggcgcccctccctcccgtgccgctgcccccttgactagtgccggacgcgctgcccggatcacctgcgccagccactgcagcacgtcgggccaccttggccgggggcaggctcagggacggtgtggaaccccgaccacttctccgactgcacgcctcgcagggctgcaaaacagcagccccctcgtcccacgcccgcttctcccagatcatcccgccgagagtgggctgccggctgcccgccaagtaactgcgggggcactggctttggggagaaaaagtttggcgaccggctgcgccagtgcagcagcgtgtggggagaatcccggggcctgagccctgccttggccgctgcg

SEQ ID NO: 9976 - DNA, 1446 bp, Artificial sequence
  DNA replication origin
gacgccgtccagccatgccagtgcgctccggcagcagtacgcgcagcagtccgcgcagcagtcggcgtccgcctcccagtaccaccagtgccacagcctgcagcccgccgccagccccacgggcagcctcggcagtctgggctccgggcccccgctctcgcaccaccaccaccacccgcacccggcgcaccaccagcaccaccagccccaggcgcgccgcgagagcaaccccttcaccgaaatagccatgagcagctgcaggtacaacgggggcgtcatgcggccgctcagcaacttgagcgcgtcccgccggaacctgcacgagatggactcagaggcgcagcccctgcagccccccgcgtctgtcggaggaggtggcggcgcgtcctccccgtctgcagccgctgccgccgccgccgctgtttcgtcctcagcccccgagatcgtggtgtctaagcccgagcacaacaactccaacaacctggcgctctatggaaccggcggcggaggcagcactggaggaggcggcggcggtggcgggagcgggcacggcagcagcagtggcaccaagtccagcaaaaagaaaaaccagaacatcggctacaagctgggccaccggcgcgccctgttcgaaaagcgcaagcggctcagcgactacgcgctcatcttcggcatgttcggcatcgtggtcatggtcatcgagaccgagctgtcgtggggcgcctacgacaaggtacaggcttgaaccccagcccacgctaccggagtcgggcactgggtggttgggatgggcactggcggggaccctttgcgtgcggatccctagcctctccgggacgatcaagggagcccgccaggacagcgggcgcgtctaggacgcgcatccgtagtcagctaaacaactcggagatgaaccctttccgcgtgcagccaaagttctcgaggcagttaagagtgctcagcgcattcgggcaccttaagtaagtggttctggaagtcggtggggaaaccatctgtaattcatcccctcgtgaattatgtttagaagggccctttcaacccgctctcttgaactcagaagtaagttcctctggttttgctagcctggaacagcggcgctcgcttcggtcctctatggcgtggacccagcagcccagccacgcgtcttcccagtctttccaggtctactctcgtctcttttggttttgaggccgagtgatctgacagatcacagagccaagacaggtgcacccctctccccttatcttccttctgtgagttcaggtccacctgtgggggactgactgactctggggacgtggaaggcggttaaaagtgcttctttcttaaaagtgcttctgtctgactgtgttgcaggcgtcgctgtattccttagctctgaaatgccttatcagtctctccacgatcatcctgctcggtctgatc

SEQ ID NO: 9977 - DNA, 1074 bp, Artificial sequence
  DNA replication origin
gtcggaagatggagaggagggcggggcgttggccaagggggcgctgccccaccaaccagggctactcaaacgtggtgacttcgagtgggtgacctcgcctgcctgggcgcggagcgtggagggagggtccgcccagcgagtgaacaggctcgaagtgtgcgatcagggtcagcccgcagtcagagcgtgtggccggtaaatagggacagcacgttcgttcgccctgccctggccttttcgggcctctttccaggtccttagctgctgctgctccaggccgggaatatttaaagcagccttcttttggtagggaggggaagatgctggaggagcgggatttcagccccacacctgtcctggagcctttaggaacgcaggctggcgccgtcggtggcgcccgcgacgacgccctcagcaggcggggtggtgccgggcctgagtcagtgcgggaggctgggctccgcgctgcatccgagaaattgccggcagaagctcctaagtggtttgcaggcggaacgtgtcgggaagtacggaggctgcacagtgcactgccctccggaactcgcagacggagagaaggcgggaaagggcgtcagcgtttgccctctgcgcctggagcttcgagaagaggtgatggcacaaaggagcactcgactccctgtgcgcggttaacagaaaggaggatgattctgtagccctgatgtgagcacctgaaaccctgcagtcccacaccccactaactccaacgccgcagatatagcatatggagtagttttagattcatgcccgacagtcctatggccccagggctggggagctggtttaatgcactcttagcctaaaaagtcccaaatgaaccctacgcctctctgaattctcttgttctacaggcactgaatacattcatcagaaacagaatattcattaacatttcgaaagtgaagctgtgtcttgggcctcccctaccatttacaaccccgggccagaagtacaattggagaactctccttccacttttcttccaagcccagactccatcctgcacctcaaggggccttcagcacacactgtcca

SEQ ID NO: 9978 - DNA, 1442 bp, Artificial sequence
  DNA replication origin
ttcgtggcaggcgcaccctggcctctgcagacagctccctgcgctgcgggcttggccgggatgcagggcggggccgagatgtagggcggggtcgggatgcagggcggggctgagatgcgggggtgcaggggtgcgggggtgcgggaggggcgggactggggtgcagggcggggccgaaatgcgaggcgggggccgggattcaggcggggaggggcggggcgagggaggggcaaggtgccgggcggagccgggatgcaggggaggggcgggtctggggttctggggcgggcgggtgtgggggcggggcggggcggggcgggggctgcgctctgccctgtcgcgggtttatataccctttgggcacttaaccgactgtgccagcccagtcccatacctgtcaagaaaattcattgtcttacatcgtccttaaattttattcgtgttatagtcaatatatacatatttttacctaatatacatccgctttctaggtttctacttagcgctgctgagactgagtctaaatgaaaaaacattatcaatggattctaacaataaatcatattttagatttttaaagaaaaaaacccagcttgctccacagaaccagatatcagaggcaggaatgccacagttacattcctaggacttggtcaatgagaagacagattccaaaaatacagtgctgggaagttggaaaaaagccacagatgacgcttccagtcaagacaacctgtggcaactgagctgatttctgtaggtactaccttttccccctttatagaaatcgattcattcagtcagtcaatatggagctcctagcatatgtcaggcactgttctaggccttgggaattcattgttgaattagacacataggtaaggttccttcacctttaacaagtaaacaaataggtatttattgagcaattcctttatgccagggctgttataagtgctttatatgcacttttgcatttaatcttcacaaataacttcatgaagtaggtactattatcatctccatttcagtgataaagttaaggatcacatggccacacaggtagagggtaggatacctatctagacagcctgactccagagaccatcctggtagaggtattaaacaggcagcgggataaacgcctctggagcccaggagagagagagctaaagatacgaatttgatcttcctatagaaaatatttgaaataagactgaatgagctcacccagggtgagtataaattgaagtctgagaactaagcctaggccactccgagaaggtgaccacggacaagaggagaaggggaccaatatggagagatctgtgagaagggaggaaaaccggaagtctgtggagggaagtttttgcagaagaggccggacgtggtggcttacgcctgtaatcccagcactttgggaggccgaggtgggcggatca

SEQ ID NO: 9979 - DNA, 1485 bp, Artificial sequence
  DNA replication origin
ccgccccctccccgtcgccccaccccggccgcgacgccccgccccgcgcctaggctgttgctggccgcggccgccgccctcccccggcccaatggcgtggcggcacagtcagtgatgtgacgctcaggcttgtccggcccccggctcgcagcccattacaccatccgtcgcagcagtcgctgcagccgctgcagtccgagccgactaagggcgggaggcagctcgggtggcggggcgtggcgaacagcgcggccggattcattcctttggggcgcggagcatggaggagctgtgcggccgcaggcggagcagggcggcccgggcggcggtggggacaacggtttccctttgaaggggacggacaaagcccgagtgaccagcggcggcggggaggactagtccccgggcaggtagtggcggcggcagcggcctgccagggctcgggccggggcctgaggtgcccgcggaaggcctgggcgggaaggagggcgccgggggagccgaaggcgggcagcgggctggaggccacagcttggcccatcgggagggggttgtggtcgatggaggagattgggagggggctgccgttgtctggaacagggagaggggaaggttgtgttggggcgactgtggtttgaggaacctgcggatcatcccttggcggggggtggggggtgatcgaaatggggcgggcgaagttaatgactaaaaggcaggcggatttcctgagagccgtgagtagttttaaaggaaagagaatctttcggggcacagttttggccttagccggggtttggtgtgtccgacctttttgttctttctcgaaacccggcctcaggccttccagcctggcgcccttggccagctctcctgcagttgcaagaaagagaaacatttctgaacccgagtctcctgcctctttcggttgtactctccctgggcgtgtgcaaagcaaaactagaacaaagcttggctggttagagctggaggcgagaaaacgggctgcctgtagtgtttaaattttccgcacatggaggagactgcctgcgaccagaacatttgggtctctgtgtatccttctgtatttttctttaccaccttttctttgggggtggggggggtgtgtgggatggagtagtgcctgaagtatagcttttattcctttcttcccacagaagtggaaattaagaagtgttttgccttcttctatagaaaattaaatgctgctactttttttttctttctctagtttggtgccctggttgtcagatgttggaaagcagtaggacggaacatactcttcgtggttgtgtatccgttctggggtgcagcaattaacattggactttggttcctgtgactcttgcctgtgtcgatagagttaaactggagctctgctttgaaagataaataaagcacagcctctcaactggacataaatggatctaaagacagcagtatttaacgcagctcgggatggcaaac

SEQ ID NO: 9980 - DNA, 947 bp, Artificial sequence
  DNA replication origin
ccagggcctcgcccgcgcagccaggaaagcatgcagcccaccgacgggcggaggaaccgcccgggcaaagccacgtcggtggctgaccgcgcggcagggaggtgggcaccctgtccacacccaccaggaggctgacagctggcgagcgccaggcggccgggacgggacaagggccgcagcgcgccggagggggtcgctctgagaaagccgcgctgggcgctgcccgtcgccaacgactccccctcgcccggatcagcggcggctggatactcacgtagggctggtagaacttggagagccgcggcttcccgtggttgttgaagattaggatcgccttgatcatggctgtgccgggccgaccgggtgggcactgggggccagggcgggggcgggcgcgcgagcctcgcctcgtaatctcgcctgcgatccttccccacccgccccctcccgcacgcgaccgcgcgcgctcccgagccgtcgggcggggcccaaggggcggggcctgggcggggcaggcactaaggaaagcggaaacatttctaggtccgagccagcggcctaactggagtgtgcgcattcgaccgagcacagacacgttgcccaccgctcctctcccgaggtctgtagtcgcggagaaacacatgttgcgttactaacgttcagaggtctgcgacagcttcgatttgaatgactagccgggaacaccaagtttcactgtgtaattgcgtccccctactccggcgcctcctttgcgacgctccctggagaaaagcacgcccactgcacgcgctcagtcgctacttccgctctcgagtgtctccaagcaagatggcggaggagccgcagtctgtgttgcagcttcctacttcaattgctgctggaggggaaggacttacggatgtctccccagaaacaaccaccccggagcccccgtcttccgctgcagt

SEQ ID NO: 9981 - DNA, 1802 bp, Artificial sequence
  DNA replication origin
gcacgcggcccactgtggcgttcccagtgcccggggaaaggggtccccgcacctcggcgcgctcgcagtcctggaagaggctatgcagcagcagtcgagaggtggccaccgtgcagcgcaccgtgatgttcacgcggccagtgaagggcaaagacccggccggaagctcgtcgggcctcagctgcggccacagctccagatcgtagtgcagcggcacgagccagggcggcaggcgtagctggtcccagggccccgggggtcgccagttgctcggggtggtcgtcaccgctagctcgcgtgcactgctgggtttcggggttggcgtcggcttctgcctgaggggaggggaagactcggcttccaagtccctgagtccaggcagctccgacggtgggacgcgctcgcagtggccgtacaaggcggcgagtacggccagcgccagcaggagggcggctaccagcccagccagcagcagggccactgcgcggctcacatagaagcctgagctggaagggggccccatggcagggaccgggttcaggcgcgaggctggagctcagagactgtggcagctgtcaaaaccccggccagggtgttcagtgctgcgacccctgcccctcctctcttgtatcgtgcctcttcctcctggaagagcctggacggactggagctcagcagacagcggttgggaccatggcttccccctcccagctaatcagacacaggtcccagcctacccacccccgcccccggccagcgccagggaagaggcggacctggctcacccagacgcgtacccctttgggttcgaagagacagaccccacggaagatgcctccagggttggcgcggggagggggtggtcaagccaaacgaatccggacaccttaaacgtggatatttggatgaggggtgtgccccgatacggtttcaggtgttgtcggaaaggggacaggtaccaagcacctctatctccaagccagcgatgagctaccagcaacacacctgctccaccgccagctggggcttcgtgtgctagggggtggtaagggcttgaggaccaggatatttgggaatgcgttcagaaatgaccctgcagggcgtcggccgcgccgtcagaacaaatttctggagccaaatgtgtggcgctaacttcgcttcctaaataagcccaggaggcatgcggcccaggcagcgaaggcgaagatggaaacaacgtccggaggcccggaacttttccagagctcaggaagccaggctggaggaagaggcgacaaagtgctagggagcctggcgtctgcgtctcccgggtgaaatggggttgtggggcagagcagggttaggaccgcgttaccacaagaaggggcctggcgggatggtttttcttagctctgcaactgcctggggccggggtttcccttcctgaagccgggggagaggggacacctgctttcagaaccgactcgaatcaagcaaagagaataaaacaattcggcggccagtgtttccacccagaaattcctgggctggaactggttttcccggcggtaccctagtcgctgaggctttcacatgtttgacatggcatctgtttgctatttagctggtgcccctgagcgaattcttggcgtctgcgctggatctggagtctgcattcacgcacgctggtgaattgggaatgagattgcaagcatcaggaggcactggggacggaagggaaggtagttagatcccactgcaggctgaagattttaaactatcccgtcttgagactcgcgcgcgtgtgtgtgtgtgtgtgtgtg

SEQ ID NO: 9982 - DNA, 1391 bp, Artificial sequence
  DNA replication origin
gcactacgatctggagctgtggccgcagctgaggcccgacgagcttccggccgggtctttgcccttcactggccgcgtgaacatcacggtgcgctgcacggtggccacctctcgactgctgctgcatagcctcttccaggactgcgagcgcgccgaggtgcggggacccctttccccgggcactgggaacgccacagtgggccgcgtgcccgtggacgacgtgtggttcgcgctggacacggaatacatggtgctggagctcagtgagcccctgaaacctggtagcagctacgagctgcagcttagcttctcgggcctggtgaaggaagacctcagggagggactcttcctcaacgtctacaccgaccagggcgagcgcaggtaagggctgtacagcccggggcccctctcggcccccgcccctgcgtcccggtgcaggctgcgggtccagctgactaccgtgtccaggtgcgcgtctgctgccctttccaaagaatccccttgcgacgttttcttttttctttttatttatttattttattatactttaagttctagggtacatgtgcacaacgtgcaggtttgttacatatgtatacgtgtgccatattggtgtgctgcacccattaagaaatatacccattaggtatatctcccaatgcaaactatcgcaaggacaaaaaaccaaacagcgcatgttctcacccataggtaggaattgaacaatgagaacacttggacacaggaaggggaacatcacacaccgcgacgttttctttcaaagccagacagagtgcgagcgcctcctttctcccttttcctataaccttgctccgaataaagagacggcggagaccgcggtccttcctctggccagttttcaaccctgtatctgctcatcccgtttgtttctattgctgcccctttttaggtcgctggtacccctgaagcttatcgttctcttcagaaagcacctttcctctctagccggaaatttcttcaccccattcaacaaaccgcttgcccctcaaaggttggtccttgggccagcagcagctgtaacctgggcgcttgttagaaatgcagacatgtgttctttttacactcatttgagataatatctcctacacggaatgtttcctgcccctgcacaagaattgtctctttccacgctctgagaccacaatactgtcctccggcgaactccagggaaatagcttaagtgggagatatcaaaatttattttttttccaaccggcgatctctttgtccactcacacactggtggagcatttgcgccgtacacaactgcatgtactttgccctttattattagagaaaatgttctcagatgttctctgagggaaagaatcccactaaattacaccctg

SEQ ID NO: 9983 - DNA, 1078 bp, Artificial sequence
  DNA replication origin
cctatccaggtatgtacatacatatataatatataaatataaagacatatatatgcacagacttaactccaacacgattggagtgtcgggagggcaactgggctgccctctccgccctccaggactgcgggacaagtctcccggcgcccgggtcgcaggagacccggagccctaaaacggcccctgcgcggcttgggccttccggctttccgtccgccgcggccgccattggctgggttcggcgcagctaacagacggcggcagtgcgagaaagccgaagatggcggtccccgcggcgctgatcctacgggagagccccaggtagctgatccgttaagctcttgcggtagccgcgcccaggaaggcccagatcgggctcgcacaaggctgtccttgctgcctgccgcctgggcgccgcggcgggcccggttgagtggggtggggtggggtgggctgccgaggttgcgacgctgcgtctgcggagtgcgtggggccgtgtagcgcctctacagtcacggtggtccacctgtggggctcacagtgcgcctggcagctgaggtctgtacggaagcgtgtggtctgcaagcgtggggtctgcgtcactgttcgcggagtttggtatcagaagttcccgggtgctgccttcagtgctgccgaatcacgtggaacggtattccgtttccgatttcagttccggttcagacactctggtgggaaaggctcacgctgctgctggagggtctttaatagccaacatgtgttaataccccttttaaatcagtatcgaataggggaccgaatttttggttggtagaagaatctagcctggctttggtagcatttgcttttatttgcattttaaacagatttttagttaatttctacttatggtagataaagttggttgtccatggtagtgatataaagctcccctttaacattatttaagtaaaaaaagactcaatttgtgaaaaaataagcaatagtgcaggtagcgtgtggatacagaaaaagtactgaagtatataggcaaaatagtgttcggaagtaatttctttgtgcttggattgggtagaaa

SEQ ID NO: 9984 - DNA, 1209 bp, Artificial sequence
  DNA replication origin
taactgatcagttgtttgtttagctcatctctttgttgccatattgccttatggtgtacagttaggaacaaccagttgattttcagttttctgcctagagatctcaggcaaatccaaatgtttattaagtaaatatttcatcctctgagttttatagggaacacaattttgccgattttttgttgctacatatcagaagttcctattttttcagccaccaataacaattttttaatgaatttctagtttttcctaatagattgctcactgtttttcaagctgaaggccactgtttaactccaaaaccaatactacatattttatttttatttttttaaattgtggcaggaccttacctttggtaacatcagttagctattgctaataacataccatttcaaaatgtagtggtttaaaacaataaccatttattattgttcacaagtctgtaggtgggcaaggcagttggctggctgggcttggctgatccaaggctgacttgctcatgtttcagcagtttgccgggtctagtttgggatgattttaatcagtgggatgagtggactttatgtcggttatcatttagcaggttaccctgggctgttcacttggttcagagacagcagaaaagatgtaggataggtctttggagatctggtacagaacaggcacaccgttattttcatcatattctgttggccaaaggaatttgaaagaataggccagatttaaggaatagggaagtagattctaattgttgatggaacatgctgcaaagtcacacttcaaaggttatgtttatagtgagaggtgaagaattggagtcatttttgcaatttaccaaaatatatgtgtttaattttaaagtagttgtacagtttatactcccaccagcagtgtatataagttgtgattgttctacatcatgtccagaactgctagtaacagtctttttagttttagctattttggtgggtgtctagtggtattttattgtggttttaatagtctcaattgctaagatggctttcctttactttttttttttttttagtcaaccatttgaatatctacttttgtgaaagggaaggggaggtgtgcctccaaagtctgtgttaccttttgggctgccatttcttctagatcctggcctgtaaatcatgacttgttaactctccaaggccttcaagcagatgcctgcctgcctgc

SEQ ID NO: 9985 - DNA, 1110 bp, Artificial sequence
  DNA replication origin
agacctggcagaagatggccctgggtttgaaacccagactagggctctgttccgactcctcactgtgtcctagggcgctaccatgggggcaatggggcgctggagagtaagccgggcagtgcccacccaccctgcctgatccttctggggcgggaagtgtctcttgtcccgattctccgcgttttgctcagctcctcgctgtgggagatggtgcaaaacaggatcctgaggtctcctccctcctcgcaagacccgagcggcacggggggagccagggagcggtcccgggcttgtggacgtcgggaaaggaaacagaattccgctgtttttcccgctccctcgccgcccctccgcccagcgcctcctcccactttacagcggcggggtcactagaccaggcgctcctggaaagtttccctgaaagccaggggcggcaggcacgaccggactggggctcagcatgtgcagtctgagggaagccggacctggagggaatcatgcggacagctcgggatgcagctaggagctagatcccggccctttggagagtggaacctcctggcccgcggtacttgctcgacaagtcggggaagggatgaatggggaagcaggaccccggaggcaggtgcggccactgtggacagaggctgtggggaaggtgcgtgtggacacaggccggggctcagtggcttgcaagtaggcagcttcaggtgcagaatcccgagccatctgctccctgcgcacgatttcccagcgtggctatccagggagggaggaagcagagccaggtgtgcgtggagcgggagaggaatgggagactggaggcgctgtcttcacagccggggcaagcacttccagggagtctccggcctgtatcgcactggggagccctgcaggctttttcgcgtcggtctttgggagaaaggtggctgctttggaactgcggtggccaggcacagccacagtgggatcgctcctttttttacgctcagcttttttacgctactgaatgcgatctgtgaaaggtttaaaacacaggcgtgcatggacacacacacgcacacactcgcccttgtacgcacaactttctttacctcagatctgaaaagc

SEQ ID NO: 9986 - DNA, 903 bp, Artificial sequence
  DNA replication origin
ccttctcccacctggcactggacgaaaacagcgctgttatacccaaccccctccagccctcgagggcagaaccccttcccctgccttcgacacaccgggccagggagcttccgagaatcccaccatttagggcccgctctgctccctgctgggcacgcgggaggatgagccttgggtctcgcacacacacccccaggaggaacagccatacgcgccgtcgcggcccggggcggcgccgggcgtgtgcgcaacgcgggtgggaaagctctcgacgtggagccggacgcactctggggcgcagggcagagaggaaaggcaggcagggctcacggctgctcccccaggaccgggcaaggctcgggaaacagagacacaagacaaaataaaacgcaggcaccacaaagccgacagcacgcgctagccacggccccgggaccctcaggctggagtccagctgcccgggaggtggggcgcgcccgggcgcccggggcgtaccttttcggtgcatcgacggacaggcggccggggctcggagcgaactggtacagcgtgtatcccatttagtaatccattatcgaggggatctctccgggccgcgggctgcgctctctccttcgcaagcctttgtcattcctacatgtgtgcttgtctctttgggggaaatagtcgcggcgactactttctgggatgcaaacgcgatgtgttcatctccaatgacgagcggagaaggggagaggaaaaaagaagccaaaaaaaaaaagaagaaaaagaaaaagaaaaccaacaaggaagagggtaaatgttcaagaaactcttctccaaatccaaattccacttggattccacttcggtgagtccccttggtggtgtctgcgccgattaacaagtcatttcagggcgggg

SEQ ID NO: 9987 - DNA, 1523 bp, Artificial sequence
  DNA replication origin
atagaggcctttgcccgagaaaggtggggatagcggcccctgctgacagctctggagaacagcaggggtactgattttttctttttttcctaccattctccctaccttttccaggtggtggtagtggtgcggggggaatgggtgttgacccatgtgcatttattcttcgtgaagcctcttaagcagatgtctgtacttagagaagcgaccaaagagggaacgtggacttattagtggtcttagtcccaattagggaacaggtacagtttccaatataaagaaactcggcctaagtgggactgagaccccgatctccgcacttgcttttctcagccaactccatgactagtaaatatctctccgagaactgctgggccgcccgatgttactttgtttaaaggttgcgactaggatccgtaccatctgcgaagcccccttggggagcaagagccgcggcgcgcagttgatttcggggcgcagcggcagggggaggggaacgtggtgtggcccgacgagttggcacaagcctgtaactgcaagactttgtagctattgaaagttcaagtggtgaaagaaggctgtgcctgccattcttcatgtgatcataacaatagcgccttggaagtggttgcgattttcttcttccataaaccttttgggttctcactggaattgtatgcgtgttatttctgaagtttacttatttctaagaccagtccacaaaatgtgaacttcattaagttttaaaatagatcgccgtcgttaaaaacgccattctctgcactgtagtttatttgcttacttcacatgctttattaacgtgtgtatgtgcgtaattaatagctgtgttcttatcttccaagtgtatttttaaccgcaccggcttctatccaattcatctaactacgtagagcgtccatcgcttctggaatctacctcttgataacagtaatcagaatcagaaaagctcgccgttcacttaccctcatcctttaaaacttttccatttaagaaaatcgatgaacaaaacctttcttgtaactcgctcctgcactacgtctatttttatttatttttctgatttggcaggactcagcaatgctgtccgggattttttttttctttttttttttcctagctagagcagatgtgggggtgggggaggtgagggctgggctccagccagagtcgcccccgctgagcctccgcctagcgcgcggtggggccaggaatcctggtggaaggaagcggcgctggccagttggtccaaggctccacctgcagccacaccgcgtagtttctccgcctctgcctcgctcactcgcactcacatacaccacagctctcctttgggtcggaggagacgccagccaaagtaggcggagttgcggaaggagagtccgatctgcgcaatccagtccgggacttggctccgcccgggagcggcggcctctccggtgacagaggagtagtgagcggcacggggtgaggctgcagccaactccgctccccgcgcactcggc

SEQ ID NO: 9988 - DNA, 1513 bp, Artificial sequence
  DNA replication origin
tgtctcacagtggaggcaaggaattgcaactttttttctattattgtacaccttgaaggcgaggttaattaaatcctgttgtggggtttgagggccggaatttaacttttgtagttttatttaatgtcgggagcagattgggtaataaaaagtattttgagaataagacggccttttgaccttttagggtctagggctgtaaagtgtctcagggttgctgccaaacaagtgatgaactgggctggatttttatatttgataaaaaagatcctaaacgctatccgatttgggataaagaagaaggagcattaaccttgactatgcctttagctccagccacctttttaagagtcaattgctgggcaggtgggggagggctagtcacggaacgaaactgtaagccggaccaggtgtgaggcggggaggtgataaaaagattatagggtgggggagcggaggctgaggaagaattgggacctagctcggcctggcgaggagcagcctggggaggaggggagaggtcagatgggtctgtagaaaaggaagattagaaagactcagcaacacttcgagttggtactgtggggacaggtgggagggaaagaaggaagatttgggacgagttgcactgggcacagagactagggagggactgatgtgtaaaagaatgcctggacgtcaggcacctcagaccgtttgcccattttacgacaattacttagatcttgcaggatggaaaaatttaaagtgtcattttctggctatttggaactactatcgagtttgtactggggtcaagcggcattgcagaagaaaataaggcatttaggttttaggtcaggtgtgagttgaagagattttaagtttttgacaacacaggccaagggagaaggaggaatggagggtggaaggttgcccatagtgaaggaagcaagcctagagaaaagagagagtagagacacggagggaaggggttccggggttcttacattccagaaaagtgggaaaggggttgaggcacggatataaggggctggggcacagagataagaggtcagggggtggaaataagggatggggagcagagataagtcaggttgtggaaataaggggtcggggtgcagagatgaggtcagggtgtggaaataaggagtcggggtgcagagatgaggtcggggcatggaaataagggattggggcacagagataagatgtcggggtgtggaaataagggattggggcacagagatataagaggttggggtgcagaaataagggattggggcgcagagatatgaggttggggtacttgcccctcctccagaaaagcgggacttgccactaagagtgaaggagaaggggttgggggtttcttgccccccagaaaggtggagaaggggtagagacacagagagaaggggttggggtacttgccccttccctagaaaagtgggacttgccgctaaccaaggcaggcgtccctgcgtggtctgacacttctgaaacgtgggtg

SEQ ID NO: 9989 - DNA, 1151 bp, Artificial sequence
  DNA replication origin
accctccgcccggcagccgccctgtctgagaagtgaggagcctctccgcccggcagccaccccgtctgggaagtgaggagcgtctctgcccggcagccaccccatccgggagggaggtcggggggtcagcccccccgcccggccagccgccccgtccgggagggaggtgggggggtcagccccccgcccggccagccgccccgaccgggagggaggtgggagggtcagccccccacccggccagccgccccgtccgggaggtgaggggcgcctctgcccggctgcccctactgggaagtgaggagcccctctgcccggccagccgccccgtccaggaaggaggtgggggggtcagccccccgcccggccagccgccccatccgggagggaggtgggggggtcagccccccacccggccagccgccccgtccgggaggtgaggggcgcctctgcctggccgcccctactgggaagtgaggagcccctctgcccagccaccaccccgtctgggaggtgtacccaacagctcattgagaacgggccatgatgacaatggcggttttgtggaatagaaaggggggaaaggcggggaaaggattgagaaatcggatggttgccatgtctgtgtagaaagaggtagacacgggagacttttcattttgttctgtactaagaaaaattcttctgccttgtgatcctgttgatcggtgaccctacccccaaccctgtgctctctgaaacatgtgctgtgtccactcagggttaaatggattaagggtggtgcaagatgtgctttgttaaacagatgcttgaaggcagcatgctcgttaagagtcatcaccactccctaatctcaagtacccaaggacacaaacactggggaaggccgcagggtcctctgcataggaaaaccagggacctttgttcacttgtttatctgctgaccctccctccactattgtcctatgaccctgccaaatccccctctgtgagaaacacccaagaatgatcaataaaaaaataaataaataaataaataaataactcatctttgaactccaatgcatctagggaaagcaccgcccactcctattatttgacatcttggtgtctccttctttcctttttcattttggattggtttcttgcag

SEQ ID NO: 9990 - DNA, 1293 bp, Artificial sequence
  DNA replication origin
atcatggcccgttctcaatgagctgttgggtacacctcccagacggggtggtggctgggcagaggggctcctcacttcccagtaggggcggccaggcagaggcgcccctcacctcccggacggggcggctggccgggtggggggctgacccccccacctccctcccggatggggcggctggccgggcggggggctgacccccccacctccttcctggacggggcggctggccgggcagaggggctcctcacttcccagtaggggcagccgggcagaggcgcccctcacctcccggacggggcggctggccgggtggggggctgaccctcccacctccctcccggtcggggcggctggccgggcggggggctgacccccccacctccctcccggacggggcggctggccgggcgggggggctgaccccccgacctccctcccggatggggtggctgccgggcagagacgctcctcacttcccagacggggtggctgccgggcggagaggctcctcacttctcagacagggcggctgccgggcggagggtctcctcacttctcatatggggcggttgccaggcggagggtctcctcacttctcagacggggcggatgggcagagacgctcctcacctcccagacggggtcgcggccgggtagaggcgctcctcacatcccagacggggcggcggggcagaggcgctccccacatctcagacgatgggcggccgggcagagacgctcctcacttcctagatgggatggctgccgggaagaggcgctcctcagttcctagatgggatggcggccgggcagagacgctcctcactttccagactgggcagccaggcagaggggctcctcacgtcccagacgatgggcggccaggcagagacgctcctcacttcccagacggggtgacggccgggcagaggctgcaatctcggcactttgggaggccaaggcaggcggctaggaggtggaggttgtagcgagccgagatcacgccactgcactccagcctgggcaccattgagcactgagtgaaccagactccgtctgcaatcccggcacctcgggaggccgaggctggcggatcactcgcagttaggagctggagaccagcccggccaacacagcgaaaccccatctccaccaaaaaaatacgaaaaccagtcaggcttggcggcacgcgcctgcaatcgcaggcactgggcaggctgaggcaggagaatcagacagggaggcttcagtgaaccgagatggcagcagcacagtccagcttcggctcgg

SEQ ID NO: 9991 - DNA, 1274 bp, Artificial sequence
  DNA replication origin
ttgggggtaaggtcatagatcaccagcatcccaaggcagaagaatttttcttagtacagaacaaaatgaagtctcccatgtctacctctttctacacagacacagcaacaatctgatttccccatcccctccccacctctcccccgactctattccacaaaaccgccatcgtcatcatggctcgttctcaatgagctgttgggtacacctcccagacggggtggtggccgggcagaggggctcctcacttcccagaaggggcggccgggcgggggctgaccccccacctccctcccggacggggcggctggccgggcgggggctgaccccccacctccctcccggacggggcggctggccgggcgggggctgaccccccacctccctcctggatggggcggctgctggacggggtggctgccaggcggagacgctcctcacttcccagacagggtggctgccgggcggaggggctcctcacttctcagacggggcggctgggcagagacgctcctcacctcccagatggggtggcgatcgggcagagacactcatcagttcccagacggggtcgcggccgggcagaggcgctcctcacatcccagacagggcggcggggcagaggagctccccacatctcagacgatgggcggccgggcagagacgctcctcacttcctggacgggatggtggccgggaggaggcgctcctcacttcccagactgggcagccgggcagaggggctcctcacatcccagacgatgggcggccaggcagagacgcttctcacttcccagacggggtggcggccgggcagagactgcaatctcggcactttgggaggccaaggcaggcggctgggaggtggaggttgtagcgagccgagatcacgccactgcactccagcctgggcaacattgagcactgagtgaacgagactccatctgcaatcccggcacctcgggaggccgaggctggcagatcactcgcggttaggagctggagactagcccggccaacacagtgaaaccccgtctccaccaaaaaaatacgaagaccagtcaggcgtggcggtgtgcgcctgcaatcgcaggcattcggcaggttgaggcaggagaatcagggagggaggttgcagtgagcagagatggcggccagtacagtccagcttcggctgggcatcagagggagaccgtgcaaagagagggagagggagcccgtggggagagggagacaggggagagaggagaggggagaggtgagagggagaggca

SEQ ID NO: 9992 - DNA, 802 bp, Artificial sequence
  DNA replication origin
cctgtctgggatgtgaggagcgcctctgcccggccgcgaccccgtctgggaactgatgagtgtctctgcccgatcgccaccccatctgggaggtgaggagcgtctctgcccagccgccccgtctgagaagtgaggagcccctccgcccggcagccaccctgtctgggaagtgaggagcgtctccgcctggcagccaccccgtccagcagccgccccatccaggagggaggtggggggtcagcccccgcccggccagccgccccgtccgggagggaggtggggggtcagcccccgcccggccagccgccccgtccgggagggaggtggggggtcagcccccgcccggccgccccttctgggaagtgaggagcccctctgcccggccaccaccccgtctgggaggtgtacccaacagctcattgagaacgagccatgatgacgatggcggttttgtggaatagagtcgggggagaggtggggaggggatggggaaatcagattgttgctgtgtctgtgtagaaagaggtagacatgggagacttcattttgttctgtactaagaaaaattcttctgccttgggatgctggtgatctatgaccttacccccaaccctgtgctctctgaaacatgtgctgtgtccactcagggttaaatggattaagggcggtgcaagatgtgctttgttaaacagacggttggaggcagcatgctcgttgggagtcatcaccactccctaatctcaagtacccagggacacaaacactgcggaaggccgcagggtcctctgcctaggaaaaccag

SEQ ID NO: 9993 - DNA, 1201 bp, Artificial sequence
  DNA replication origin
aggtcatagatcttacaccataccccaacagcatcccaaggcagaagaatttttcttagtacagaacaaaatggagtctcctatgtctacttctttctacacagacacagcaacaatctgatttctctatcttttccccacatttcccccttttgtattcgacaaaaccgcatcatcatcatggcccgttctcagtgagctgttggatacacctcccagacggggtggcggccgggcagaggggctcctcacttcccagaaggggcggccgggcagaggcgcccctcacctcccggacggggtggcggctgagcggagacgccccccacctcccggacggggaggctggccgggcgggggctgccccccacctcccggacggggcggctgtcgggcggagatgctcctcacttcccagatggggcggctgctgggcggaggggctcctcacttctcagacagggcagctgccgggcggaggggctccttacttctcagacggggcagctgggcagagacgctcctcacctcccagacggggttgcggccgggcagtggtgctcctcacatcccagacggggcggcggggcagaggtgctccccacatctcagacgatgggcggccgggcagagatgctcctcacttcgtagatgggatggcggccgggaagaggcgctcctcacttcccagactgggcagccgggcagaggggctcctcacatcccagacgatgggcggccaggcagagatgctcctcacttcccagacggggtggtggccgggcagaggctgcaatctcggcactttgggaggccaaggcaggcggctgggaggtggaggttgtagcgagccgagatcacgccactgcactccagcctgggcaacattgagcactgagtgaacgagactccatctgcagtcctggcacctcgggaggccgaggctggcagatcattcgtggttaggagctggagaccagcccggccaacacagcgaaaccccgtctccaccaaaaaaatacgaaaaccagtcaggcgtggcggcacgcgcctgcaatcgcaggcattcggcaggctgaggcaggagcatcaggcagggaggttgcagtgagcagagatggcggcagtacagtccagcttcggctcggcatcagagggagaccgtggatagagagggagacagagactgtggggagaggga

SEQ ID NO: 9994 - DNA, 796 bp, Artificial sequence
  DNA replication origin
atgtggggagcacctctgccccgccgccccgtctgggatgtgaggagcaccactgcccggccgcaaccccgtctgggaggtgaggagcgtctctgcccagctgccccgtctgagaagtaaggagcccctccgcccggcagctgccctgtctgagaagtgaggagcccctccgcccagcagccgccccatctgggaagtgaggagcatctccgcccgacagccgccccgtccgggaggtggggggcagcccccgcccggccagcctccccgtccgggaggtggggggcgtctccgctcagccgccaccccgtccgggaggtgaggggcgcctctgcccggccgccccttctgggaagtgaggagcccctctgcccggccgccaccccgtctgggaggtgtatccaacagctcactgagaacgggccatgatgatgatgcggttttgtcgaatacaaaagggggaaatgtggggaaaagatagagaaatcagattgttgctgtgtctgtgtagaaagaagtagacataggagactccattttgttctgtactaagaaaaattcttctgccttgggatgctgttggggtatggtgtaagatctatgaccttacccccaacccggtgctctctgaaacatgtgctgtgtccactcagggttaaatggattaagggcggtgcaagatgtgctttgttaaacagatgcctgaaggcagcatgctcgttaagagtcatcaccactccctaatctcaagtgcccagggatacaaacattgcggaaggccccagggtcctctgcc

SEQ ID NO: 9995 - DNA, 920 bp, Artificial sequence
  DNA replication origin
cgcccagccagccgccccgtccgggaggtgaggggcgcctctgcccggccgcccctactgggaagtgaggagccactctgcccggccagccgccccgtctgggagggaggtgggggggtcagccccccgcccggccagccgccccgtccgggagggaggtgggggggtcagccccccgcccggccagccgccccgaccgggagggaggttggggggtcagccccctgcccggccagccgccccgtccgggaggtgaggggcgcctctgcccggccgcccctactgggaagtgaggagccactctgcccggccagccgccccgtccgggagggaggtggggggggtcagccccccgcccggccagccgccccgtccaggaggtgaggggcgcctctgcccggccacccctactgggaagtgaggagcccctctgcccggccaccaccccgtctgggaggtgtacccaacagctcattgagaacgggccaggatgacaatggcggttttgtggaacagaaagggtggaaaggtggggaaaagattgagaaatcggatggttgccgtgtctgtgtagagagaagtagacatgggagacttttcatgttgttctgtactaagaaaaattcttctgccttgggatcctgttgatctgtgaccttacccccaaccctgtgctctctgaaacatgtgctgtgtccactcagggttaaatggattaagggcggtgcaagatgtgctttgttaaacagatgcctgaaggcagcatgctcgttaagagtcatcaccactccctaatctcaagtacccagggacacaaacacagcggaaggccgcagggtcctctgcctaggaaaaccagagacctttgttcacttgttgatctgctgaccttccctccactattgtcctatgaccgtgcc

SEQ ID NO: 9996 - DNA, 1312 bp, Artificial sequence
  DNA replication origin
tcacctcccggacggggcggctggccgggcagggggctgaccccccaacctccctcccggtcggggcggctggccgggcggggggctgacccccccacctccctcccggacggggcggctggccgggcggggggctgacccccccacctccctcccagacggggcggctggccgggcagagtggctcctcacttcccagtaggggcggccgggcagaggcgcccctcacctcccggacggggcggctggctgggcggggggccgaccaccccacctccctcccggacggggcggctggccgggcggggggctgacccccccacctccctcccggagggggcggctggccgggcagaggggctcctcacttcccagtaggggcgaccgggcagaggcgcccctcacctcccggatggggcagctggccgggcggggggctaaccccccccacctccctcccagacggggtggctgccaggcggagatgctcctcacttcccagacggggtggctgccgggcggagaggctcctcacttctcagatggggcggctgccgggcggaggggctcctcacttctctgacgggtcggttgccaggcagagggtctcctcacttctcagacggggcggccgggcagagacgcccttcccctcccagacggggtcgctgccgggcagaggcgctcctcacatcccagacggggcggcggggcagagacgctcctcacttcctagatgtgatggtggccgggaagaggcgctcctcacttactagatgggatggcggccgggcagagatgctcctcactttccagactgggcagccaggcagaggggctcctcacatcccagacgatgggcggccaggcagagacgctccttacttcccagatggggtggcggccgggcagaggctgcaatctcggcactttgggaggccaaggcaggcagctgggaggtggaggttgtagcgagcggagatcacgccactgcactccagcctgggcaccattgagcactgagtgaacaagactccatctgcagtcccggcacctgggaggccgaggctggtggatcactcgtggttaggagctggagaccggcccggccaacacagcgaaatcccgtctccaccaaaaaaatacgaaaaccagtcaggcgtagcggcgcgcgcctgcaatcgcaggcactcggcaggctgaggcaggagaatcaggcagggaggctgcagtgagccgagatggcggcagtacagtccagcttcggctcggcatcagagggagagcgtggaaagagggagaggggagaccg

SEQ ID NO: 9997 - DNA, 1012 bp, Artificial sequence
  DNA replication origin
gccttcaagcatctgtttaacaaagcacatcttgcaccgcccttaatccatttaaccctgaatggacacagcacatgtttcagagagcatggggttggggataaggttatagattaacagcatcccaaggcagaagaatttttcttagtacagaacaaaatggagtctcccatgtctacttctttctacacagacacagcaacaatctgatttctctatcttttccccacatttcccccttttctattcgacaaaaccgccatcatcatcatggcctgttctcaatgagctgttgggtacacctcccagacggggtggctgctgggcggagacgctcctcacttcccagacggggcggctgccgggcagaggggctcctcacttctcagacggggcggcagggcagagacgttcctcacctcccagacggggtcgcggccgggcagaggcactcctcacatcccagaaaggcggcggggcagaggcgctccccacatctcagacgatgggtggccgggcagagacgctcctcacttcctagatgggatggcagccaggaagaggcgctcctcacttcccagactgggcagccgggcagaggggctcctcacatcccagacgatgggcggccaggcagagacgctcctcacttcccagacggggtggcagccaggcagaggctgcaatctcggcactttgggaggccaaggcaggcggctgggaggtggaggttgtagcgagctgagatcacgccactgcactccagcctgggcaacattgagcactgagtgaacgagactccgtctgcaatcccggcacctcgggaggccgaggctggcagatcactcgcggtcaggagctggagaccagcccggccaacacggcaaaaccccgtctccaccaaaaaaatacgaaaaccagtcaggcgtggtggcgcgcgcctgtaatcccaggcactcggcaggctgaggcaggagaatcaggcagggaggttgcagtgagccgagatggc

SEQ ID NO: 9998 - DNA, 1037 bp, Artificial sequence
  DNA replication origin
acgtcgtcggtgggggcgaatgctcacggaatcgtgactgggcatctgcgctggcctccgcctagactgcgccccacgcgggtccccagagcccccggcggcgcttccccagcgccctccgcgtggaaccccgcgcctctggaacagaaggggcgtgtgacgcagtcaccgttgcctagggccacgttctgatcagatctgacgcctccagcgcccgaccccacgccaagagggccgggcctcagtttccccacttccaaggaggcggcgctatgctgtcctgcttcaggctcctctccaggcacatcagcccttcgctggcgtctctgcgcccggtgcgctgctgcttcgcgctcccgctgcgttgggccccggggcgccccttggaccccaggcagatcgccccccgccgccccctggccgcagccgcctcctcccgggaccctaccgggcccgccgccggcccctctcgggtgcgccagaacttccaccccgactccgaggctgccatcaaccgccagatcaacctcgagctctatgcgtcctacgtgtacttgtccatggcctattacttctcccgggatgacgtggccttgaacaacttctccaggtatttccttcaccagtcccgggaggagaccgagcacgcggagaagctgatgaggctgcagaaccagcgaggaggccggatccgcctgcaggacatcaagaagccggaacaggacgactgggaaagcgggctgcatgccatggagtgtgctctactcttggaaaagaacgtgaaccagtcgttgctggaattgcacgctctagcctcagataaaggtgacccccatttgtgcgatttcctggaaacctactacctgaatgagcaggtgaagtctatcaaagaactaggtgaccacgtgcacaacttagtgaagatgggggccccggatgctggcctggcggagtacctttttgacacacatacccttggaaatgaaaacaagcagaactaagccacgagctgccttcctcccaggctagtggatcca

SEQ ID NO: 9999 - DNA, 1205 bp, Artificial sequence
  DNA replication origin
gtagttgtaataagggttgtcgtcagagtacttgtaggggttgtaagggtcgtcgcccaccatgccgtccacgcggctgggcggccgcaggttactgagcgcaggaacttctcccggcgctgtctggttctccgcgcgcgaggcgccagcttcgcgggctctagatgtcgagtagccagcttggaaccagtgacgggcggtgggcctggggcggccagcggtgactccagatgagccggccgtccgcgttcgcgccgcggcggtgcggttgtcgcggatcagcaggatcggagtgcggggctgctgggcggaggcgttggctgcaccagggacggcggcgcccgggtcccggcggcgctgaggctggtactgtgagcccaggctcagcaagctgaacacctgcccgttgttctcccattggatctgctggcgccaggcgcccggagccgccggcggctcgcgcgggggctgctgttggccggcggcgggaggggcgcagtgcactagcgcgcagagctgcaaaggcccgagcaggagcacggtccaggcgaagcgcatcactccttttgccagattgaccccgctcgaggaggacgtggctcacagaaaataaaaacggggctcaaatcacgtgagggaaggagaaatcttcaaccaaggaggcgagcggagcacgggtatctcagtctccaccaagcaatgccaagggtgggattcagacccttccccagtcaaggcggctgctcggacgtggcacccttccctttcccctttctcagtcctggaaggcaacggggagcggcgcggcagtcccggagagcgggcagtgtctggagtgaaggaaggaggagagattttaaactttctggcacgtttgcaaagttacacaagccgttctggcccggccgcccctcagctatttgttcacgtaatgcgattggaaacgtgcaaggcggacagctcctcgcctctgcccctccctctctcccgtccctgccctcctccccccagacacgttgcacagggagcgttaaggggaaagaacaaaacggaacacacatcctgagacacactggcttaatctggggcgaacatgcaggaatttcaaaaaactcagacaggcgaaggcagccaggccatggggcgacgccaaaatatgcacgaagaaaaatgctattaggtcaccagcccttgagaggcgggaa

SEQ ID NO: 10000 - DNA, 1084 bp, Artificial sequence
  DNA replication origin
ctcccgcctccccgcggcgtccgcttgggacctggactcacccggggcgcccggcgcgccggcggctcaggagcgcgaagggactgactgaccgaccgacggaccgcagcggcaggagcagaacagcctcagccgaagtaggcgggcggtggaggcgctgccgcggccccgctacgtcacaatgcggcccggccgcgggcgccgctccccgggccccccaacgggcgcgcgcgggcgggggcagcctgggcggccgcggcccgaagccggcgctgggggacaaggaacgcagcgcgggcgcccggccggggacgggggcgcggccaccactgccactgcggaggctgccggggccgccgcgccctcaggctgcgctgcgcccctgcggccgcccccaggccagcgagccccgctcggcctgactgacagcgaccctccccgcggcgcccccggctcggcccacgcccctccctcgccgcttcctcaccagggatcccccggcctgcccgccggctcctgtccacgaacctgctctttctttacctttcgctctttttacctcgactgccgttgcttttccccagctggggctctcctctcctccccgcctactttttgtccgcgcttcccacttttctcctcctgccccccacccccttccttgcttcttggcctctccccctggaaatcgccccctcaccgtgatccaagcgttaaccgctgccatctcattggtccccagaccattccagggttccagcataaactgggagaagagactcgggaaggcggggaacggaaggtgggcattgccctgggaaactcatgtctgagaagccttttggcagagtattttgcgttggcacggagtcttcacccccacccctccccccgaagctcgcccacccctgaggacgtggccaaggagaggagggcaagggtggctttgcctgcctggaatgttctgtgctcaagtgtgggtggatggagaagatgttaggctgaaataaagactttttaattcaacgacgtttcagtgtaccaatggccctacagtaatattatctttacttttattgtctct

SEQ ID NO: 10001 - DNA, 844 bp, Artificial sequence
  DNA replication origin
cgcagtggcagtggtggccgcgcccccgtccccggccgggcgcccgcgctgcgttccttgtcccccagcgccggcttcgggccgcggccgcccaggctgcccccgcccgcgcgcgcccgttggggggcccggggagcggcgcccgcggccgggccgcattgtgacgtagcggggccgcggcagcgcctccaccgcccgcctacttcggctgaggctgttctgctcctgccgctgcggtccgtcggtcggtcagtcagtcccttcgcgctcctgagccgccggcgcgccgggcgccccgggtgagtccaggtcccaagcggacgccgcggggaggcgggaggcgggcagccagcggctcagcctttccaagtttgcaccaggcgaccccggcgggtgtcgccccgtgctccccaagccccgggacccctttgtgccgcgagtctcggctgctccgggcagcagaggcgcctctgcagaaagggtttgagggggaggtctctatagtaacagtaacagtggtggcggcagcggctgctttactggggaaagggggaaacaacccccgcctcggtttccaaaggattgttcttttcatttgcccgcctcatgtggttcttattcttgctgtcacccgggatcttatcgcaggcagggatgggcagttccgcggctcggaaaagctgagataaggaggggcgaagtaatagtaatagcgacagtactaacaacggtaataatagctgtagaaaagggacgtctggtgttgctgccgcccctcgctcatcagcaccagctccccgactgccctgtccagcccgggctccgccagcctccctctagtgct

SEQ ID NO: 10002 - DNA, 1066 bp, Artificial sequence
  DNA replication origin
tatggctggggtttgtctcacagtggaggcaaggaattgcaactcagaaatacattgctacttggctgcctctactttattattgtacaccttgaaggtgaggttaattaagtcctgttgtggggtttgagggctggaatttaatttttggagctttatttaatgttgggagcagattgggtaataaaataaaatgcatattgagaataagatggccttctgacctttcagggtctagggctgtaaagcgtctcagggttgctgccgaacgagcaatgaactgggctgggtttttcatatttgttgaaagagcctaaacactaactgatttgggagaggttggataaagaaaaaggagcattaaccttgactatgcctttagctccagccacctttttaagaggaaattgctgggcaggtgggggagggctagtcacggaacgaaattgtaagccagactgggtgtgaggaggggaggtgataaaaggattatagggtgggggagcagaggctgaggaagaattgggacctggcgaggagcagcctggggaggaggggagaggtcagatgggtatatagaaaaggaagattagaaagactcagcgacacttggggttgggactgagaggacaggcgggagggaaagaaggaggatctgggacaagtcgcattgggaacagagagtaaggagggaacaatgtgtaaaagaatgcctggatgtcaggcacctcagaccgtttgcctattttatgacaacaattatctagatcttgtaggatggaaaaatcagaagtgcagttttctggctatttggaaccactgtcaagtttgtactggggtgaagcggcattatagaagaaaataaggtgtttaggttttaggtcagctgtgagttgaagaggttttaagttcttgagaacacaggctaagggagaagaaggaggaatggaggtggaaggctgcccatagtgaaggaggcaagcccagagaaaagagagagtagagacatggaaagaaggggtcgggggttcttgccctccagaaaagcggtagttgccactaaggg

SEQ ID NO: 10003 - DNA, 1700 bp, Artificial sequence
  DNA replication origin
aaaatatatattttaggctactaacaggttgtaggatattatggaaagcatattaaaaacttgattcttgggaggctgaggtgggaggcccttgaaactcatgttgtgtcttatcataacgcttcctcatgtgactggttttttgttttgtttttgttttttgagacagggtcttgctctgtcacccaagctggagtgcagtggcgtgatctcggcttactgcagcctccgcctcatgggttcaagcaattctcccactcagcctctcaagtagctgggattacaggggtgagtaaccaccctgtaatctggctaatttttgcatttttagtagagacagggtttcatcatgttggccaggctgatctcaaactcttgacttcaggtgatacacccacctcggcctcccaaagtgctgggatgacaggcatgagccaccgcgcccggccatgtgattgttatagagatgaaatgagacattatgtgataccgaacatagtacctgctgcattccactagttttgtaaagacgagtacttacgtaagttacgtgctgggtactatgccaaccacgagatgacgagtttttaaaagcatgcttgccctaaaacctagtaggtagggtagataaataaatcatacatacagtgtatagtcaccagaggcttaaggtaacctacaagctgggctctgaactcagatagcttatcgtccgcagagctggttagttacctcaggaggtgctggccagaagtgaaagaaaggtgtgtagtcacagggcacagctaaggcacagttttgagagaagggcacatcctggagctgcaaatgtgtgagtgctgggttaggaggacggatcttcagatgagactaatgtagaggggtccacatcaggtaagttcctaaaacgagaagctgccttatccctctgttgcacggctcagggtcccatcataaagtctagagtttgctaagctgaaatgtcctctgcactcaaggacaaacggagttaagtgcaattgtttacagtccaagaaagctcgctggctggttttttcctggatggctgaggtcacttctcagtgacctacaagtcacgtccacgtttctattctgctcggtgcgctaacctaaagaagaaacccaacgtttacttgactaacttgataatcaagcctcccccgccgggacacttaatcttttaggtaccttcagcctactagaccctggtccgaggcacgggttcagtcctttttttttccgtattctatttttccctcacagttaaaaagtacttcacagttaaaggcggcattttagaactgcagcgtgaagccagagcgtttgtcttagtgaccggccaactttcgggctcactttcgagctctgtggtacaccaccattctcagattcgacgtctaactcaggagacgctgaccttcgaatcgaagggaattcggagagtcttggtataagccggctggttcaccgctgttaatgccagccgagagggaaaaaaaaaattcaaccaaccaaaacaaaagttaaaagcgccactctttctattctttgctgtctggcaatctcttaatggtggcgtctagcaaactgcaaatcaagctccagccggagtccgcagggcagggagcgccgggtgcggcccagtccccgcgcccagcgcgttggcgcgcacaccccgt

SEQ ID NO: 10004 - DNA, 1056 bp, Artificial sequence
  DNA replication origin
ccaaggcagaagaatttttcttagtacagaacaaaatgaaaagtctcccatatctacgtctttctacacagacacagcaaccatccgatttctcaatcttttccccacctttcccccttttctattccacaaaaccgccattgtcatcatggccggttctcaatgagctgttgggtacacctcccagatggggtggtggccgggcagaggggctcctcacttcccagtaggggcggccgggcagaggcgccccccacctccctcccagacggggcggctggccgggcgggggctgaccccccacctccctcccggacggggcggctggctgggcgggtggctgaccccccacctccctcccggacggggcggctggccgggcggggggctgacccccacctcccttccggacggggtggctgcctggcgtagacgctcctcacttcccagacgtggtggctgcctggcggaggggctcctcacttctcagacagggcggctgctgggcggaggggctcctcacttctcagatggggcggctgccgggcggagggtctcctcacttctcagacggggcggctgccaggcagagggtctccttacttctcagacggggcagccgggcagagactctcctcacttcctagatgggatggcggccgggcagaggctgcaatctcggcactttgggaggccaaggcaggcggctgggaggtggaggttgtagcgagccaagatcacaccactgcactccaacctgggcaccattgagcactgagtgaacgagactccgtctgcaatcctggcaccttgggaggccgaggctggcggatcactcgcggttaggagctggagaccaccccggccaacacagggaaaccccgtctccaccaaaaaattactaaaaccagtcaggcgtggcggcgcgcacctgcaatcgcaggcactcggcaggctgaggcaggagaatcaggcagggaggttgcagtgagccgagatggcagcagtacagtccagctttggcttggcatcagagggagaccatggaaagagagg

SEQ ID NO: 10005 - DNA, 1011 bp, Artificial sequence
  DNA replication origin
aaatagtcaaagaagactgttcatgagggcccaaaagctatgaaaataaagaccaaggcctgacacagtggctcacatctctaatcccagcagtttgggaggccaaagcaggaggatcacttgagcccaggagttcaagaccagctgggcaatatagggagatctcatttctacaaataataatttttaaaaattagctgggtatggtggcacgtgcctgagatccagctactttggaggttgagtgagcccagggagctagagcccagggggttcatcacttgagcccagggggttgagactgcagtaagccatgatcatgccagttcactcagaaggaaaggagaagggggaggggaaggaaggaggaggaggagaaaaagaagagggagggaagggggaggggaaggaaataggaagggggaagaaggatgggaggggatgggagggggatgggaggggatgggaggggcaggggtaagaatggagaagggggaggaaaggggaagggaagagagagggaaggaggagagggaagaggagggaaaagggagaggggagggaggaggatgggtagagaatgtggggagagaaggagaaggggaggggaagacgaaggggaaagaggggagaagggtgagggaagggaaagggaagagtggggagggaaggccaggcctttaatcaataagaaactacccgtcttaataattagtgctattctgagaagctacatgatatggtagaaagagcaccagtctggacttagacacatccaacacccagatctgctacttcctggctgtatttccttacagatgttgcttatcaactctgagccttagtttcctcatacgtaaaacagagatgataacgcctactttcttaggtctggtgatggagtaaataaatacgacaaggtatataaaacccttagcacctagcctggcacataactggtgctcaatgcattctgttatcctcctgaatatagtagtccccccttagctg

SEQ ID NO: 10006 - DNA, 1723 bp, Artificial sequence
  DNA replication origin
gcgtgctgggaggccggcgctccgggggagaccctgggggagctgggctgaggccagcctacctccgccgcagtctgcttggacttcttgtcccgggtcggtagtccgaggtgaccagcctgggggtaggagaggcttccggaaccggcgggcccgttctccaggaaagagactgcccaagtacttccttcagcgtggcctgggctcgggagcagaacgagaggaatgcggggaggggggcgggacccgcacaggagaggcgctcggagcccagggcttgcagccgcccgcccgctgcgtggtctccacgctggccgcggtggcttcaggcaggcattaaagcgcctggttcagatgagagactaccctccgcctcttttggggaaccgtcgtccttcccgggaaggggaggtgcgccttcaacttcggcgggcgggcggcccctgctgtgggctacgcgaggccgggcgaaggcggcacctgtagacctggggcagcctccactgcggggaaagggggcggggggctgccagaaagtgcgtctttaaggcttcctcgtacttaactccgcttcagttcttttttcagcgtatttaaccaagggtagacgataatgggagaatgcagggagagggaggggataatttggtgcccatgatcaccacttctagaaaacccactggcaatagtgtcttcgaagctgaagctggagggggcgggctgcagctgaaagtggtcttcatcagtctggggtttgtcaatggaaacgatactaatcaacgagtagaatgcttacatcctcgaccgcagacgccacctgaggacggggaggactagggggtggggaggaggaggtccagctcagcatctgatgtcgcagaaaggccgtgccacgttgtgggcggggctgataaacagcctgatggtttcgagaagctctgatcttactcccagcctcttgatcttgtaggcatgtctaactttgggaaatggtttgtgcaaggccacagagctgaacggggtctcttgggataaagccataaacataaaattcgcacaattatgaaatgttggaggaaataaactgtaatatactttgggtgacatttaaaaatagctgaaaaatgagaaaaaccagcgcagagaagactaaggaggcaaagggaactgcatatgcataggtcctcaaacaggaaagccctccctgcattcagaggatgtggagaggacggaatggcttcagcacagaatgagaggtgacttgagatgaggttggaggggtgagcagcagcggaatcacacagggccttagaggctgcaggtaggcatgcgggtattgaggcaattcttaaaatttgaagtgttattctgcagtcagagccactgaagggttttaagcataagaatggcatgatctcaatatatactcgagaaatttatgtggtcactcagtggagagtgaaatgggaggtcattcagggcaccatgccagagtccagatggtggcttggattagggtggtaatcattgaaatggggagcaagggaaggacttgaaatagattttggagatataactaacaggagttgctgacggtttagaaagggggcgagggagagggaataggattgccaaataaaatacaggatgcccagttagatgtgaatatcagattaacaatgaataaatgtttttagtgtaagtacgtcccctgcaatatttg

SEQ ID NO: 10007 - DNA, 764 bp, Artificial sequence
  DNA replication origin
ccaagccctagactcttaagtcccagaccagcctcaccttacctgaaaactcggtgctgccggtgggtgcgtgcgggtgtctcggtgagcgtgcgggtgcgcgagagtgtgcgccctgcgtgcgctacatgcccctgagcagcgcgggaggagagtcctagagattgtgccgcccggaaacctcccgacctgcaagcgagaaaattgggaggcccgcggagggcgcgagagtgcggacggacctgggcgcccgactcaaccgccgtgggctgctgcgcttggccgctgccgcgtcctggctccttggttccacgctctggcagcttcccggctggacacgtgggttttacgacagcacaaaatagagtgagtgtgtgtgtgtgtgtgtgtgtgtgtgtgtgtgtgtgtgtgtgtgtgtgtgtgtgtgtgtgtgtgagagagagagagagagagagagagagagagagagagagagagagagagaacggaggggggaggggaggcaggccagaagaaggggaggggagagggaagaaggaagttctaattcggcccgacccacatcgccagagcgcctttcccgcacaaactcctccgccctcccatcccctgtttttttggcgtgacgtctgccgctagcctgttgtctctttctgcccatgatatgtcttttctgggtcccagctcagtgccctgatcttgaaagcagtggaaatgcggcaacgggaatgcatctccgcacacgctgtggtgtccgcgctgga

SEQ ID NO: 10008 - DNA, 1214 bp, Artificial sequence
  DNA replication origin
cggacagcctgcgcccgcggcccgcctctctctcctccgcctcgtccacgccggcttcctcttccacctccgcctcctccgcctcctcctgcgctgctgcggccgctgccgccgcgctggctggtctctcggccctgccggtgtcgcagctgccggtgttcgcgcctctagccgccgctgccgtcgccgccgagccgctgccccccaaggaactgtgcctcggcgccacctccggccccgggcccgtcaagtgcggtggtggtggcggcggcggcggggagggtcgcggcgccccgcgcttccgctgcagcgcagaggagctggactattacctgtatggccagcagcgcatggagatcatcccgctcaaccagcacaccagcgaccccaacaaccgtacgtagccgcagcccgcgcgctctctcccggggcgccggcgccggcgccggcgggcgcgggtgcctgtcagggaggcgggtcggataggagtgacacggggccgggtgggtggggagcacctggtcctggccgctggcccgcgcctccccgatctctgtgacaaaagttttctggcgttggagaaggaaagagaacggatgggacggccggtggcactttggggttccctctccctccctctcctcacctgcttcacagtcccaagtgtttggggccggagtctaccgtggacccggcctaacagacctctgccctcccgccggacagtgcccggggccaggcgggtactggcagcgtgtgacagggggtgtctgggtcaggccctgcctggccttagccgggacgagggagggaccctcagcgtctctggggagcacgcagaccagggcttgtttttgctactctccaccccacctctggaggggtcattttcgggccgcggggttgtgggggaaccggcgggagctgttcgctggccaggcctcactggagtaggaattttagatgaaactgagtccgtttctccttgaaggcaggcagtattcttagatctactattcatttaaaaagaaggaaaagaaaaaaaaatgactgctacttactgagaagaaaatttctgttctcctccgattccgctgatcccgctttatccgcgcacctttgaccccgcaaacattcataacccatgttggtttatgtatttatttttagaaattagggtgactgtaatttagtaaaagacgcttactcccctc

SEQ ID NO: 10009 - DNA, 1982 bp, Artificial sequence
  DNA replication origin
gcaaagcaggccatggttttcttttctggaatttcatttctcgttctaggaaaggtgaaatataaaacgcttccgggcttttggtgtgtggagaggccaacagtcatgtgtaggcgcgtggggagtgagagctacatcacatcttcactccccagtacctgcccgacgccttcgttggctctcacccgccctgcatataggaaagcaaggagtaggtgaaaagcctgcttccccgcctgggcgccactatccaccccggctgtaaatcctcccctaccgccgccaaggtcgcggccctcagtctcgcaggccgagacccgaggggccggcgcccatcgatcccagcccggcgactaggacccgggagtgccgcctgctggcagtgccgcgtgcgccctaggcggggaggggcgtgggggctggggagccgggcagagggcgggcaggcagagcatccgggcccgaacttctcgcgtggggttcacgcccccggggctccagcctgcggtccccccactgccttctcgagctataggctagatgggatggctgaaagggagcgatgggcggggtggggcgcccaggcctcagcgccgaaggctgagttttgaaggtcccaccccgctcctgcccacgaaaggctctcttctgacatgaggcgtggccgccgacaccacccacgatccgacgtccccactgcaccccgccacccacccggccctcctcctctacccggcaggggtcttccaagccccgggagcgggtctagaagcagatccagaggcgaggcaggtttgcctggccgccggaaggggagccaattgatttcagtctcgaccctgcggggcggcccagctcctgggaattctctcaggaactctccctctacgcgagtttaaagctccccgcgaatcgcaaaagctctgggcgttctctgccctgcctggctgcgggcttgaccctgggaccaagagggagagacaaaaagaagagagcaagaaggtgggagggagaaaatgtgggtcttatttgtcttccgatgactgtattaataaattaaatgggagcgccagtttgtgagggtgagagaatattgcgcagagataaacctcgccggcccctgcccctgcgaggctgccatatacaatgcggagatgatgaataggagccgcgagaggagatcgaagcgggtctgggctggctccactctctcctacaaaactatagggcaattaattgtggcttgtcccctcatccttcatctcctggtggcacatatcgatggagattactgctgatggaccattttatcaccttgaataaacagtcgccacctcttctaacctcaatctaatatatggctgtatgttcggtttcagggcgctagataacgaaagatgtaaaatagctaaatcatgtgtgttatgggatgaggctgggcttgcacacacgcgagagagagagagagagagagagagaaacacaaaagcccacgcactgaagccaaagctccctcccacccggaccaggtctgcaatctaaggcgctcgctggtctttgacagaggaggcgcagggcagaaggggcgcagtggatgttcctcggttgcacaaaaagcctgctggtgtgccactgggctcgaagttgcccaaacaggacctgcgttttccacctgggtgggaagggattagggaaggtcagaaaacactcgccctcctttgtctctttccttgaccccttagcaagcaaccggacaaaccagtgttaggcccagactcccttttctctccccagcccctctccctaaacccttggaaagcctggtgttcccaacaaggaagcctcaagccccgctcccacacccatgcacacaccggcgctgtttccagcctgttccctgcgcaggagggttccagtaaatcgggaggggacagagacccctcccccaactggggaatttgcaaagtggtccaactctcccc

SEQ ID NO: 10010 - DNA, 783 bp, Artificial sequence
  DNA replication origin
cgccggcggccggaggaggaaagcgagccacgcagggagcgagcgagcgagcgagcgaggtaggggggaaggagcgagagagagaggtaacgcagcgctgctcggattcggtccctgcactgccgctggtgcctcctaccgccgccgctggccggagagtcgccgcccgagcctctgctgtcgccaccgatgcagcccggaatgaatgcacagcagcgcctcgcttatccggaggtcaaacatccttctgcctcgggcatccggatcgacgccggacccggaagtgaacacatggaaaaaaaattaaaaaggaaagcgtctgtttagcggcggcggcccccaagctgcccgcatcagcgaaaacagccgagtagagccgaagattgcaccaaccttcttggattggtcggatcgccgaccggaaaggagacggcgcggtcattggctggcaaggtgtataaagcctaagccgcgccctatccccgtctttctagagccgtgcgtgagggaaagtggggagaggctgtggatacgagtgtttctctggatgaagcagtgggcggagaagcatagcaaagtctacgcagagaactggaagagaacaccaccatgctttaggagagctactaagaactgagtgagcaaagagccttaagggtaccattgtgccaagtcagggtgctgaggctttccctgttgtgctcagcccgccaggttccaaaaaaatcttagggcccggcctaggagtatgacatcactgggttgacatttttccccgcttgt

SEQ ID NO: 10011 - DNA, 1182 bp, Artificial sequence
  DNA replication origin
gcggtaggaggcaccagcggcagtgcagggaccgaatccgagcagcgctgcgttacctctctctctcgctccttcccccctacctcgctcgctcgctcgctcgctccctgcgtggctcgctttcctcctccggccgccggcgggtgtgatgtgccgccgccgctgcccccgccggcgctgacggactgggggcgccgcccgcgcccgggaccgacccctctgctcgcggccgcgcctttgaggtaaagccccctgcgcgtaggtgctccgctgccagccccggcccggcggctgcctcggcgcggccgcggcgccctccctcccgggtggggctggggtcccgggcgggtggggtggggtgcggcgggggcggcgccgcaggcgcgggtgtcgggggaggggtgggcgaggaccatggcgggtggcccggaggcgtgggcaggagggggccgcggtcggaggctgagggcgcggagggctagggggcagcgggggccgcgggtggcgggtcgggctgggtgcaaaagttgccggagtggtgcggcgcgactggggcggcgagggaggtgggccaactgggccggcgggggcttccttaggagagattgggaggtggggagtgtcgcccacggtgctccttgactgtgtccagacaattacctttggagtaggggcttcaggcaggaaggaggcatggataggctgggaggaggcgacgggggccagcgttcagctcagggataaacttcccgttggagtgtttaaggggttgggtggggggacacagggatttacctgtttcttagagctttgactcagctcaaaacttaaccaagacattagtcaaaggttagcaaaatcactctgatggttactctcatggtgccggtttgtttgtttatcccacatgcaggggaagtgacactgagaagcatcgggtctcttggtccacagcctccacatttcttttcagcaggatgaggagggagatgtgtgtctactcgtggggtgggggtagtgaggcctgtgtcatggtcattccccttctcccacctcatgttttagggaggaaaagttcagatgggggagagagtgagtgtgcctgtgtgtgtgggagacagctactgttgatacactgtgtgaattactttcaactcttttgtagtaagcacccaggctggt

SEQ ID NO: 10012 - DNA, 951 bp, Artificial sequence
  DNA replication origin
tgactatgcctttagctccagccacctttttaagaggaaattgctgggcaggtgggggagggctactcatggaacgaaactataagacagaccgggtgtgagtaggggaggtgataaaaagattatagggtgtaggagcggaggctgaggaagaattgggacctagctcggcctggcgaggaggggagaggtcagatgggtctgtagaaaaggaagattagaaagagtcagcaacgcttggggttgggagtgaggggacaggcgggagggaaagaaggaagatttgggacgagttacactgggcacagagactagggagggactgatgtgtaaaagaatgcctggacgtcaggcacctcagaccgtttgcctattttatgacaagaattatttagatcttgtaggatggaaaaattgaaagtgccattttctggctatttggaactactgtcgagtttgtactggggtcaagcagcattgcagaagaaaataaggcatttaggttttaggtcaggtgtgagttgaagaggttttaagttcttgagaacataggctaagggagaagaaggaggactggagggtggaaggttacccatagtgaaggaggcaagcccagagaaaagagagagtagagacagggagggaaggggttcaggggttcttaccttctagaaaagcggtaaacgggtcagggtgtggaaataaggggttggggcacagagatacgaggttgaggcatggaaataaggggttggggcgcagagataagagattggggcacggaaataagggattgggcagagagataagaggtcggggcatggaaataagggatcggggctcagagataagaggtcggggcacggaaataagggatcagggcacagagataagaggtcggtgcacagaaataagggatcggggcacagagataagaggtcagggcaagga

SEQ ID NO: 10013 - DNA, 915 bp, Artificial sequence
  DNA replication origin
ctgatttgggagaggtctgataaagaaaaaggagcattaaccttgactatgtctttatcttcagccacctttttaagaggaaattgctgggcaggtgggggagggctactcacggaatgaaactgtaagccggaccgggtgtgaggaggggaggtgataaaaagattatagggtggaggagcggaggctgaggaagaattgggacctagctcggcctggtgaggagcagcctggggagaaggggagaagtcagatgggtctgtagaaaaggaagattagaaagactcagcaaggcttgcgattgggactgaggggacaggtgggagggaaagaaggaaaatttgggacaagttgcattgggcacagagactagggaggcacggatgtaaaagaatgcctggacgtcaggcacctcagaccatttgcctatttttcgacaaaaattatttaggtcttgtaggatggagaaattgaaagtgccgttttctggccatttagaaccactgtcgagtttgtattggggtcaagtggcatcgtagaagaaaataaggcatttaggttttaggtcaggtgtgagttgaagaggttttaagttcttgagagcacaggctaagggagatggaggaatggagggtggaaggttgcctatagtgaaggaggcaagcctagagaaaagagagagagacatggagggaaggggttcggggattcttatcttccagaaaagtgggaaaggggtcgcggtgcagaaataaggggttgaggcacagagataagaggttggggcatggaaataagggatcggggcacagagatacaagatgtcagagcacagaaataagggatcggggtgaagagatacaaggttggggtacttgtccctcccccagaaaaacgagacttgctgctaagggt

SEQ ID NO: 10014 - DNA, 1004 bp, Artificial sequence
  DNA replication origin
caactcagaaatgcgttgctgcctggtgcctcctctctattattgtacaccttgaaggtgaggttaattaagtcctgttttggggtttgagggctggaatttaatttttggagctttatttaatgttgggagcagattgggtaataaaatgcatattgagaataagatggccttctgacctttcagggtctagggttgtaaagcgtctcagggttgctgccaaacaagtgatgaactgggctggatttttatatttgatgaaaaagagcctaaacgttaactgatttgggagaggttggataaagaaaaaggagtattaaccttgactatgcctttagctcctgccacctttttaagaggaaattgctgggcaggtgggggagggctagttgaggaacaaaactgtaagcaggactgggtgtcaggaggggaggtgataaaaggattatagggtgggggagtggaggctgaggaagaattgggacctagctcggcctggcgaagagcagcctggggaggaggggagaggtcagatgggtctgtagaaaaggaagattagaaagactcagcgacacttggggttgggactgaggggataggcaggagcgaaagaaggaggatttgggacgagttgccttgggaacagactggggagggacctatgtgtaaaagaatgcctggacgtcaggtacctcagaccatttgcccattttacgacaagaattatctagatcttgtaggatggaaaaaatcaaaagtgccattttctggctatttggaaccattgtcgagtttgtattggggtcaagcggcattgtagaagaaaataaggcgtttaggttttaggtcaggtgtgagttgaagaggttttaagtttttgagaacacaggctaagggagaaggaggaatggagggtagaaggttgactgtagtgaaggaggcaagtccagagaaaagagagggtagagacatggagagaagtgttggggggtgcttgcccccca

SEQ ID NO: 10015 - DNA, 1236 bp, Artificial sequence
  DNA replication origin
cgcagcgcaccgcgggaagatggcgttggaggtcggcgatatggaagatgggcagctttccgactcggattccgacatgacggtcgcacccagcgacaggccgctgcaattgccagtgagtgtgaaaggagggtgggtgatcgtggctgggcgcgcggagcctgggccccggggagcgcgcaggcagcggtgagggtgaggggtgggagctaggagcccgggccagagcgaggagcccaggctgtcgggtcagtggccgcagaaggggcgagcagacgtcccccaggcgggctcacggagcccgggctgcgggggccgaggggcgaggggcgacggcggcagcggcagcggctggccgtgcgaaccccgaactggctgctccctgcgaggcggggcgcgcgagccctggcgcctcctggaggccggcttgcggcggcctcttagacgtctcacctccgcctaccgctctttcttttctaaacttggggcttccccactccatcgccgctaggtaaccataaaggggcagattttgccaaatatgtagcatctagggacatcagcctgaaacagcctgtgatgctcattttctccctgagccgaagggagactgaggcccaggaatgaagtttatcgctcactcaaagatctggttttccatgtttccaccgaacctagctttgtcatgcggtaccatggcactaggcttttgcattagcctctctgattttgtttgttgttttgaggtggtctcacgctgttgcccaggctggagtgcagtggcgcgatctcggctcactgcaacctccgcctcccgggttcaagcgattctcctgcctcagcctcccgagtagctgggattacatgcgcccgctgccacgcccggttaatttttgtatttttggtagacgcggggtttcaccatgttgcccaggctggtctcgaactcctgacctcaagtgatcggcctgcctcggcctccaaaagtgctgagattacaggtgtgaaccacggcgcccggccacatccagctaattttgtatttttagttgagacgagatttctccatgttggtcaggctggtctcgaactcccaacctcaggtgatccgcccgcctcggcctcccaaagtgttgggattacaggcgtgagccacctcgcccggcctaatttttgtatttttagtagagacgggggttctccatgttggccaggctggtcttgaacttccgacct

SEQ ID NO: 10016 - DNA, 775 bp, Artificial sequence
  DNA replication origin
ccacggcagaacccggtgagctggtcgccgcggttgcgcccccgcccctccttggcgctaacgcggccgccagctagcactcacttgaggagcagctggtcgtgttccgccttgcacttgcccagctcgatctgcagcttggcgcgctcgcgggccgtgtcgtcgagcgcgcgtcgcgcgtcggccagctcggtctcgtagagcgccttgaggccggtgagctcacggccgcgcacctcctcgcgctccgtcacctgcagctgcagcgcgctgttctccgtctccaggctgcgcaccttgtcgatgtacaccgccagccggtcattgagctcgcgcagctcctccttctcctggagccgcgacaggcgcgtggggctcagcggcgtggtggggccgccagcgcggctgcccatccgcggcggcacgggggtcgcagtcgccatggcgggcggcggagacagcggggcggcgaggccgcgagcgggaccgtgataaggaggggacggcagggggcgaagcggggaccgaaggcacaaaccggcgacctgcgctcacgtccagacgctggcgtttagaggaacggagaagcacctgggatggcgggagctcgattacagcacaaagggcaaaggcgcgcgggggggaactacgaatcaatcgatcgatcgcgaaataccctttgtaagaaaacacacacacccactcacacacgcacgcgggaaaatgcaagacgagggtgactggaggcccagcagggttcgcgccgccgccgtct

SEQ ID NO: 10017 - DNA, 1063 bp, Artificial sequence
  DNA replication origin
accgcggcgaccagctcaccgggttctgccgtggggagggagcagaggccaggatgcacgcgtccttctgaaggaacagggtctcggtctccggaaaggagaaagaatctagagttcatagcggagcaggggtcgcggagggggctcgagctgtagcgctggggggccgtgatgcccatttctagattttggatacccgctgggacgtggtaagtgcgcgcctgggactgccgagaaggagctcccgctttcgcactcgaatccggggagccggcgcggagaggcggcccctcaggccccaggtgcggggagctggagcgcgagcgcgcgctcgcgtgcgcgccccagtttccggccggcgcgagacaaagcgtctagcggatttgcagtgccgggatgggcggccggggaggactggcagcccgcctctagaatgaatgagcttcgcgcgggcagagagaggaaggggagggaccttcccgcagcatccgcgtctcctgggggtgggtcccgctttggcgcgctcagtcttggccctgtgacgttttgcgaagattctacgcctgctttaggcgggagagagaggcggagcttgatccgtgcgcctccagccagccccgggcaagttaggtttgctagctggttagctttctctggggaaatgtgtcctgtcccagcggggatggtgcggtccctcgggtggttctgcgcagggaaggaaagctgggtttgtgcatgtcacggctaccgttcttagaattgcggttctcctacccctcaggcagcggccctctgtccccagcttttgcctcctcgtagtatagtcaggctttcgggtagagactgtgcttagtaccccttagtcgaccactgtgcagatagtagaccagggcaggtgacagggtgctgtgtaaatgctgagtgtttgagcgaaggagagtttgtaattcacctaagcgagtgcgagttttcattccagtgcacaaggatacatttgcagacctttgctggccttattttgactttctgataagcaaaatggcctgtcatcagtaggcaacaa

SEQ ID NO: 10018 - DNA, 1401 bp, Artificial sequence
  DNA replication origin
agagcctaaacgctatccgatttgggataaagaaaaaggagcattaaccttgactgtgcttttagctccagccacctttttaagagtaaattgctgggcaggagggggagggctagtcacggaacgaaactgaaagccggaccaggtgtgaggaggggaggtgataaaaagattatagggtggaggagcggaggctgaggaagaattggcacctagctcggcctggcgaggagcaagcaggctggggaggaagggagaggtcagatgggtctgtagaaaaggaagattagaaagactcagcgacacttggggttggtactgaggggacaggcgggagggaaagaaggaagatttggcacgagttgcactgggcacagagactaggaagggactgatgtgtaaaagaatgcctggacgtcaggcacctcagaccgtttgcctattttacgacaagaattatttagattttgcaggatggaaaaattcaaagtgccattttctggctatttggaattactgtcgagtttgtactggggtcaagcggcattgcagaaaataaggcatttaggttttaggtcaggtgtgagttgaagaggttttaagtttttgagaacacaggccaagggagtagaaggaggaatggagggtggaaagttgcccatagtgaaggaagcaagcctagagaaaagagagtagagaaacagagggaaggggttcgggggttcttaccttccagaaaagtgggaaaaggggttggggcgcagagataagaggtcggggtgcggaaataagggattggggcgcagagatattaagaggttggggcgcggaaataagggattggggtgcagagatacgaggtcggggcacgaaaataagggattgggacacagagataagaggtcggggtgcggaaataagggattgggtgcagagataagaggtcggggtgcggaaataagggattgggacacagagataagaggtcagggtgcggaaataagggattggggcgcagagatattaagaggttggggcacggaaataagggattggggcgcagagatacgaggtcggggcacggaaataagggattgggacacagagataagaggtcggggtgcggaaataagggattggggcgcagagatattaagaggttggggcgcggaaataagggattggggtgcagagatacgaggtcggggcacggaaataagggattgggacacagagataagaggtcggggtgtggaaataagggattgggggttcttgccccgtagaaaagcgggacttgccactaagggtgaaggagaaggggttgagtggtacttgcccctctcccagaaaagcagagaaggggtagagacaaggagagaaggggttggggtacttgcc

SEQ ID NO: 10019 - DNA, 1196 bp, Artificial sequence
  DNA replication origin
ggtgccagggctgctgggggagctgcccgccagtaccacaccgtgcgcctgcactcctcaggccttgggtggttgatgggacctggtgcctcctaccagggggcggcacccgtccgggaggctcaggctgagcgggagcctagtgcaggggccgggggggggggggggggcggggggtagggcatggctgcttacaggtccccagccctgcccggctgggtggcagtggaggcccgtcgagaatttgagcatggcacgggcaggccggctgtgctgggggacctggcgcccccctctgcagctgctggcccaggtgctaagcccctcactgcccccgggctgggggcgcaggccggctgctcggagtgcgggggcctgccgagcccacgcccacccggaactcacgctggcctgcaagtgtgcgcccaaccctggttcccaccggcgcctctccctccacacctccccacaagcagagggagccagctccagcctcggccagcccagagtggagctcccacagtgcagcggcaggctgaagggctcctcaagcgcggccagagtgggcgcggaggtcgaggaggcgccaagagcgagcgagggctgccagcacgctgtcacctctcactatgaacaattggcaggacagtcatggtctggacctaaggaaggtttgctcagggctgacctacccacgagcagctgctcctggcagtctgagcgcctttcatatttcctgtattaaccttgtggcgcacaaagacagcatcgagaacaagctaatgagaatcatccctctcatcatggaacccgcatcccctgcctcaaaccaagccatgtgcacacgcacacttgatgatagcagaatcgaggcatctgttgacatttgtcttctttttgtttctagagtgtggtgggatgcctccatcactgtagcactgtcagatgggcgacagccttatcggccgcctccaatctcagcaggatgtgggttttcttttttaacgggatgctctgaagcccttttgtccgtgaccaaaagcatcattcttggcactgagcctgaggcctcttctctgacctctgcttcccttcccctatctacaattactgcacagtcagcccattgccttactgtactactctgatcatgtttgatttcatatacttaacatctctatgtaaaatgaccaacc

SEQ ID NO: 10020 - DNA, 1216 bp, Artificial sequence
  DNA replication origin
gtagcctgcgggcccctggcggcccagggcatggggcagagacgccatgccggctgatacacacgcccggaggaggtgagggaggaagccacttgaaaataaacaggtgccgtaaagggcataggtagcttgcccgggtttcctgcttcctggtcgctcgcgctcgcctccccgccgcctcgcctcccctcgagcagcctccgcaccccgttctttcactcctcggcgcgtgagctcctggcagcctcacccttttgcacatgacgcgcctccccgggtctcccgcaggcaggcctcgctcctccctccgccaggcctgcccgggaggcctcgacccggcgaggtgacccgccccagggtcgccggcgcgaggacgaggctggcggtgcgctgcttcctcagagccgcttcctcagagccggctgcggcgggcccgggcgggaaccacggagcccagtgcaccagcctcctcggtgctaccgcgggacacagaggaaacaggaacagctggtttctgtgggcaggccccgggctggaactagagccagggtaagggaagcaataataacatctcacatttgcaagagggctttatgctttccaaaacgcactcacaaataccctggcttatgttacttcctgtaaggtgcgcaagtattagggacccctttttacaagtgagaaaactgagcccataggaaggttaagcattagtgacagagctggactgcactccaacgccacggtgagaggtttgcccaaacatccctgacctgtgtaacatctgtcaggagcttagcgcgatgaagatcagatgactcagcggctccaaagcttgagagccctcactgtggccctttactgtgtccaggtgcggccggcgggggacagggaaagagatcacagcgaagacccagaagaaacaaaaggcaagcgaatgtaagagcttcaccaccttcccactccaggacggtggacaacaagaggtttgaaagctgtgatgtcctcactgtcttccgtccctctcacggaatgaaaagtcgtttttgccagaatattatacctgcaagatctcacggggaggagactgcagcccacccgctggagatttttgcctacagaaagcttccctttttttccaacccaaagacagacttttatagcctctccaactccccttgaatttttaagagagagaaagaaaagccccaaagtg

SEQ ID NO: 10021 - DNA, 1046 bp, Artificial sequence
  DNA replication origin
ccgctgctgcggcggcggcggcggcggcggcagcggcggcggctggtgctggggcgggggccaagcagacccccgcggacggggaagccagcggcgagagcgagccggctaaaggcagcgaggaagccaagggccgcttccgcgtgaacttcgtggacccagctgcctcctcgtcggctgaagacagcctgtcagatgctgccggggtcggagtcgacgggcccaacgtgagcttccagaacggcggggacacggtgctgagcgagggcagcagcctgcactccggcggcggcggcggcagtgggcaccaccagcactactattatgatacccacaccaacacctactacctgcgcaccttcggccacaacaccatggacgctgtgcccaggatcgatcactaccggcacacagccgcgcagctgggcgagaagctgctccggcctagcctggcggagctccacgacgagctggaaaaggtgagctcgcccagccctcccttcttccccagcccctggtgcatgccgaccgcgggatgtggctgcagactcttcccgagttgaggtggcgggagtagtagacgtgcacgacttgctggcatctctggattcagctgtcaagggtggaattgccgaggaatgttaacttaatctctcaaaagtttgtagcgggtttggctagttacgtgataccggagggctgcctctaacaaccttccccatccagttaggtatctcgtgtgcactttctttcccacccacgctcaacagtcaccatccctctgaatgacagtagtgtttgtgggccctttagaggagaatgtgcagtgaggatctctcgagagaggttggagagcacctaccatctgtgtcgttttgaaagattgtgttgtgtggcttatgtacgcctattagggatcgcaagagtgggaatgttgctgtttgaaggaaaaccttaacagggtgtgtttatggtctatgagttattaaagctcaattcttgcaatcttgaatatacaaaggatcatagagatcttgtcttgggac

SEQ ID NO: 10022 - DNA, 718 bp, Artificial sequence
  DNA replication origin
atatccaaagacccccaggagcgcgtcccccttttccttcccaaccccgcagctcagcgggcggaaagccctctctccgggggttgggcggcgggtggttagggggtccaggggtgccgatcgcagagcgtgtgcagagctcgcgctgcgggaacaggttctgaatgtccggcggcaggcgggcctgggtccgcctgctgcaggggccagagaagcctgcttgctccccacgtcggggccgccgctcgtgagccttttgtttgaggacgtgtgcagggttcacagctcaccttctcatcgtcaacccgagcgctccaccttgcgacgcgctttccttgacacgtcggggccaaagtaacagttgaccaaggaggaatggatttgggaaggagggcaaggattctttggaacggaatggtccctttgttctctgcatctggaagctagaatagtagcaaattatatgtttccatgcctcttttcgccctttaaaaaggcaggcaagggacgacagatgaaaggcagtgtttagacatttctgaccctcctgcattccagcatctagctcttttgcttccacgtctgcctcccgatctccaataatttgaagtgtaattttgatttgtttgttgtcctgaaatctactcgctcggggcattgcttacgaagaccgtttatatgttgctgcatccctctacctatctgttacgtgaccgcg

SEQ ID NO: 10023 - DNA, 1310 bp, Artificial sequence
  DNA replication origin
cccgagcggtacacgttgcataaccggcctaaagccccgagcgactccaggaccgtcagcgggcgggggaggaaattacaaaagccctggcgtaaaatttcaaaaaatgtgaacctcaaaagaaaaaagggcctgcacgcagagctcggcggattcccgtgcgctccgaagacggatattggaaagctgcaaaagtcaccagaaagaaacaggcaagcaaacaaaagtcgcccccagaagaagaggagggttccctccgggctcgctcggagtcccacagggcaacgaagcgcgggtagcggctgcggagccgggcggaggtgcgcggggccggggcgtgcggccagcaagagagagggcgggaggctgggcgctggagaagatgcggcggtggagggcgcggcgcgggggttttagaggcccggcggggcgcggggcgggccggcgggcggcggctgtcagtgggggcgcggccgtccacacgtggggctcaacccggactgagaggccggcgcagagtgggcggggacagagtaagggagagatcgggactgaggaacgaggggaaccagggttgggtgaggggaagaggaaggaagggggggagggcgaagggagggaagaggacggagattggggagaaggggggcgaacccgagaggaaggccgggctggaagagggacttggaaagagggattggcgagcccgggtgcgagaggaaatgagcgggggatgggggcgaagttagggcaaagagagaagtgggaaaggagagggagggccaaggtccgggcgccgagaggaggggcccggggggccggctggagggggcgaggcgctaggcggctttgcttcccgtccccgtcaattggccgctagctctgttttgactgcctgtacaaagcgagtagacggcgggggatggggcgattagggaccggatttgggaaaggaggcagcagccccttcccctccccctccgtcctcgcccggccgcggaccagggactagggtgcctaagcgcgccaggcttggccggacccgcagctgaactgacccgcagctgaacttccccgccggacagaggccgcaaggttgaggatgagaacgggtctttctgtagggtcccggcccctgacctgggatggggggattcgcagtcagccaggaatagaggctcacggggctgttggttgcagcctcaatccaagaaggaggagacctcccctttgccctcctacccccaccgccccaccgggagcggcgtcagtctgcgggaccaaattaggggctgggagtttccagattg

SEQ ID NO: 10024 - DNA, 842 bp, Artificial sequence
  DNA replication origin
tgttttgactgcctgtacaaagcgagtagacggcgggggatggggcgattagggaccggatttgggaaaggaggcagcagccccttcccctccccctccgtcctcgcccggccgcggaccagggactagggtgcctaagcgcgccaggcttggccggacccgcagctgaactgacccgcagctgaacttccccgccggacagaggccgcaaggttgaggatgagaacgggtctttctgtagggtcccggcccctgacctgggatggggggattcgcagtcagccaggaatagaggctcacggggctgttggttgcagcctcaatccaagaaggaggagacctcccctttgccctcctacccccaccgccccaccgggagcggcgtcagtctgcgggaccaaattaggggctgggagtttccagattgaaatgcgccctccaccaccaagagggagctcacgcggccgcggggggccgaggcagccagccggcgccgcggtcctggggagtccgtgcaggggtgtgctctggtgtgaaacctggcaggactctgcctgggcttgcatgcagggaggggttagagactctgaaatgtactagcgggcagggtggtgacaaggcgggtaaatgaggctcggggcatgcccttgcttcctggcttggaccccttctgattgattaaatcctagcaattggtgcaaccctctgtacctcttagagtgcctctcaccggcctgctctgggttcttcctttgtggccctcctttcatgaaatctctgtgaagtcctggtcatttctcatttagtggaatatcacaatttaaaaatcaaacactcctgaa

SEQ ID NO: 10025 - DNA, 1428 bp, Artificial sequence
  DNA replication origin
tgttataccttatcagcctcgccagggcccccgcgccgcccaatcccagcaactctggttctcctgtgaccccaagccttccagatccctgggtttccccccacgggactgtcacattcttccccgccggagacgccagtcgcggggcctcctccctggggtgtgagcaggtcggcgcgccacacttctctaggtggccggacgcgcgcccagggaggagctggcggcggggcccaggctgttccggctgcggcacgccaggggatgtggttagccctgagcctggaggccgaaggtgggcaggcaacactcccaccatgtttcggaggagaatacactaggctagcctaacgacactcggagtgcgagctgcggctggggtaggggcacccctttccagcgggcgcgtgggtcaccaaggagcagttctccgggacccgttgcgtcagagggactgggcggggctgggcggggcaggacgggggcggcgctcaggaaccctggaacccgctggccctgaggccacggaccgagacgtggtgctgagcccctgcgcggtttctggtgcgtagagactgtaaatcgctgcgcttctcagtcatcatcatcccagcttttcccggctcgaattcagcctccaactcaagctcgcgggaaagactacctgagaggagaaaagcttctgtccctggaccttcttctgagggtggtgaggtttgtttagggtcgcagaagcagggaggactgactcagccctcacagagaagaggtctggaaagtcctggggaactcgcagggcacgggccgctgtcgcggttgggaggcgagggcgcagcgctggggttgtagattccaagacccctgagggtggctgtgttggtttctcgcaggagtcggaggctccctgctttccagccgcccagtgacccaagcttaatcttcagcaccacttggggcgaccttttcggtgcaaacctacgattctgtttctcaggattcctccccatcccgcttcgccccggaaaagctgacaagaacttcaggtgtaagccctgagtagtgaggatctgcggtctccgtggagagctgtgcctggaagagaaggacgctggtgggggctgagatcagagctgtcttctggcccagttgcccccatgcttctgtcatggctaacagttctaggggctggaatggtcgtcctgcacttcttgcagaaactcctgttcccttacttttgggatgacttctggttcgtgttgaaggtggtgctcattataattcggctgaagaagtatgaaaagagaggggagctggtgactgtgctggataaattcttgagtcatgccaaaagacaacctcggaaacctttcatcatctatgagggagacatctacacctatcaggatgtagacaaaaggagcagcagag

SEQ ID NO: 10026 - DNA, 872 bp, Artificial sequence
  DNA replication origin
ctcgcggttcttccccatactgcgctcccgcggccgcggcttctcgcccggcgcacgcctccagcgcgatccactccggggcgcagcggcctccccggagcgctaggaggccgggcggcgaatttgcccaggccctttgtctgccgggggagggggtgttggggtgggggggtaggctgtgtgactccgggaggccgccgaagccctggcgggggtggggtggggtcgggttgggggaggagcgggggaggcagccccgcggccccgcagccctcgagctccctggcgaattaggagatgagtctattttctgtgttctggacgctgcaggagtttccgaggccgagcaggctagtgctggagccccacaagacagacccacagccagccgagagccgggagtgctgcctctggacaggcagaggactgcccggcgcgggcaggagagctgtggtgtccgagccgaggctcgccgcctgcacccgcgcggaacgggcggaggctggtgtcacagtctcagcaacttggtgtgccaagctccgcacactcctcacgctccttaggacgcaccgctgaaggctctcacccgcagcggcgcgggagggaatgagtagggagatgggaagacacgactagagaggtgggttgtagagcagaaaagaatcaagcacatctgaccagaaaaagggaccaaggggtgcccgccaagcgtgactttgcgggacaaaggtcccagaacaccgtgcacgtgctcaaacgccggttgggatggggtggggacccaaaatccctcacctgactattgattggccactcgggaaggcctgatttgcatccatcccctgcccccgtgtgcaggtagaggtgcctcc

SEQ ID NO: 10027 - DNA, 1313 bp, Artificial sequence
  DNA replication origin
gctgtcgcggcgcggcacgcggtttccccggctcacacccgcccctcctccgcctttgcgcccccagccgcggccgcagccggccgcctaggcgccgacaccggctggaggtcgaagcgccgcggacgcctcgactgccgcgggctgcagctgcctgccgggctcccgctcagctctgggccggggctccgagcaagggtcgggagtgaaacttctcccggcggcggcggtggcggcagcggcggcagcagcggcagctggaggagctgcaggaggaggaggaggagcagcggcggcggcaacgcgtccgctcctaggctgccaccctgtcagtggcgcgcctgggccctccctcctccctccttcccgagcccccgccctcactcccgcctcccgctccccccgccgccgggctccgagctggcccggaggaggagccgcaggcggcaccgctgccagccggagagaagcgcgggccgcggtatttccccgtcacccgcccttggacgccccccgtccgcgcctcagtccagagccggcctcctctccggaaggaaacgatccctgtcgggccgcctccggcttgcagcgccgacgccccctcttccctcctcccccagctcttgctcttcgtcccatttcccgtcccgtcccgcccctccgctggcctcccgacactcgtgtctgggggctctactggcctcctcccggcgcctaggctccgctgacctcatcggcggagctcgggtccgggagcccccagcaagttcgttgctgtcccaccgtgctctcctcccccggcccacagccgggtacgtcctggcgtgacccttaccactctgccccgccccaggtccgccagggcgccactcttcgcgttttccgtcctttccacgttgttcttaccgctgccactccgcgccttctctctctagtcggtcacttgtcaggaaaccaaacgtcccatcccagcacctctcctcccagcctaacttccctcctacctgcatcgtccaccagctctcctcagtccttcacagaagcaccattgtcgttagggtctctcctaagaaaatctctgagggattggaaatacttatcctgaaaggctaagggagttggtggtgtgtgggggttcaatccccaaagaacgtaaaaatcccatgtcctccacctgttgagttggaaaatgtggggctgcctaatggtctccccctcggctctcctgatgatatctgttcaagaaatgagaactatggtctattttcagtcttggtagaagattggctcagtgggactggcaaatagtggag

SEQ ID NO: 10028 - DNA, 1958 bp, Artificial sequence
  DNA replication origin
aatgagtttcagctattattggattcttaattcaaaacacatttcattcttaatagaaattgaaataatatgtcattttaatgttctgaaggacaatctttcaaagtattaaaacaaatgaaagaagtaggtgctgttaatgcattttataaattccctgcaaaatgtggcaaacttctgccaggaaacctttgtaattttgagatatccaaggcaaggaacttaaagtagaggaagctttcttctttgagtcaatcctaaataccactgttaaaaatgtaatgagaccattctttatttttatatccaattatcagtattttctattccaacctgctctagagtgacttccctccttccaatccaaagccaagaaatctctagttattatgattacactaattccttgtgccaaaatgcaacagtttgggtttattgtttggctttttgttcgtttttcttgcattatgtgaaaagtactatccgaatcaggaggaagcaatgaggctacgagtagaaaggcataaaataaggaagggctgcccccctttgaccgggaagcaaggaaatgtggaaaacacagagaaacctcattcggtacaaccctgctgcttcccttgcgttgctccccatctcagcaactggctggactggaaagattcacttctctgacctaaagaactttgatccgctgagtttagaaattctctgtccagagccgcccacattccgggaaaaagaccgcgcctcttttaaactgacaaaaaaagttttttcttgctgtggctgcctgtggttctgggaaggacttccagcctctgcttatcaccgcggccaacaaaatgcactggaaaggaaccaatactagtgtgtgctagtacagtctgctgttcccaggggtctggcttattagcgggtgctttcctcttttcccccaccaccaattccttacaacatgcccatcctctcagggttttattgaggtgtggcggggggatgggggacggcttggtgctgaactgtagcggctggaaggagcagcgcgctggcacggtggggatggccaaggactcccagtatgtggagagttgagccaaagggaagggaacacataggaaagggtccgggacagcgaagacgattcctcaatctgagcagttccaaaagtgcgctagatccagtttaaacaaaagagcaagatccaaagccagaacactggatctccagactagttgtagctagcatcctccgtcttcccttcctgaagaccacgcccctctggaccgattggggaaactaccatcagcaggggctttcagaggagggcagagtgggaatggcctttggtttagctctaaggttccttttctaacctctccgacgaggtaaagactaagggacaagcgcgaggcggcaccgaaaacagcaagtgaggaaggcgaataaagccaggcaggtgtgaggagggtccagattgcagaagacgaggaacgggctacgaattgtgggcggatgcaaggggtggggagggcgggccagggcctgtgggagcccgaagcacgtgctggcagagaagcagcggaggggctgggcaggggctaggaccggttacagagaaaggagtcggggagactggcaggctggaaagccggcgcagggaggtcacctttgatgtagacatcgtcgtcggcgcgcatgaaccactcatacttgtccaggtagtggtcgtgcatgtacttgatcatcatgaaggactttttctggggaggataggagtcgtccacacccggtagcgcgatgacaggcaggggtggcgggggctggccggcgttggggggctgctggctggaaaagaactccacgcggcccgggatgaaacgcgcccaggtccgctgcgcggccagcgcgcggctgcccaggtacttctgcgcggtcatcacccccacgtacaggaagtc

SEQ ID NO: 10029 - DNA, 979 bp, Artificial sequence
  DNA replication origin
cgccggctccgcggctcctgccgccccaacgcctgcagctgcgctccccagcgcgctcgcagcttcctggctccccctccccgcccaggctcgcgcgcgggttgggcggagcgagaggcggcgcgcgcccctagagcggccggaggggcgggcgccgttgcgcagctgcagcgaccgcagtgctggccccgccccccgccaggccccgcccccgccgtacctccggcatgggcgaatcggccggcaggcgatgggacccccgggattcgagccgcgcgggttaggaattggcctctgtagctaacggacgcctgagatccgggactgcagcactcgcgggaaaggacgctccgaaagatggcgaccaaacctgggcgggagcgtgggggagccccttcccaccccggcccgggccgcggacatccgtgcggaggagcgacgtctgcgcacgttgtggggcggtggacgcgcacaggcgagggtgggtgggtgggtgctgagcggttgtgggatgaggggtctctcagtagcggttgagagcccatcctctgaccactgctttttcatgtaaaagtcagaatcgttcaatcagtcattaactggtttaaggctggctaaaccacctggtttgaaatgcgtgaaaattacacatgtactagacttctgtgattcctttgggtgtgtattttacatatctcagaaatcagaaacatgagtgccctatctagcagccagcagtccaccaaaatgcctacaaaactttatcgtaagttcaaaaggatagcgtaatgccactgaagtaagctctcgaacctgtaagtaatgtatggtcttccccattctaggttgatggcgaggatttctagttactcaggccaaaaactttatatcatccataactcctctcatactctcattttcactttcaatctgtcaagaaagcttgttggttgtaccttcaaaatagaacagagtgggc

SEQ ID NO: 10030 - DNA, 894 bp, Artificial sequence
  DNA replication origin
aggtttctcagggctgctttgagctggattaggggcggcacgggaacctaagtgggagagattagactgaagtaagatgttggggtaaggggtgatattgtagagttaaaagcagcatttgttgtgtagagtgattagtgatagcctggatgcagtttcgtaggaattgagagattaatcggaagacccaaggcctgagtaagaagagaaggaggaagataggtattagaggactaacaattggaagaagccaggatactcagttagagagtagccaggtgggtccagtgtaattagttgcctgattagtgagtttttgagctctgtctttgagttttttgatgttatataccaagccagattaatttaagtaaaaacaacacttttcattaagaaatatacagagtcctcctttttcagcagtgagtaaatcaaggcctcggcggttctagaggacagctgcggctaaagagtcaacctgagcttggaggacagataaagtttgtgatatgtctgtaatgctagcagagaagtcattggagaggctgcggaatgttgtgacagaggttgagatgcctgctattccagttccaagtctggtagtggaggcagaaagtcctagatccacaagtaaagggattactgggatgactctttttgtcgtgttggtgtcatgagggagacaggcagttgttcattcccatctgcaagctggattttgggggtaaggaagactagagtacatgtgcccttccagttggcgggtaggcacatgtgggtggaagaggcacataaaaagaagagaccttgtgtcagtcagaactggaaatgtaaagtgaaaaggtgagagggtgtactgcaagaggagtcctgcaccccaaatcctagagatcc

SEQ ID NO: 10031 - DNA, 721 bp, Artificial sequence
  DNA replication origin
gaaattgggtctcttgaatgatagttaggatgttttatccttgtgagttcatatgccttgtcttcccagcaaagaaaatacagtgcttttaaaaaacataactttcagtctatgtgtttttagcactctttttctaattcatctatattcactcattcagctcatttttgtgagtacccactatgcatcagacctagcattaggtgctgagggcatagggatggagaagacataggtctgcacccgtgagctcccagcttgtgtcatcaggcagttacaatatgatgcggtcactgccttgaggtctgcatccctggtgcatgggttacccggccactgagagatcagtacagcaggacagaaaggattcccagaggaagtcagtctaagcagagtcctgaaagatctgtagctgcagaagccagggaaaggcattccctgcaggagaaagagcatatgtggaggcctgatggtagcacagaacacgctgctttgagggagttttgagaggaaaagagagggcccgaggcagggcttgagggcacgagcatgagggagatgatgggacaggagttcccaatagaggtcaggcaggaggggctggagaggctagaggagaacaggatttgtcagtgtcgtctgtggttaagttgtaactggaggatgtcaccatgaaatgacctgctggtgctcttgacaaagactggtcccgggcgcggtg

SEQ ID NO: 10032 - DNA, 1412 bp, Artificial sequence
  DNA replication origin
aaggagcttagggagctgaggggattagggaggcttcactcactctcccagctcaggggaagtgtccctgtggcctaacttaaggaaatggtgggggtgaaggaagtgattactaggcccaccaaccctccaggttcaggcctgatccagccaagcacttagcattggttgatcaattaaaacctcgaatggaatcccagtctgccaaatatccatgtgacactaggcaagtcaattgacctctgaactcagtaaaaaaagggatggtgccaccgacctcctagggttttccatgaatattaaataacacgtacaaagcctcaggtaaagatttcaagagggtcaacttcctccccttccttggctcagaaaaagctttattaccacttctgatggtgctgtttgaatgtgagataataataaacactaacattcatagagcatttgctgtggcctaggacaggtttaaggccaatttaaggatcaagcactgcacacaaattatcaggctgaatctgcacatgggggttggggtggaggtggagatcctttagtggtattatactctggaggaccccaggctcagagaggggaagtagccggtgcaggtggtagaactggcagataaaagggcctgtggtgagactccaggtgtgggtgtatggggggttgagggaggtaagcgcggaggcgggatcgagcaggggtccttgtagccgcctaagaagtgcagtggtgaagctgactcctgtgaggtggaggggaggggtctggaaacagtggagacacagcagccctgggcagagcagaggagccaggtgaaccctaccttacagaaatcttgtactctggctgaaggacgggcagggaggggtcgtgaggaagcccctcgccgggatcaggaagcctaggtcagtccgggttacatagctgacctgctgtgggacctcggggaccaacaccctcggtttctggtcccaggagatggacaaggacgcaatgtctgttcctggccttggctcagggcctaatctgatccgcggatggtccttgccatcagggaagggggacgcaagaactcggcgggggtttgtggtggggtcgcagagagcaagccctatatctccctccgcagacccaggtgctccccaaacccggcccggagcccgcgagaactgggggcggagggtgtacttaggcggccctggggaccttgacgggacagctcagcagcaggggatgggggctcggcggccgcggagatgtaacacctccacctcgggcgaagacctcatagcctgcgggagatgggagtccgggacgcggacaggacgggcacttacctacgaatagccagagggagccccccgacacgaggaagaaggtcagcatggcggtcagcggggcccggc

SEQ ID NO: 10033 - DNA, 1638 bp, Artificial sequence
  DNA replication origin
acctcgggcgaagacctcatagcctgcgggagatgggagtccgggacgcggacaggacgggcacttacctacgaatagccagagggagccccccgacacgaggaagaaggtcagcatggcggtcagcggggcccggcccggcccggcccggcctccccgacccgcagccccgcagccccgcagcccagcagccccagcagtagccgcgccgccgccgccgctgccgggtatttttagcccccgccctccggccccgcagctcccgcctccccgcgccgctgcggagacggctcaagggggagggcgcggcgcgcactcgcaaccgagccttactccctgccctgcagcctggccggccgggtctggggcttgccccgcactgaccgcggtgtcggaaccgccaagctcccgggcgggggaggggcccggccgcagagcgaaccagccctctccggccccgctctccaacgtcagtacctggcattctgcggaaaccggctggaagggggagcacgggcgacgagcgccagagcgtgacattgagcccaccccgccgccacccaccccatcaacacgcgaccctgcccccgcgcgactcgcagcctgggttttatggctgggcaggctcgaatggcagccgggtcgcggttacctgtcctaggaggtgcacactcctgtgggctgttgcccgctgacaccaacgccccctaggacccgagtttgcagacatggggagcctccgggtgccacctctgcaaaccagtgaggggagggagtggcaagtgttcacctaggctctgacaaatcaggcagctagaccagatagtgcccagatcatctggggacgcacgagttcaggtctgaggctacgcaaggtcacaggagactcagtgtgatcacaggctgccatatgtgttcaccagtagtaacatggtcacaggcagccacatggaatcacaggtgtctcatgaggaaatcatgatcttcgtacacaactgtatgtggcacacgaggtctcaagaagcccctcatagccacaataaatggccatatagccacacacagccacagatgcccacactgctgggctgagggcttggacacctgttgcagtgtctgccattgaaaggaggaagcccagttgcacattttctgaaataataagggtaggcatcctggtgggcaccccatgaacatctgcacctccaagcaagatcacctcttcccaatgcccttgcttgttttcctcaagcatgcagagcccaccaggactccagcaccgaggacagcgctcaggcagccgggccttctctatacgcagccctcccaggccaggagctggctgagccacagcccagaaagaagaggatagaaaaccagagagcagaagtcaggaagcagagagtggaagagcatgagatctcttcaggcccaccagagaccatcagccatgagtgcatgtgggctcacagctcagcagctgggtgtgtgggggggcctgtatctgtagtacgagtacatggcatgtgtgtgcccaggcctgtgtgcaccttgtagtggtgcaagtgtgcagatgtgtgcctctgagtcacttccaatctttacaataggatcctacaccttctccatcataggatc

SEQ ID NO: 10034 - DNA, 1135 bp, Artificial sequence
  DNA replication origin
agatgaagaaactgagtctcagagaagctgagctgatgtagctaggaagtgacatcactgggactgagataagcagaacagtccaacccagaggctgagcaccccctgggcagcatcggacaatgacggccttaaaggatgatgccatgtggcaggaggggacagcagggtgaggatgagatgtaaccactctgattactgacggggagatccctgaggcctctggcggagtagtttcagtgtatggtggggcaaagcctctggcagtgggctgagaagcgagtgacggtgagacggagggtagaagattctttgaagttttattttgaaggaaagagggggatggggcagccagaggagtcacagggtcagagacgcaccttccacacagaagtttgagctccttcctctcttaaggaggtgagccgggaatgggtgagatggctggccggccagcacaggcagagccccaccatcagctgtcacgggctcctcgcagagagctcagggaagggctgcctgggtggcccagtccatctgggtggggtaggtgcagtggggtgggcctggttggtccacaggtttgtggtgggaggggacaatggcttctgtgttctctgtgaaatagaggtcaagtcagcccctgaggtggggctagaagcaataagggtggtgaggtttggtggcttgagctgtgactacctggaggtgaccttgaggggctggcagcctggggtcagagggcgaggaggttgggaggacccagggccttggcaggcaagaatatggaatggaaggccccagaggcagggagtggggccatgggaggaggctgggatgggcagggaggccagctgggcagagcaaaggaggcaggaggtggtgcagccccggaccccggagaggcccagtgactgcagcccaatacctgctgccgttcgatgaaccagggaggaatggagggacatgttcctaaaagcaaacctcattccaaaggggctgccaaggatatctgggtagttggccaccacagcgcttccgtgagcccttggaccgaggcatagcctgggtcatcctgggggtctccttcaaggtttgccttgactctataggagcttcatgcaaaatcatgggc

SEQ ID NO: 10035 - DNA, 1227 bp, Artificial sequence
  DNA replication origin
gtgggcggagccccggcagcggcccgaggcggagtcgccaagggaggaggcgccgagctgaccgggcgacgccgcgggaggttctggaaacgccgggagctgcgagtgtccaggtgagcgccccgcccgctcagccgccagatcaaccttagcgctggggcgcgggctggggtcgccaggcggtgcgttctgcccgcgcggggctgagagttaggggccggggccggatccggggccgggggtcgcgccgctagccgccagcagcgcagtccgggccgccaccctgcaccctccgccctgtttctgcacccgtctgggttcttgtgccgccgcccgcaagccttcccgagctcagggtggtgaggtcagcggcgcccttcgtgcagttccctcggctgtcgggcggggctgggaacttggccgctcttccctgtcaggctcccgggaagtggcggcctgaccccgggctgccggctgttgggagcgggggcgcggcgtccgcctggccctgaggggcctcttcatattggctaagcccgttctgcaccctcccaagggctgggagtcctaggtcttgtccgggcagggtccagcttggagcccattagatgggccattggatcagaaagtcttttctcccccagacatccttgtggaaccagcgttgtttttccttggcagctgcggagacccgtgataattcgttaactaattcaacaaacgggacccttctgtgtgccagaaaccgcaagcagttgctaacccagtgggacaggcggattggaagagcgggaaggtcctggcccagagcagtgtggtgagcgctgtgctggaagggaatgcgggcagtgggtacttggtagagcactgactgcctccggccagaggacttcccggaggaggtgacccatgagctggagtggtcagaggaaggctggcaaaagggcatcgtggacagaggaacagcctatgtgagtgggagcagagaccttggccaatgccattccttatggccttgtagtggaagcaaggtgatggggaaggaacactgtaggggatagctgtccacggacgctgtctacaagaccctggagtgagataacgtgcctggtactgtgccctgcatgtgtaagatgcccagttgaccttcgcagcaggagcctggatcagggcacttcctgcctcaggtattgctggacagcccaggtgggtccctggcctttgtat

SEQ ID NO: 10036 - DNA, 1593 bp, Artificial sequence
  DNA replication origin
ccaagtatgactcccaggcttctggttaggtaactgatgggaagtatctccttcagtacagcagtgaagacaggatgtgtggagggggaagatgtagggggagaacaataactctgtgttggacatgttgccattgaggtgcctgtggacactcaagtggggatgtacactgaacagtgagttacatgaatctggggttcagcagtaaggataagggtaaagagagaaatttgtgtcacctgcgtgtaaagagaagcgtgaagtggaaagcctagacctgagttttgaggaacccccaacctttactaatagggagaggatgctgaagaagcttgagcagaggtggccagaaaggatgaggggaaaccaagggaaatcagtgttccagaggggctgtggtcatcgctgggtgtcagacactgctcagggccctggcagatgaggtctgaagaacagccgttgaaattggagattggaggctacagtttattgagacctggtttggtgctgttagggagctagaaggctgactgcagggcctgaagagtgggagagacagctcctttagggcctgaagagtgggagagatgtgaggatggggagacagctctttcaagaaattccgctgcggttgagaacagagacactcagtggggtcgaatgagggttttgttcccatagtagaggcttgaacacatttacaggccaatgggaaagatccagttgagagcgggtagttgagccttcaggagagaaaagggatgttccatggggcaaactcctgagaagggggaggagatggaaggaagcttctgtggatgtagcagatgcaggagggtttgtgtagttttagccgggctcgagccggtggctgacgcaggcaggaacaatggctcacccatgttttatgtgtatttccgtgtgcgtgctcctgctttccccaggtctgggccgcctgcctggcccgtgtgccgtagggaatatccacactgggcctgggcggaggctgggcatctcccgctctgggcttgctccctgatgagattctcagaccgtgcttcccctcattcatgagaggaaggttcacagagcaggcgtgggaacctgcctggccgccagggcctcctcccgctcaggctgaggtttgctgcatctctgtccttattcccttccagactggattggctgaaccaggtgtccactctttttggcccatggcataaagaagggtttgggcaacccagtgtgccccaggttgttaccgcccccccgcctccgcccccacccagcctttgatgggcccccttctcatcaatccatcacccctgcacatgccaccaggactgcctggaccagagcccgggactctctgaaacccactgagagctcggccctgggaatgggcctcccaatctcggtctccagggggtgggccccaggtccctagtcttcctcagggtcttctccactgttctgcctcctctcctgatacccagttcctagccggggtgaccccagcctcccgtaacagcctccttgtggtggtgctgggaagaaggggcccgtgtacccggcagggccccccaggcaatg

SEQ ID NO: 10037 - DNA, 1483 bp, Artificial sequence
  DNA replication origin
ccacgcagccgccagactcacccgtgagatggtgaggggcgcgctgaagtcccggccgcccaccaggcggaagccccagggcgaaggcccgcgcagggtcacggaatggggcatcgcgggctggagccgcagccggagcctgagccggactctgaggaggagccgccgccgccgcagccgccgccgccgcctggacgccgcgcccgcccccggcccgcccgcccctgtccccactcggcccagcccccgcccccgctccctgtgcgcctggattggccccgcggccagcccgaccctcccacttcggggggctctgaggacccgccctcagccccggctgccggcaacccggcacccccactcagctctcagagatccccgcgttcggacggccccgacggcctggatcctgctcgggccttggatctgcaggccgcggacccaaacccagctgtcgacaccggccctttgaagtcgcttttaggggcggtgctccagcccgaggagggatggagggcccacttgggggatggggctgccccagctcagatacctcctcatgggcccgactggcacacctgcggcccatcctgccgtgtgaggagccctctgaaccaagaaccctatgaaccaggggcttgcgcagcactgggccggggacgcagacccaaaacgacagcaggcagcgccgagcgtgggagtggacacagaaaggtcctcagactagtttgtggaggccagtaaggcttcctggaagaggtggtccctgacttgtatctggaagcaaggtgtccctgcttccccagaacattcaggccttctcttgctgcttgcaggctcctcgcaggccacctccctgtctgcacagccccctcccctcgtcctttgccaggagatttgtttccccaggtctcctgagaaagtagcagctggagcggctggggtcgtggctgtgcagtgtaaagggaagaaatatatgcagcgcttcactttgggcccttttctctccaaggtcttctctccattcccaaccattatcctccggggatgtacttgaacagccaatgcagatgccatggcaccaccaacctccctctggttctctcggcacttctatctggctacatcagggagacaccttttacttttccagactctgtggaggtctctcatttagcccaaatccttaaccttatgtgtccttttagtcaagctgtgataaggaccctgctcttgggctcctcacaggtggtgggatgaaatgtgtccactgggtctctgacaacccgcaaagaggagaactgcttgagaagcacaaacctagggcagtccaaggaagggaggggcccttcagagtagaatgtgggtgcctctgtaggaggcaagatgctgctatctgttcagctgggagagaaacaagtggtgtgtggtagcggtgtttatatgggagtgtatttggggtgtgtgtgtgggggggggtgcg

SEQ ID NO: 10038 - DNA, 1629 bp, Artificial sequence
  DNA replication origin
gccaatccaggcgcacagggagcgggggcgggggctgggccgagtggggacaggggcgggcgggccgggggcgggcgcggcgtccaggcggcggcggcggctgcggcggcggcggctcctcctcagagtccggctcaggctccggctgcggctccagcccgcgatgccccattccgtgaccctgcgcgggccttcgccctggggcttccgcctggtgggcggccgggacttcagcgcgcccctcaccatctcacgggtgagtctggcggctgcgtggcggcagggcggtcccatgtctgagaccgggttctcgcggtccgcccgggacccagatcccctgtgtatccgaggcttgaaggcggagggttggcctgggcgccccgcatgctgtagaggcggcttccaggcagaggcaggcagccccagccgccctcctcccacgctgggcctgtctgcccgatcccgcgaagaatctcccaagagttcacgcacccgcctccccgctggcctcatctgggggagccactgtggacccgggaaggacccgcggagatgggccaggggtctagacagctctacagaggcccagaaactcttcagactcaccccctgcctgaagatctggggcaaaatgatttagagccccccttcccctatcaggggtccctgccggcagagcttggtgacccagggaggtctggggtcctcgctgaatctgagaagacagaggtccatccacttcccactttgggcgtgagtcagtctctcattcacgacctcagtcaccctaaggggaagtgaccaggaggaattttggcttccaggggaaagggagacttaactgtgaggttgtgagacccctccccacaagatgacacaaagccgggggccaggacagcctcaggcccgttcctcaagtttcccagggccctgccttgcccacagagaaggaaaaggagccggcacagccctggagcgtggctagtctgaggatagaggagtggaggaggtgactcaggccctgttcgagggggtgcctgtctaggggagacaggatcctggcccagcctcgacatcctcgtgtctggagggccaaaagagaggactcagaccctgcccttgggggtccccagcctaagggacagaagaggagagaacccaggccctgcccttggcggctctcagtctggaaggagcagaggagataacctgaaaccatctgacggccatcccttgctcccacacaggctgatcttgtctttgggggcctgtgtcagaggcacagagaagcaccttcccccaccctactgccacctcttgccatgggggctgggccaagccggctgggctttaagagacttctgtccagttcttgggagggggtgggcaccaggtggagcgtggaatcatggaatcccgtttctgggggccagggtgacaggcaggcccagctgtcctaggaggcttcccacatctgccctcactgccaggtccctggggccgagtgaggtgggccttcaacacatcccagagcctttcatctcctctttcctataggattcctgctgtgtgtgtgtgtgtgtgtgtgtgtgtgtgtacgcaagcctgtgtctgcttgtgtgtgtcatg

SEQ ID NO: 10039 - DNA, 2353 bp, Artificial sequence
  DNA replication origin
agaagcaggcgtgggagcagggtcccagctcagacgagttccaccttggcattggggtacaccgccaccacgtcgtagccctcgggcggcttcacgcgcgccttggcgtggctctcacagtagagccgctcgtccagaaagaagtaaccacgctgcttgaggttcaggccgcagtcactgcacatgaagcactcgggatggtagagcttgtcccgtgccttgacgatggtgcccctgatggggggaacgagacaggacagcgtcgagtgactgatgggttcacgactgcgcccgcatccagggccctggaaggctagggtccgggaggggcagcgggggcggttactcacacgatgccgtggccgcagcgcgtgcactcgggcagcccctgcaggccgctcagcggagcgcccagcttgctggccgtgggcttgaggttccgggggccgccaggcccgggccaatcccctgaaacccggagcgtaggtggcatgaacggggtgaggaggtcagaactccatttctgcggggtgtttggttgggcgccagacgggccatcggcacccgagactggggaacgggtttggcgggcgtggggtgaggggcagcgacagggggtggagagggaatcgggaagccagggcgtagcaaggttgtagcaagggcgtgggaccgggccgcagagaccgaagagggcaggtgactgcgaggcgggacgtggggtcgctagggggcaacctgggcactgcagggagtgggaaggcagatggggacaggtggcaggcgtcttaccgccctcgccggcctctagcatgccctgcaagtagcggaaggagcctgactgcttgggctccgcggccacgggctcggctggctcccgcagcatcctgtacacctcggagcccaggtcgactctgcagtcccggctccgcgggaggcctctggctgggtcagcgctgggagggagaaagaaatagaggaggaagggatgcagttccagccttcaccctgtggacttggggtctggtaaggcttatgagtcagaatgcaaccagctaagacccaaggatcaagtgtcaggggtcagagtgggactgggtgagatttgagggatcaagggttaagatgggttctgggcatggcaccgaaggcatctctgtgctacctggggggtggagacacatgcagggtgctcatctgggctggcagggtggcctcgctgctgccattgtgagggactggaaagcgagggggttgtccatatggagatcccaggcttggtctgccatcttctggcccagtcccggtgcctgagggccgcctgctggttgttgggctgccgtcctattagagagaggcctaaggcactgggagaccctctggcctccagccattccttgttcaccccacccccaccctgctgtgctgtgccaggtggtggatgtcagttggcttcctctgcttcggcatctctggcctgtggtgctcagccagggaagggatttctggggaagggctgggcctggggactggttatgcccctgcagaaatgagaaacgtccttggaaagtcagacacaaaaacctgggcagctgagactcagcctgggcttgtgagccctgcagtggttctgcccaccaccactcaggaagggacagtactggggcaggcctatcccaagaagcctaaggtctgtgtggctacagcagagtatgtggcctcctggcagaggtggccctggtgccaagccttctcaccttcctgaactgtggtgggtactgggtaggcccatggctgggaactcaaaaaacgtaactcctgtcctacagtcagaaagggtccttgactgtcatgtgtccaaggccctttgggcaggctgaggctcaagagtgccattgtgaggtcagccccttctgggcctacacctgtcccccatttcctgctttccaggccacaatgagtagccttctgcaggcacagcagatgaggggcagagaccaggctagggctcaaggctctctgccccactaccccacagccagcctggtgcccatggctgaaacattttgggtgggagtgtcctgaacctgccccctcagccatgaggagagggcagtatctctgtgtgtgggggtctgagtggggactggggatctttgtccctgcagagtccagagctgtgcagttcccagcttgcaagtgcacacaagcaccccacagcaatgtaaacaggggcatgcacactctcacaattatgctttaaagacacacacacacacataaggacaacacatatgcacctaccaatctccctacatacaactaactacatgcgcatggttacagagacttg

SEQ ID NO: 10040 - DNA, 748 bp, Artificial sequence
  DNA replication origin
tgggtaggatgttatggctggcatgagggtgtagaggatgatatccatgtctttggtctgaaagcccctgaggtaaggaactgggccctggggttcgagggatgtagcaggtttggggacaacagtgaaagttggttctagccaggtaggctggagcctggagcactgtgaattggggatcctggatctggttccccctcctggagagagactctgatgtcccctgtctcagtactggcaccctgggccatacaaaccttgtcctatgaggaccctgtcccaagcttttcatggtctactacactcagggcccctgggcagacgaggtgggctgggggactgggtagaggctgggccttgaagctggggaaaggacaaatcaggctgtcagctctgaatgccactccccttagctgccctccaagccacccccaaccaggatgcccaggcaggggctgctgtagttgctgcaaccctgaaggggtggagctgttgatctcggggtagcctatggtggcagggagcctcttgggtggtagtttctgttgggggaaggggttattgcatgtcatgggattaaggtgagtaccagcggctagtggatctgtggtggccagtgggagagtcgagtttctgcgggtgagtgggagtgagaggtgggggccagggcccatggctcccggtatttttccacccactcctgtgcttaataatgcttccctgctttcctgggtgccagtcatcctct

SEQ ID NO: 10041 - DNA, 1132 bp, Artificial sequence
  DNA replication origin
ccctcgatctgctcgggccgcgtggccccgggcccagaccccagcagggttccctccgcggtctcctccaatctggaggctgagcttaggctgccacgcgtggggcgcggaggggcgagtcagtggagtcggttcccgggaaacttctgggggcggcagagcgacaggagcgcgccctctcctgtggcgcctcgcgcaggcggctggcacacgccgacagggagctcatttcccaacagtcctagcagagctgaattcggtcacccctggcggcgcccggacagcgtcctcaggacagccaggaccctcatcttgcacagggaaaacaggcccacagcctggaagggatgagcaaggtcacactacgtcagagatgggcccggatcggagggaggggcgggggcaggagacaaccgagtgcccgggaggcgagtttcctcccccgcacgccggcgtaatggctgagcccagcctggaagcccccgccgggtccatgggcgggcgggcgccaggacatggagcctgcgcattgcgggagcacagtcatggaggcactgtcgtcacgctgggttctgattttgagccccttgctctcctcacgcccccagggccctttatcgcggcaggctgtcagagctttctccgactggaaggctttctgttagcagaagggcctgcccccagtccaggaacagagggagggagggagagagaagtaggagatccgatttggcgctcagacccggcagggtaaccaaagcagggaccacagcctccctttttttggctcagtgcccagacctaaggcccttctgctgttgtgtgagctagcccgggcctggagcctgagccctggggttcacgaggcagataaaattgacagggtgaagagctcacctctttggagattttgcacgagtgtgtttgtttccccaggctccgattaagaggcggagggacatttctgcctctttttgtgtagcttccagtctgacccctcctcttaggaggacttcccacccccttggaacctcagtttcctacctgtaataagactatacatcctgatgtgctaggacagctctgatttatgcctattaatccagtgaaattattaatagagcctcccttt

SEQ ID NO: 10042 - DNA, 881 bp, Artificial sequence
  DNA replication origin
aaaatcggaaatgaaaagacagttggtgacaaactcctttctccatcacctccttattggacagaaacgacccaggaatgcgcctcgcgtgagtcctattctttcttggggtgcacacccgctgctggaagtatgaacagcaggtttgagggggaggggagcgctgacccgggcactgcgcagggagtctcaaggggggctgacgcagagggagggtcaggcactcccgggtcaacggtctcggcctggcacccacctcggtcacgacggtggacaggtagacgtcctggctgaactcccagccatccaggcagctctcctgctccagctgccccaggtccacgtcgcgccccggctccagcccgagcgccgagaagttggcgatggtggcgagccggtagcggctgcagctgtggggcacctcgcggccgtcccgcagccgcagcgggacactgttgttgcgccaggcgctgctcaggttcgcggcgtccggcactcgacagcggtgctccggggtccccgccaggaacacgactgacataccattgaagccattggggatgatgctggcgctgagcaggaagaagatgaggcgctggaagggcccccactcgcccaggaaggcgatcacctcgtcgtagtcccgcatgcttcccactgccgctccgaaacttgcaactacgggtgatgacagcgttctcaggacagtgtcttgtagctggggcgctccccaaggatgttagaacgttcccgggggacaggcaggctgttagaaattggggcgcgaagccggggaccgttcctgggaaacaggctgaaggcgttggagcgttcccgggagctcgcgctgagcttgatgccactgtacacttgggaccaca

SEQ ID NO: 10043 - DNA, 886 bp, Artificial sequence
  DNA replication origin
gaagggcccccactcgcccaggaaggcggtcacctcgtcgtagtcccgcatgccgccctcagaggcccacagagcgcggcctggggtcggggaacgcggcgggctttgcgcgtgcgcgcggggcacccgccgccgaccaggcaagccaggcagcaggcgacccaagaccgtccgcggagggtaggctcgcgagctgacaccgccgccttggtcctgccgcggctggccttacatagggcgcacgaccagggaaggttgcgggcctgggccgcaaggcgcgccccgctggcaggcagagcggcgccggcgaaggcggagctggggcgggacgcgagggcgcggggcgggccgggagtgcacctgaggcccgggcggggcctgtcctggggacctggcgaggcccggcctctgccagccaagcctgctggggacgaccgaggtagcccgggctcggcttaggaaggcagcgggactcgaggccttggggtccgagtccgaactcgctcctctagcgccgggcggggagcgagtgggagagcggccgcgaagctccagtgttgaaaacgcacccctcccagctttttgcaaggcctacttgggggcggaggtaaggagaaagtcactggcccagggtctcacagatagttgctcttgacaccgcctaatcttataagagggacggggattattttgaacctgggactgttaactaccctagtagagaggctgggagctatgacttttcattctagtccagatgccctttccacattttcgtctgtaacaagccattttgttcatgcagatgtaaaaatttaacttcacgattaacgatcctagcctagggttaaatattccccacagattagttatttccgtgcagagt

SEQ ID NO: 10044 - DNA, 1321 bp, Artificial sequence
  DNA replication origin
ggttgcggccccagggcccgcgctccaggctggcggccgctgcattctgcgcccctcgcctgaaacggcagctgcgccagtcctggccacgaccgctttcattttcctcaacgacatcggcaggaaagcgaaagcgaaaccctccgggaggcgggaccggggccgagcgcgcagtgaacgcggggcgcgcggcgggcgcgggccggcagccagaggcgggggccccgggctcgggtctgcgcgtggcctggcccggtggcgttcggggtggagctgggccagccgagtgcccgagagctagtccgccacgcacacctgcctcggcgggacccgggcccgggctgggcgggaggctgggcaggcccgccgtaagtggaaaggcgcccgcggcgcttcggccgaccgggacaggttcctccatctgcccttcattcagcgtttacttgggcctgtggctggcagccggcccgggacctgaccgctggcggcgcctcgggctctggcctgaggaggcagatggcagcctgagcaactgggaccaagcctctgaggagtccccgttggaggggacttgaccatgaggtaccaggcatctcatctggggtcagcggagaacccaaaagtcaatgacgtcggtgaaatgggggtcccttcatccgataagagaaactggaacagcaagcctatggtttggactccctggtctaagcggtgcccatcaatatctaaacatttagagattccaggtttcagtgtctggccgtctcttactgtcagtgatttggggcaaaatattcaagtagttagacttaattacttcccctgtgggatgggaataataataatcatacctactgccagaattttaggaatgaacaatagaaggaagaaaatacttaaaattttctgacagcctctaagtgggttccttgagggcagcaaccaagtcatttacctggatgcttgatagacattctctaatggccagtccatcaacttggagctatctccatgataacaggttagttgtcaaagtttggacaatattatctggagtttaaagactgaggaagccctgcaattttttttggaaggtgtctgaaacttagcctgacaattagcccccacaattatgccacggaaccaggtttttgttagagtggagcatggccacaacgtttgatggacattcctacagcggtgttcagcgctggccactgaggtctgaaaatacttttgcaagcatttctattcacttgcttttagaaaacattggtaagacaccatactccaaacacagtttgccctgtctgtacgtttg

SEQ ID NO: 10045 - DNA, 1426 bp, Artificial sequence
  DNA replication origin
tcccgcccagcccgggcccgggtcccgccgaggcaggtgtgcgtggcggactagctctcgggcactcggctggcccagctccaccccgaacgccaccgggccaggccacgcgcagacccgagcccggggcccccgcctctggctgccggcccgcgcccgccgcgcgccccgcgttcactgcgcgctcggccccggtcccgcctcccggagggtttcgctttcgctttcctgccgatgtcgttgaggaaaatgaaagcggtcgtggccaggactggcgcagctgccgtttcaggcgaggggcgcagaatgcagcggccgccagcctggagcgcgggccctggggccgcaacccgcgccgggcgaggtaagcacagccccttcgcggccgcctcgcgggctcctccttgcggacccggcgggcccgacgccaggcgtttgacccgggcagggtcaggggttctgccgtgggggcggggagggcctgagaagcggcacccttgggtttcgtggctttgagcctccaggccaggctggaagacctgggaggcctcagacaagcgtgccaaggggctagcagcccggggtcgagctggaaccgtggcaagtcgggccacctgagcacgcctttcccttttgtagagcaccgacctccctgggtgttggtaaaaatcaaaagtgggagggtgtacgtaaaatgctgaacagaatgcctaacctgagctcataatctactccctctgacctgtcagactcatttttcccactgggccccaccccatacctcatgtagtttgcttaagtttcctagatctggtgcacctgggggcacttggagtgccttccaagtgttccttgaccgagcaagctggcagctcatctcccttgatcacgggcatggagagcaactaggccaggatgtggcccccttgccctggccctgtccatgtgaagtcagggccttactctgctggggcccccatcccggggctagcatagatgtcagggataggtgcactcacagaccgagtccttcccagaccaggaaatttccagtccactgcatctgccagcagaagcatgaaagatgcgtgccaccttgtctttgcccttcgtcaagtatagccaactcattcttggtatgcaggaagggggttccaccccagggctgtggaaacagcccctgcccttagggcgttcccatcccctgaagagagaaaatatgtattcaagttacccatcaggcaggttgtgtagaacaaggacaggtgagtgaaagagctaagagctgagagtaaagtgactaaatcatcagaaactttacatttaagttatgacaggttttgcaggccaataccaagaatcccctttaactcaatttttgtctcaataataatgaattcagcctaatcacacagatctgatcata

SEQ ID NO: 10046 - DNA, 1453 bp, Artificial sequence
  DNA replication origin
tcggagtcgcgctccgcgcgccctcactgcagcccctgcgtcgccgggaccctcgcgcgcgaccgccgaatcgctcctgcagcagaggtgagtacgcctttgaggcgcggggcaccggcggcgtcgaataaaaggcgcgcggggcaccaggaagtggggggtcgaaagctccaggctggagactcgccggcgcgcggcgttgcccgggcctccgcgcgggctccggggggcgccggaggagctgcgagccgcgggccgcggcgcggggagggcgggacgcggcgtggaccgcccacccggacgaggctgccggcgcccggcagctttcgcagatctgcgtgcgcgcagccgccaggggcctgtaggtggcccgctatgttcgtcccgcgcatccacacgccgtgccggggaccgagtgtcagcccacgcgtgggcgcccagtgctcccggctttcggcggtcccagctccgcgcccaggcgacaggttttgggctccctgtgctggtggcaagggctggcttactgcccaggtggctggagggaatcgtgacctacggagactgcgggaagaggcgccacaggtgttccttgggccacttctccagaggaggggaaaccgggccggaagggttagcgtcctggtcttagcgttgtgggcgctgtggctgtcaggaaggcgtagaatggattcaggggggcgggagggggctgttcagggtgacggctagccctttgctagctagtggttacaactcaagtcaagggaatttcttcttggcatcaagcaaaagaagtccctcccttcccaaaggatttgaattttgagcgaaaagttctgaaattagggtatctgtgcattttgtctcttttcctgcatatgaatcctgaagccatcacttgcatgcctgtctcctccagagactggctgggaggggctgaaggaaggggcaaaagcatttttgcctaagatgctgaaaaaatttggagagcagttttattccagcgcagctcccctccgcactgagtgtagtacctagcagctggctgaggtgaggggagggtaactaagtgacctcgggtggggcaggtcactgcccaggtactgttcaacagattccagactggagcctctgtgttctctttacagccaacatgcccatcactcggatgcgcatgagaccctggctagagatgcagattaattccaaccaaatcccggggctcatctggattaataaagtgagtgtaactctttgggttttcctgccactgttttaacccatgtacttctggagggaccaaagcttcagatgcagctcaaaaagggaagtgataacgggacaagcaggtgtttctcccagtgggtcctgcatgcagggagtgtgcacggcccagcctgggcctcacttgcatgactcctgccttcttcccttcttgaggtagggcacccac

SEQ ID NO: 10047 - DNA, 1568 bp, Artificial sequence
  DNA replication origin
ggccgccgggcacggccggcgtggactgggcacggctccgggtggcctcggttcggcggggctcgggcgcacgtcttgcctcgactaaggagtggcgagctctgccagggcagcggcgccaccgagcaatccaaacacttagcgggattccccagccctggccggccccgcccccggacagccgcgcgggcgcccattggccggctgcgtgccgtcatttcggggaaatcaggctgttgtagagctagcggcgaaggggaagtacagggcggctgctccgccccaccctctccggccgggcgccaccgccccggggccaccgcgggcccgccccgagcgctcccaatccacccctgctccggcttgcccggaggagggctgcccgggacagcccagcgcccctggccccagcctgtcctctcactccgccttgtcccagccggctggctcctggggccatcttttcaccctcctggcggggcgggggcgggggtatatctcccgaacgcaggtgaggggatcgcccgggcacttgccgccctctccagtgggaacactgggccgaatctcccgactggcagcctggctcctcaagcttgccagtgggatatcaagaagggagggtttcagtcctagcactacccctgtttttaggggtgaccccctccctccaggtcactcacctgccctggggaagtgaagaaggcagaaagcctaccctgccccgtgtgctgtctggggctgctggaccaggggaaatcccaacttggccgctgctggcacagcccccaagggacgcaggacctctgtttttcaaccataaaataatagtagccctaccttgatggtttgctgtgatgggaagagattgtaaagcactatgctccactcgggcaacagacgctgagtagttttcaaggtcgccgttgcagggtctaatagtgaccaggatgacaccccaccccttttcggtctgcctccctgggactccccctggctggctttagggaacagaggaggagaaggggttcagagaagcccagacggctgagtgagggtaggggtgggctagctctgatccctcctagcactcttgcctcaggccgcctccagagcctccctgtggcccgcgtatgggagttccgcaatggaagcattgctgtcatctctgagtccccagggcttggcccagagaggttctgggcagcatggaggaattagctcagggctgatcaacgccatggggctagccaaagggttggggagcccaggtcccatgctccttggtaaggcccctacttaactctcgcgcacaactagtccccgccccacgtatagtcctagagacttgactgggtgttcattttccatccaaaactctggcccaggaggcttcttccttcatctccctaaagctcctgcagaagtaagttactctcccaggcgtgtcatttccttcaccccagctctccctccagggcagcaccccattttgcaggctataaatagacacacccatgcaacattcgacttgccagtcactctacctccctcccgtagaggaaatg

SEQ ID NO: 10048 - DNA, 966 bp, Artificial sequence
  DNA replication origin
gcttgtaaattgccgcaggggaaggccgcgttgcgtcccttgccggggcactgccatccgttgcagcctgagacttgggatagacctgcggctctcccgttggaggcgcgggtggtgctgagcggctggacggatgctgcccgccggggttcggcgcgcaggcactcagatggctcccacctccgcctgggccttgcagctggcggtggggcggggcgcaggggccgggtaggggagggcttgggtccggccatccagtgggggtcagccccatcgccgggttccgcggggccgcgccgaaggggcggagcctgggtttcggtttcttgcaaacgcggcggcaacagggaaatcgaggagtttccgggaaccgaaccacgctgggagcgctgaggtctgcgcagcggcgggggccgggggacgggcgggcgtccagtgttaccggccagtggccagctggaagttccagcgggagccggggaaaaccggccccggaaaagccccacctgaatgcacctgcccaggcctctccggatggtgttcatgctgagggtgggggtgtgaaggatggacctgcctgcagggtggcctttagggaatgagggaggagttctacaagctaaggggtttgagggtgtgcacgcggggaaagaggggactgtgcgcaggcaggtgggatctgaggaattgggatatcccctcaaatgactgaggtccccagctgtcccctcactgtcacatcccatcttattgtccttatacgatgaggtctccttactgagatcatatccgtagtgtcctcttttgcttatttgttggaggatttccccgaacatgacttggagcccttgagagtgagccctgactgtctggtctagtctcctggatctagaacccaccaacctccacggggggcttgtgactgtttactaagtgagaaaaggagtagggtgagttcgaggcatc

SEQ ID NO: 10049 - DNA, 1389 bp, Artificial sequence
  DNA replication origin
ctcggcccctcggccgctcccgcccctcgccggtgcgcaccggcgctcggggagccgctggcccgggtgtccagccggcccttgccctgcctggcgctcggaccgccacctttgccgccccctcgccagcctccgcagcttccagactggccggtctgcgcgcccacccctgcctcccggaccggccaccgccggaggccgcggaggagggcccggccgcgcagatcccgcttatcgggcccatctcccgttacataaggccacccccctatctccgcgggccatcgccgccgcaaccgccgcgccagcgccttctcccacgcgcgggggcgcccctgcccaccgctcccggcagggcttttggtggccatgggggataaggggcgttgactcacccgggcggggctccgggagttgcacagaccaaggtagttccccgctccttcccccatcacggagaccctgtgggagatgccgtgggccctctactacagattaggaaacaggcccgtagaggggtcacacggccaagtagcggcactccaggcactgggggccctcgaggggaaggggcagacttctgggagtcagagccagcagctgggctgggaagcttcgagtgtggacagagagggtgggaatgacgttccctgtgggaagagagggtgggcaagcctgggatgcctctgagcgggaatccagcatgccttgtgaggagggtcacaagcacacccttgtgaggaggttgagccccatcgaggacaggacggagggagcctgagcaggcagagagggggcctggggaggcgctggttcggggaggaagtgggtaggggagaaatcttgacatcaacacccaacaggcaaatgccgtggcctctgctgtgggggtttctggaggacttctaggaaaacgagggaagagcaggaaaaggcgacatggctgcaggggccaagcccaggagccgccctccacagcactcattctgcagaagggaaatttgaggcccccagacggcaggggttgatcctgcagagactggtgagcaaaggggatcaccccaagccccagtggcactaggaacacttacaatctctgacctggactaaggctgccagcctggcccagttaagagtttcccagaaggatggcccatacactttaaattaaaggggccagacacgtgcacactacttccagccactctggaagctgaggtggggggatcgcttgagtctgggagttggaggccagcctaggcaggcaacatagtgagaccccatctccaaaaaaacaaaacaaaacaaaacaaaaaaacaccaaaaaagctcccagaaagacctctgaatctttctggatctctcagtggagacctggaaatctgaact

SEQ ID NO: 10050 - DNA, 1376 bp, Artificial sequence
  DNA replication origin
tcccggcgccggtctggaggaaacagccctgggcgttcctctcccgccgtctccgggggaggcccctctgccccgaagcaaccggagcaggtgccctgggacccgccagcccggagcggcctccctccacgcggcgtccgcagcagtccccgtgcggccccggcgcggtacggcgccagccgggaaaaccgcagacgcggtccccgccgccgccccagagcaagctccgcggccggctccacagtcccgcaagccgcgcaacctggaaggcgacctggacgagcgccggctgctctgccacttgcagctggcccaggaccgcgaggcgcgcctgtggcggggcggcaaaccccaggtacccgtcgctgccgcgtggccctcctcgcgcgtgcacggcaggcggatgtggcctccacctgcacccgcgctcgggtgttctgaaactggaggccgggcccttccccaggtgtggcccctcacgagaggcacgaggctggatccaccagcttctctctaggagggcgtcttgctagcagggccttcggaagagggcctgtttgaatcaaggaactcagcctacgacgaaaagtgggcgcgaggggtgggggtgatgggtgagccgctgcgccggggggcgcttactcccagcgggcatgcagaggaagggacttctcactgccccaccccccgcaccttaagcaggaggctcctgctgctgggggaccaggagtggccgctagcgaccttcctcgccccacctgctcttcttcctagcaggatgaaatctgcgacgccttcgaggaagtcgtgctgtggctcctgcggcttcagaacaccttttacttctcccagtccacttttaacctggccctcaccatctttggccgcctcctgatttcagtgaaggtagggaggcctctgagggacggtggcagatggtgagagaagaaactaacctttgctccccattcctgcttgagaggtgagggtttccagatgctcaaaaccaaggtgtataaactaacttgctccgagtggaagagctggtgttggaacctctccacatcctacactggctgtctcagggtcatgtagtcatcaggattggacttggggagcgtgagaggacctagctgggaaagggcttcctgtgtaatgaggtaggatgtgcttgtctcgacctgtcgagggcagcttgaggctaggatgagactgggttccctgagaaggtgccatatttcccacctccagtcagtcccgaaatgaaggaatactgcccagtcatctgcagttctgaaatcaggagcatcttcgttggtcagatctaaaaacggcactaacattctgtcttgtggagaaattgagccttttaaaaa

SEQ ID NO: 10051 - DNA, 1777 bp, Artificial sequence
  DNA replication origin
gcggggaggccggtcccgcgggcgggggcaggggcggctccgcggcttctcccgccgccgccgccaaggggagtttccaggaagtggccatattggatccattcagccgcagccgcccgggcggagcgcgtcccgcagccggctggtccctgtcgctgcccctgcgctcgtcccagcccacccgcccggtgcggagctcgccatggcggccaccgacctggagcgcttctcggtgagggccccgctgggccacggcgcgcgcgggaggcgcggggcgcaggaggggccgccctgcagctggcggggggcgcgaagcgggctgtcagcgcctcacggccgggcctcgacaccgggccagctcgaggaccccggcgcgggctctcggccgcgctatcggggggtcccggagcgtcgggcggcctgccttgccgggcggctggtcggggtcgcttcctggggcgcaggcaaggctaacccctttcgcgggaaggagcaaagacccgcctggctccgggcaggtgcgaagatagagtggcgcccgcggggccgcaggtgagggtccgggacactccggaccctatcgcccagggtgtttctttctgcacacttggggaagagtcctagccgcacaggtgctgcgggataggtacagccggggaggatggaggccccaggatccgagagagtctcccacacgagcccaggacagttgcagacttgagtcctgaagacccttggcctgcttttccttcctcccccgctcccctctgccccgctccccacgccggaatcctgggtgcgactccaggcaggtcaggcctcagtggtcgggtctgcggcagccattcgccaggagctggagggattccagactcagcccagtgggcgtttatttgggctccagtccaggtcctcagaaggttgatgtccctggtggtccctgcaggggtctcactgggcctgagcctgccgacagccaacttactaaaggctttcataattcactcgcgggagggaggcctttggggggttgtatctggacatcccctgctgtctaaggctggatctgggtgtgtctgggaggctaggctgtgacagtgaaggaagctgtgtcctcttgccagcatgtaaggccctggtcggctggaagggggaggagggggagaaggaggaggaggaggagggaggcccagggctgttggagggaagggggaattctgaatatgtgaacgataacgaattggttctggggctaaataagggagccaggacttatgtaattaatgctataaataccgtcatcccaatttatatatgtaaattttccatttaatctgaaaatacatttcttattctactttggaaatgtgcatgactaaagcaggagctcttggtttcataatttctagactcgggtgttttattcccattggagagggggtcgtatgtcagttaagtaagtttaaatacatgaggaacagattcagaggctgggctactcagagattcacttcgccccgtattataaattggaatttatgtaccggaggagggcagtgcctgaatcctaacagacctgctgattagctggaggccaagagacccgtgagtgcctgggtgtctctgcatgtgtgtctgtgtgcattttctgtgcccagctgaccagaaagttatgtctgggtcttgtctgtggccagaggtttaacagttgatgttgcaggtgggagaggtatgtagagaaaccagaatcagacagcctgataggaatcctagacac

SEQ ID NO: 10052 - DNA, 1164 bp, Artificial sequence
  DNA replication origin
ataaaagaccattttgaagataatttagggctagtcccagagagttgtaatgcagaactgccatacggatggcagttggtcgtgatttcttgttagttatagggaaagaaaaaggaaacagtagatacagtctaggatgatcaattcagtattgaccacacattctctgggctctgagattaaggcccttgtagtctagagagggagattttatttaatattatattttaagtacaacttaaagccctttacttatgttatttaatcctgtaacataggtgctatacttgttctcatttttaggaccagggaagggaggcatagttaagtaacttgcctagctaaggttaaaaagctagcaggattccaccaggaaggtttgccatagatccagctaccctaaccactgctctgctctatttcttgtagataactttaatacagcatgggaaacagcaacatagagagaggagcaaagtgaaaacattgtcaggaaggtccagcgggaagtcagtccaccttggggacaagctacagtttgcctgggagagtgaggaggggaaagccaaatcagggtgacaaggtcaaacagcagagagggggctcctcttaagccaggtgtgctaagtcgaacgtggtctttaggcacctccagtcagcacaagtttctgagtaggagaaacaggtcaggttgcttctcagcatactggggtgaggggtgtgtgtggagggtggaccaacctgggatgaggccagtggggggtagggggcaaaccttgccacattcccagaaagagcagagagaaaggcagagggaagagaaagaaacggggtttcagaggatttgggagctgcttttgtatagattgtcagtgagaaggatacagaacctcctgaggcctccgaccctggcgtaagtgttaattttctgaacgttttgagcagtgacattagcggagagaacgtgcacgcactgggagtggtcatcctctttgcacaatggtggaaccattaagacgttgtcccaagcccttgggacaggcagggtgatggacacttgcaatctgacgccttgaccgtcgagctccgcttttctattgcaggaatcccagcctaaactgcgcatcctgctcgttggttgcacaaggagccgaaggctggtcc

SEQ ID NO: 10053 - DNA, 1457 bp, Artificial sequence
  DNA replication origin
gtgcgctgcgtcccggcccccgccacgctccgcctccgggcggaggagcccggcctgcgccggcagctgtcggaggagccgagcccgcggagctcccctctgctgctgaggcggctctcggtggaagagtccggtctgggcctcggcctgggcccgggccgctccccgcacctgaggcgcctgtcgcgcgccggcccgcgtctgctgagccctgacgccgaggagttgcccgccgcgccgccgccgtccgcggtgcccctggagccgtccgagcacgagtggctcgtgcggactgccgggggccgctggacccaccagctgcacgggctgctgctgcgcgaccgcggcttggcggccaagcgcgacttcatgtctggcttcacggccctgcattgggccgccaagagcggcgacggcgagatggcgctgcagctggtggaggtcgcgcggcgcagtggcgcaccagtcgacgtgaacgcacgctcccacggcggctacacgccgctgcacctggctgcactgcacggccacgaggacgctgccgtgctgctggtggtgcgtctgggtgcccaggtgcacgtgcgtgatcacagcgggcgtcgcgcctaccagtacctgcggcccggctcctcgtacgcgctgcgccgccttcttggcgatccaggcctgcgaggcaccacggagccagatgcgaccggtggtggaagtggcagtcttgctgccaggcgccccgtacaggtggccgccaccatcctcagttccaccaccagtgcatttctgggcgtcctggctgacgacctcatgctccaggacctggcccgaggcttgaagaagtcgagctccttcagcaagttcttgagcgcctcgcccatggctccacgtaaaaagacaaagatccgcggtggtctgccagccttctcagaaatctctcgtcgacctactccggggcctttagctggtctagtgcccagtttgcctccaacaacctgaaggtccctggggctaccacctggttgatctatcgtggcctgctcgtcgcagtccaaacccgcccaagactgcagcccaatcaacgcctggagcctcattctgtttccagctttgtccagggcagcctgttttacccagatgggcctgcacctccagcttctttctgaagcatgacccatctccagagatgggatttgagaaatcagtgagagcttcctataaagaactccaggagacaggcctgaactctagagggaacttgaaatccagggtcaaaggttaaggggcagcagctggtctggcccctgaaagccttcacctgatgcctctgcagctacacaatcccaagacagagctagagcaagggtctctttaaatgttgaaagatgttaggttgtcagctttaagatatgtggtggttttgtaatttgatgcttttattctgtttttaaattgaaatgaggtaa

SEQ ID NO: 10054 - DNA, 1413 bp, Artificial sequence
  DNA replication origin
ctagagcgcgtgcttggccttctgctgctgctgggcagtcgcctggcgcgcgtgcgccgcgccctggcccgggcggcctcagacagcgaccctgatgagcaggtaaaaggggttcaggttgcaagcgagtagggcggtgaggggcctgctgtctccggctggaaccattccgggagcggcggcgccctcacccggctcacggcgcctcttcctgcggctcaaggcctccctgctgcagcgactccggctcctgcagcggcaggaggaggacgccaaggagctgaaggagcacgtagcgcggcgcgagcgggccgtgcgggaggtgctggtgcgagcactaccggtggaggagctgcgcgtctattgcgccctgctggcgggcaaggccgccgtcctggcccagcagcgcaacctggacgagcgcatccgcctccttcaggaccaactggacgccatcagggacgaccttggccatcatgccccgtctcccagcccggcgcggcccccagggacctgtcctccagttcagccgcccttccctcttctccttacatagttataggtggagagggtggggtgcaccgcccctatctctcacccacgtaagtggggtgatgctgatttagtctctgcttttcccttgagggattggggaggacccagtccaggcctttctaagatactcctccagccgggcgcggtggctcacgcctgtaatcccagcactttgggaggccgaggcgggcggatcacaaggtcaggagatcgagaccatcctggctaacacggtgaaaccccgtctctactaaaaatataaaaaattagccgggcgtggtggcgggtgcctgtattgccagctactcggaaggctgaggcaggagaatggcgtgaacctgggaggtggagcttgcagtgagcggacatcgcgccactgcactccagcctgggcgacagagcaagactccgtctcaaaaaaaaaaaaaaaaaaaaaaaaaaaaaagatacttctccaaagtgttctcatgtggcctcacccaggtcttgtgtattatttggtaattaatttatggatcttaaaaactgcagtattcccccattttgtgatgagagtgtggggctggcaggggttggttggagggaggagagaagacagaggagcacttaaggtgcaaagcagcctattttttcttcaataaaaattgttaagagaagtgtgtgtgtcatctgcagcacagctgtgggaggagtgagaggggtcttgtttacacagtcaccagccctggctgactagagcagaagagggatttgctggcagaatatcagtcaaccctgccaatgtctagttagtctggagaacctggcttgaaaacaggagggaccaggggaatactgcgctttcaactccactgtcac

SEQ ID NO: 10055 - DNA, 2506 bp, Artificial sequence
  DNA replication origin
cttccttacctagactgggactacgtgcgtgtggtttggggcggcccgggccccgccccgcccgacgctgccctttgcacatccccgcggccccggcccgcggttgcagcccgcagtgggccgcagccaacagaggtcccggggaccccgggaccactgaacaggcaggccaccccgctgctgtacgcgctggcggccgaggcggaggccgcggcgcaggctgccgagccgcccagcccgccggcctcgagggccgcctaccgccagcggcttcagggcgcgcagcggcgagtgctccgggagacgtcgttccagcgcaaggagctccgcatgagcctgcccgcccgtctgcggcccactgtcccagcgcggcccccggcgactcacccgcgctccgcctcgctcagccacccgggcggggagggggagccggcgcgctcccgggctcccgcgccaggaactgccggccggggtcccctcgccaaccagcagcggaagtggtgcttctcagagccaggaaagctggatcgtgtgggtcggggcggtgggccggcgcgggaatgcctgggtgaggcctgctccagctctggcctccctgggcccgagcccttggagttccagcatccggcgctggctaagtttgaagatcacgaggtcggatggctgcccgagacgcaaccccaaggctccatgaacctggactccgggtccttgaagctcggtgatgccttcaggcccgccagtcggagtcggagcgcttcaggcgaagtcttgggttcctggggaggatcaggagggaccatacccattgtccaggtatggaagtcaggagatgcaggctggtgaggggagcatctgggaaacaaaacttgagccacatttcagtcgactgttcacccttccaggctgttccccaaggagcagaaacccccagaccattgtttcagaccaaactttccaggtgagagacacggaccactctggaccaagttggggggaagcagcttgcatagcttttgcccaaaaaatgaaagggcttcctacctaccctcagtctgagccttctggttattttgaaaataccctactgtctccctggtgcaacaccaagagcttccttcctttcactgtggtcactatggggtccctgcctccaggttcttgcctcagaaagaggctgcggtgatgtatcctgcagagttaccccagagcagccctgctgacagtgaacagagggtctcagagacctgcattgtgcctgcctggctcccctcccttcctgatgaagtgttcctagaagaggccccactggtcagaatgagatcaccaccagacccccatgcctcccaggggcccccagccaggtaattccctcttgcttccaagcatcgtgaggcaccccctgacacacacatctacaaaacgctagaggggtgggaatgctctcctagctggagcctgggattccaggtgatgggggtagggacagatggcccttggaggccaccatttgtttgtggctggagctttttctgattcagtgtcttttctgcttccagtgtccatgcctctgaccagccgtatggaactggcttaggccaaagaactggccaggttacagtccccacagagtacccgctccatgagtgtccaggaactgcaggggcagatgactgctggcagggggtgaatggttctgtaggtatttccaggcccacaagccacacccccactgggactgcaaatgataacatcccaactattgaccccactggactgaccaccaatccccccacagctgcagagagtgacctcctcaaacctgtcccagctgatgccttgggactttcaggcaatgatactccaggtccctctcacaatactgccctagccaggggcactggccagcctggttccaggcccacatggcctagtcagtgcctcgaggagctggttcaggagctggccagattagatccctctctatgtgaccctcttgcttcccagcccagcccagagccacccctgggcctgctggatggactgattcctttagcagaggtccgggctgcaatgcggcctgcctgtggggaggctggagaggaggctgccagtacttttgagccagggtgagtgaggtgtactagggaatctggacactgagcccctgaagttggggacaggaaacccagggagctctggttttgttcccaggtcctatcagttcagcttcacccagctcctgccggctcctcgggaggagacaaggcttgaaaaccctgccacccaccctgtgcttgaccagccatgtgggcaggggctccctgcaccaaacaacagcatccagggcaagaaagtgagtggagaagggctggtggaggctgggggtgggtaggagcccagagcctgggcagggaagtcatgagcctggccccagccttgagccttccctgtaggtggagctggccgcccgcctccaaaagatgcttcaggaccttcacacgga

SEQ ID NO: 10056 - DNA, 1789 bp, Artificial sequence
  DNA replication origin
gcgcgccggctccccctccccgcccgggtggctgagcgaggcggagcgcgggtgagtcgccgggggccgcgctgggacagtgggccgcagacgggcgggcaggctcatgcggagctccttgcgctggaacgacgtctcccggagcactcgccgctgcgcgccctgaagccgctggcggtaggcggccctcgaggccggcgggctgggcggctcggcagcctgcgccgcggcctccgcctcggccgccagcgcgtacagcagcggggtggcctgcctgttcagtggtcccggggtccccgggacctctgttggctgcggcccactgcgggctgcaaccgcgggccggggccgcggggatgtgcaaagggcagcgtcgggcggggcggggcccgggccgccccaaaccacacgcacgtagtcccagtctaggtaaggaaggaggtctgtccccggcgactgcgtgcgcggctcggggccgccggaggctgcggagaaagagctgtaggccgagtccgcgcgcatggacagatgccacaggtccaggctgctagtggacgaggccggggaggcgcggtcgcccccaggtcccagggcctccatggctgcgcagatgagtgctgaggctgggtggctgcgtgggtcctgggaaaacacagatgtggtgccgggtgaggagctccgggtgagggctgggacagcctgctggccccgccaccacggacggccagacacttacacttcccctccctggtcacaccgtcacaagcgctggcatcccccagattttggcagagtcaccttgggatcagaggtggcagaggaagtaggaccagtcccagggagcacctctgaaggttgagggcccagctcaggggaaggaattgggaccagctcattccctgccaggctccccttgcccacacaagcagcctttaccctgagacctcctggaacgctgagaatgtacccatgttcctttcctccccaaccctgttccacccaggctgcttcctggccgttctgttggcttctccatgtgatctttccctgataaacaatggtcaagaacactcttgtgacctcaggggagctaagaaaggaggggtgggggaagacccagggcaaggggcagaggcagcttcacagccttcctccctccctctgtgcctgttatgttccaggtgctttatataaatatttattttgatcgttgcaactgctgtctgcattttacagacaaggacaatgaggttctgagagggaaatgatttgtccagggccacacagctgggacgtggcagaagcctgcctggaatccaggcctgcctccacgctcactgcagccagaatcaatttcctagaagcaagccctgctgaaaggcagtttaccatccctcctgttccccaacagcctgaatcctccaaggaagcccacactccactatgggaaagtcacccctacctccccatacactattggcagattccaaaataatctggcccccacttctcaaactctgcctttcgtctaggaatgatgggccgacccccatctttgccctgcttctattcttgcttctcctgtaggactcagcttagaggtctcctcactttttgggactcctacagtgtgctgagctgacccccaccccacactgtccctgttggcttgcttctgattccctcctcccattcccacccctgagcttcctgagaatgggccctgctcttcctcattgctgcactctcagtgcccagcagagtccctggcatacagtcaatgttaaat

SEQ ID NO: 10057 - DNA, 1108 bp, Artificial sequence
  DNA replication origin
aataaaaatgtgtctacacatgtgtttccttattgactgtaacttgttgaagatgcttttgcactggtggccctatcaggttgatgttcacgcaggctcctcacagtgggtgctttgcagaacctaccatgccaagagggcccagctgctttggtgtgttttggggggcctcagcacaaaacaacaaggcattttcatacttgtctggctgcagggagcctcttgcagtccagccagcccctgtggctgggggtagccctaccttaggggtccctgcctcagtggcagtggtacctgtgggctgggctgttatgcctgtgccggctgctgaaagggagttcagaggtggagctcaaggagctctgcaggcattttgccaagcctctccagagcagagggagcaacctagactccccgctagaaagacaccagattggagtcctgggagggggagttggggtgggcatttgatgtatacttgtcacctgaatgaaggagccagagaggaaggagacgaagatgagattggccttcaaagctaggggtctggcaggtggaggcaccagtctgaaaggaggagctggggctgaggaattgtcaagggggccagtgctccttcagtctgggcttcatggtgtctgtgacaagtcaggcagcagttgggatgtggctctggagttcagcaggggagggtagaccaggcaagacccaggtttttagttagaggttactggggaaatagctgaagacagtttccggtggataaaatcacaccaaggcaatgggaacagatccaagtaaggcgaccgaggaggcacaggagaacggacagcctcaaatacaacgaatgatcaggatttacatcatacctccctcaaggccacctcacatctgacctctctgtggaggggctatccaggccgcccctcccagcgggtcttccctcagtactgggctcactgtgtaggcgctgtctccctgtcagactgagttcctgggtactggaccacgtctcaaaacccagtacccgcagctgggtctggctaggcggacgttctgggaagttcaccggctctccctgtccccagcgtcccccgttctcccagcc

SEQ ID NO: 10058 - DNA, 1035 bp, Artificial sequence
  DNA replication origin
aaaattagctgggcgtggtgcccggtgcctgtaatcccagctacttgggaggctgaggcagggaaaattgcttgaacctgggaggcgcaggtttcagtgagcagagatccggccactgcactccagcctgggcgacagagggagactctgtctcaaaaaagcaaaacaaacaacaaaagtctttcaaagccgaaaggttcttaggcactgtcttaaagcctagcgctccagctgaagctggtgcctgagtccagatggtgttgaagaaggagcagggcccagcgggcaccactctcagaagtcgggctcaggtgtctcctgcctccgaacccaagaagacccaagaagacagagttcctcaggctcccagtgtccctaggaagtggcaaccttgactcttggccagagttcagagtcctggttattaacaccaataaacctttatttgccagggatactaccatgggaggacacagcccctgagcccagccctgttgatcctgtgggagcgggagggcagcggaggacaaaggcagagacctgagagccggagaggctcatcaaagggtccccagcccctctcaggaacggagcatttcttggcagagtggtattcataggacagagtttgggaagtcggggcaggggagcctgaggacacagcaaggagagctcagtggcaggtgcaggcagagcgttctttggaaaatggagatcctggaaggtgagggcctcgagcgccagtgtccagccttagtgggtatgcatatgtccagctccctaaggacacactcaggacagctaaggtgcacacaagtccaggggcttccccgtgctccgcccccctctcccccaccccggtagcaggctggagggcccagaccatgctgggtagtgggagaaatggaaagaaatgggacagggaacaggagacaagagcccatggtgggagtcaaagagctggaagagttttggaaatgggggtctgggggtagagttgatcaagggccgagttactcagcgggacaggtggga

SEQ ID NO: 10059 - DNA, 1262 bp, Artificial sequence
  DNA replication origin
gtcttggtcacatggtggcacggccgctgcgtcagtcacagccctggctgcaggagtccagctgccgtcgccgccgccagcggacggggcggggatcctggtgccaggtcttcgttaacccgcccccgccgcctcagtcagctgtcccagcccgggcccgaccgtcatggagcggtgcggggcctacgcctgttccgtgtgaggcgcatcgctgccgccgccgccgacgccgccttcgtttgtcgaggcctccggaacccccgccgcctcccggagcccctcgcccttggcagcctgtcaccgccccctgggcgggctcgaatgcgcgtccggtgaaggtgcaggcccggcgccgccactgccgcagccaggagatggttcgggcctagcggagccgggactggaggtaagaagggccgacagactgacccagggccgggccgggccgcgggggttgtggccggggccgggtgggggtgggggcccgcaagttctgcggggagcctcggggagaccctccgggctggggctgctcaatcaggcgtcacccctcctctcatctgcgcgtcccaccccaccaccttcccgcaaagataagaaaataaaaaaagctaacccaatcctaacaaaaattcccagaaatccatccgtttagtgtttctcctttcctctttctttcctcagacgttccatcggctgatttgttactttttcatatcctcctcaatttcaaattatgtctaattaaagagaaaataggcccagattctggctaacattacccagctagttctcgctttccttctcgcgatcctgcgcacctctcccacacccccacccccgcaaaaaaaaaaaaaaaagaaggaaaaatttccgccttcgacttgcgaaggggattgactaaaaatgggaacgtgggggtataatactcgaataccctcccctacaacttctgaatcggtctgttacctagttatcccagtagcttgtgcgtggatattgatgtttaggcctttcctccagctgcctgtgcttggggttaatctcgtaattgacgtcagtgctttgttccttctactttgctgttccttccactctttgaggatggatcatggagtacaggagttttgggagtaaccttattgccttttcgtttacaaacagtattattttcaggaagtggaagtacgaatctgaaatgtttgtatatggagttcaaggcgaagagttcgatttagggttctcgtagttttgtcagttgt

SEQ ID NO: 10060 - DNA, 868 bp, Artificial sequence
  DNA replication origin
ttcccggccgccatcccatctaggaagtgaggagcgtctctgcccggccgcccattgtctgagatgtggagagcgcctctgccccgccgccccgtctgggatgtgaggagcgcctctgcctggctgcgaccccgtctgggaggtgaggagcgcctctgcccggccgccccgtctgagaagtgaggagcccctccgcccggcagccgccctgtctgagaagtgaggagcccctccgccgggcagccaccccgtctgggaagtgaggagcgtctcagcccggcagccaccccgtccaggagggaggtgggggtcagcccccgccaggccagccgccccttccgagagggaggtgggggggtcagcccccccgcccggccagccgccctgtctgggaggtgaggggcgcctctgcccggccgcccctactgggaagtgaggagcccctctgcccggccaccaccccgtctgggaagtgtacccaacagctcattgagaacgggccatgatgacaatggcggttttgtggaatagaaaagggggaaaggtggggaaaagattgagaaatcggatggttgctgtgtctgtgtagcaagaagtagacatgggagacttttcattttgttctgcactaagaaaaattcttctgccttgggatcctgttgatctatgaccttacccccaaccctgtgctctctgaaacatgtgctgtgtccactcagggttaaatggattaagggcggtccaagatgtgctttgttaaacagatgcttgaaggcagcatgctccttaagagtcatcaccactccctaatctcaagtacccagggacacaaacactgcggaaggccgcagggtcctctgcctaggaa

SEQ ID NO: 10061 - DNA, 1479 bp, Artificial sequence
  DNA replication origin
gagtggacacagcacatgtttcagagagcacagggttgggggtaaggtcatagatcaacaggatcccaaggcagaagaatttttcttagtgcagaacaaaatgaaaagtctcccatgtctacttcttgctacacagacacagcaaccatccgatttctcaatcttttccccacctttcccccttttctattccacaaaaccgccattgtcatcatggcccgttctcaatgagctgttgggtacacttcccagacggggtggtggccgggcagaggggctcctcacttcccagtaggggcggccgggcagaggcgcccctcacctcccagacagggcggctggccgggcgggggggctgacccccccacctccctctcggaaggggcggctggcctggcgggggctgacccccacctccctcctggacggggtggctgccgggctgagacgctcctcacttcccagacggggtggctgcccggcggaggggctcctcacttctcagacagggcggctgccgggcggaggggctcctcacttctcagacggggcggccgggcagaggcgctcctcacctcccagacggggtcgcagccaggcagaggcgctcctcacatcccagacggggcggcggggcagaggcgctctccacatctcagacaatgggcggccgggcagagacgctcctcacttcctagatgggatggcggccgggaagaggcgctcctcacttcctagatgggatggcgggcgggcagagacgctcctcactttccagactgggcagccaggcagaggggctcctcacatcccagacgatgggcggccaggcagagacgctcctcacttcccagatggggtggcagccgggcagaggctgcaatctcggcactttgggaggccaaggcaggcggctgggaggtggaggttgtagcgagccgagatcacgccactgcactccagcctgggcaccattgagcactgagtgaacgagactctgtctgcaatcccggcacctcgggaggccgaggctggcggaccactcgcggttaggagctggagaccagcccggccaacacagcaaaactccatctccaccaaaaaaatacgaaaaccagtcaggcgtggcggcgcgcgcctgcaatcgcaggcactgggcaggctgaggcaggagaatcaggcagggagggtgcagtgagccgagatggcagcagtacagtccagcttcggctcagcatcagagggagaccgtggaaagagagggagagggagaccgtgggggggggggggagagggggaggggaagagggagcgggagagggacgttttttaagacagagtctcacgctgtcacccaggctggtgtgcagtggcacaatctccactcactgccactttaacctcctgggctcaaggaatcctcccacctcagcctccagagtagctgggactacaggcatgcgccaccatatctggcta

SEQ ID NO: 10062 - DNA, 606 bp, Artificial sequence
  DNA replication origin
catgttttgaaagaacattaaatgggtttgcaataaaaaagccagaaggattttcccagatgaagtggtttttagggtgggattgtgggtgattgtttatttttgcttgtttctgttttcagagtttgctacaataagcatttagggccaggcatggtggctcatgcctgtaatcccagccaaagtgggaggatctcttgggtccaggagttcaagaccagcctgggcaacatggggagacaagcccctaccccccaccgcctcctgtcactaataaaagcatttaggaattttataatgttaagaaaactagaagtgtgttttaagaagaatggctccaaggtttcaaacctagaatacgggatatgattgtacatgtggagcttctagtcttgagtcattggagatgtggtgggagtttagattgagaagttttcctgggtggggttgagacatcgaagctccaggtgggtgtggatggaagcttttggggctggagtcgtgttcctcattgacgggatgaaggcttgtgttgagatgtgttaggaagaggaagtaaaagctttgaaagaaggaactgccagagaggagttatgatgcataaag

SEQ ID NO: 10063 - DNA, 921 bp, Artificial sequence
  DNA replication origin
gagtacttggtcaagaagcttggcctcagccgccccgtccgggagggaggtgggggggtcggccccccgcccggccagccgccccgtccgggagggaggtggggggggtcagcccccccgcccagccagctgccctgtccgggaggtgaggggcgcctctgcccggccgcccctactgggaagtgaggagcccctctgcccggccagccgccccgtccgggagggaggtgggggggtcagcccccccgcccagccagccgccctgtccgggaggtgaggggcgcctctgcccggccgcccctactgggaagtgaggagcccctctgcccggccagccgccccgtccgggagggaggtgggggggtcagcccccccgcccagccagccgccctgtccgggaggtgaggggcgcctctgcccggccgcccctactgggaagtgaggagcccctctgcccggccaccaccccgtctgggaggtgtgcccaacagctcattgagaacgggccaggatgacaatggcggctttgtggaatagaaaggcgggaaaggtggggaaaagattgagaaatcggatggttgccgtgtctgtgtagaaagaagcagacatgggagacttttcattttgttctgcactaagaaaaattcctctgccttgggatcctgttgatctgtgaccttacccccaaccctgtgctctctgaaacatgtgctgtgtccactcagggttaaatggattaagggcggtgcaagatgtgctttgttaaacagatgcttgaaggcagcatgctcgttaagagtcatcaccaatccctaatctcaagtaatcagggacacaaacactgcggaaggccgcagggtcctctgcctaggaaaaccagagacctttgttcacttgtttatctgctgaccttccctccac

SEQ ID NO: 10064 - DNA, 1269 bp, Artificial sequence
  DNA replication origin
aacctgtagaatatgtctacttggccaaccacattcagcataaagctccgaccacaatcccttctccttccaagcgcctgtctctggtctttgctgcaggctgcactgcccagcctgcgggatggtaaccttgcaggctgtaatcctttataagaaagaaagtctccttttctaaattgacacttatgtgattttttttaagttaacaaaacaaagaagcttctccaagaggcccccagctgacttcccctcaggttctttggccagatccgtgtcacatcactcctaaacaaatgtggaaaagccaccctgactggcatcaggtggtgtggggggaggtgggcaaacaggttctgtcaggaaggagggtggggctgagggtgttgggacaacactctgttggtttgggtgtcggggggtgggtgatagaggaggctgccacccaggcatggcgctctggaccgagcatggctctgagagcaggtgctgggggcagactgattgggccacctgctggaagaggggccaacaggcttgactggatggggagattgagggaaagggaggaatccaggatgaatactggggttttggcctgaaaaactgtgtgggtgttggttccatttgctgagaggctgagggttagggtagacatttcagctgagatgcagagttctgtctttaaccatggaaggtgggctgaggggtggtcagttggatatgggagtttggggctcaggagagtggcctaggctaggtgtgcaaccttgaaatttattgatgcataagtaatacttagaaacacaggatcacatgagatccctggggagagagtgtggagtgaggaaagagatctgagggtggagttctgggacccccaatgtttaaaggcgagaggatgggcaggggccagtgaggagggtagggctgaggaagaagggccaaggagggtgtggctcacttgtgcccagtgtggccgagagctctaggtggataaggagtgagatttgactgtgggcttggcaacacagaggtcatttgggacctctaatgtttcgttagagcactggggaatgaagccatctttggaatgggttggacagagaacgggaggtgagaaggtgaagaggcattctttagaagggttttgtcatgatagagagcagagaaatgggatggtagacagaaggtcaaggatattggcttgttatgtttttaaggtgttgtgtttgtgtgctaatgggagtgattggatagagagggagaatt

SEQ ID NO: 10065 - DNA, 1142 bp, Artificial sequence
  DNA replication origin
gagcagtgtgttgggggcgttcagcgttcgggctgggggcttggtcctaagagagcttgcactgtggatgatctccgccctctttgcgcccgcaaaacaaagacgagttctgagtttcaggagggacctggacgaggcaggcacagcactctgctttcggcgcctgtcgcctcgagtttggggacgagctgacgctagtctttggggctccctgcagccgacaaagcggcgccaaccccaggcctgccacctgaggactttgtgcccgcaactcttgcgggagcggaaagccgccgaggcagtggggtttcttgttttccagagcgcggcgagcctccgcgcggcgcggcaagtgcactaggagtgcgcgggtcagcggggcgggcccggcgaggtcggtgtcgcggctcgagagcgggtgccggggcgctgtccagcagccctcgctcgcggccgcgggccgccgacactgatgaatggcgcggccacagcccgccgctcccctctaggtgtcgcttccgccgagctttcctccagtgaaaaacagcgccggcagcttggtctgttaccttcgtaaatttgttgcaagcctgtgcaccaggaattgtactagatggggcccccgagatacaaacatccgtccaggttctctgggccaaacgtaaacagaatttcaataggtggtgaagtaactgccagccaaaatgttcaccgggaatgggcctgtgtcacaatctgtgaggggaaaagacggatcagtgagcgactaggactcttcttgaaagtcctaagttattttcctactgccaaatttaggggaaaccagcgatgctttttaatagtgtcttcttaatcctgggagccaggcgccagtttctgtgcctgcccctctggcccccaggacagactctgggtctggttggcggggggtccacctgggaagggaatggtcggaggtgtgagtgatgcagcttctgagactccagagccacagcaactctcaggcaggagctcaagccggacatacgagcagatgccctacagggcacgtgtctgcttcccatcttagcgttgtgagaaggaggcactgcagcatcactagaccatttctgccatactctgctaaatgttcgctttttccc

SEQ ID NO: 10066 - DNA, 827 bp, Artificial sequence
  DNA replication origin
ccttactgcccgcgccgggaaagccaagtttgcccgcggggaagggaccgctgggccagggctcggcagggctaccccggccaaggccaggactcgaggagaggctgggacgccgaggctcgtggccggggtctacggtggggaccggagtgacccggttggcacgcggggcgccacgcagaagcgctcgggccgagcccgcagctcgcgcccggctccgaaatcctgcaggcgccgttcttgggttcaggaccccgagcggccccggcggagccaggcgagcgcggcccctcggcccgggcccggtgcccttggctccgggttggggcgccgggcaggcattctcagcacctcctccccgcggctttgcggggaaacttgcgtctcctcgctgcagcccaaagggcccgctgcgcttcgcctggccctggcttccccggggtccgccgcatgtgaggctggggaggaaggaatcagggcacgacccgactccaggcagcctgcggcgctgcttgtgcgtagccggccgcggtccagagtgagcggcccggggtacccgcttgaacgtgtctagggagcagtgtgttgggggcgttcagcgttcgggctgggggcttggtcctaagagagcttgcactgtggatgatctccgccctctttgcgcccgcaaaacaaagacgagttctgagtttcaggagggacctggacgaggcaggcacagcactctgctttcggcgcctgtcgcctcgagtttggggacgagctgacgctagtctttggggctccctgcagccgacaaagcggcgccaaccccaggcctgccacct

SEQ ID NO: 10067 - DNA, 1719 bp, Artificial sequence
  DNA replication origin
gcaagcgcccgcgccgggccctgcagcaagatgcggggccgcgggcgccaggaccccagtggggtgcagcgggaccggctggtggcggcgccagcgacatggcaccctccccgcgcccgctgggagctgcgcccgcgtacctgagacggccggggccgaggggaagaccaggtggccggacttgggcgggagggagggagcaccccgtggcggcggcggcgaccccgccccgcgtccttcggctggtttctcgggctgtcggcgggtcccgggctcgctggaggctgttgaggctccagctccctgagccgccgctgcccgctgctgtgccaccgccgccgcggctgccctatttctgccgccgggaccggagcccgtgacgtcaccctctgggccccgcctgcccaatcgccgccacctgtgcgcgccgcccgcccgccagccggtcagacccgcgcggcggccacggcaggtgcgcggagcaggcgggcgcgcacgcggggcgcgatgactccggagcgctggggccatctagggcccggagggaggagggccagcgtagcgctcctgcctctggctagcgtggagctcggcaagtgacagcccctcttcacctctgctctcctccaggctcctttccgggccaggttccccaaagctgtgctctccaggcgcacagggggtctctgaatccgcggccattgctcgtggagtccaggcgggccggtacaccacagcaggagagctgtccctggggacaaagtgggtgaaatcccccgccgttgagacccaacaacctgggaaacagcaaaggttttctcttttctgaatcttccctcttccaactacagaatcttaagacattcagggcatacaggggcaatcccaagtgacatttgcctacctgacctagctgggcccagagggtcccttctcccttagaacaggatatttccccatcctgatcccatccccaagcctggggctcccaaacttttctgaatccctctttaacatcagcagcttttgagatcagtcttccttcccgaatgaactggaaacacctttgtaacaactaggggcccataaatggtcatacgtagcctcagtctggcaggaaacttaggagggagcccctacccaggccaggctgatggccaggagactttctgagggcctgcctcctgctctggctgcgtgggcaccaggggccttcctggcttaggtgaacagtgttctgtccatgcctctgtaatctctcctggccggggggaggtgacagaggggatttttctgaggatgaagttagttaaatataaggaaaaggggaagaataatggaaggctgacctgaagaaagagatattacgtttgttttttccttccacagattttcctgccgctgaacccctccaatgcagcaggcactgtgctattaatagttgctagagatacagcagtgaatgggccagcgcggtcttggcatcacacagttttggtctggggtccagctctccctctatcactgccaagctatgtaatgcagagccaatcgtatctctactgtaggtatcagtttccccacttgtaaaatgaggggttggacaaaacctggttgacttcccatgtggataccatgatttttactcagaaggataaaggctactacatcctcagtgaccctgggccctagccagtgtgatcctctctcagatttgac

SEQ ID NO: 10068 - DNA, 1551 bp, Artificial sequence
  DNA replication origin
gtgtatatatggctgctattggttctgtttctctggaggactctgactagtacagccactcatctcatgtcattaaacaatgtacccccactggccccccttgccagtccctgagctgaggtgcaggcttgagtgagggagacaaaaggctaagattgcttgtgagagtaaagtgtttttagatttttaaaaatttaaattgtggtaaaatacagataaaaatttaccctactgatcatttttttaagtgtatagctcagtaggataatatattcacagtgctgtataaagttttgattttagctggactagataagactctttaatacctgaagataacatcatccttagagccaaaagtgaccccaaattatgggattttcagggagaggaaaaaaacaaaaaaaagctcttgcctgtttgcctcgtggagctgaggcctttctctaaaccatggtgggagccagctgtagagctgtgataacagcaaggtcatgaggagccacagaaccggaggaggggccacagaactggaggaggagacacagaaccagaggaggggccacagaaccggaggaggggccacagaaccagaggaggggccacagaaccagaggaggggccacagaaccggacgaagagccactgaaccgaaggaggagccacagaaccaggggaggagccacagaacgagaggaggagccacagaaccagaggaggagtcacagaaccagaggaggagccacagaaccagaagaggagccacagaactggaggaggagccacagaaccagaggaggagtcacagaactggaggaggagccacagaaccggaggaggagacacagaaccggacaaagagccactgaaccgaaggaggagccacagaaccaggggaggagccacagaaccagaggaggagccacagaaccaggggaggagccacagaaccagaggaggagccacagaaccaggggaggagccacagaaccagaggaggaggcacagaactggaggaggagccacagaaccagaggaggagacacagaaccggatgaagagccactgaactgaaggaggagccacagaactggaggaggagccacagaactggaggaggagccacagaacaagaggaggagccacagaaccagaggaggagtcacagaaccagaggaggagccacagaactggaggaggagccacagaaccagaggaggagtcacagaaccggatgaagagacactgaaccgaaggaggagccacagaaccaggggaggagccacagaacgagaggaggagccacagaaccagaggaggagtcacagaaccagaggaggagccacagaactggacgaggggccacagaacctgatgagggggccacagaaccggagcaggggccacagaacccgggaggggagccacagaaccagaggaggagccacagaaccagaggaggagccacagaaccgggggaggagcccagaaccaggggaggagccacagtactggaggaggagccacagaatcagtgggggtttggggagg

SEQ ID NO: 10069 - DNA, 1726 bp, Artificial sequence
  DNA replication origin
cttcctttttaaaatggctaaaaacgctatttttggctgtatagtacccaatcatgcaggcggcagggaggggctcgctttggccctcttcagcacgtcacaccctacctttaatccgcagccaactgtgtggcggtccccactttcgcctagcggcaactccctcctccctgcaatccttccttcttattccggtttccagagcacgtctccaggcttcgacgtcaccacgctgggacgtatgtgccgagggccgcggcgtctgacctcatggcgtagagcctagcaacagcgcaggctcccagccgagtccgttatggccgctgccgtcccgaagaggatgagggggccagcacaagcgaaactgctgcccgggtcggccatccaagcccttgtggggttggcgcggccgctggtcttggcgctcctgcttgtgtccgccgctctatccagtggtaaaggggggcggcagtgtgggcttaggaaggctaggagggctcgggcgcagggcaggagacaggccgggccagggaaagggcgcttccaagtgtcaggagcagacggcggtgtctggttgggtcagggtctccgcgggcctgaggacggagggtatggtgtctgaaggggtccaaggtggtagggtctccaaggggcctgagaagcggggtccctgagagatgcaggaacccagggagcaggcagcagggtgtgtagatgggcggggagggaggagtggtgttagcgcctagagatcgttgaagaatgggctgccgcaaggaatggcggtggtggggtctccaaaatttcttggatcggaaagttaggagactctggaagagagggtggcgacaggggctgaggaggtggccggggctgggggtgtggtgtctggaaagggtcctgagtttgggggactcaggaatcttgcaggaccaaggaaaggtgggggttttccagaatgggagaggtcagtggtaaagaccgaggcgggcaggggcagtaatccagtgactggactgaaccaatggaatatttccgagagggaaagtgaaagggaaagagctgtcttagggtactggtgcatatttgaagactgggaggttctggtgtttgataaagattcagagtactggggcgttgggcccctgaaggcttgggaggcagagaggagtttggagacaagggagatcatgattcctcttccctgtgttccgagttaaccaggataaccctgcctcgttttaatgcatctgtaggatttgattgataaaatatttcatttcttgcaaatgttgcatggtgaaatcaagagattgaaggcttttattgagaaattaggaaatctgtaaaccagtgcctgatacttggtgggaaaaatccactattaagaacttgtaaggattaaacggtattttgtttagtagtcccatttttctttcaggccaagacacagtcctgcgtttctccctaaatttgaattttcagctgcaaaacagtgtgacctggtatagtgttttctttcttgccagcagggcctgtccagccctacattcctctgcgacagtactgtgggtacatacttatgtttcctcagcaacatttcagtgttgctaactggacgccctcccagaagtctttgcagtccctgaggaaggactgctgtccatttcctaaggcccttttatcattagtgaaatgtaatgaggatttccctggttgatgcaga

SEQ ID NO: 10070 - DNA, 853 bp, Artificial sequence
  DNA replication origin
ggaggagcgggcgaggggccccggcagcccggccgcggggagggatcgcgagcggccggcgcgggcctggctggtgagcgggcgggcagagaaggccgcacaggcgggtgccgaacaggtctgggctggggagcgcgaggccgagggtccagagacgcctgcggctggcggcgagaggcggcccgggcttgcgggcggaagtgcaagggcggccgcgtggaggcccggcgggccgcgcgtctaggtgaccttccccggcggcgccctctggccctggatcccaccagcgtgcatccggcggggacccgttcgccgcccacgctcgccggaccaggccagcgggcgggtgccggccacgctgccgcctcggggatgagctcacgtgacgaccgtggccccgagtccccaggcccacgcgccctggccggcccacgcccgcagaagctggcgcccggcaccgcccgcctgtgccagagccttctagagcggaacgcgccggccgagagtcgacttaggcggtagaggccggagctcgggcctgggctgaaggtttggcctcggaaaaggaggccccacggggaaggatgtggccttcttggtcttaggagtgattactggttcggtcgttcattcattcgccaaatgcggcggtgcattctggaaactgtttcggagcctgactttggattagaggcccgcagtcttagtggtttgtacaaggtcacacagctgggaagtccccataccttcgttttctcatctataggacgggagcaattgtacctctccttcgatgagttttggggaataataaaatgaattaattagcatgaaacctttagaacagtgccgg

SEQ ID NO: 10071 - DNA, 1263 bp, Artificial sequence
  DNA replication origin
gtgggccccatcccccgagggcagtcccaggcccagcgcggacactgggcgcctggggcggcgcagatacagagtagaggcggcgactgttgctcccgagctccgcgctccggatacaatgtgtctggcgcctccgacccgcccgcgcggcgtctagacaatctcagagaaaacccctgtgcgccgattttgcactacagattagcgattttctcctgtagcaaagctactagcagccaatttccatgcatttgagaggcaaaaagacaaaataaaacaaaacgtggattgggttttgcgaggtccctgctgggtctctcggcgcgaggagatcacgccggttatggccggccggccgactgagggcaccccgggtaacccccgcgaccagccggggcgtgtcctgcgggacccagttagtgtgtgttgagtgaacggtcacctcgctgctaggcctaagcgagtggtctcgttcaccactgagtgtcccctgtgttacgcgcgaggcccactcgaagcaggtttcgagaattaattcgtagatggacgaagattctacacatccttcgcctttgatcaacaaacgtcctggaaggcttgaggcgtctagggccctgtggaggaggtgccgggttacagaatcaggacactcctcacagccagctgcgacactatctaaagcagtgggcaactggggctacggaggaggcaatcaggactggctgctgggaaaaggcggcagattaaaagtggcgactggagttggaaaaggtgctccagtgggatagggtgctgaggaagagggcagctgatacagagtgggagtggggtgcagacaggttacctaggccctgtgtaggggctgggggaggggtgactgggaatgtaaggaagagcccccttcaagatcctgaggagtgtaggacggattctatgaccctcccaggcgcacgagttgcctgggaactctgggcttcccagcctggtggtccccaccccgcacactgagactggtgggcagggggaggacaagaactcagggaggccgggcgggacaaggcggggctccaggaaccccacagggctaggaacagatgccggtgcaacccagttttgaggctgggagcaaatgtcgaagggcttcctcccctccagcgccacctctcaactccgctttaaagaaccaatctgggccgggtgcagtggctcaagcctgtaatcctagtactttgggaggccgagacaggcagatcacttgaggcc

SEQ ID NO: 10072 - DNA, 1677 bp, Artificial sequence
  DNA replication origin
tattctggaggacgttcctgctgaaccagggttccctacaaacacatgaggacccctaaagccattgggttgggcagatccggattccctttcagctgtcccagaggaggctcaccctatgccagaccctacctataacctcaggagttgaggtggcggaggctctgaactcccgtccctgtacctctcccctccgggcagggccgagcccccccttccccgccaatccggagcagatgaggcgagactaagcggcaagcccaccctgggaagaggctggggagacctaatgggcagggtccccctcatctccatcaccaagctgagcactcgtgcccatgccaccccccagccccagcctggggaaaggaggaaaagtgggcaccctagcccggaggtggcgggggaggggggtgtgggggctggtgtccgagacacccggctgggcgggcacagataggatctgaacacagggaagcatggcctagctctttgatccacagccagccacgctgggcctggacccggagggaggcacggctgtcttccggcccggctttgcaccgctgccaggggtcctgtggggccctcagagggagaggcgtccaatacccggccctcccccaaataccctctatcccaactgctctcagaagaggcgtgagcgtctacagtgaacccagcacagaaacctgctaggggagctgctgttgactgcatcgcgatccaaaggaccggcgtcttttgtagatgcaggggctgagccaggccaagcgcgccgtggaggcccgcgtggacgcagacccgggtgccatacagatgcgctggaatccaggcactttcccgcgctccgcaaatctagatgtttcagcctggatcgagcgagggttagagggttagtcaggccagggtcaacttcagagtcatgggctccctaaatgcgacttctagggttgagttgctgtggacgagcgacccatgtcggaatcccgcgcccacgtggctgcccaaagttccgagtctccgggctgcaggttctagtcacggaaccgagttgggagagtcataggggctgggacttggaggatcggctgaggtccggtgctcttggctgtgttcgcggctcggagccgtcgcctgactgaggggcccgtcacagatgtgtgatgtataagctctgcacgcaacaggagctcaataaatgtgcgaaggggggtatacttatgttcgcactgtatgcaggcggcctagaaggaagtccctgattggcacagggatggaggatggggcaagagccgcaacagcgccgcggagttccaacgctgccggttccctggggtacgagcacagcctcaagcagcctcaagccctaggaagcccccagttcaaagcacagggcgcattggagcctgggcacgatacagttcacaccacggctgcgatggtaagccacgcccaagtcccaagggcctaggggacccccgccctccacagccggaggagaaacctgggcgcagaaagcagggggaatatctggttgtaggtgagtaagcggggtcaggagttcccgttagagtctctgcgtttcgggagaagggtgatcattcccaggcttgtccgacgtctctctcagggtgcgctccggaagagcgagccctttaaggctatgccgagtgg

SEQ ID NO: 10073 - DNA, 2293 bp, Artificial sequence
  DNA replication origin
ctgtcctgttagagcctactcttgacccatgtggcccaaaggacaccaaatggtcccatcacccataccctgacagcagaacgaagccctccctgctccagatactctcccagcacttgcccacaccatgagatgacctccgaaaggaagccttttccctgtgctgctgtggagccccgggaggctggagtagagccttgggcctaggccttttgtctaatcatggttccacggtgaccccagcccctatgcaagtggcacacctgttggaagtttggcactggtgggttatgtcaacctagtcccaaatctaagggtttatttacatcttgtagggatccaaaacgcatctttgttaagcatgggctcacacagggtgagttctctggatgtagtcactacatcagcgggggaatgctggggggcacaccccccatctcacagacttggaaggaagtgaaccacctcatataccaagccaccccagagcagaaagtcggatacagagactactcgaaaaacatactcattttacagataagggcccaaagggcaaggagctcatttctagagctagccatagaataggctttccagcctaggcttctggaaagaagcctatatgtcttctcattcccactggcttggcatgcagcagctctcagaaccaccctcttcactcctggtctgaaatagcctagcacttaactctcctccctctggtgaccccactgtagccatgcgagcctccagcctgccagccccacctgcactgggcttacattcacacccaacactcacttaccacagtcctccaaaccttccacgtaccttcaccccaacttggaccaactgaggagagtgtgaaacacgaataggaatttctttaaaagcgcagctgtactgctccaaaacactcagaataggctcttcacactttaggtcatctgtaccaatgggcatggtttgtaaagatcatgaaatcttttcaaagcactgggacttaaaaatatttaattcacgaattaattaaactggtcccttctcaacatcactgatttgtagcacctttgccaacccttcctggtatgtctgagaccaagccagtttcctaagaacccactttccacacatggtgttcagggtccttctttggcaacggtacactcacgcccgtcaggacacagccgaccgaacacagcacgtttctcctgcacaaccaggggacctgaacagatcagctttcctgcccattcctccaagcgccaaggaggctcagggtttcctgggctagttagaaagttaattgcaaagctctgagctcagatcagagcagcgaggagcaagggtggtctcggctcaaaagttctctaagaagaccccaccctggcatcacccagcaccaggacagagcctgcacctgcttatgagcaagctgggaagacaaaagccaagaggcagagggcaggggggtgccccagggcggcccctccttccttcagcaaagttctccttttggttcagatcccaccgggtgtgtatgggagaaaagaccagcacaggagtctcgtctattttgttccaggcagaagtctcttgccggtgcctcacctacctggtcaaggaggctgcaagcacagggcggcactggctgcggggtccacttaccagcgggggctgcggctgggggtgctgccctgctcccgaggggggtgggtaatgcatgagcagattgaaggcggagtagacggtctctttgtacatgccgctggtgcactccggggccttcaggcctggaaaaaccacagctgggtcagacacaccagccctggcagcggctgggactgaaggctgtctgctcttgagagaaaaagaattgccaaggggtcccctgcaagttcctgacttgggaaggaacgggctgggagtatcggcagtgccaagttttaggggaaggacctggagggcaggcctccccgaggtggcccctacttgacctcccaccccccgccctccaaccaagaaaccttggccaattctgtctcctgaaggcggcggattagtcagtcacctgggcaggaggggaggcggggatggcgggggtctgtttactcctataaaggtcagggcaccggaagtgactcgacccggcggcgcccgggaagcccgccccccactctccacccctgggttctgccgcctcctgagctgcggtgggggaggcacccggctccccgcggtccttggcgtccccgtcccaccgaggccagggcctgagcgcgacgaagggaag

SEQ ID NO: 10074 - DNA, 1312 bp, Artificial sequence
  DNA replication origin
ttttgagactgggtctcactctatcacccaggctggagtgcagtgacaccatcttggctctccgcaacctctgcctcctgggctcaggtgatcctcccaccttaacctccagagtagctgggactacacgctcacaccaccacacccacctaatttttgtttttttgtagagacggggtttcaccatgttgcccaggctggtctcaaactcctgagttcaagtgatctgcccacctcggcctcccaaagtgctgagattacaggcgtgagcctccacgcccggccccaaaatctgttttaaaagcagacatttcttggtgattctaataaagggggttctcagacatatttggaaaaatatatccctacttttatgccagaccctgtgctgggtccccgggctgtgtgacctgacactgcacagtcctgcttagaatgcttaaagagagttaataaggtaccaccttctatgccataggcggggagcaaaggggctccagtgggccctgcctaggaggcctgaagctagagctgctgagggcagggctgtgctgcaaagaaaatgtctgagagctgcaggcgtttcatcttctgtcatcagctgtggcacctggcagacactggataggcttgtagacaaagacctggtaactcaaggagctgcttggccttcctgcccagtcccatcccagaggcactgtacatctctggtttcttcagggggccctgtgtggaagtatcttttgtcttcctggtgtcagggatatcatcacgtgcctgttggctaggcgagcccggcgcccagtctcctaggatggggagagtaatgttcccgagcagaacagggtggggctttcagactactccctttcctttacagctggcttcattccatcgacctcatcaaagccttcctgggagcaccctagagaagagttacgtccaggccgggccctggctgcctggttcacggcggaatccccagcaccacgcctcgcacgtcgggctcaaagcatgtttagtgaaggagtaggtacctactgctagatggagccatctctctagacttggggtttccctataacgatggctatgtttggcatggaagcctctttagaagtcaatagtaggaaataagggctaacagcacctaattgtggagtaaggttcaaatcctagctctgccacttaaccgttccgaacctgttccctcactgcagaggcgaaaaggctaacactatttcacctcggagggttaccgtggagaatggaagctggacaagctgtatcagttcagtagtaaaacacacac

SEQ ID NO: 10075 - DNA, 1094 bp, Artificial sequence
  DNA replication origin
gccattacagagagccgagctctggagcctcagcgagcggaggaggaggcgcagcggccgacggccgagtactgcggtgagagccagcgggccagcgccagcctcaacagccgccagaagtacacgaggaaccggcggcggcgtgtgcgtgtaggcccgtgtgcgggcggcggcgcgggagcagcgcggagcggcagccggctggggcgggtggcatcatggacgagaaggtgttcaccaaggagctggaccagtggatcgagcagctgaacgagtgcaagcagctgtccgagtcccaggtcaagagcctctgcgagaaggtgagctgtagtacggctgcggacagccgccgcggggccgagcccgccgaggaaaaggcggccgtgaggagggtgcaacatggcggaggccgccggtccgggccccccgagtctccgagaccggcgcccatcctggccggcggcggcttcctaacgacccggcgccccctgcctcccgcgcagggattggttgccgccgccgcctaaaatggcgccgttcactcgactcctgggcttttgagtcagccggccttggcgccagacgaggtggcagggggagcggagaccctgtgggtcatcgtcagggacggttttgagggtgagctggcttggattctgcggcttgggaatggagcctgggcctctccggtgggctgagtaagagtcttgccgctggtacccaggcctagttaggtccagagctgcccagaggatcccccaaaggcagtcttgttaggccgtatcccagaacatacctaaaggtcacacagctttagtaccccttggtggtttgtattaaactcaccaagcgatcttctccagaaatcaaggtaaggggtgtctttaagaatttttaaattattctcttaacctaatttttacgaaggtcatggtggtagctataagggaggagtgtaacttatttttcatagttggaagaaatcgggaatttggtgagtcatactacataaggagcttttggattggaaatcaagtgtcggttgaatatgatttatatgctgactcaaagccttctctaagcttaacacactt

SEQ ID NO: 10076 - DNA, 1932 bp, Artificial sequence
  DNA replication origin
gcagcagggaaccctagaccagtcgatcgacaccgttttactttttgtggggaggggaagcagtatcaaaatttcttcgggcgccagaacgagcggcaaagcttatgggagtagggccgaggctaggacccggcttccgccagtcccgctgggcccacagccggccctctgagggtcacaaaggggaaggtgtctgggatccacgccctgcagccccgcagctttgaggggccgtcatctaggcgaaggtgaaggcccttaccgcttgaaatcccgcatgagcctcctccgggccggggtcgacatgctccgcagctgccccgcggtcagtctgaaaaaaaaaaagtcccgcgcagcccccccaccccccggcgcggcggccgaatcactgtggatcgccgccgccgccgccgccgccgccgccgccgagactgacaaacaaccctgcaatgacgtctccctccgccgcctccggatccctccgccctccgccgctaccacagtgtgagtgctgggggaggagggggcgggacgcgggagcgcgccttccccgagcccttcagcggggcgcggttccccctgggcttcctgaagtaatagacaaatttgtgttctctgtgttcagactagaggttgtggattcaaagaccacgaaacagaaacactatcccgtctccctccccgtcactagtttaggctcggcggggtggagaaagagggacgcatccgggccagagatttcagggaaaggaggtgggatgatgtaagatcacgtgactgcccgcggccttgtcaacaatccacccctgagtgggagggggagaagtatctagaaccacgtgtccctatgacgcgtttagaacgggtcacgtgagcgcctcgcctggatgtgagtttcagccaggtctgtgaagcgggtttaagagggtgagggcgggataaacctttattagttgttttctgtttatcacaggtatagagacaacattacccaagaggtcatggcagaatcaacagcttgttttgttttctttaaaccgggaccaaaaataattcccctctggttggttcagtggcttattaactctggtacttggggcaagaagagtgagaggatcgcacgatcttctaaggcagccttgaatactgaggcccacacaacaatctcctgaaatggttccttgaagctaccagatagtctttctgctttgcagtggggtttctagtattggaaattctgggcaaatattaaaggatggtgtattatgcagtttttcctttctgggtctgctttcaattgaagatatgtgtcagagtccggggacttgcctatggtgggggagtaccattgtatttttaaggaatgtgggggtgcagtcttccaagcatatcaatgagtggttggttgtcaaagaaacctacaaatatgattcatattctgggggagagctccggcagacatgagtgagggttatatatctagcctgagataacttcaggttttctacactagcaagaaaggtgcaaatgggccagaagggccccccaccaccagggggttcagaggtgttgacctcccaaagaccttgaatattttctgtggtcaccgtccttccctctattgcttccaattcctaccttcaggactttgttatactaaggactctgagtacttttgtatccatttggggaactgttcagttcaacaggtaaagggagggtggaatgaggaccttaacattgcctcagccttgcccctgattccatggaagcagagttaacttttctgactttccttgtacctctttcttcaaaccctgaattccctctctgcttccagtgactgccttggtgatcaggttagccaggcctaactcttgataggtcctgttagacattcgcaatgtgttttttaagttaaaagctgaatat

SEQ ID NO: 10077 - DNA, 1209 bp, Artificial sequence
  DNA replication origin
gcagtcacgtgatcttacatcatcccacctcctttccctgaaatctctggcccggatgcgtccctctttctccaccccgccgagcctaaactagtgacggggagggagacgggatagtgtttctgtttcgtggtctttgaatccacaacctctagtctgaacacagagaacacaaatttgtctattacttcaggaagcccagggggaaccgcgccccgctgaagggctcggggaaggcgcgctcccgcgtcccgccccctcctcccccagcactcacactgtggtagcggcggagggcggagggatccggaggcggcggagggagacgtcattgcagggttgtttgtcagtctcggcggcggcggcggcggcggcggcggcggcgatccacagtgattcggccgccgcgccggggggtgggggggctgcgcgggactttttttttttcagactgaccgcggggcagctgcggagcatgtcgaccccggcccggaggaggctcatgcgggatttcaagcggtaagggccttcaccttcgcctagatgacggcccctcaaagctgcggggctgcagggcgtggatcccagacaccttcccctttgtgaccctcagagggccggctgtgggcccagcgggactggcggaagccgggtcctagcctcggccctactcccataagctttgccgctcgttctggcgcccgaagaaattttgatactgcttcccctccccacaaaaagtaaaacggtgtcgatcgactggtctagggttccctgctgcccatttcggccagctgcccggcgtctcgcccaggcgatcagacattatccgcccgcccctgcaccctgcggcgcccccttcttgtcccctcaaagtgagctcctgcgggagcttgttcctctccggcagcaccagtcagctttgtttcacggccccgccgtcttctccgaggagccgtgttggggcgaacccctctcccgactcctgccaatcctttccatttgtgccctgagggtggggtccagtgcgtgaggcccggaggttaacccatcccccgaaacccgactctgtccccgcccgcctgaaaggaccttgggaactgacttagagatctgggaccttagagctggccaccccggctgccagtgctttctggaactcagctctggctggtgaagaaagcccctatctatagcctcccgagtctg

SEQ ID NO: 10078 - DNA, 1187 bp, Artificial sequence
  DNA replication origin
gctggagcagttccagaaagcccgagcttgtgggcccctggcggcacggtgcctatctttccaccgttagctaaattttccttgggggtaaggattgtttctccagatctgtctcaaaatgcacattccccaggggtggagtgccacccgacgctttgaagaggaaaccagaagactggagaactggggcggatagatcttaggagccaagatggggagaggggctgatggggccgcagggatttggcagccgcctaagctccctcaggccccgcctgcacctttcccagcccccaggactctaggggaagtggtgggtgggggagggggaaacagagctgacagattctgtaaacagagccggtttgggcctcggccaaggacggggtgtcctggcccagcctgggtgtgaggcccatccgcggctctccaggacaccccgccctgcccggctgccccgggggtgcccggcccagagccagctgtagccaggatgtgtctgacttgggatgtggccaattccctagtggggaatgtgcctgggattggggcgaggggtgggggtagcaaaggagggagcttctaagaactgtcattgatcattcattcacccagtgcccggctcagcgaagagggcagcctctggtccccgcctgtgggaggtgccggtgctggattgtcgccccacccccgtctccatctccaatcctgtctcttgctcttctgctgcctgaggcagagtccccgcggggtagggaagctgagagtggggcctcaggttccgagagctcttcattggccaggcctgtccccttggcttgttgccaaatgtggtgttccatggcctcacgatggcaattcagagatgcaggaatgccctcaaaaaggggatgagggaggacaggcatccagggatactcaaggacactgttagaagcaggagctgtggttaggaggtggggagaggacacgggtggccccgggacactggcaccccagcaggtggaggcagctgtgggctatgccttttaagatatggagaggagttcctttgggaggagaggagatgggttggctgagactcgtaggctggggccagagtgccagctacagattctggactttattgtaggggtgagcatttcccaaaatgtgctcctgagtgatcgtgggtggggtgaacaaaa

SEQ ID NO: 10079 - DNA, 1873 bp, Artificial sequence
  DNA replication origin
gagatgtgagcctgacaccagggaggagaagcctgttccacgctacggaggtgcaaggaaggtgaggtccgataattgcccgctgcatctaacgtggagagtccttgaaaaggcagttctgctgtagtggtggcgccctgatgggagctgggggagaaaaaggaaggaagggaggagaggagttgaaggtagcaaagaattctttctaggagttatgccgtaaagaggagagaagaaatagggtcaagaggagggctttctttgagaagaattgcagcttttttgtgtgctgacgaaaatgatcctggagagagggaaatttgatgctgtgggtgagaagggggctaggtgttggcatgaagtctttgagtaggtgggaggggatggcatctggtgcacgaaaaggggctgccctgaaataggagcacggacggctcgcccatgtcagtgggatggcaggcagagtggagggcacagatgcgggtgggtgggggagtagtggtggggcctgtggaacttctcttctgagagcttctattttcttagcaaaatcggaagaggttgtcagctgagaatgaggtggaagaggaggtgtgaagcagtcgtctaggagagggggtgtgaataggcttggagatatagtaggattgctgggcagctgttagggctcactcagggagggttgtggtcattaatttaaagtgagactggtcagcccagttatgagattttcttcagttctggtcagcctggaggtgcacaggtggagggggcagaggactgaatttaactgaggttgtgattttgccaggtgactactgtggccagcgggagagtatagtattggatcatgaactccaagctgggtaaggagggaaggcgggcactatgaggatgaggaatggtgaatatttgcttggagcagtaggttccaggaggaattgctggctttggggtcctgcgggagtgagctggagagcaaggcagtgtttattggagtgtgagatgcatgaaattgagatgacgaagggattgcattgacagataatggcgggttcaaaatctggctatgggagcaagaggctgaggtactagggaagccaagatcgtggagaggaggtcaagggcctgagaggcattcatctacatgaatgctcacatcgaaaactgcagcaggagtcgggtgggagacgaggactgggagccaggagcaaacatcctcaaggaatgagggaagtgacccagggctttgtaaattgctacaaaaaggaggaataacagtgatcttgtctgacagtatgacattcaaatatgggtgtttctaaagagggtggcaaactgtctagcagtggcactgaggagcaaaatgggcacctccttacccctagacccggggccacaagggccacagagggaaaacggccacctcttaagaggctgcagagggggcagaatccacacaggagaggcagtttccattaaagcaagaaagtgaaggggacattcagaaatggggctgagaatatagggccatactggtgagtttcagagagtcccgtgaaaggatttctagagatggggtagggagatgaggtcagcaaagcaaaatacagcatccggtagggcttcgagtcctggggtgcaggctacctgagtgttctgggcctcctgtgggaactgctgtgagcagagataaagggtctgaggggcccaaggctgggcttgttggcaggtggaggggtttttcactcctgctgatgatggtgctgtgaagctctgaggaggggcagtctttttagagcaggtggggctctggctccctccttactcccaggtaggaatgtcaatcaaaactctcaggccaggctcagcg

SEQ ID NO: 10080 - DNA, 835 bp, Artificial sequence
  DNA replication origin
gggcggggggttgggggggcggcgacgggggtgtcgggagcggagatccgagtgaataagaaaaaagtggctactccccctccctcgctcctcctgcccgcccccaccccacccccaccccaacacattttttttttctaaagagatcacaaggaagtcttggtttaaaaagaaacagaaacatacacagggggttggtgaatggtgccgaccgcggccatcgcagttggaggctattttttggggggggtgagtagcgtccatggagttactttgcgcccactcctagcggcaccggcttaggtcctgcgggccgaccgtccccggcggggggcgtggggcctgggacgccgcgggcccggccgcctccctcgccgcgaccccggatggatgcgcgccccccgccctcccgcgccggccccaggagctcccggcttcgggagcatccttcccgcgccggtccctgcagcggcgcgtagccgagggcagcgcccgtcaggggggcaccgcggagcaaggtaagatccagcccccggcggatgggccctgcgcatctccacgacgttatttggcgtttttgcaacagatctgccagcgctcttcgctccctcgctctctcttgctcgctcgctccctctctctcctgctggctgcctgttctaggaagccagcgcggagaggggggggatgcacagcacaggggagagagattgcgcatgttggtcagtcgtgttttaaagagtacagtgcggggaggctgagaggggcgcatgcaacaacaacttttggaagggtgagcttggcgaccttctttattaatgactgcggcaaagcg

SEQ ID NO: 10081 - DNA, 1175 bp, Artificial sequence
  DNA replication origin
caaggcagcaggtcccactcagccccttcctagacgctttggaaccgctctgaatggaaacatgacacctctcgatgaccccctacaaactctgacccgggatacaactttgtgcctcgggatcctgcagaagatgacccaggggtgctagacgcagcggcgaggtttggaaatctgcagagaccagaatcgccggccgcagtgtgccttcggcatacggcaaagacacccagtgacccttcacctcccccagcctccagcaagaggccagcagccaagctggtaaaaaagtgcccaggccagcggcagtggctgaggggattgggaggggagttgcgcgcgcctccagcccgcccctggaggcagtccgcgggaccgcaggctggaggcgcgccggcgtgattccgaccgccggagccgggaggaggagccggaggaggctgcggggggctccggcccaggcgaaggaagggcaagaggctgttcgaccgggggcggcgccgggaggtgggtgggcttaacacccaggtcgggggaggggtttaagagacaccgggaagggcagccgagccccaggggcgggtggggtggtagctgtgtgtagtaggggacagggctgggcctctggaagctagagtgaagccttcctggctgtctcgcaggcaaccccatcctctggcagaacagctgcgaatcgccaagttgacccctctcgtcccttggccgagaggagaggatgtctcaggacccagggatgggcgggaagaaaccatggggagccacaagtctgcacccaggcggggaggaggcgggcgggcgccgctccgcaggcgcaggcgagtgggtgggaagaagggagggagagggaggaaggaggtgaggccgggaagatgccactgccgggggcggggcggggccggggatccggcaaagggactgcagcagcgctaggtgggggcgggggctgcaatgtcactcatttgagagtcaggtgtgtgcgtcccaaacggggtccgccacaagccggcatcttcctggtaccacccatggtgcagggccctaggcagagggctggggactgcggatccgtccctgaagcgggacgcgaaccggcagagttgggagaaggtaaacaagggccacgccccctgccgtcgccccgcgggcgcgcaccc

SEQ ID NO: 10082 - DNA, 857 bp, Artificial sequence
  DNA replication origin
ggggaaggcaggacggcggggggggatggcaggacggggggggggatggctgtgcgaggggttaaggctcaggaacaggggaacatccagcaagacttacaacagccccagcggccaacaccggcccgccctgggccccgggatcccactgcttgttggaaggaggagtttccaaaaggaaaccacggaagaagctcatcttgtagcaggactaggaaacttgaaaaggcaaacggtctggtctggtcagctctgtctgagcgtgaccagacttcggccgagactggccccgaaggaaggaaggaagttggagcctcagagtgattctctacagtgggctggtctgagccccatgaccctgtctgggcactggccctcccctacagccctccacctgcactggcagctggctgtttgggagtcccctgagtaaatggcacagctcaggagggattctgggaaccccttcccagagccgctgggctgggcactggcaggggcagagcagcaagggaggggagggtggcagggtgggcaggcaggcctcagatgatacgggctgatcaggaacagctttcagttcccctggaactagcgggccctctgcaccccctcagtgctttctcatataaactcgttgtgcttgtgacagtgagtagactctggctgggtatcgtttattatacttccttggggatcggtggagtgtagcaggaccccccaaatggaccccagtgggatctgggggcaaggcggggtaggccctggactggcccatctgccatgaaataatgcccaaacgacagtctgtgtcacccagtggcagtgggctggagtcctgagctcttgtccacctt

SEQ ID NO: 10083 - DNA, 895 bp, Artificial sequence
  DNA replication origin
ctgcccggccaccccgtctgagaagtgaggagcgtctctgcccggccaccccgtctgagaagtgaggagaccctctgcctggcaaccgccctgtctgagaagtgaggagcccctccgcccagcagccaccccgtctgagaagtgaggagcccctccgcccggcagccaccccgtctgggaagtgaggagcgtctccacccggcagccaccccgtccgggagggaggtgggggggtcagccccccacctggccagccgccccgtccgggaggtcaggggcgcctctgcccggccgcccctactgggaagtgaggagcccctctgcctggccagccgccccgtccgggagggagatgggagcgtcagccccccgcccggccagccgccccgtccgggaggtgaggggcgcctctgcccggccgcccctactgggaagtgaggagcccctctgcccggccaccaccccgtctgggaggtgtacccaacagctcattgagaacgggccatgatgacaatggcagttttgtggaatagaaaggggggaaaggtggggaaaagattgagaaatcggatggttgccgtgtctgtgtagaaagaggtagacatgggagacttttcattttgttctgtactaagaaaaattcttctgccttgggatcctgttgatctgtgaccttacccccaaccctgtgctctctgaaacatgtgctgtgtccactcagggttaaatggattaagggcggtgcaagatgtgctttgttaaacagacgcttgaaggcagcatgctcgttaagagtcatcaccactccctaatctcaagtacccagggacacaaacactgcggaaggccgcagggtcctctgcctaggaaaaccagagacctttgttcacttgtt

SEQ ID NO: 10084 - DNA, 1286 bp, Artificial sequence
  DNA replication origin
ggtcacagatcaacaggatcccaaggcagaagaatttttcttagtacagaacaaaatgaaaagtctcccatgtctacctctttctacacagacacggcaaccatccgatttctcaatcttttccccacctttcccccctttctattccacaaaactgccattgtcatcatggcccgttctcaatgagctgttgggtacacctcccagacggggtggtggccgggcagaggggctcctcacttcccagtaggggcggccgggcagaggcgcccctcacctcccggacggggcggctggccgggcggggggctgacgctcccatctccctcccggacggggcggctggccaggcagaggggctcctcacttcccagtaggggcggccgggcagaggcgcccctgacctcccggacggggcggctggccaggtggggggctgacccccccacctccctcccggacggggtggctgccgggtggagacgctcctcacttcccagacggggtggctgccgggcggaggggctcctcacttctcagacggggtggctgctgggcggaggggctcctcacttctcagacagggcggttgccaggcagagggtctcctcacttctcagacggggtggccgggcagagacgctcctcacttctcagacggggtggccgggcagagacgctcctcacatcccggacggggcgacagggcagaggcgctccccacatctcagacgatgggtggccgggcagagacgctcctcacttcctagatgggatggcggccgggaagaggcgctcctcatttcctagatgggatggcggccgggcagagatgctcctcactttccagactgggcagccaggcagaggggctcctcacatcccagacaatgggcggccaggcagagacgctcctcacttcccagacagggtggcggccgggcagaggctgcaatctcggcactttgggaggccaaggcaggctgctgggaggtggatgttgtagcgagccgagatcacgccactgcactccagcctgggcaccattgagcactgagtgaaggagactcctgcaatcccggcacctcgggaggccgaggctggcggatcactcgcggttaggagctggagaccagcccggccaacacagcgaaaccccgtctccacccaaaaaatacgaaaaccagtcaggcgtggcggcgcgcgcctgcaatcgcaggcactcggcaggctgaggcaggagaatcaggcagggaggttgcagtgagccgagatggcagcagtac

SEQ ID NO: 10085 - DNA, 868 bp, Artificial sequence
  DNA replication origin
accttggcatgattgagccagaagcagaaggccagtgtggagtggagcaggcgaggagacgaggggaagggtcagagcatgggggccttcttggcgtggtgaggagtttggattttattctgtgaaggaaagctaatggaggatttcaggcagagaagtgtcatcctgtggctgtgttctaaaaaatcaccctggctgttctgctcagaataggcggtaggaaggtcagagtggaagcaggcagactctgtagaacactgttgcagatgtctagaccggggatgatgggggtcttatggaggtatcagtggggatggagagaaatgtagggttccacatattttgaaagtagaataatcaagacttgctgaatgattggatgtgtgataggggagggtcaaggatggcaccaaggttttggttcaagctatagtgtaaagggtagtgccactggagccatttactgagctgtggaagatggggtgcaaggtggggggcaggggtatggaggtgagaatcctgttttcacatgtcaggtttgaggtacttattagtcatccaaatggagttattgggttaggaggtgggtgtaagaggctggagttcaggctgagacagcagtttgtgagttgtcagaggggatcactgtgagagcatggtccagttaggcaggagaggacaggatcagatgggcagtggaggcacagcgatgatatgtccattgtggtttagatgccaataggccgttacattcatcctgggaaaaagagggccattctctcctgattgcttttgttttttagtgagatcatcaattgagagcaagtaggggtggaagggaagagtgttggagacctggggagataag

SEQ ID NO: 10086 - DNA, 1063 bp, Artificial sequence
  DNA replication origin
gtttacagcgtccctgtgtatgttggactgactgtaataaatctgtctatatcgacttgtccatgtacgtctattaaaaccatagtccgagcgtgctaagcactgctgagccccgactgcttcattgggctgaggagggaggcggatagaaagggaactgtgggtagaaagggaaccgggccccttgggtaggagcagagcgccgaggcagcccccgccgaggtctgcctaccccgcttccccaccaccattcttgacctgctcagcctggctcccatgagggcaccgtcctgcgttgcgagcctgtccggtgcgcacccgctaagctgtgcctctcggcgttgtccgcgggacgccttagcgagaaccccctccctccgcggctgcgggactctacgggtttcttcccaggccgggtctgcggtgaccctcgaggccccagggtgctatggggcccttgcctgccaggagcgttcgggcaggggctgctgagagcctctttatgcctggggttgccttttcttctgtgggcccagcaacagcccctcttctctcctcggagccagggccaggctattccaggaggactgagggggctggatctatcagagtatagcgagggcctcccgctgcctttctccctaatgcccgcaacgtgccgagagcccaccgaggggcgtgcggctgtgcaggagaaagtgtccgtcacacaggactcacttctcacttccaatccatcccaacttgtggggactgctggccgcctccgccctcccctggcttttggaaactactgaacaagaccagcctgtaaactgcctgtaaaattctgcttcccttaagtaagtcatttctaatggcaaaacaaaatgtttgcagctgcagtgggggaggaaggaggggttgatattctgctttagaatcaccttatgatgggggttggcactgccctggacccaggcaagccctagctaggagtagggcacagccacaggcctagtcacgagctgacagctggagagccctgtgcacacattctcaagccaggtcaacacagcctttg

SEQ ID NO: 10087 - DNA, 1093 bp, Artificial sequence
  DNA replication origin
ccattagaaatgacttacttaagggaagcagaattttacaggcagtttacaggctggtcttgttcagtagtttccaaaagccaggggagggcggaggcggccagcagtccccacaagttgggatggattggaagtgagaagtgagtcctgtgtgacggacactttctcctgcacagccgcacgcccctcggtgggctctcggcacgttgcgggcattagggagaaaggcagcgggaggccctcgctatactctgatagatccagccccctcagtcctcctggaatagcctggccctggctccgaggagagaagaggggctgttgctgggcccacagaagaaaaggcaaccccaggcataaagaggctctcagcagcccctgcccgaacgctcctggcaggcaagggccccatagcaccctggggcctcgagggtcaccgcagacccggcctgggaagaaacccgtagagtcccgcagccgcggagggagggggttctcgctaaggcgtcccgcggacaacgccgagaggcacagcttagcgggtgcgcaccggacaggctcgcaacgcaggacggtgccctcatgggagccaggctgagcaggtcaagaatggtggtggggaagcggggtaggcagacctcggcgggggctgcctcggcgctctgctcctacccaaggggcccggttccctttctacccacagttccctttctatccgcctccctcctcagcccaatgaagcagtcggggctcagcagtgcttagcacgctcggactatggttttaatagacgtacatggacaagtcgatatagacagatttattacagtcagtccaacatacacagggacgctgtaaacaggggcgcgggccggagagcgggtgtgcaaagtgggcgcagggccctggggccgcgccccttgctctgccggctcgactcttgcacggcgggcggtgaggagggggctgttcgcccagacagagggccacctcctagcccgggagcagagcagagggcctgggcctgcagctaagctcaaggctggggtgttctgagatggacctcccccacctcccgccaggcccgcactgc

SEQ ID NO: 10088 - DNA, 1929 bp, Artificial sequence
  DNA replication origin
ccggccgctgggcctcggcgctcgcctaccgcgccgcgtgccctccgcggagtgggcctccggggcccgtgggaacacacacaccacccgcgccatcccgagagaaattgcaactcatccattttttcgcggcacttttctccgacgtctttttgcttttttttttttttttttttttttgtctttttggagggcagagtggggtccggaaaagcaaacacaaaaccaacccggagtgggaagtgggaggagggggctgcgcaggtgtgaggtccgcggcgcggtgagctggggcttgcgagccggggccccgcgtgcgtcctccgcgcccgcgcccgcgcccttccccgctccggccgccggcccgcgtggtgcggcggggcggtcagctgttgtactggcacgcgttgaggcccgaggccgggccctgcaggccgccgtagccaaacgacgagtgctgtttggacttgagccgcaggctggctaggctcgagttgcacgtgtcccggtagacgctgtagggcgaggcgggagtgccgtacgggcaagcgcccggcgacatggccgagttgagcgaggagccggtgaggttgttgatgttgttgaggcccgagttgggcatgccaggcacggcgcctgggcccatgctggacggcatggtcatggaggagatggagctgggtgctgagaacatggactgcgacgacagcgggctcatggagttgaagaaggtgaagctcttggtggagagcggcgctggcgccaggctcttggcggcccagttgttgtaggagtagccggcggcgtacacgtcctcgtagggctgcactaggccgctgaactgcggcacgtagccacccttgcacaggtccagctgctggttacgctcgcgcttacgccacttggctcgccggttcttgaaccagacctgggggaggggacgggagaagggtcagggccgctgcgggccgggagggaccccacccccttccccaccgcctggagccttccgtcggcccgctgccctccgaacgtcgtttctctccttcgaccgatatttccgctcctgcattccctccacaatggttcctttcctgtccccagaaaatactaatttctttttccgatctttatcctctcccgaaattatatccgttttcttctccgaatacggattctcgtttaacagatattcgttttctttcttcctctctcaaccagttcacctctgccttctcccccaaacaggttcgctctatctactaaatatttcagtctttttattctccctcaaatacaaaaggtatttttcctccctgagacataggactttccgactcccccaattcttcgatctatttcatcgctcaaatagtttgttatcatctttatcggcaatatttgatgttttctttttggctccaaatgtttattttcgttcagtccaccccactgtctgaacctctttcttctccctcagtctgttttcttgtttatcccccatttttgatccttttgaatcgtcctcaaatattaggcttttgaatcctttccaaatatctgacctgcactgttccccttaaacagttgattctttttctcaaatacctgatctttttgcttcctatttaatttctttcctgccgcctaaatatatgccaaatatgtttctccacaaatatttaaattttttctattcttactagattcttctaatcttcctgcccttccttttctccccccaaatttggtaagaacctcctagtcctcccccatccttacctatctgcctaccgcatgccctctgcccactcggattttcctccagttctgagtggagtttcctgagctagtttgccagatccctgcttctcagctttccctagtccccagcactgacactacctgattccacccccacccacccct

SEQ ID NO: 10089 - DNA, 951 bp, Artificial sequence
  DNA replication origin
gggccggccgggctgctgaggcccgagcggcaggagcgcagcgcggagcgctgagccaggcgcccagtcgcgagaagctgccgccgcctctgcccgcccggcgccgcagccccgggcggtccatggggcgggcacggcgtcgctgcaggcgccggcagccctggagggcagccgcttaggcgctgcgctcttgtccccgcaggtcgcagccagggcggcggggcgcgcccagccccggcccctggagcgcccgccgcggtccccacctccatggacgccttcaaggggggcatgagcctggagcggctgccggaggggctccggccgccgccgccgccaccccatgacatggggcccgccttccacctggcccggcccgccgacccccgcgagccgctcgagaactccgccagcgagtcgtctgacacggagctgccaggtaagcgccgttccccgcgcggcgcgcacagagcctacccgggcgcggagcacggggagctgggagcagggcctgacgcccgcgccgcgcaaccaagctccctctccgccccagaagcgtcaggagctttctttttcccgttctcgacctgacggtgaacgcggaaacttacgcacacgcgaaggcacttccacgcggtccccacgcgccaagagactggcagatgcacgagcctacagctggagggttggactgacagcccctcttgatcaggagtaaatagaacgggaaagaatttgatttgcgcaactgggcgctaaggagcggctcggacgaagggagaggaggagaccgagaaaggaagaggggtgacgggcgagagaacgcactcagagagacagagagggaggttaacaccgtgacagtaggcgacagaatgaaagagaccaaagagaaggggcgggcgggaagggtaaacggggggagaggggtcatcaagtagaagggagaca

SEQ ID NO: 10090 - DNA, 1924 bp, Artificial sequence
  DNA replication origin
atgtacaggatgtgtgtgtgtgtgcgtgcccccatgctgtctgcattcaggctgttctttttggtaagacagctaaaaaaagaatggtctgtgaagggacactccctagcacgctgcaacacctgaatatctccttgaaaggagggatcttctactgcaggagactcgtggtaaaggtggccaagaaacatggcaacggtggggctgagggcaaatgctgggcaactgtgcttccccatgttcccctccccgtagccaagactcatttcatggagggagatctcagcttggaagaaggcaggagtcactgagcctccccaatccaaacccctgagaagtgtcctccctctggcctcagaccctgcatcctgtggtcacagacccacagtgagaaaggaccaggccctaaggagctgtgctgtctctccacggcccagagcgggggatggggatggggatggggatggggatggggatggggatgggggtaggggtgggggtgctttggactaacgtggagggaatggaaggcaggcctggttccaccctgcatgcccgaccctggccccagcagcccccacaaggagctcagctgaccctgggtgtctccctgtgatgggaaggggtaagacgaggactcaaaggcagaacctgcagagtgccccagacgctgatacctgcacagtcagtgccacccacccaggagttgaggaggcactgggttttggggtgaggacactggacacctccctgcttctttcccaggcagacaatcctggcgcagctcccttgggttgctgtgtctggtggagctgatcacaggtgaggggcagagggcagtctggggtccgcctatggccagaggagcaggtcagggcggcgccttgccgccccagctgtggcctgtttgctcaagacgctgaggtctcggggccagctaacaattgttgagcaaaatccttcgacaaacttcacctacgtgcaaggactcgaggagggaatcactcttaggagtgggagagtaatgtctttgcctgtgcccagtgaaggcccattggagctgcagctcagctaccactgtgtgggagagaagctggaagactgagggcttcctgggctgctggcccagggttgggagacagcagtcacctggcttaccaggcctatgcctgaagccctgggaagccaggacgcaggccccaggctgggacaaagctaccctgaaggagggcaaaggctgccaaggccaaccccatgcctgccaaggccaggcctggcccatttggccaaggcctaaggtgtaaaacaaggggagaggtacaagaggctgtggggtctggctgggatccttggggtcttccttctgcattctccaaacgcctagagccagcagaaacgtttcgtctgattagaagccatcatttctatcccaatcccggaaaattgactgcggtgcagagagggaggcctgagaagcagccgtaggggagaaggtccaagctaattaggaggcagcatccgggggcccattagagcgcaggctgctgtcactcagccgggctgagttcccgggagaagaggctggagaaggaggggcaggcggcccctcgacgaggacaccgctgggagctgccggaacgggccccgggctctgcccccgccccggcgctggctcgaaggcgcccgctcggtgcgatcctgttcggcaaacattcactcatcctgggctgttctcgccagggctggggacttcgaggcggccgagacgggagttgattctaggcgaaacaagtcatttgaggcctgaggtgtgcacgagccgcccgggactcgcaggccagatgcgtttcttttgtgaggccgagggagaactcggtgtgtcaccggggaaggagggagaggcgcggcgaggccgcggggggcg

SEQ ID NO: 10091 - DNA, 1006 bp, Artificial sequence
  DNA replication origin
cagcgtcttgagcaaacaggccacagctggggcggcaaggcgccgccctgacctgctcctctggccataggcggaccccagactgccctctgcccctcacctgtgatcagctccaccagacacagcaacccaagggagctgcgccaggattgtctgcctgggaaagaagcagggaggtgtccagtgtcctcaccccaaaacccagtgcctcctcaactcctgggtgggtggcactgactgtgcaggtatcagcgtctggggcactctgcaggttctgcctttgagtcctcgtcttaccccttcccatcacagggagacacccagggtcagctgagctccttgtgggggctgctggggccagggtcgggcatgcagggtggaaccaggcctgccttccattccctccacgttagtccaaagcacccccacccctacccccatccccatccccatccccatccccatccccatccccatcccccgctctgggccgtggagagacagcacagctccttagggcctggtcctttctcactgtgggtctgtgaccacaggatgcagggtctgaggccagagggaggacacttctcaggggtttggattggggaggctcagtgactcctgccttcttccaagctgagatctccctccatgaaatgagtcttggctacggggaggggaacatggggaagcacagttgcccagcatttgccctcagccccaccgttgccatgtttcttggccacctttaccacgagtctcctgcagtagaagatccctcctttcaaggagatattcaggtgttgcagcgtgctagggagtgtcccttcacagaccattctttttttagctgtcttaccaaaaagaacagcctgaatgcagacagcatgggggcacgcacacacacacacatcctgtacatccatgcggagatgctgtacacacacatgtattcactgcactatggaagtgctgagtttaggcatatatgtgctacttggcatga

SEQ ID NO: 10092 - DNA, 907 bp, Artificial sequence
  DNA replication origin
tagcccagcgtctcttaccccacctgggcagcgctgcgtctgcggctcgtgggctccgggctcgcccgccgcggactctggctcaggtttcggctccggctggggccccggatccagctctggctctggcactgcacggttcttcggcccctgctggttcgctacatcccagcgcgcgaggccggggcttcctcggctcggcccgctcctcccgccgccgccgcccgtcgcccgcggggaaggcggggacactggccgggaggcgggaagggtggggggaggggaagctaggtgttcgccgggacctgcggggagaggggcggcgcgcagtcccgccggctaggggtcctggcctccctcggggcgtaggctggggtccgcgcggctggcggccgggcctcgaggccggggagcgcgccctgggacctccgtggaggggccctgccgcatgcggacgaagccagagcgggtcccagcctggccctggggcactttctctccctgggcccagtttcccacctgactcgtgaggggctggccctacttccgtttagacgggggctggtggtcgagtttggggttttgagattggacctttcttctttctgctcagcctgcgggagggagctggtcttgcgtgttggcagggagagtccgctgcccagagcgtggcagccagggaggtttgaggacagaccccaggttttctgtgtttgggggtagggggtgttagggtggggcaaccgcccgacctgccctggttgggggaattgccttcttccctctcctcaggggctgggctggtgaggaaagggcacaccaacccctcaggacagacacttctggggccccttgtccaacccctatgcctgcacatcccccagcgaccatcctgctgcgggcctgc

SEQ ID NO: 10093 - DNA, 1060 bp, Artificial sequence
  DNA replication origin
gccgctgggagacgggctggacgcaagggaactgggagcctgtcctttgcccaccctcaggccacagggctccccagcgttgcctcgtggccagataaccctgtgcgcgaagcctcatggtggaaaccagttggccgaacctactcctggtaccccgaagtgcccagcctgagcctgcttgctgttgggattatgggatgggaccacagggcaggtcgggctgtggcctgcctttctcagggactggagcggctaagcctgcccgccgacggccacgggctccagagcgaccgtttccggcgcaaggtgccgggagatggcagcgcggcagccgggcctgaatctttcatgagatgcagtcagcagcggcgcctccctgcctggttctcgccgacagctgctgcgggagaggccgcgacccgcgccacctcggcgtcctgctagtccgtgcctccagggccgcttggcctgggaacgcagagacccacgaccccctccccaacctccgaagcgggaagccggcccgacccaagctcacagaggcctcggtgttcaggccctgccaggtggcctctgcaccctgtcgtgctgttccagggactccataccctcctctcaaccctcgacagcaggaacccctctccagtggtgtgtgcagggctctgtgcacccagggtcgcaagttaagataacgagtccccgatgccggcactagcggacctgcgcctggagaaagtgcagtctaccaacttggaccctgtgctgtggggagtttagccccctacgtctaccccctcccattgactgctttatgtgtaaaatggcttgttggcgggtccagccctagagctgctaagctgagaagtttctaatcttgtctctggaatcttccttccactccaagcaccaggggcatctttgggcataaatgcagccgctggaccttactatggagggctgcacaggcactcctggggtggcttttactctggcgtctgtagcaggaaatcacaccttcccccctccctgcacgctagcaattttccaaattttgttccca

SEQ ID NO: 10094 - DNA, 1235 bp, Artificial sequence
  DNA replication origin
tcctcctcctctaggagtgtcctctgtgcagaatattttcctagtgggttggacggggctgtgggcagctgaggggagactggacctgcctgcgctgtgtgctcctgactccgggctggggcccggctggagaaccttcctgtctcatggttcacctccctttcctgcaccagccccgtggtgcatccccagaggggatgtcttcccccagtgaccagccccggggagggaatgtcccggggcattgaggggcatcccctacacacagtggacaggcctcagccctcacagtgcttgcccacctccacttcctgccccgtcagtggctccttcacttgttcagcccccacacagcttcctgctgtcaaccaggcatggggtagcggtgaggagcagggcagagtccaatgcctgccctcagggagctcacagtccagtagaaagttctctgaggatgggatgggctctctggtactgggtggtgcagtgagggggatggagggatgagcagggtggcatgcggggctgggcacggagtagtgtggtcagggaggcgtcgtcctgcatgaaagtagacctgaagcacgaagactgcgggctaggccaaggggctgggaagagtgactgtggcaggggaagagcatgtgcagaggccttatgatgggggcggtgcagggaaggtcagcgtggctggagaagagagtgaaaggaggaggagtgagagctgggtggggcaggtgagaggggctggagctgcagcccccatgagctacccaggggactgtacctggagggggctttggttataggcacattgggtcagatttgcatttgaagatcaccgtggccactgtgtggaagaagggtctagaagggggaactggttcagtcactcttgctgggatcctggtgggagcagtgtcaggggcatgaagagaaccagggtaggaggggcaggacttgccaatgggatggatgctaaaggagagggaggaggaggggcttgcatgagggcagagccactccagagttggaggtgctggtggaggagctggtctggaagggagacaaatgagttccattttgatgagccatgtttgaggttcatccagtaggaggtgaggagtgggcctttgggtggggctcagtagagaggtctggacagagcaatgggagtcaccatcgtgggagtcacccctatctgcttgcctacctctggctcttccccctaagct

SEQ ID NO: 10095 - DNA, 1400 bp, Artificial sequence
  DNA replication origin
tcgtatctcaccttgaggcctttgcatacaccagttccccaccagaacacactacagcctccacttatttgtaatcctactcaaccctgcagggctctgctcttagacatcccttatgcttcctccaggaagccctccctgaccattctgtcagtggggaggtgccctctctctcagtgcaccctgcactgctgccagccacagtgctgtgccttctgaacagctgtcatgtggttacgtggccatctaccccatcagatgctgagcaccactcatgcacacattccatgagcccactgggccaagctctgtaatagactctggggacaagcaaaggagaccctgccctccatgaaggcagaagctaggggccgcacacctgctgcgccctcactgcctcaccccaagggcacagggcagggcaggggttttctcttgatggctctaagaatcaacaacaggactcaaaggccaagcagcaggcagagggcctgactcagagagaggagcatgggaataacatgcccatgtgaaagtcagcccgggtgacagctgggggtaacccatcatgctggacctctcgcttcaagcaggtgcatggtggcttcagagtggagtctgatgttggcaccaggccacagctcggccccatcttgccactgctaaccacagtcggggtctcatggcatctagtgcttctgctcttgcaagctcctgacttgaaaagggagtggacatgggaccttcctggatagatgccaaatccagtgtcaatcaacagggaaaacagtgggcaatgtctgcaggagatgcctgtgaattacagcagcagagatccctgcctgtgtgccagtcagcgtgggtgggcaataagctgaggagtctgcgtgcatcatttcatcaaatcctcctaaaagccctgccaagggaacatcatagccccgctttctaggtaaagggagcttagatcagagaggtgaagtgacttgcccaggccacacagcaggaacctggcagaaccaggactcacagccagggacctgcgactctgtggtcaactctctttcatcctggtatgctgcctcccaagggcctcaaaaaggacgagaggttcggatgagcacctcgtccaagaccaaagagctggagagaggaggaccccgggcaggccctgagagtctgggcttccttctgggcctcctgggtaaaaagaccagggaccccagcaaagcccaaatggacacacaacggggcccaagttctgctcctcccaggttggggtcccggcccgggccttccagtaattagtgcgcccttgttaagactcagtcgcgccattcccgggccaggacttgtttttgttcccatgcggaggccctcgcaggaaggccaggcgcacg

SEQ ID NO: 10096 - DNA, 1085 bp, Artificial sequence
  DNA replication origin
gcgtaagtgccgcgcgggcccccttgccgcactccctgtccccgccgctcgggtccggccgcgggtgcccgggagcggcccggcctggcgcgcaccggtgtggtgcgggccgggctcgggccgccgggttcggtgtggcccacgccgggtcctcgcgcgtgcactacgtcctcccaggccttgtcgggccgcgcgggattccctttggttttgttcaaaaaagaaacctggaaaccaacttctcttcgaaacgcatccccctgcccgcgcctgggcgcttttgtgggaaaaaagcggtgctggcgcctaccctggcgacccttcctggggcgggctcacgggccaggcccgaggccgcaggaggccccgcggcgctggctaggcagtctgggcctgggcacccgggagctgctgtgagcagagttgtacttggtgaggcccccgccggcccgcgagttgccggccccggcacaataagtcgggcccgagccccggggggccgaggtgtaggcgtctggctcgctatctgcagggaggggaaggcgggggctactcgcgggattgaagccgggctggtgcgggggaccgggttggggagtggtccaaggatgggctggagaggggccacgggaacccccgctgctcccgattgtctcggtatcagccttttgtttgctttgtggtaggaagggtttgctttttttaaaaggtaactccggaaggctgtaggcttccccgggtggagaaggccagcaggaaagagcctcgctgggggtggggtggagtggggaggtgagtgtgcaggatgctgctggcagtgtcacctgacaacaggtgtgcgacatggcgctccctacccccactcctgcaggggccacagatcactcaaggagttggtcagtacattgcttgaaaggttcttttagacaagatgttaggggaaatgtttctgagtttcaaagtgagagacttctgtacaaacaactgggacaaaccttgaattcaacaattacaatgactataaaggccttgtaagattttaatgacccagtaaacagcacataagaatagacaattagaggggg

SEQ ID NO: 10097 - DNA, 1235 bp, Artificial sequence
  DNA replication origin
ccccagcctttgcacttgctattcctcatgctcggcgcagttcttccccagacatccacacggcttgctccctcaatttcttcaggctttaaatgttactttctcatagaggccttctcttgtatttgagcctcactcttatctcacacttcctattccccttctccgccttatttttctccaccccatggagaccctctgacacattctcccgtttgtctgtctttcccccacgagactgcaaactacaggagggcagagatttctgcctgttctcttggctgtttcatatccagcacccaaatcgatgtatgacacaaaatacgttctcagtacttaatcgaattaacgaatgcatgaatggcaggtattggacattgttttgcaaactcttaaagtaaggtgtaaagcatcccggtgaggtggaggttactgccgctgcgattcccgcgcagcctgaggactggggggtgggggtgggggtctctaattacctccataatccccagtagcggcactttaaacttcacatcaaccctgagggatgtgtattattatccaaatttagttcacagctggatggagaagtggcttccggctccacactttggagggaggggagtagagggcaggcccccatttaagtacccgggatggggcaccaatgccttcaggcggtaaaccaatttaggaagacgtggcgggctttgtggcggctcctcctctttcggcctgtccgcagtttttaaaaaacgtgtgtgatgataaggaatcactgtctacattagtaattcccaacttgggtccgaaagtgaacttttgctgaagcgaagtagctaaccgcttccatgtgcaaggcaggttccagacttcggggtgaggaggattaactgaaggaccccaggggaaccgggtgcgcagtaattgatcttggggcagaccagggcttggcggtggcctgtatctaaagacagcggggtctctgaggcggggcaggggggagttggcattgactggggagggaagagcgatcgctggtaacagccattgtgccttcccactgggttagtgggaaggttcctaaagatgccgtggcagcgacagtcccgtgctcagagccaggcacacagtaggcgttcactcgagacgcagagtctgggacgcgccctgaagaagctcctctccaggggcctggcccttcccaaggactgggctctgggcgtccccggggtcat

SEQ ID NO: 10098 - DNA, 1137 bp, Artificial sequence
  DNA replication origin
gggggtaaggtcatagataacagcatcccaaggcagaagaatttttcttaatacagaacaaaatggagtctcctatgtctacttctttctacacagacacagcaacaatctgatttctctatcttttccccacatttcccccttttctattcgacaaaactgccatcgtcatcatggcccgttctcaatgagctgttgggtacacctcccagacggggtggcggccgggcagaggggctcctcacttcccagaaggggcggccgggcagaggcgccccccacctccctcccggacggggcggctggccgggcgggggctgcccaccgcctccctcctggacggggcagctgccgggtggagacgctcctcacttcctacacggggcggctgccgggcggaggggctcctcacttctcagacggggcggccgggcagaggcgctcctcacatcccagacggggcggcggggcagaggcgctccccacatctcagacgatgggcggccgggcagagatgctcctcacttcctagatgggaaggcggccgggaagaggtgctcctcacttcctagatgggatggcggccgggcactttccagactgggtagccaggcagaggggctcctcacgtccaagacgatgggcggccaggcagagacgctcctcacttcccagacggggtggcggccgggcagaggctgcaatctctgcactttgggaggccaaggtaggctgctgggaggtggaggttgtagcgagccgagatcacgccactgcactccagcctgggcaacattgagcactgagtgaacgagactccgtccgcaataccggcacctcgggaggccgtggctggcagatcactcgcggttaggagctggagaccagcccggccaacacagcgaaaccccgtctccaccaaaaaaatacgaaaaccagtcaggtgtggcggcgcgcgcctgcaatcgcaggcactcggcaggctgaggcaggagaatcaggcagggaggttgcagtgagcggagatggcagcagtacagtccagcttcggctcggcatcagagggagaccgtggaaagagagggagagggagaccgtggggagagggagaggcagaggcagaggcagaccgtgggg

SEQ ID NO: 10099 - DNA, 1049 bp, Artificial sequence
  DNA replication origin
tcgtcttggacgtgaggagcccctctgcctggctacccagtctggaaagtgcccggccgccatcccatctaggaagtgaggagcacctcttcccggccgccttcccatctaggaagtgaggagcatctctgcccggccgcccatcgtctgagatgtggggagcgcctctgccccgccgccccgtctgggatgtgaggagcgcctctgcccggccgccccgtctgagaagtgaggagcccctccgcccggcagccgccccgtgtaggaagtgaggagcgtctccacccggcagctgccccgtccaggagggaggcggtgggcagcccccgcccggccagccgccccgtccgggagggaggtggggggcgcctctgcccggccgccccttctgggaagtgaggagcccctctgcccggccgccaccccgtctgggaggtgtacccaacagctcattgagaacgggccatgatgacgatggcagttttgtcgaatagaaaagggggaaatgtggggaaaagatagagaaatcagattgttgctgtgtctgtgtagaaagaagtagacataggagactccattttgttctgtattaagaaaaattcttctgccttgggatgctgttatctatgaccttacccccaaccctgtgctctctgaaacatgtgctgtgtccgctcagggttaaatggattaagggcagtgcaggatgtgctttgttaaacagatgcttgaaggcagcatgctcgttgagagtcatcaccactccctaatctcaagtacccagggacacaaacactgcggaaggccgcagggtcctctgcctaggaaaaccagagacctttgttcacttgtttatctgctgaccttccctccactattgtcctatgaccctgccaaatccccctctgcgagaaacacccaagaatgatcaattaaaaaaaaaatgagttaggcatattgctgtgggtctatttctgagttctctattctgttccaatggcccatgtgtctgtccctctgccaatatcagtccatgtcttcattactgg

SEQ ID NO: 10100 - DNA, 1239 bp, Artificial sequence
  DNA replication origin
cagctactcaggaggctgaggcaggagaatggcgtgaacccgggaggcggagcttgcagtgagccgagatggtgccactgcactccagcctgggcgacagagcgagactccgtctcaaaaaaaaaaaaaaaaaaaaaagaagaggaatgggcggaggggaagggctattccagacagagggtggcatgtgagcagagcacaggagtgcagtccagcagcatgccgctctgtgtgtgcatgtgtgtgcatacgtgtgtgtgtagacacagccatgtccaggggatgctgtcaagagatcatgctggaaggatgggcaagtcataaaccatgtggctcatgaacctcaaaaaggaacttgggctttatctccaagtgcagtggggagccactggcacgttaggaagtcaaatctgcaaaaggagatgagtggagagaggaagtgagaggagaggaggaggcctcccaggctgctgggctggcgacgggagtggaggaggaacaggctggagggtggagaggagaaacaggctggagtgtggggaggatcaggtcattttgtcaagttcgaggaagttgactaagggtggagagggcatttggggtggaggaatgtctgagggagtgaaggtggaagaattggacagagagaaggctggaaactgagtctggggtgtgtgtgtgtttgtgggggtgtgtgagagtgcatgagtgtgtaggcatgagggtgtgtgtgcttgtggggtgtgagtgtgcagacacgcgtgtgtgtgcttgtgtggtgaatgtggacatgagtgtgtgtgcttgtggggtgtaagtgtgtggacatgagtgtgtgtttgtggggtatgagtgtgcaggcatgagtgtgtgtgaatgcttgtgtggacatgagtgtgtgtgcttgtgggtgtgagtgtgtgagtgcttgtggggtgtgtgtggacatgagtgtgtgtttgcgtttgtagggtatgagtgtgtggacatgagtgtgggtgcttgtggggtgtgagtgtgtggacatgagtgtgtgtttgtgggtgtgagtgtgtgagtgcttgcggggtgtgtgtggacatgagtgtgtgtgtgcttgtggggtgtgagagtgtgtgaatgtgtgtgaagcttgaggaggtggatgatgaccacatctggagtgtggctataagaacagttcgagcggtaagagttcactggagtcacttggggcctgcaattgtgatcagctcttca

SEQ ID NO: 10101 - DNA, 1185 bp, Artificial sequence
  DNA replication origin
tgagtttgttacaaaccgagcttctttcttctccaaccccacccccacccgcagctctggagaccatttctccaggctgggggacgcaacctgcctcccgagaggcgcgtccctgtcgcctcaggcaggtgcaggccgggcgggcgcgtggggcggggcaggggcgttatctcctgaccgaagagggccgcacatctgtttatctctgaagcggcgctggattggatttctcgatgtttatctccctcagaggaacagcgcgctggggctgcggagagcgcagctgcgggccgggcagtgattgacaggtcgggaacagggcctcccgcccctcctccgtctgggtggggggcgcttggctgcccactgcgcaccccatcctagagcgctgcaggtgagcatgccggcggccaggtgcctccgagttcctcggttacccggcgctcaggcctgctcctcactagggaccacttagctgagccagagagattgcagtgttgacttagtgaggcagtctagggcgggggtggggagcgggagaggtagccagtgaaaaggtggatgaaatcctaatgagtcaatttcctaacctgccagagaggcagcctaggggaaccacgggaagtgccctctgctctcaagaatgcctggagctaagaggggagccttagtaccccgaagaggtactgggagagggagcttcaaggccatgagtagggctgcttcaggaggctgtgaggtcacaggaaacccagagttgaatgtttgtctaccttccctagctataccccctacccaaaccaggcgacctccccactttcttctccatcattgcggtttgtacttatgtacacacccatctggcatggttgtgtggttgatgaaactgggctcctgcgggtagggctggagcatgaagtagtgttcaggcaacacttgttgctggttagggctactggacctttgaggaagcaggctgaaccgtggtgttgcaactattgttcacaagccacctaggatcatgggaaaagtcatctggattttgatctttttcatgctggggccctacttggtacctgtatgtcctggtttattacatgaatgtcagcatatgttgttgaccttaattctccctgccccagtggctgccttagaaatgtggcatgtccctctaaagctttcatt

SEQ ID NO: 10102 - DNA, 999 bp, Artificial sequence
  DNA replication origin
agcctggaagggtgcaggggcgcacggagaacttggcctggcctcctcgcctcgcctgcaggggccacgcgcccggccggtctcctgagtgatgtcgccggcgatcagatcagctcgtgtgagcaccgagtgtggcacacgactggcctcaggaccccttaagtacccggcgcaacaatgggcgcccccctcccttgccacctccgcccccgcggcagcccgggtgaatggagcgaggcggcaggtcatccccgtgcagcgcccgggtatttgcataatttatgctcgcgggaggccgccatcgcccctcccccaacccggagtgtgcccgtaattaccgccggccaatcggcggcgtcgcgcggccccgggagtcggctcgggctaagctggccagggcgtctccaggcagtgaaacagaggcggggtcggcgggcgattagcggccgaggcacgctcctcttggggcgggctgggcgcccctcgctggggtgggacggggaggcggggcgcgagcgcgaaagtgtgagccgcccagtgagttgcggaaacctggagggtacttggagtttgggttcgcatcccctctccagctgcttagtggtcgcgtgactttggacgagtaatttaacttccctgagcattgctttccccacctgtaagatgagacaaaagtttaccctgtggaggatgatcagatataatgtttgtggaacactaaatgtgcagcatccgctgaacagggtgaaaatcattttcaaatagactggagagtggccatgccagaggcacagggcgcagggcaaggataagtgtcgctgctccgttcaggctgatgaagaaacgggaaagaatctgaccttcatctggggagtgcgaagaggagagtggaaaagaggatcgggtgatttcccaggttgccttgagtcttggtctcacccttcccttctttcccttcccttctccaccctcctccgcacctctgcccacaagtcacct

SEQ ID NO: 10103 - DNA, 1722 bp, Artificial sequence
  DNA replication origin
tatgtaaactgtgttgctacccttttccttttataagaaagggcaaatagccagagaagctgtgaatgttgccactttagcaaaaagtggagagcattttatttgaagccagcttctggggcttgtcctgggctgactacagtctgcctgattggtcaggccccctccctttgtccaggttctggcaccacccgtgcaccctggcagggctctgccgtcccgagaatgcccctgccagctcacgggggaggcagcagtgaggttttatagacaaagatcatccttcccaggagaatttgtgctaaccaagactgatgtcaaatggcttcttggttgactagaaagttcagtccacacttactttgtcttctgagctttgcaggtagccggtatggggccagacaatgaggaagaaaaaacacagggaggaagaggaggcctgagggcatatgggggttggtcatccacccatccgatgacactgctgagtggccctttgtgtgctgggctctgtgccaggcaccattagtgcaaaggtagggacagcgcagcagccccacctggggagtgagggtgtcctctggcatttaggatgcagtgtgggtgggggtgggggatggtctgcagaaggcgcgactcaccctagctgagaaagcaagccggcatcctggaggaggagacttctacagcctggatggcaaagagctggtgaagccaaggacaagtaggaaaggagcgagaagaggatgtcaggcagaggggacagcctgagcaaagacctaggggtgagagagacggcgggacattcagaacagtggtgaggagtgaggctggcggaagcagggtgaaggctttatctagagggcaatggggagccaaggagggcatgtgagcacaggagtcagactgctgtctttagaagagtcctcaggctacagtgatctttctgcaatgagaaagaaaaagagggtatgggaggcaaagaatggtggcagagacctgtcctctagggctctggcagcctgtgggtggctctcagagtcaggctgtgcagttcagtagggaggtggggagacggtgccccctgcaggtaccctggttgcagtcctcacttgtgagcctgggtcacttgcatctgcacagtgaaggtaaaagtacttctctgaaagggctgttgaagctgctggaaggggaaacggagaggcgagctgtctggaaacaggtatattctgtgccagacttggtccctggggacccagcacaccaccagtcactggtgggcatttctgaactgctgtttggtgacgaaaagggtggcagccccagcctaccacagattagatatgtgacaaacaacaggacatttcagaaggccacaacattctcatgataaaaaaaaaaaaaagtttcaagttcctgggaggcacaattggccaggatggaagcacactgacctggcgcttatgggctcgtcactgcgtggtccccgcggatagcctgcagcgacagctcgtacccaaggaacatggccgcactcatggggaagccccgcaccgcgttcacagtgatgcctctgaaaaacacctttgcacaggggccaggttattgcaggggactgacccacactctctgcagggccaccaaggaggggcagagaatagctagtggtgctgcctacccaggcccggtcccccaccagagcccaaaggacctgtgcaggca

SEQ ID NO: 10104 - DNA, 2159 bp, Artificial sequence
  DNA replication origin
cccaacccgtgcgcccctggctgccctgggcacccacccgctcccgcactgtgcccgtgctcagttttcccagcccttgccctcactgccagccctccctccctctctccctcgccacagtcttcctcaaaccaagggtataggtcccttaggcctcctgtggctgcttccaaatggggaccttgggactgagggacagctgtctcgggggcttcggtcctgcatgctgggggcccgaagattccctcactgatcttgaggctacaaaacactgcagggaggggtgaggggaggcagtgctgattcccagaacaccatggcccatcagacttgtttctgcaccccaggagctgaccaccctccccagctcctcaatctctaatccctccacccccaccccacctgtcatgctcattgaaagacagatgagtaaatcgtgtgatccacagaaacgccaaaaatgtggggcaggttttgttgggctctaagctgcttttggagcccgtggggaagggtggggtcctcaccttggtactaattcattcccttcttcagtaaacatctctgcaacagtacctgccagatagattctgcaaaggcaagagtcctgccctggaggagctcaaggcaggtaaacaaattgtcacatggtaaagaggtgatacttacccaagcatctattaatcacctgtcagttacttggcactgctagccctggggagacacagatggattaatagaatgagtgagacctaagccctttgtgaaaaagctccaatttgggaagatccgtagcccaagccaatgatgttccatgaagagtagctggggctttgggagctaagaagaggcacctggccctgacagggtgatacctgctctgaggcctgaaagatgaaaatgagttaatcaggtaaactgaggcatgcattcacgaaactcaagttatctggttggctgaagcacagggaggtggagtcaagggtagggaagaaggggaggaaggtagcagggcccagactccagctaagagcctagcgggtgatgggtggaggcaagtgacatggccagtgtcatgagaggcttaaggaggcaagaagaacaggtaaccaggaagggaccatgggagagcttgaactatggtggtagaggcagagatggggaaggctgggcaaatgtgaggggtgtaggaggtaatagtctcaatagaatttggagtctgtatacagggagaaggggagaaaggagagtcaaggatattgtagggtgtttgtggtctggacattgcagcaggtgatggtgccatgttcagaatgaggcacatgcagagtgcaggcttgccaggtagatgagtggtttgggacaccctgagtctgaggtgcttatgactcatcctggtgaagcatcccatgaggataaagctggatatgaggatcgggggcttgagtgagggacgcgggatgaagattcacacctgggagtcatcctccagtgacagaagagcccaggaagtagagaatgtggggttgtagtcaaggaggggtatcctagtaggagggcgctgctcaaagtgaggaatgctgccaacaagacagatctgaatggctttcactgtgtcagaagcagagaggccactggggacttggctgtggagagcagatggccaaagcccgaatatggtggtttgatggagagatgagtagcatgtagaagcttgtctgagaagggaaggggcgagttaggatggcagccagggaaagaaaaagacaagcggggcttggagaggttagaactctggtagaaagaaggtgggaaggagaagggagagagtgtgggcactggaggagggcctactgagagcataaagcaactgagggcctgcatggggagtgatcaagctagtggagaggagggaacaggtgtatgggagattttagtggtagcattgattagacttggaaaccccttgggcatgcagggttagggagggggagtagagctaacctcgaggctcatagctggcaggaagggatgcctgtgctgggcacgctggtgaaggtgcacatttgggtgtgtgaggagagtgctccatttgtgttcacattatgtgtgaacaagccacctgcatttccaggagggatggacaggagggagctata

SEQ ID NO: 10105 - DNA, 1349 bp, Artificial sequence
  DNA replication origin
actgtggcgagggagagagggagggagggctggcagtgagggcaagggctgggaaaactgagcacgggcacagtgcgggagcgggtgggtgcccagggcagccaggggcgcacgggttgggaggcgccaggcggcccgccctccttgcacgggccggcccagcttccccgcccctggcgtccgctccctcccgctcgcagcttacttaacctggcccgggcggcggaggcgctctcacttccctggagccgcccgcttgcccgtcggtcgctagctcgctcggtgcgcgtcgtcccgctccatggcgctcttcgtgcggctgctggctctcgccctggctctggccctgggccccgccgcgaccctggcgggtcccgccaagtcgccctaccagctggtgctgcagcacagcaggctccggggccgccagcacgggtaagccgagccgcctggccaggggctgcggaaggtcaggtagtcggggctcggagcgcaagccgctgggggcattgaactgggctgggggcgcaggggacaaagcccgaactaaaaaccttgcagcatggagcgctcggacaccagccctgcacgcggtggaaggagagagggagggaggtggaggaccatggagggaaagcgggaggccgccgctttgtagaagggagtggggaagtggaccagagactttcgacgcaggccaagagcctgagacggacagcgctttcagcttctcctcccagccactgcagaaagggggaaatggcaactctttggccataatcaccgtgggagggtgccaagggcaaagcccacccagcagtacacctattccaacccagccaggcccccggccagcgactccagacaagaacctgggccacacacggtggcagcatctaaggtgccccaggctcctgtgctcctggccaggccctgcactcagacactgctggcacccgacactgctctctgggtacagcaagggcaatgtggcacttcttgtcctgcccgatgaagagcaggagaatgcactgggccctcacacacactgttcaaatggggaaactgagtcctgagtggttccactttcccacagtcctgaagtgtgcactggagccaggattggagtctgtcttaaagtaatagctgggtttgtaaatgtaggacactatcattgcaggaattcctttgagaccctgaagatgtgttggctttaggagacaaactcaagcagaaggtctggtctgatagtggccctaatactgacccaggcagaggcaggcaacatttctacctcaaaaaccaggccatacctgcgtcacaaatacccaggctttgctgcagcttcc

SEQ ID NO: 10106 - DNA, 1468 bp, Artificial sequence
  DNA replication origin
ccggccccaaggcaccgactctcggtcagttgggcgcggcagggcgggaggggcgcgccatggaggcgccgggtcgcgccagtatgctccaggccaagtgaagcggtccggctggggtcggcgggacccgcgggccatgtacggcgacatattcaacgccacgggcggccccgaggcggcggtaggcagcgcgctggccccaggagccacggtcaaggcagaaggcgctttgccgctggagctggccactgcgcgcggtatgagggacggcgcggccacaaagcccgacctgcccacctacctgctgctcttcttcctgctgctgctctcggtggcgctcgtcgtcctcttcatcggttgccagctgcgccattcggccttcgccgcgctgccccacgaccgctcgctgcgcgacgcccgcgcgccctggaagacgcggccggtgtagcttgggactgagccacggccgccgggcgccccgtcccgacctagccaagagcagccagcttgagcctggtagggagggcacgacaccggggatcgctggcccctgggaacacggtgccctgacccaaagacccttcctgaactagagtggcaacccgagaggaaagggagaccgaggcgtcgggagcctgtgtagggtctcgatcccagtacctgtaggtaccgtgattctgatcccctggccaaatctttcttcctctggacagagggtccagtcgggaaaccttcccgaaagacggcggtcgggtcgggaaaccttcctgaaagacggcgcgccagcccgtcttgcttgctcgccgcctgctgacttccttactttgcacacggaaggggcaggaaccgcaagcgtgcaactagcctggagctacccgtctggactcgcaggccctgtggctgtttcccacagctgctacggcctctcttgctccttgacaccgaggaggaccccactaggatccgagcgtcgtgaactcacctgaactttggaaggttggcactggggggccgcatccccctgggaaatgactgaacgcggggtttcagtgggtcccgcctgggtctaaggacccagtttcttctgtgagcacgggcagtgggaggccggtggaaaggcgcaggggcccacctacgcgtctcacatcttcaggggcgcatttctacaataaaaactcacccaattagacctagcgctgagaacgtgctggtaattgtttgcgccgctttggaaaaggggataagggtagatcgatcccgagcaggagacccaagcgagagacacctccccgcccaggacattttgatgatactacctcctcttcggctttttcccagggtcggtcaattacttccttggggaagtttttttttcaggatggtctccagggaaaattgctgcctgacctgctgaataaattcccattaacagggctcctggggaccctttctgcagggcagttccttc

SEQ ID NO: 10107 - DNA, 1658 bp, Artificial sequence
  DNA replication origin
ccccagttctcggagctggacagttctgtgcccgcgcccctcgggctcactgtttctctccgtcgccaccaggacagaggtcccagtcactgactcgcctttcggctttacaacagcccgctcagctcggaccctcagctccagtgagctccaggtgctgggcgcctctgggctgcggcggcggggagaggcactcagcaagtgcagccgcagcccggggtctctgctgagcgcccggtggcagagcgcacggagggcgggtggccagggagtcctccgcgtcctccggcgccgccgccaccgcagcgtctcggaacagtcctgcaggctctggtccctgtcgagacgcccagtgttcagcgagcttgtccccactccctccggctgctgcgctcctgttttgagcaggagactgagctttctggcggctctgagcgcgctcgtgtcccgggcgggggttcgggggaggggcgggactggcggcggctgcccgggggagcggctgcgaaccaatgagggcaagagaggacgcggctgcgactgcccccagcccggcctcacatcactcagggacagagggacagagacagggacagagagagagagagaaagagagaaaagcacagggtcacaggaagactgacgggcaaagacacagttacagacctatgaacagagccacacgccaaacagggacaaaccgttgaggtaagcaaaccaactcagagacaaagctcagctgagcgtgcacacctgcgttcattatcctccttgacaggctccctccaggcatggcctggtttgttccgagtgcccactggctgctgggtagcgcaggccgggcacaccacctccaagggtgtgcagacgcgctcccagacaagcatgttcaagccaggactgattctgtgggccccgtgtcctctccggctgcgtcctgccggtctgtgtgcatcccgcaccgtgtgcaagaatgttcagctcccttttgcctattctgcctgggcacagaggggcaaaaggaggacatggcgctggcagttgcccccctgcccttggcaggtctggaaaggcgaggtggccaggacagaggtgtgcaatcagttggattgagtggggaggtgtctcctttcccaggagtctgaactgctcacttcctctgcaaagtcttccaggacccccagactagagtgggaacaaccaccctggaccaccacagcccctgcacttctcaacaagcacccacccctcacctctggcctgtcattttctttcagggccagaattagggggaggtgggtgagaagtctagagcacaatactgaatgagacactcgctctcagagtctgcaagtgcagggttgggagtaggtgtctccttcagttttgcccctagatgcctcacccctcaccctagtcccagccctgttgtctgctcatttgtcagagaccctcaaagggtcaaccaagttcacatccatgtctttctcctcttttcctcatctcccattcaggggtgcaatacatggggagagcttggtgacattggctgagagagccagtagaaagatgagttagttattctctcttcccactgcacctcatgcctggccaccagcataacaagaacaatcagggtgtgcaaggcagaccttggc

SEQ ID NO: 10108 - DNA, 1100 bp, Artificial sequence
  DNA replication origin
cactcggagaatagacgagacgggtcccctgtagttggacggcagcctcggattcgtgacgcagcctcctcgttcgtagatgagtcccccattcgtgagaggggtccctgggtctagaggcgcgacaggcgccccaggtgcgcgagcgctgcccgtgcccgccgcggggtccccgcctccgggctggggcgctgggacgcctgggtgcccggggctcgcggccgcccgccctcttcgctcatcgccctgcgcgccctgccccgcagatgccggcgatcgcggtgttggcggcggccgccgcggcgtggtgcttcctccaagtcgagagccggcacctggacgcgctcgccggaggcgcgggccccaaccacggcaatttcctagacaatgaccagtggctgagcaccgtctcccagtacgaccgggacaagtactggaaccgctttcgagacgtgagtaccggcgccacccggccctggggggcgcggagcctctcggaggggacccctgaagcggggttggggtgtgtgtgtgtgtgtgtgtgtgtgtgtgtgtgtggttgggagggggacaggtgggcatctcccgcgggggctggtcggtcccagcttcctgggtgcggtcttgcctgaaaggaactttaaagagaacttcgaaggctccatgcgcttgcctgttacctgtggcccaggtgtgtgtattcgtagggctgcgggaggtgactgcactaaaatacagcacagatcaccagtagctgtggagaaagaggttctctgagcttccgacttctcctaaccgtgatggtagactttccctagctccggagaaaacctccccggggcagcggtggcgtggaccatctctggggtgtgtcaggagaatccctactggagaggttgggtctgggagtggtccaagctatttatgggggagctatttatgggagtcaggtgttgcatgtgtgtgtgtgtgtgtgttgagggaggcggtcatggcaatgggcctgataaaatacaggggaggtggggtggtttgaccctcggaatcttgaaacaggaacaactagcccgtgcagttggtcccctgccctgaaagggacc

SEQ ID NO: 10109 - DNA, 2066 bp, Artificial sequence
  DNA replication origin
gcaaaaaaaccgcagaaatcaaaagaataacatcaattacaacaaaacaactttttctgatcacttaccatttgcagatgtagcaactagcacattacatagattatctgattgaatcctcagctataactttatgagataggagttattatttgtccccatttttcacatgaggaaactgaggtttagcttaagcaaaatattcaaagtaattaaaccggaacccattttagaagctaggaaatttgactccagagccttttaagagtttatcactactgtgtgaaatgcaggtatgaacatgcattcaaggactaggtaggaattcctagatacaccagcccttgctagggttctgggatacagaatgaacaaaacagggaagggtatatttcttacggcgtttaccttgtggtggagacgggataaaggcaaatgtgactggtggagctaaggactgtgaagaaaatcgagcagggtttgaggatgggagctagtggggacggtgctagtttaaacttttaaatagggtggtctggaaaggtctatttgagaaggtaatatttgaacagaggaagggaaggaagtatcccgccatgcagctggggtaggggagagggtggaagtgaaggtgccccaggggaggagacattgagtgcaaagatgagaaaggacacacctgggtgttccaggagcagccagaacaccagtgcgactgcgggagaagcagggatgatgggaggtgagttcaggaggaggggcagagatgatgggaggcgagttcaggaggaggggcaggggtaatgacaggcgagttcaggaggagggacagggataatgacaggcaagttcaggaggaggggcagggataatgacaggcgagttcaggaggggcagggatgatgggaggctggtacaggaagggcagggatgatggaggcaagttcaggaggaggggcagggataatgacagttgagttcaggagagggggcagggataatgacaggcaagttcaggaggggcagggataatgacaggcgagttcaggaggaggggcagggataatgacaggctagttcaggaggaggggcagggataatgacaggcaagttcaggaggaggggcagggataatgacaggcgagttcaggaggggcagggataatgacaggtgagttcaggaggggcagggatgatggaggcaagttcaggaggggcagggaggacagaggtgagttcaggaggaggggcagggatgacagaggcaagttcaggaggaggggcagggatgatgagaggcgagttcaggagaggcatagatgatggaggcgagttcaggagagtcagggatgatgagaggcaagctcaggaggggcagggatgatggaggcgagttcagaagcagaggcagggatgatgggaggccagctcaggagggacagagatgatggaggcaaattcaggaggaggggcagggatgatggaggcaaattcaagaggaggggcagggatgatgggaggtgagttcaggagaggcagggatgatggaggccagttcaggagaggcagggatgatgggaggcaagctcaggaagagcagggatgatggaggcgagttcaggagaggcagggatgatggaggcgagttcatgacaagcagggatgacaagaggcaagttcaggagaagcagggatgatgggaggctagttcaggagaggcagggatgatggaggcgagttcaggagaaggggcagggatgacaagaggagagttcaggggaggaagggattatggaggcaagctcaggagaagcagggatgatgggaggcaatttcaggaggggcagagatgatggaggcaagttcaggaggaggggcaggaatgatggaggtgagttcaggaaaggcagggatggtaggaggcgagttcaggaggggctgggatggaagggccacgcagccatggtaaggcctttggttttatgaaatgggtaagaccttaggagaatttcaggccgaggaatgacatgatctgacaggttttagaaatactgttccagctgcta

SEQ ID NO: 10110 - DNA, 900 bp, Artificial sequence
  DNA replication origin
tctgcccggccgcccctactgggaagtgaggagcccctctgcccggccagccgccccgtccaggtgggaggtggggggtcagccccccacccggccagccgccccgtccgggagggagggaggtgggggggtcagccccccgcccagccagccgccctgtccgggaggtgaggggcgcctctgcccggccgcccctactgggaagtgaggagcccctctgcccagccagccgccccgtctgggagggaggtggcggggtcagccccccgcccggccagccaccccgtccgggaagtgaggggcgcctctgcccggccgcccctaccgggaagtgaggagcccctctgcccggccagccgccccatccaggagggaggtggggggggtcagccccccgtccggccagccgccccgtctgggaggtgaggggcgcctctgcccggccgcgcctactgggaagtgaggagcccctctgcctggccacaaccccgtctgggaggtgtacccaacagctcattgagaacaggccatgatgacaagggtggttttgtggaatagaaaggggggaaaggtggggaaaagattgagaaatcggatggttgccatgtctgtgtagaaagaggtagacatgggagacttttcattttgttctgtactaagaaaaattcttctgccttgggatcctgttgatcggtgaccttacccccaaccctgtgctctctgaaacatgtgctgtatccactcagggttgaatggattaagggcgctgcaagatgtgctttgttaaacagatgcttgaaggcagcatgctccttaagagtcatcaccactccctaatctcaagtacccagggacacaaacactgcggaaggccgcagggtcctctgcctaggaaaacca

SEQ ID NO: 10111 - DNA, 1702 bp, Artificial sequence
  DNA replication origin
ctccctccctcccggacggggcggctggccgggtggggggctgaccccccacctcccacctggacggggcggctggccgggcagaggggctcctcacttcccagtaggggcggccgggcagaggcgcccctcacctcccggacggggcggctggccaggcggggggctgacccccccacctccctcccagacggggcggctggctgggcggggagctgacgcccccacctccctcccagacggggcggctggccgggcggggggctgacccccccacctccctcccggacggagcggctggccgggcagaggggctcctcagttcccagtaggggcggccgggcagaggcgcccctcacctgccggacagggcggctggccgggcggggggctgatccccccacctccctcctggacagggcggctggccgggcggggggctgacccccccacctccctcccggacgaggtggctgccgggcggagacgctcctcacttctcagacggggtggctgctgggcggaggggctcttcacttctcagacggggcggctgccaggcagagggtctcctcacttctcagacgggggcgtctgggcagagacgctcctcacatcccagatgtgatggcggccgggaagaggcgctcctcacttcctagatgggatggcggccgggcagagacgctcctcactttccagactgggcagccaggcagaggggctcctcacatcccagacgatgggcagccaggcggagacgctcctcacttcccagacggggtagcagccgggcagaggctgcaatctcggcactttgggaggccaaggcaggctgctgggaggtggaggttgtagcgagccgagatcacgccactgcactccagcctgggcgccattgagcactgagtgaacgagactccgtctgcaatcccggcacctcggaaggccgaggctggcggatcactcgcggttaggagctggagaccagcccggccaacacagtgaatccccgtctccaccaaaaaaatacgaaaaccagtcaggcgtggcggcgcacgcctgcaatcacaggcactcggcaagctgaggcaggagaatgaggcagggaggttgcagtgagccgagatggcagcagtaccgtccagtttcggctcggcatcagagggagactgtggaaagagagggagagggagaccgtggggagacggagagggagagggagagggagagggagagcaagaaaagaattttcaacccagagtttcatatccagccaaactaagcttcatcagtgaaggagaaataaaatcctttacagacaagcaaatgctgagagattttgtcaccaccatgcctgccctacaagggctcctgaaggaagcactaaacatggaaaggaaaaaccagtatcagccactgcaaaaacatgccaaattgtaaagaccatcgatgctaggaagaaaccacattgactaatgagcaaaataaccagctaacatcataatgacaggatcaaattcacacataacaatattaaccttaaatgtaaatgggctaaatgctccaattaaaagacacagactggcaaattggataaagagtcaagacccatcagtgtgctgtattcaggaaacccatctcacgtgcagagacacacatagggtcaaaataaagggacggaagaagatctaccaagcaa

SEQ ID NO: 10112 - DNA, 1281 bp, Artificial sequence
  DNA replication origin
ggcggctcgccaggcagaggggctcctcacttcccagtaggggcggctgggcagaggcgcccctcacctcccggacggggcagccagccgggcggggggctgacccccccacctccctcccggacagggcggctggccgacccccccccgcgcctccctcccggacggggcggctggccgggcagaggggctcctcacttcccagtaggggcagccgggcagaggcgcccctcacctcccggacggggcggctggccaggcggggggctgatccccccacctccctcccggacggggcggctggccgggcggggggctgaccccccccacctccctcccggacggggcggctggccgggcggggggctgacccccccacctccctcccggatggggcggctggccgggcggggggctgacccccccacctccctcccggacggggcggctggccgggcagaggggctcctcacttcccagtaggggcggccgggcagaggcgcccctcagggaggtaatatttttaaagtagtataatgcagaagataaggccatgatgcaaagatgttagaagaagggaatgaaggttagattgtgcagtatttagaggagaagtagaaaatgattatccatgcttactcccttgaacccacccactgacgtgggcctgcttttttccttgtacccctgactttagatggagcctggggttctctaccattgctgcctcttgagacagacctgtgacctcactctactgtaagtgcaggggtgcaggcacccactagggtcacacacaagggaaagcattggtctctgtggtcacaggtctccctggacccaggccttgagttagaaggtatttcatgccaacaaactacaaggagaccttccagatcagaactaggaatcagaccagctaacactttggagctgagtaatcctgagcctattttcttctctctatcatgggagtagcgcatcctatcctgtttccaggatgatctggggaacagggggaatggggaggagagcattctatggaagtagacaccacaggcgctgtgctgtggagcctccctgccagcctcatcatctgcagtgagggagcttcacagttgggtccaggcaggagacacaggaatcctcaggtcactgctgctgcagaccacatgcacttttggggaggaaggatttccaggacttctggttttgttttctctttatctagatgtatagtgcaggcaggtatgtcctgtccagcctcccctactcttccca

SEQ ID NO: 10113 - DNA, 926 bp, Artificial sequence
  DNA replication origin
gccccgtccgggaggtgaggggcgcctctgcccggctgcccctactgggaagtgaggagcccctctgcccggccagccgccccgtccgggagggaggcgcgggggggggtcggccagccgccctgtccgggagggaggtgggggggtcagccccccgcccggctggctgccccgtccgggaggtgaggggcgcctctgcccagccgcccctactgggaagtgaggagcccctctgcctggcgagccgccccgtccgggagggtggtgggggggtcagccccccgcccggccagccgccctatccaggaggtgaggggcgcctctgcccggccgcccctactgggaagtgaggagcccctctgcctggccagccgccccgtccgggagggtggggggggggtcagccccccgcccggccagccgccccatccgggaggtgaggggcgcttctgcccggccgcccctactgggaagtgaggagcccctctgcccggccacgaccccgtctgggaggtgtgcccagcggctcattggggatgggccatgatgacaatggcggttttgtggaatagaaaggcgggaagggtgggggaaaaattgagaaatcggatggttgccaggtctgtgtggatagaagtagacatgggagacttttcattttgttctgtactaagaaaaattcttctgccttgggatcctgttgatctgtgaccttatccccaaccctgtgctctctgaaacatgtgctgtgtccactcagggttaaatggattaagggcggtgcaagatgtgctttgttaaacagatgcttgaaggcagcatgctcgttaagagtcatcaccactccctaatcttaagtacccagggacacaaacacttcggaaggccgcagggacctctgcctaggaaaaccagagacctttgtt

SEQ ID NO: 10114 - DNA, 969 bp, Artificial sequence
  DNA replication origin
acctactccaatgtggaggaggcggacgccgccatggccgcctcgccccatgccgtggacggcaacactgtggagctgaagcgggcggtgtcccgggaggattcggcgcggcccggtgcccacgccaaggttaagaagctctttgtcggaggccttaaaggagacgtggctgagggcgacctgatcgagcacttctcgcagtttggcaccgtggaaaaggccgagattattgccgacaagcagtccggcaagaagcgtggattcggcttcgtgtatttccagaatcacgacgcggcagacaaggccgcggtggtcaagttccatccgattcagggccatcgcgtggaggtgaagaaagcagtccccaaggaggatatctactccggtgggggtggaggcggctcccgatcctcccggggcggccgaggcggccgggggcgcggcggtggtcgagaccagaacggcctttccaagggcggcggcggcggttacaacagctacggtggttacggcggcggcggaggcggcggctacaatgcctacggaggcggcggcggcggttcgtcctacggtgggagcgactacggtaacggcttcggcggcttcggcagctacagccagcatcagtcctcctatgggcccatgaagagcggcggcggcggcggcggtggaggcagtagctggggcggtcgcagtaatagtggaccttacagaggcggctatggcggtgggggtggctatggaggcagctccttctaaaagaaaatttaaaatgcctgggagtggctataggggtagctctttccaacagcccaagtggggtcaactcctaagccccaccccctcacacacaccgccttccctgttttgcccttgggggagccacttctaaggctgcttacccttgggggtgttcctctatttgcctgccacctctcttgtctctccctctgaagatggactcggccc

SEQ ID NO: 10115 - DNA, 1055 bp, Artificial sequence
  DNA replication origin
aagtgggctggcagaagcggaagcgggagcggcacaggccgcgggcttgaatagaccgcggagggcggggagtccgtgatctagagcggcgctgcggcgcggtaggcgggattaaggggagcgaggcggggattggctggtagccctaggctgccgtacgtcggcggtgacgcacgcctcggggagggtgcgcgcgcgttcagcggcctctttgtgtggtgcccagataggggagcggaggtggcggcggcggcggtagcggtggccttggttgtcttccagtctcctcggctcgccctttagccggcaccgctccccttccctcccccttcctctcttccttccttccctccccttccctttttcccttccccgtcggtgagcggcgggggtggctccagcaacggctgggcccaagctgtgtagaggccttaaccaacgataacggcggcgacggcgaaacctcggagctcgcagggcgggggcaaggcccgggccttggagatggagaattctcagttgtgtaagctgttcatcggcggcctcaatgtgcagacgagtgagtcgggcctgcgcggccactttgaggcctttgggactctgacggactgcgtggtggtggtgaatccccagaccaagcgctcccgttgctttggcttcgtgacctactccaatgtggaggaggcggacgccgccatggccgcctcgccccatgccgtggacggcaacactgtggagctgaagcgggcggtgtcccgggaggattcggcgcggcccggtgcccacgccaaggttaagaagctctttgtcggaggccttaaaggagacgtggctgagggcgacctgatcgagcacttctcgcagtttggcaccgtggaaaaggccgagattattgccgacaagcagtccggcaagaagcgtggattcggcttcgtgtatttccagaatcacgacgcggcagacaaggccgcggtggtcaagttccatccgattcagggccatcgcgtggaggtgaagaaagcagtccccaaggaggatatctactccggtggggg

SEQ ID NO: 10116 - DNA, 1056 bp, Artificial sequence
  DNA replication origin
gagggtggcagggaggcagggatgtcgcgcctcgtctggttcctaatgtctgaagttcttttggttccctgttgtctttcacaccgccgcctcgggctcgcttttgcgcagggccacgtggcaaagttttagtttaaccgcacgtcgggcccactgtaaacggttaataaccgccttcgtggaccaggcctctgccctccatctttgtgcgggcgggaggtggggcggggacgccaggtgtagcggacaagcggagaggcggcgggtagatccgggcccccaaccccaacagtcaagttttcaaaaagcccgcgcgtggcgccccagaccgcatccgttgggaatggcccccagcgcgccccctgctctctccccggcaaagccctgggcgggagaaggcgcgggggtggtaggccggctctgcacgccgggggcgccggggcaagcgcgcaccggggagcgcgcccgtccaacagctgccgaaaacggaagtgggtgcgaggggatcacggtgattggctgaactcagatgtctctcaaggggctggcgcgaacgccactgcggagttgggcgaggggatgagtaaaggggagggggagaaacactgggaacagccgcggtgctaggaggaaatgaatcgcggtggtgcgcggagggcagggagggacccatgtcaagggacagtggggcgctcgggaatgaaagtgggctggcagaagcggaagcgggagcggcacaggccgcgggcttgaatagaccgcggagggcggggagtccgtgatctagagcggcgctgcggcgcggtaggcgggattaaggggagcgaggcggggattggctggtagccctaggctgccgtacgtcggcggtgacgcacgcctcggggagggtgcgcgcgcgttcagcggcctctttgtgtggtgcccagataggggagcggaggtggcggcggcggcggtagcggtggccttggttgtcttccagtctcctcggctcgccctttagccggcaccgctccccttccctcccccttcctctcttccttccttccctcc

SEQ ID NO: 10117 - DNA, 1420 bp, Artificial sequence
  DNA replication origin
gcgcagatccgggtacccgcccgtttacctaccgttggaaccgcgatgccccgttccctggccgcggccgcttctccaggacccgcggcgacggcaagagggcgagaactgaggccccaagtggctccgcggccgagaagcctcttcctggggcggccgctgacgggaggttaaagctacggctgtggcgcggggccagcccggtaagcgaccccccggatacccccggcggtggtggcgacgcagacgcggaacagggggagagagtggcgacagaggcggcggctgaggtgcagagcctccctaacggcgagcgggaggagagcggctggcgggcggaggccgggccggacgtgacgtgcgtgggagggggcggggcaggccgctggtgggggcggggcggcgagggtccccacccccacagcattccgggcagcggccctgtgtcctgcaagcttgaggaccgcggttcctctcccaccaattggggtcctgaattagggtgcgagcagccaggcgccatcccggggcgggttgtggggtcctcggtatggggaggttgggaaacagagaggacactggggagaggaaagataaagggaaaatccggaacacagagatcgcttctggtctctgcggaggaagccaggcccccagggcgcccatatccaggtgaggagcacagagacctgaaccgaaaaccgctgggggagacctaagcggtgacttcggttcccattcccagagatgtgagttagatccgggaccacggggctgcacctgcgtcctgcccgcccccaccctaccccttcacctcaggacctgacctagactccagagagaacagtaaggcttcggtgccttagtctgggactgtggaagtcgataggctgcgggcttacagggagcttcgtatactaaaatcagccagctgcggaggcagagctgaaaggaggcagaaagaatgagctctctgaacttgcatggctacccagaccatccctacaactcccttgaactcacaagggtatgaatattcagccaatctcttctttgttatagtctgttaagggctttgagatcttccatttggactccttgacagccggtagatcaacacctgcacaaaaaatagcagccaccacaattcagttgtcccttacctacctgagctggaagttagtaacttggaaaatgtaaaacaagaaccctcatagaacttgggacaagatttgaaaaaaataaagttaccctatgaaatgatctgtaaatgggctacagaggccacagtgtctcccacatttcatcagagagagtaaaccatgtgtaacctaagtgtcacatacccagttaatgctgtcataaccgaagggtggggtccacaaagagtctaaaaccagaagaatctgaataagaatgt

SEQ ID NO: 10118 - DNA, 1405 bp, Artificial sequence
  DNA replication origin
gcagaggcgcccctcacctcccggtcggggcggctggctgggcggggggctgacccccccacctccctcccggacagggcggctggccgggcagaggggctcctcacttcccagtaggggtggccgggcagaggcaaccctcacctcccgatggggcggctggccgggcggggggctgacccccccacctccctcctggacggggcggctggccgggtggggggctgacccccccacctccctcccggacggggcggctggccgggcagaggggctcctctcttcccagtaggggcggccgggcagaggcgcccctcacctcccggacggggcggctggccaggcggggggctgacccccccacctccctcccggacagggcggctggccgggcggggggctaacccccccacctcccttccggacggggcggctggccgggcggggggctgacccccacctccctcccggacggggtgcctgccgggcggagacgctcctcacttcccagacgtggtggctgccgggcggaggggctcctcacttctcagacggggcggttgccaggcagagtgtctcctcacttctcagacggggcggccgggcagagacgctcctcgcatcccagacggggcggcagggcagaggcgctccccacatctcagacgatgggcggcctggcagagaccctcctcacttcctagatgggatggcggccgggcagagacgctcctcactttccagactcattttttgtatttttagtagagacagggtttctccatgttggtcaggctgatctcaaactcccgacctcaggtgatctgcctgccttggcctcccaaagtgctgggattacaggtgtgagccactgtgcccagccgagagatggaaaacttcttaatcttttcacagagaatttacatttaataaaagtatagcctttgtttggtttaagctgcaggaatgaaactctgatgatgaaatcattggcttgagtcagtaggaagaagaggggtttggtgtagaggggcagtcagggccatccctgaaatcacctctttttaggagctgtccacctcagaggccagctctgaccttccatgtgatgtgagggatactgcttcactctctggacatcattttctccactcagaaatggaagcaggagttcttgattttccagaactgaggacattccctcttaactcctaagtgattatcaccctgccttcctctgcaaactcagctttcctagagaaaacaagggagaggggatgcagggaaatgggcagtaggcacccttaacaatcctgtgaggagtgcttgctgtgacagtgcatatactaaaattggaatgatatagagattagcataactcctgcataaggatgatatgcaaatt

SEQ ID NO: 10119 - DNA, 1057 bp, Artificial sequence
  DNA replication origin
tcagccccccgcccggccagccgccccgtccggaagggaggtgggggggttagccccccgcccggccagccgccctgtccgggagggaggtgggggggtcagccccccgcctggccagccgccccgtccgggaggtgaggggcgcctctgcccggccgcccctactgggaagagaggagcccctctgcccggccagccgccccgtccgggagggaggtgggggggtcagccccccacccggccagccgccccgtccaggagggaggtgggggggtcagccccccgcccggccagccgccccatcgggaggtgagggttgcctctgcccggccacccctactgggaagtgaggagcccctctgcccggccagccgccctgtccgggagggaggtgggggggtcagccccccgcccagccagccgccccgaccgggaggtgaggggcgcctctgcccggccgcccctactgggaagtgaggagcccctctgcccggccaccaccccgtctgggaggtgtacccaacagctcattgagaacgggacatgatgacaatggcggttttgtggaatagaaaggggggaaaggcggggaaaagattgagaaatcggatggttgccgtgtctgtgtggaaagaggtagacatgagagacttttcattttgttctgtactaagaaaaattcttctgccttgggatcctgttgatctgtgaccttacccccaaccctgtgctctctaaaacatgtgctgtgtccactcagggttgaatggattaagggcggtgcaagatgtgctttgttaaacagatgcttgaaggcagcatgctcgttaagagtcatcaccactccctaatctcaagtacccagggacacaaacactgcggaaggccgcagggtcctctgcctaggaaaaccagagacctttgttcacttgtttatctgctgaccttccctccactattgtcctgagaccctgccaaatccccctctgcgagaaacatccaagaatgatcaataaaaaaaaaaaaaaagtttaaaaaaaaatacaaaaaattagct

SEQ ID NO: 10120 - DNA, 990 bp, Artificial sequence
  DNA replication origin
gagaaatatttggttctcctagatggcgagtttccagcggcagcttccacaatgtcttgctagtcgaacttgtcagacagcaggtgggccgcctcggaaagagcaacctcttccgcaccaagcccggcggctcccggggcgccggccctcccccgcccccacccccgcggtccctcggaccagcgctggaggcgcgtggtgtggacgcgcgcttcggagttggagggcggcgcccaggaccctggtgggagagtgtgtgcgtcgcgctggagggcgggaggcgggggcgggaggtgccggtcgagggagccccgctctcagagctccaggggaggagcgaggggagcgcggagcccggcgcctacagctcgccatggtgcgccccctgaacccgcgaccgctgccgcccgtagtcctgatgttgctgctgctgctgccgccgtcgccgctgcctctcgcagccggtgagtgtcagagcgcgcaccggccgggggtacagtgggagggggaggtgaggtgtaggcgaggcccggggcacctgtccggagagggcgcagcagcctcccggtgcatccgagccgaacaaggggaactggagcaggaagcccagggtgcctgcaaggggctggggtcacacctaacacagtgtacgaactgagatagactgagtgccagcaatggcctggccacccaagcatctcctcctcgcccctttttcccccctcttccctcttttgaggtaggtctacacagtcacagaacaacccacagccaggtcactaccaagacagcgtctctaagaggcggggagaatcagatcagaaacagagtgtcatttgctccacgtgggctttaactcttccatctgctttaaggactgaggaagaaactaggtacaggtgaagaaaaagaagttcgttaaaactgacttgtttcataaccttctacaatagcaggccttgcaagccgtctagcacagtggcttgcccc

SEQ ID NO: 10121 - DNA, 1116 bp, Artificial sequence
  DNA replication origin
ggcccgccaggctcgagtgcgcagcgcaggccccggatctccgctcgccgctgccgccgcgggagccgaggccgaggctgaggccgcagtgtccgcgaacagcagcagcagccgcttgcccaccggggaggccgccgcgtccgccatcgccggggccggcctgacccgcgctcccgcccgccgcctcccaccacctccgccgccaagcgcccgatccgcccgcaaggcctccctccgcaccacccgcggccgccgttcccccccaccccccccaacagccaccaccaaccaccggcgcagcgcagcgccccccgtggccgggagcggagccgcagcctgggccccgcacagcgccccccgcgctctggagcggggcgacagctcctggcccctcgcagcgctccgccccaatctccccggggcctgcagtgccccctgcggtctggaggggaattgcaggtccggccggggtagggaagtgggcgggtccttcagcttccccatggcatcatccctggtctcaatcttccttcagggagtcgtatatatgagagggctttagcttgctctcctcggataccaaagacatttacggggtaagggggtgaggggcaaggtacctagagagtggatgttttgagctatttagtgtctccaatacccccattgatttcctatcctgaaaatatgagctcctacctgctgtcttgtaggaaatgttctccccattggtccatgagacacaatgtcttccttctcaatggcccataacagcaccatcccattctatactgccagcacttcttaggttcctttccaattggccaatgtattacttccattggatgtataatgccactctttccactgactgaaggccaacgtgccccccaacatcttggtgtttttcctaaaaccgacctaacttcttccccttcctagtctgccaatgttattaagtctacgtgtttctccattcaactcttaggggaactggaaatagaccaacagtaaaggggttctcttagtagcactccatcttaccatggaattagtggggctgggggcaaagaaaattctgtaactcttatctgaatgcatttaatacaggtgtgg

SEQ ID NO: 10122 - DNA, 1598 bp, Artificial sequence
  DNA replication origin
cacggtgcgggccatgagcggggcggtgccccaggacctagcggtgagtggcggccgagtcgggcactcgaggccggggctgcggggcctgcgggcggcctccccgggggcctttgtgagggggcggtgggatgggggtgacccatttccgtgcccccgggtctccttagcgccccccgccggcacctccgcaccccgagcgcttgccggcatggcttccgcgtcggggtgtgcgccccggtttcccccggggggcggccagggcgtccggagctgctgcttgcagccagcaggccccgcctcctgggcgacccttttctcggcgttccccccaacacgccttcggagcaggctctcgaatcttgagctcccgggagcctcagagttcggccagtgttgccgctgccctctcgaagacgcggacctgtggtccccagcctctcccaggagacctgcgccctgttccttttctcccagagccccaagtggggcgggaatgtgggcagttatgggaggcacggaggctgcagttggagctggtcggggcttttttatctggcagttacttcctcatctgagctgggctcggcctggcggtctccagaaaggccagctctcggcactgtctcgagctctcctctcctttccttaacgcttctgggtgacaggagctgcagttgtggctgtttttgttaagtttgagatctttcttagtggccgaacggggctgctgggtagtgctttttgctcccagctcagctactcccccaaccttgggagaggttttgttttgaaactttgtgtttgggcttggccctttttgaatgccttggtgtgttttgtgattaaagttgttcagtcatacaacttaactagcattcgggatcatgatgtgttattctcgttaatgtggcggtaaaatatagtgtttgagttttggcaagccactttatttcctcattttgataggggccctagcttctctggtgagataaggctatgaaaaatggtgtgtgtgcgtgttggggcagggggtggtcttttggaatgtaatagatcagcaagcagaaagtaaattttcttgatgaacttgcttttgcagatataaacgggaacgcagtttgtgagatttggaagtaatgttgtaggcttccgatgttcatttttcttcctattgatcaacggtgttagactgtcctttttcactaatatacaagctttatggattttttttgtggatggcttaggctttgcttctgctacttgggttcatttgctttgatttttcttcatgctgtataagaaacgttactaggacatttataaggcctcagtggggcaaatttgcaaaaagatactaaaaatttaaggggatggaatgatgattaagactgggatttggatctctattcctctgcgctttctttaaaagatggctgggatgggaaaagaagtgtccatttcagattcattctaccaccttggaggcaaaacatacttaagatccactattatatgcatactttgaccgaaggcctactttgccctagctattcattgggatttttttctggttcttgcagtggtcgtctcgtttc

SEQ ID NO: 10123 - DNA, 1650 bp, Artificial sequence
  DNA replication origin
gacatgtttccccatactttatgctttgtgaatggagtgggaaagttggggtcctcccttcctgtggcagagtctggggggaagggtcatggtgtgtggcctcagcaaagttggacagtctgtggtgggattcttaagcaggcagcctggctgcctacatgaaacgtgtggccatagatccaccttagagatggtgggagacactcatgtgggatttatcaagcagtaattaaagtgtttcattgtggggtgataacagactgcattccaattaggagatgttttctggagaggaagttgtaaagaatagcaagaggggttatcagaggctgcttttctggaacgttttgggaaacatcttccaaagtgtttgaacctggaaatataatttaccaggttagaaatagaccattgtgttgttcagggatactgagcttgaataagaccatgactctttgaaatacacagttctgaatgtgtcctttcagcccagatgggcacaggttgatgctgtggtcacccgaaggattacaactcaacataaagggtagaggaatgcagaagctctaaaatgggacaggaaaggagagcaatagggctgggggtgttggtggatggttggaggttggttgctttcctgaagatcaggaggcaggctagcctacattctggatataaatgtctttagaatcaggacattcactgccactagtgcttgctgatgggggtggaactggagccccaggaccctctcgcagcccctctgtttgaaaagaaggttgaccctttgttgtcagtaaccacattgagagcataaagctctgttccgctgcaaagcttaggagctgacaacctaaaaaagcagaccagcagcccggtggctcacaccagtgatcccagcactttgggaggctgaggcgggtggatcgcttgagctcaggagttggagatcagcctgggcaatattgcaaaaccccatcttggcaaaaaaaaacaaaaaacaaaaaaacaggaattagctggtggtgttttgggcctgtagtcccagctactcgggaggctgaggcgggaggatcattcaagcccaggaggtgtgctgagattgtgccactgcactccagcctgagcgacagagtgaggacctgtctcaaaaaaacaaaacatcatctggtcaggggagatcctctttcaacggggtgagaaggagtggggtggacaggtgcggctgtacctgtgactcaggagctcaggtggatgtcttcagggcctgtaatgaggagagtttgctagtcagcagttgggggatgtaacctgtttaaagtaggcttcctggggtcatcttagcagcatgacttggtggctttgtgactctcaacagattattgagccttaagcttctcattcccttatcttcaaaatgagggcttttatagcgcctgccttatagggtggtcaagaggattcactggcaacgcagtgaagctcttagcacaggggctggcacacagtaagcgcctggtgtgggcagggcaggaggtgggcaggggtcgatttcaggatgtaaccatggagacctccacgacaacagcctagggcttgaaacccaagaaagatgaacaagcgattcgaggaaggcagggcactgagggt

SEQ ID NO: 10124 - DNA, 2310 bp, Artificial sequence
  DNA replication origin
aggaatgggaggagcttcacccccaggcccagtcttttgtttggctggctgggtagagaaaggcagaggccctgggccctgagatacaggaggggacgctggacctcaccaggagagcactatatccgtgagcgtctcggccgtggtgaagaaggcaaagacgatccagtacatcatccatttcacctgagggacagagggaagcgctggctggggcacggggctgaggggccagggacacccaggaccccagctctgcctgttgaacatgcctgggctggggagaacaccaaggaccccacttctgcctgccagccatgttggaggcgctgtgtgggacacccagggccctcctttgctggtgggtcttgttagtggctgacagtgttggtgcaaagtcacccccatctgtaataggacccagtgccctcccctctctgtgccatgtgggttgggtagggggtgaagggtcatccactcacatattccttcacgttttttgtcttcacggccttgtaggaagaataggctgggtacagggtgccaaagatgagcctagggaggcaggcatggttactgggcctctcagccaagggcagtggcctctccctcccagctccgcatcagcccctgggtaagtaatgggaagagagacagaactccccgctggactgatgaactcaggtcaggggttaaggtcaaagcagcatggaacatgcccagccaggtagggtgatgccccctccccgctccactgttcagtttttctctagccccggaggcagggaaaggcccagaggccagagggtccaatgtagtcccttgcgccatgatccttggttacacacaaatatgtcatggagactgggagtcaggtcactgccacagggtgtcttccttcttgacctcatgcccattcacacccatctgcccttaccctccacctccctcagagccaggctctgcgagggaacctgacaccacctaacagggcaccctacctggcaggcagaggtaccactgtggccctggggccctagggaacagagggcacaggggcaggaggccctgagagaggcaaagaggcttattcccccatgtaaacaccacagggacagggctcaggggagggccccgctggtgatccaagtacagaatgcagacaagacacaggccgggaaagaagaggaccgatgccctttggggcttgcccaggcaagagagaagcagccaccctgaaggccacatggaggcgtgaggcccctccattccccctgggatgggtgggggaagagaaggagtctagagtaaaccaggacagaagcacttggccggcccggctgtaccgaatgggaagaagggagcagggtggggctgccggtgtcagtccccaacggtggaggccgaggggcagtgtcctcattagggcaggggatagctccgagaaccacgaggagcccctgtcaggctcagccccttgacaatgtgtggctgtcgcctgtttccacatggacaggagggatacttccaaaccggctggtgcaagtggagtgcggagcagaatcctcaaggacaaagtctgggctcgtggggaatggtgtgtgttccctcctggggcccggggaggtgccagagacacagctccacagtgtggctggcagcctggaatgaaggccacggagcgtcctcccccagcggggtccacaatcccaggctgagcacacacatcccctctcccagttacctctcacactttgtcctccgagcatttctgcttcccgatacccagacttcctccctagggggcctaagggcatatgccctcgtccccagtctcctgacagtgagtggaagggagagaccaaggggcctggtgatggctctgagctgcggaatgatgatgaggccctgccttgctccactctcttccatcaccctgttacctcccccagagggacagggcccgggtctgaggatctcctccagcccagacctgctaggtgggggaggggacgcgcctgcctccccttttaaatcaagccgtgctgctcagcctctaggatgggcgcaggagcaaggacggtagaaataaaagaggttattaataaagaatgtgggtgaggtccctgggaagccaggcctgccacgctcccctaatattcccccctccagtcctgggtgccacatctccatgtctctgggggccccaaataaggacgcagcgcctttaggtgactctgctgcacgaagcttcggagaagtccacccgggctttaacacccccgccctccatcacagcccgcatcaccc

SEQ ID NO: 10125 - DNA, 1024 bp, Artificial sequence
  DNA replication origin
aagtgctgggattacaggcatgagccactgcgcccagcctaggcctctggttttatcttgagtcccaaaaccattttcccagactgagccccctcaagcccatctcttagctgggcaccagagctcctgtcagtcacaggctggcctccccactcccccagctgaaccctgcttctcacttgaggtccttcccacctgtcagctggtgtggcaagaacaaagcacagaggccaaaataaatgaggtgccagagtttggtttattggctcatccagtgccaaaggtccaatgggcaccctcttcccaaggaaccgggagccccgcggctcctgcatttctctttctccttcacgtgttcctcctggccctgactgaagccgtggcagaagctggggcgggtgtgagcagaggctgggttctgccaggggtcttagggcccagtctgcttggtacaggatggggaccctgggcaagaggggatggaccccaggggcagaggagaggggcccactcagcaggggcctgtaccagacagagcaggggtgggccctgaggagcacgggagtccagcccaggggcacggtggcaatggggtgacctaaaagggagcaaggtcataggagcaggtgagaggccccccagatccccgttctctcatgggctgggtcctctgaggctcagagcctaggatggagggttgagcagggaaagggccagatgactgtggggctcagggtgggaggaggcgactgctggagggacagtccttgacccaaactaccccgagccctagacccagaaagacacactcacacagccctggacccccctttttaatgtgggaacatgtggcactcagccccacccaatgaccaggaaaagagcccccagctgcagctctggcctggccatcctggtcgctgaagcacaggccaatccctgtcttccatccacagctgcacctggaggccccacccagggtccccaacgtcctccccgtgtgctccctttcccccatgtgcct

SEQ ID NO: 10126 - DNA, 872 bp, Artificial sequence
  DNA replication origin
ccgccgccatccgccgccgcagccagcttccgccgccgcaggaccggcccctgccccagcctccgcagccgcggcgcgtccacgcccgcccgcgcccagggcgagtcggggtcgccgcctgcacgcttctcagtgttccccgcgccccgcatgtaacccggccaggcccccgcaactgtgtcccctgcagctccagccccgggctgcacccccccgccccgacaccagctctccagcctgctcgtccaggatggccgcggccaaggccgagatgcagctgatgtccccgctgcagatctctgacccgttcggatcctttcctcactcgcccaccatggacaactaccctaagctggaggagatgatgctgctgagcaacggggctccccagttcctcggcgccgccggggccccagagggcagcggcagcaacagcagcagcagcagcagcgggggcggtggaggcggcgggggcggcagcaacagcagcagcagcagcagcaccttcaaccctcaggcggacacgggcgagcagccctacgagcacctgaccgcaggtaagcagtggcctacgccgagggggaaccctttcgccaccatcctggcgtcctgtccttcaccgcaggagtgctcctggatcttagaatgagagccgggtttccctttcattcctcgcatccccagagtcatgtgttagagggatgccaaggaaccccacacagcccaccccctgccctcatccctagcggagcgcagaggaccgagcttttgttttggatggagagctctggagctgcgtgggtgggtggagggggagggcttgttttgatgagcggggctgcgccccccacctccagtaagacttgccttgc

SEQ ID NO: 10127 - DNA, 1944 bp, Artificial sequence
  DNA replication origin
ctgtacaagggtgcagggcagggctctgaggggcccaaaccccattttgccaactcgattttctagcattgaagggagcaaggggtcaggcatatgatggagatgatactgaaatgatttatccaaaatccatgcaaatcaagttctttggatagaggtgaagaacttggacatggctgtttcaggcagctgaagtcaaagggaatagtaattggggaaggggaagtgggcagaaaggattgttggccaatagaccttccactccagtagagagggaggacttggctctgagaacctccatctgacctaagaggaaccctcctctcctatggccatctcctcctcctgtcctttaagtctcttgtgtttctttttctcccttttccctttctttcccctttccctttagcaaatttcaattgtcctgggagaaaaggttgctgtcatgtccgaaagccctgtggaggcgctgaaggagttggtgacagctgaggaagggaagctgctgacctgggccgggaaagcagggggaacagaggagtacgtggtggccaccgacggggaggggaagccactgtgcacaggggatgggtaggtcgaggagccgggagaggagaaggaggtgggcacaggggatgggtatgaggtggtggccggggatggataagaggtagtaaccggggacgggtaagaggtagcaaccggggacgggtaggaagagagagaggaggtggccgaagaggccacaacacttttgtctgctttcttgtccttctgccgcaagtggatcttggtatgcctcttgcgttcatcgctcctggcaaactttcttccacagatgtcgcaggcgaagggcttttcgcctgtgtgggtgcggatgtgggtggtgaggtggtcgctgcggctgaagttgcgcatgcagatgcggcactggaagggcttctggcctgtgtggatgcggatgtggcgggtgagctcgtcggagcgggagaagcggcgatcacaggactccactgggcaagcgtaagggcgttcgtgggggggcgtcttgctgggccggttggggtacttgcgcatgcggctgggtttgatgagctgggactggtagctggtattgagggccttcaggtcctgggagcccgactgagtggcaaaggccttaatagtagacagaggggttagcgaaggctgctgggtgcggctctccaggccctggaagggcttctggtctggggtgcccaggcccagatccccctgctgctgtggaaacaggtagtcggggatcatgggaacctggaagccacccttggcggcagggtaggcaggaggcgggtactggagcgctgtccctgccgagcccgggaaggcctggctttgtggctcagggaaaatgtcagtgttcggcgtggggaaggtgggtgccgctgagtaaatgggactgctgtcgttggatggcactgcgcagctcaggggtgggctctgggaggcggaggcggaggaggccgctggagatggtgctgaggacgaggaggccggtgggttggtcatgctcactaggccactgaccaagctgaagaggggctcgggccacaaggtgttgccactgttgggtgcaggctccagggaaaagcggccagtataggtgatggggggcagtcgagtggtttggctggggtaactggtctccaccagcaccttctcgttgttcagagagatgtcaggaaaagactctggcaggagagagagaagcgggaggcctggttactggaaagcaatcactggaggacgaggacgacccgagctgccaggcaagagaccgggccggctaccattgactcccgaggtagttaataattgatagcagcacattgcaatgttcctggacccgcaccagtggcagagcccatttcaacaacagctgacgcaaatacggagaatccccct

SEQ ID NO: 10128 - DNA, 1333 bp, Artificial sequence
  DNA replication origin
aggaaatcgctggattttggaggctttatgatttatcagcttattctatggaattaagccctgggcatcatgctatttgtcaggggcctggttctagcgaagatatgtgtttatctttcactatgagatcccaagagtctcccgaaatattctgggcctcagaactggtttctctgggtggcagagtatcagaacacagggcagaaggaacctgttcctcagagatccaatcgacatctcccttaagccttttgctgccctccacgaacccatccttttgtgctgccagctccatgtccccattccgggggaggccagaatgacacatctacatgtcaccccgtagtctacaatgtcgggaaggagctgtgtccctgctggaattgaaaaacatccttgagggctgcaacttttacagggaaagttaccatgccaacgacagcctccttgcctgacagggatgaaaggaaacaaggctgtgggtgacatgcatctattgtgtgtccacaaacttgcctggaatctatcagggactgcggactgctgctcagcaggatggaacaggaggattcaggttagatttcagtgggactccgggatgggcaggactgatgagggcagggcagggccagcaagcgaggattgggaaatgcttctctgagattgatacccatctcttggtgaaatgtgtgggtgtggtactgacagcaggcgtgggaggggacggtgtcctagataccagtttctggctgtgatgggaacctcgacttcccccaggttctttctgccttcacaggatggtctaggaggttacctatgctctgggttagatagaagagggcatggcaggtcactggggcagtggggccacaggcatgcctatggagaaggcccagtcttggcgaggaggccccaagatgcctaaggaggagcgtctccttcaaggggcagggcttccagggagaatggcccccactcccgaacagggaaagggcacagaggactgaggagctggcactgccgaagcacctacgccacgtcaggcacttgacacagcccccatttcatttaattatctccacaaacctgcacagcaggaactctcactcccatttcacggaggagatgaggacacaggctcaggagaaggtgagtacccgtcccagcatcacccggctggcaaggggagacgctggggctggaacctcgctgtctgaactggaaaggaaaactccacattcagggtgccctattttcttctggaaagatctctcccgaagccgtccgctcctcattctgcccttcgtacaggcttcccgggcctgagacggct

SEQ ID NO: 10129 - DNA, 2000 bp, Artificial sequence
  DNA replication origin
aagagcagcctggccaatatggtgaaaccccttctctactaaaaatacaaaaaaattagccggacatggtggcgcattcctgtaatcccagctactcgggaggctgaggcaggagaattgcttgaaaccgggaggcggaggttgcagtgagccaagatcagaccactgcactccagcctgggtgacacagtgagactccgtctcaaaaaaaaaagaatcaaggaccctgcacacagaagagaataaaagccctacccaagcagaggcctggggttcctgcaaattctgtagcagcctacaggagctcccctcacaccttgccccttggctaagctcaatcataaatagctcactggtttccagcctgggatctcccatccctgcaaggagcccacctcctcactctgacttgccctcctcctggagcaggaaggcgggtggctgtcaggggcctgagaggaggggaggagagggcaggaagcagcatcactaggagcctggcctctgtggactgcattacccacaatcctagagcatagatctacagagaaggctgctgggggcctgcagccctaagtgggaaaacaagccaagaggtatcctaggctctaagtgtgcagcccagattctgagacccagttttttcccaaacctacctcctggacctttgagattctctccatgcaccctattcacaggcattcagccaacctggggctgtggagacccacaaggctccttaaattttggatttgcagccactgtgtgtgtgtgtgtgtgtgtgtgtgtgtgtgtgtgtgtgtgtgtgtgttgcgcctggaagccactgtgtgtgtgtgtgtgtgtgtgtgtgtgtgtgtgtgtgtgtgttgcgcctggaagcctgtgagtgattttattctggatcaagcccagaggctgcttggccctaaaaggcccttctctgacatattcacccactcagccccaagctctgagcttttctttccctgccttacctgtggcagaacaatcacaggctcacaggcgggtctagctggccacatggggacttgcttgtctcctccccagcagaaagctggactttgtgacagctgtcctgctggaacatggggggagggggctcgggaactgttgctggcagccctctgtgctgagatccagtccctgtttgtgacctttctcatggcagatcagatcagggtaaccacatggctgggccaggtttgtttctggaggcgctgtcgggagggcctgtaggggcttgctggttctttcagtggtggataaaccagagctgtcaggctgagcaggagaggcccttctgggtgatgggggcacccaggggcagtgctcagccccaactcactccaggtgtacacttgccccagctgtggctcccctcaccctacccctccagctttctcctgcagagtcaaactactcaagtagggttgtggggtcatgagcctcagaccacggggagccatagcaggtggagacgttggggaccagacctaaagtcaaaaatgactgtccaaggtgaaaagggactgcggcaggcctgaaacaggatcactcagataacgacactttgttaagatcctatgatcctaaatcagctcagcagaggctggtgacctatgggtgggggtgggaaggatttccaggaggccagaagtctgaaccaagtaaaggatgcgtagcagttctttctgccagaatagtgtgggaagggtattccaggcggagggggcagctcggctgaagccagggaggtacgagaagcgcaagcggggaggaagagagatgtcagggaagacccacttgtcaactctcaggggagagcggccggcgaggctcggaggcccgtgtggctggaggtcccgggctggggccgctgaaagacctccggcagggcgtgctgtgctccgggctaggggagaaaagcgaggcaaaatacgaaaccagcggggaccagcgggacccccaagtcggcc

SEQ ID NO: 10130 - DNA, 1577 bp, Artificial sequence
  DNA replication origin
actacaggagcaaagaccctgcagccagaaacaggacaggggtagttggacaagaatgaccttgtcagggtttgcctttttctttttctttttgagacagagtctcactgtgttgcccaggctggagtgcagtggtgcagtcatggttcactgcagccttgaactcccaggctcaagcgatcctcccacctcagcctcccaagtagctgggactacaggtaggtgccactacacccagctatgtttttgtatttttttgtagacaagggttctatcattttgcccaggctggtctcctgagctcatgtgatccacccatcttggcctcccaaagtgctgggattacttgtgtgagccactgtgcccatcctctttttcttaaaggttgttctctccccacttcatggtcctattgccctttgtcagcatctgttaactagcacaggcccacagtactttgaattacagtgggcacattcacccacagatgttcactaggcactccctaggggatgggcaatgtgctgggtgctgcaggagatacagctcctgctttccagaagtttatattcccttgggggagagggagatgtgaggagtagagggtaaacacggtaagggcaggtctccctagcaccctgctctctattcagcacaaggccagcagtggacatcgtcgtcttgcattattcaggtttataggccaatactgaaatctatcttattcatcatcccgtgagcaggggaaacatcattagggttttctataccaggatgatagtgagcatgtagtagtttttgtttttttgtgttgtttgtttgctttgtaattttgttttcttttgtttttggagtattcactatgaagataagaaagggtaagaataaaatgccccaaatgaccagaggaatagagatagaagtcaggtccctcaaatttgttggaggagggggacaagctgggaggggggacgtgctgggggcggggcgggaacaagcccaaaaagggacagctgctgcggtgcctcttttgtgtttgtaaatgtcctccccgcaaggtggctctagcctgtaatcccagcactttgggaggctgaggaggatttcttgagcccatgagtttgagaccagcctggcaacatagtgagactctgtgtctgtagttccagctactccggaggctgaggtgggagggtcggttgtccagggatttgaggctgcagtgggccgtgatcgcgacactccaccccagcctgggcgacagagggagaccccgtcttaaaaaaaaaaaaaagtccttgatcaagagggcttcgggtgtttccatctgtggagtgaggggacgggttaggtgaattctaggggcgcttccacctcacattatgaaaggtcctgagagtcagattctagttccactgtgtcccgaagctgtggggcctttccttagcctccgcttctccttctgtaaagccaggtagttggcctagatcacttttccagaagactgtgactccgggacacctgtgacactcttgaggggagcgtgcccagtacccctggtcgcgtctctgggattc

SEQ ID NO: 10131 - DNA, 1073 bp, Artificial sequence
  DNA replication origin
caggccgagagggtccttgggccgggccgtcccaagctgggccccgcgagccgcgggcgggcgagcgggcggggcgcggtttctttggcgacgtcgccgggaattgggccccgggcgggcgtgggacccgcgtcgggccggcggtcccttcccccgcagggcccgagtatggggcccgggcgggcacggccggcgcttcccagcgctcgggaagtcggggggccgcctgggctggggaggagaaactataggcccagcgccgccgccgcgtttcctcttggaaaagttttctcgcggtttccaaactttgttaccgcggcctcggcgcgcgcggcagccccgcgccgggcccctcggccgccttccttccctggggcggcttgtctgggagccgctttcccgggaagtgattgtcgtccggctccgaggcgttcctgccccctcccccttcccggccgctgagacttcccgatggggcggcggggacgcgggctcggcgaaccgggaggctggagcccgggcttctcccatacagcttcgccgtaggtgggccacacccgtgtggacttttggcgtgaccgtccacttggactcggggattactcagctttcctgggtttcttgtcggttggacgcacttagctttcagccctagttttcaggagtggcattagagaggtttttttttttttttaattgttgttgacttttaaaggagcgtgtgtgtgcgtgcgagtgtgaagcacttgttggaaaaaatgttgcctgaatgaatgcctgacctttgcttggcagcagtggcttcccagtaatgcaggcggcggttggcccagttccaaggttgactccctcttacgtcctcttgcatcttggtgacatttttttggtgcgtgtgttttgtacagaatttacaattatttggaaaagagcgagatatgtcaagtctacgactaaattcggggcattttatatttatgatgaaggaaatgcttacatcattgttgggacaggataggcattttgtggagcgaatatttgtgtttagtcagcagtgatttttaaatactggacag

SEQ ID NO: 10132 - DNA, 1011 bp, Artificial sequence
  DNA replication origin
tatgagaagtgaggagcccctccgcccggcagccaccccgtctgggaagtgaggagcgtctctgcccggcagccaccccatccgggagggaggtggggggtcagcccccgccaggccagccgccccgtccgggagggaggtgggggagtcagccccccgcccggccagccgccccgtccgggagggaggtgggggggtcagccccctgcccggccagccgccccgcccgggagggaggtgggggagtcagcccccccgcccggccagccgccccgtccgggagggaggtgggggggtcagccccccgcctggccagccgccccgtccgggaggtgaggggcgcttctgcccggccgcccctactgggaagtgaggagcccctctgcccggccagccgccccgtccgggagggaggtgggggggtcagccccccgcccggccagccgccccgtccgggaggtgaggggcgcctctgcccggccgctcctactgggaagtgaggaacccctctgctcggccaccaccccgtctgggaggtgtgcccagcagctcattgagaacgggccatgatgacgatggcggttttgtggaatagaaaaggggggaaaggcgggcaaaggattgataaatcggatggttgccgtgtctgtgtagaaagaggcagacacgggagacttttcattttgttctgtactaagaaaaattattctgccttgtgatcctgttgatcggtgaccttacccccaaccctgtgctctctgaaacatgtggtgtgtccactcagggttgaatggattgaggtggtgcaagatgtgctttgttgaacagatgcttgaaggcagcatgctcgttaagagtcatcaccactccctaatctcaagtacccagggacacaaacactgcggaaggccgcagggtcctctgcataggaaaaccagagacctttgttcacttgtttatctgctgaccctccctccactgttgtcctgtgaccctgccaaatccccctct

SEQ ID NO: 10133 - DNA, 1253 bp, Artificial sequence
  DNA replication origin
ggggttcctcacttcccagtaggagcggccgggcagaggcgcccctcacctcccggacggggcggctggccgggcggggggctgacccccccacctccctcccggacggggcggctggccgggcagaggggctcctcacttcccagtaggggcggccgggcagaagcgcccctcacctcccggacggggcggctggccaggcggggggctgacccccccacctccctcccggacggggcggctggccgggcgggggggctgactcccccacctccctcccgggcggggcggctggccgggcagggggctgacccccccacctccctcccggacggggcggctggccgggcggggggctgactcccccacctccctcccggacggggcggctggcctggcgggggctgaccccccacctccctcccggatggggtggctgccgggcagagacgctcctcacttcccagacggggtggctgccgggcggaggggctcctcacttctcatatggggcggttgccaggcggagggtctcctcacttctcagacggggcggctgggcagagacgctcctcacctcccagacggggtcgcggccgggtagaggcgctcctcacatcccagacggggcggcggggcagaggcgctccccacatctcagacgatgggcggccgggcagagacgctcctcacttcctagatgggatggcggccgggaagaggcgctcctcacttcctagatgggatggcggccgggcagagacgctcctcactttccagactgggcagccaggcagaggggctcctcacgtcccagacgatgggcggccaggcagagacgctcctcacttcccagacggggtggcggccgggcagaggctgcaatctcggcactttgggaggccaaggcaggcggctgggaggtggaggttgtagcgagccgagatcacgccactgcactccagcctgggcaccattgagcactgagtgaaccagactccgtctgcaatcccggcacctctggaggccgaggctggcggatcactcgcggttaggagctggagaccagcccggctaacacagtgaaaccccgtctccaccaaaaaaatacaaaaaccagtcaggcatggcggtgcgcgcctgcaatcacaggcactcggcaggctgaggcaggagaatcaggcagggaggctgcagcgagctgagatggcagcagtacagtccagcttcagctcggcatcagtgggagaccg

SEQ ID NO: 10134 - DNA, 919 bp, Artificial sequence
  DNA replication origin
ggtgcgcgcctgcaatcacaggcactcggcaggctgaggcaggagaatcaggcagggaggctgcagcgagctgagatggcagcagtacagtccagcttcagctcggcatcagtgggagaccgtggaaagagagggagagggagaccgtggggagagggagagggagaggagggagagggagaggagggagagggggaggagggagagggggaggagggagagggggaggagggagagggggaggggaaatgtttcttaatctgtctttttttttttttttttttttttaaacagagtcttgctctgtggcccaggcaggagtgcagtggcaccatctccactcactgcaagttctgctcccccaggttcatgccattctcctgcctcagcctcccgagtagctgggactacaggcgaccgccaccacgcccggctaattttttggtatttttagtagagacggggtttcacagtgttgaccaggatggtttcgatctcctgaactcgtgatccacccgccttggcctcccaaagtgctgggattacagacgtgagcctccgcgcccggctgctttgacatttttcaagactacagccagttattttgtagatcgtctcacgctttgaatttgatgttgcctcatgactagttgaggttatgtaattttcaggcgaaataacacagaggtgatgttgtatccttctcagtgcatcgtgttaggagatacgtgatgtgggtttgtgtccttattagggacagtaattttgattacttggttaaggtggcatctcaggtttctggactgtgaagttactatttcccccatctgtcataaataaataatctgttgggagttactatgacactagatcacgctactgagaaactgaatgctaatctacttggttagcattcttt

SEQ ID NO: 10135 - DNA, 812 bp, Artificial sequence
  DNA replication origin
ggccgcccatcgtctgagatgtggggagcgcctctgccccgccgccccgtctgggatgtgaggagcgcctctgcccggccgcgaccccatctgggaggtgaggagcgtctctgcccggccgccccgtctgagaagtgaggagaccctccgcctggcaaccgccccatctgagaagtgaggagcccctccgcccggcagccgccccatctgagaaatgaggagcccctccgcccggcaaccacaccgtctgggaagtgaggagcgtctccgcccggcagccaccccgtccgggagggaggtgggggtcagcccccgccaggccagccgccccgtccgggagggaggtgggggggtcagccccctgcccggccagctgccccgtccgggagggaggtgggggggtcagccccctgcccggccagccgccccgtgcgggaggtgaggggcgcctctgcccggccgcccctactggggaagtgaggagcccctctgcccggccgaaaccccgtctgggaggtgtacccaacagctcattgagaacgggccatgatgacaatggcggttttgtggaatagaaaggggggaaaggtggggaaaagattgagaaatcggatggttgccgtgtctgtgtagaaagaagtagacatgggaaacttcattttgttctgtactaagaaaaattcttcggccttgggatcctgttgatctgtgaccttacccccaaccctgtgctctctgaaacatgtgctgtgtccactcagggttaaatggaaaaaataaataaataaataaaagtacaaaatttaatgtat

SEQ ID NO: 10136 - DNA, 1328 bp, Artificial sequence
  DNA replication origin
acatgtttcagagagcacagggttgggggtaaggtcacagatcaacaggatcccaaggccgaagaatttttcttagtacagaacaaaatgaagtttcccatgtctacttctttctacacagacacggcaaccatccgatttctcaatcttttccccacctttcccccctttctattccacaaaaccgccattgtcatcatggcccgttctcaatgagctgttgggtacacctcccagacggggtttcggccgggcagaggggctcctcacttccccagtaggggcggccgggcagaggcgcccctcacctcccgcacggggcggctggccgggcagggggctgacccccccacctccctcccggacggggcagctggccgggcagggggctgacccccccacctccctcccggacggggcggctggcctggcgggggctgacccccacctccctcccggacggggtggctgccgggcggagacgctcctcacttcccagacggtgtggttgccgggcggaggggctcctcatttctcagatggggcggctgccgggcggaggggctcctcacttctcagatggggcggttgccaggcggagggtctcctcacttctcagacggggcggccgggcagagacgctcctcacctcccagatggggtcgcggccgggcagaggcgctcctcacatcccagacggggcggcggggcagaggcgctccccacatctcagacgatgggcggccgggcagagacgctcctcacttcctaggtgggatggcggccgggaagaggcgctcctcacttcccagatgggatggcggccgggcagagacgctcctcactttccagactgggcagccaggcagaggggctcctcacgtcccagacgatgggtggccagggcagagacgctcctcacttcccagacagggtggcggccgggcagaggctgcactctcggcgctttgggaggccaaggcaggtggctgggaggtggaggttgtagcaagccgagatcacgccactgcactccagcctgggcactgttgagcaccgagtgaaccagactccgtctgcaatcccggcacctctggaggccgaggctggcggatcactcgcggttaggagctggagaccagcccggccaacacagcgaaaccccgtctccaccaaaaaaatacgaaaaccagtcaggcgtggcagcgcacgcctgcaaatcgcaggcactcggcaggctgaggcaggaaaatcaggcagggaggttgcagtgagccgagatggcagcagtacagtccagcttcagctcggcatcagagggagaccgt

SEQ ID NO: 10137 - DNA, 1269 bp, Artificial sequence
  DNA replication origin
aggaaagctaccccttaacccagagcagaaggtggatctggattattctgagtcaggcagactcctttcctcttgccagggataactgaggaataggcatgttgcacaattcagatttaggacaagtctactaggagcttctagattgtttgcttataaagagagacatatggaaggaacagtcctttttgttctcactggacatattatgtgcagatgtcatgcaaagagcctctgcagccacccagtgccaggcacactgaagacgatagtgatgaaaaatatcaagaacctggatccttgatgatactgcaaagcccttatatttaacaaccctgaagtcacttagcctaactcaggacttatacttaatgagaaaataaatcccccatttttcaagcagtttgggagctgggttttctgcaaactccagtgcaaagtatcctaactgataaaggtactagctaacaacaactattcttcttggggcttgttttaaagtaagaatgtaaagcgtaagcttgatcaggactatgaaagatataagaagatggatagcaatatatggatcttccttgaagaatatacacctgaaatacacagcgtccaacagcaagggcacaggaagggtttcaaagcacaccaacagtgaaaatgccgaagggtcaaagggctactggagcttggaaaagttaacactgatcctcatgccacacaatggaaaatactaataacaataagaaacagttaaaaagtaacaagacacggggctggtggggcaaggtatggagatactttctgatacagagataattccagtatatttaaatggattaagattttattaaaaatctgaacaaaactgcaccactaattcaggttaatccttaaatacacaaagacctattacctctccagacactaccttcatcacaagttgtcaagctacttaagataaaatgttcacaagaattaaaataggagcataacatgaatgcaatgtaattacaactttattaacagcacaatactgaaaagacaccttagtttaaatgttttaatggaactatattggcgaaggtaagtaatggtactttcagaaaacacacagaatgagtttttccctctagatagtaaaatgaacaactttaatatatccccaaatcatgactgtacctgttgtcttttggctgccataatgttcagcttatccacttcaggttttagggctttatactggattcctaagtcttgttcattgccagcatt

SEQ ID NO: 10138 - DNA, 1280 bp, Artificial sequence
  DNA replication origin
gtctacttctttctacacagacacggcaaccatccgatttctcaatcttttccccacctttcccccctttctattccacaaaaccgccattgtcatcatggcccgttctcaatgagctgttgggtacacctcccagacggggtggtggccgggcagaggggctcctcacttcccagtaggggcgggcaggcagaggcgcccctcacctcccgggcggggcggctggccgggcggggggctgacgcccccacctccctcccggacggggcggctggccaggcggggggctgacccccccacctccctccttgatggggcggctggccgggcggggggctgacccccccacctccctcccggacggggcggctggccggtcggggggctgacccccccacctccctcccggacggggcggctggcctggcggggggctgacccccacctccctcccggacggggtggctgccgggcggagacgctcctcacttcccagacggggtggctgccgggcggaggggctcctcacttctcagtcggggtggttgtggggcagagggtctcctcacttctcagacgggttggccgggcagagatgctcctcacctcccagacggggcggcagggcagaggcgctccccacatctcagacgatgggcggccgggcagagacgctcctcacttcctagatgggatggcggccgggaagaggcgctcctcacttcctagatgggatggcggccgggcagagacgctcctcactttccagactgggcagccaggcagaggggctcctcacatcccagacgatgggtggccaagcagagacgctcctcacttcccagacggggtggcggccgggcagaggctgcaatctcggcactttgggaggccaaggcaggcggctgggaggtggaggttgtagcgagccgagatcacgccactgcactccagcctgggcaccattgagcactgagtgaaggagactctgtctgcaatcccggcacttcgggaggtcgaggctggcggatcactcgcggttaggagctggagactggcccggccaacacagtgaaaccccgtctccaccaaaaaaatacgaaaaccagtcaggcgtggcggcgcgtgcctgcaatcgcaggcactcggcaggctgaggcaggagaatcaggcagggaggttgcagtgagccgagatggcagcagtacagtccagcttcggctaggcatcagagggagaccgtggaaagagagggagagggagaccgtggggagagggag

SEQ ID NO: 10139 - DNA, 1436 bp, Artificial sequence
  DNA replication origin
tgaggagcatctctgcccggccaacccgtctgagaagtgaggagaccctctgccccacaaccaccccgactgagaagtgaggagcccctccgcccggcagccaccccgtctgggaagtgaggagcgtctccgcccggcagccaccccgtccgggagggaggtgggggtcagccccccgccaggccagccgccccgtccgggagggaggtgggggggtcagccccccgaccggccagccgccccgtccgggagggaggtgggggggtcagccccccgcccggccagccgccccatcaaggagggaggtgggggggtcagccccccgcctggccagccgccccgtccgggagggaggtgggggcgtcagccccccgcccggccagccgccccgcccgggaggtgaggggcgcctctgcctgcccgcccctactgggaagtgaggagcccctctgcccggccaccaccccgtctgggaggtgtacccaacagctcattgagaacgggccatgatgacaatggcggttttgtggaatagaaaggggggaaaggtggggaaaagattgagaaatcggatggttgccgtgtctgtgtagaaagaagtagacatgggagacttttcattttgttctgtactaagaaaaattcttctgccttgggatcctgttgatgggtgaccttacccccaaccctgtgctctctgaaacatgtgctgtgtccactcagggttaaatggattaagggcgctgcaagatgtgctttgttaaacagatgcttgaaggcagcatgctcgttaagagtcatcaccactccctaatctcaagtacccagggacacaaacactgcggaaggccgcagagtcctctgcctaggaaaaccagagacctttgttcacttgtttatctgctgaccttccctccactattgtcctatgacccagccaaatccccctctgcgagaaacacccaagaatgatcaataaaaaaaaaaaaaagaaaagaaaagaacatcactgctagccttctggtccaagaaggatgagacacccacggagaagaaacaagtcagggcttcatgtgcacatggtttattaaggggtgctctccagttgacaggaaatgaggaggcagggaggactttgtacccccacctgccccctcctggcagtcagaggccgcaggctaccagagcaggtggaggcagaagctctgggcaaagaagctttggctcctcagaggggtccaggaacaggtggcaagagtgagtcttgaacccccacagaggctggggaagaaacaccccctataggaaaaggagatcccaggaagtatgggcagggaaccaaaagcatctgctttaatggctgtcttagagtgtgtcctagtccattaggaatcctataacagagtaacttagactgggtaatttataaacaatac

SEQ ID NO: 10140 - DNA, 1649 bp, Artificial sequence
  DNA replication origin
acaaaactgccattgtcatcatggcccgttctcaatgagctgttgggtgcacctcccagacggggtggtggccgggcagaggggctcctcacttcccagaaggggcggccgggcagaggcgccccccacctcccgcacggggcggcggccgggcggaggcgcccgccacctccctcccggatggggcggctggccgggcgggggctggcccccacctccctcccggaggggttggctgccgggcggagacactcctcacttcccagacggggcggctgccgggcggaggggctcctcacttctcagacggggcggccgggcagaggcgctcctcacctcccagacggggtcgcggccgggcagaggcgctcctcacatcccagactgggtggcggggcagaggcgctccctacatctcagacgatgggcagccgggcagagacgctcctcacttcctagacgggatggcagccgggaagaggcgctcctcacttcccagactgggcagccgggcagaggggctcctcacatcccagatgatgggcggccaggcagagacgctcctcacttctcggacggggtggcggccgggcagaggctgcaatctcggcactttgggaggccaaggcaggctgctgggaggtggaggttgtagctagctgagatcacgccactgcactccagcctgggcaacattgagcactgagtgaactagactccgtctgcaatcccggcacctcgggaggccgaggctggcggatcactcgcggttaggagctggagaccagcccggccaacacagcgaaaccccgtctccagcaaaaaaatacgaaaaccagtcaggcgtggcggcgcgcacctgcaatcgcaggcgctcggcaggctgaggcaggagaatcaggcagggaggttgcagtgagccgagatggcagcagtacagtccagctttggctcggcatcagagggagaccgtggaaagagagggagagggagaccgtggggagtggggagaggggagaggtgtgaaacttaagtgtaacagattagtctgtcatagaatccaaccaggagctgtgctgggagatgaggagatgaagaaagatgatgtaaactcctgggtttgaggagtttgatagtagaagaggagaactgaaagggcaatttcagttagcgatagccatatcaaaaaacttgttcatttcatattccatttgttgaactcctggaagtatagtgcttgatgccagggataccatggtgggcatgacagaggttgctcacttgggcttatagtgatggaggaccccctacaggaaggtggctcagtgagaatgcagaggacactgaaggaaaggcttccctgaggtggggtcattggagctggatggagagaggttttctgtatgttggaaggcagaggggaaaggaatcagtgttgacagatttataatcccatagaggagatcattgatggggcaaagttatttaggtagcagatggacagtcttggcttcataaatgtgatgagactgagaaattagaagcagaggctagaaagggacacagaaaggtggtagggatatagacagaaattgaagaagctcctattagatgtcttcagttttctgagccaagctgagggtggtctt

SEQ ID NO: 10141 - DNA, 1327 bp, Artificial sequence
  DNA replication origin
ggtacacctcccagatggggtggtggccgggcagaggggctcctcacatcccagtaggggcggcggggcagaggcgcccctcacctcccggacggggcggctggccgggcagggggctgacccccccacctccctcccggacggggcagctggccgggcagaggggctcctcacttcccagtaggggcggctgggcagaggcgcccctcacctcccggacggggcggctggccgggcgggggactgacccccccacctccctcccggacggggcggctggctgggcagaggggctcctcacttcccagtaggggcggctgggcagaggcgcccctcacctcccggacggggcggctggccgggcggggggctgacccccccacctccctcccggacggggcggctggcctggccagggctgacccccacctcccttccggacggggtggctgccgggcggagacgctcctcacttcccagacggggtggctgccgggcggaggggctcctcacttctcagacggggtggctgctgggcggaggggctcctcacttctcagatggggcggttgccaggcagagggtctcctcacttctcagatgggggcggccgggcagagacgctcctcacctcccagacggggtcgcggccgggcagaggtgcttctcacatcccagatggggtggtggggcagaggcgctccccacatctcagacgatgggcggccgggcagagacgctcctcacttcctagatgggatggcggctgggaagaggcactcctcacttcctagatgggatggcggccgggcagagacgctcctcactttccagactgggcagccaggcagaggggctcctcacgtcccacacgatgggcggccaagcagagacgctcctcacttcccagacggggtggcggccgggcagaagctgcaatctcggcactttgggaggccaaggcaggctgctgggaggtggaggttgtagcgagccgagatcacgccactgcactccagcctgggcaccattgagcactgagtgaaccagactccgtctgcaatcccagcacctcgggaggccgaggctggcggatcactcgcggttaggagctggagaccagcccggccaacacagcgaaaccccgtctccaccaaaaaagtacgaaaaccagtcaggcgtggcagcacgcgcctgtaatcgcaggcacttggcaggctgaggcaggagaatcaggcagggaggctgcagtgagccgagatggcagcagtacagtccagcttcggctcggcatcagagggagactgtggagagagagggagaggga

SEQ ID NO: 10142 - DNA, 1025 bp, Artificial sequence
  DNA replication origin
tgaggagcccctccgcccagcagccaccccgtctgagaagtgaggagcccctccgcccggcagccaccccgtctgggaagtgaggagcgtctccgcccggcagccaccccgtccggaagggaggtgggggtcagccctggccaggccagccgccccgtccgggagggaggtgggggggtcagccccccgcccggccagccgccccgtccgggaggtgaggggcgcctctgcccagccgcccctactgggaagtgaggagcccctctgcccagccagccgccccgtccgggagggaggtgggggggtcagtcccccgcccggccagccgccccgtccgggaggtgaggggcgcctctgcccagccgcccctactgggaagtgaggagcccctctgcccggccagctgccccgtccgggagggaggtgggggggtcagccccctgcccggccagccgccccgtccgggaggtgaggggcgcctctgccccgccgcccctactgggatgtgaggagcccctctgcccggccaccaccccatctgggaggtgtacccaacagctcattgagaacgggccgggatgacaatggcggttttgtggaatagaaaggggggaaaggtggggaaaagattgagaaatcggatggttgccgtatctgtgtagaaagaagtagacatgggagacttttcattttgttctgtactaagaaaaattcttctgccttgggatcctgttgatgggtgaccttacccccaaccctgtgctctctgaaacatgtgctgtgtccactcagggttaaatggattaagggtggtgcaagatgtgctttgttaaacagatgcttgaaggcagcgtgctcgttaagaatcatcaccactccctaatctcaagtacccagggacacaaacactgcggaaggccacagggtcctctgcctaggaaaaccagagacctttgttcacttgtttatctgctgaccttccctccactattgtcctatgaccctgccaactccccctctgcgag

SEQ ID NO: 10143 - DNA, 1482 bp, Artificial sequence
  DNA replication origin
tacaggcgtgagccaccgcgcccggccggtgatgactcttaacgagcatgctgccttcaagcatctgtttaacaaagcacatcttgcaccgcccttaatccatttaaccctgagtggacacagcacatgtttcagagagcacagggttgggggtaaggtcacagatcaacaggatcccaaggcagaagaatttttctcagtacagaacaaaatgaaaagtctccaatgtctacttctttctacacagacacggcaaccatccgatttctcaatcttttccccacctttcccccctttccactccacaaaagcgccattgtcatcatggcccgttctcaatgagctgttgggtacacctcccagacggggtggtggccgggcagaggggctcctcacttcccagtaggggcggcggggcagaggcgcccctcacctcccggacggggcggctggccgggcggggggctgacccccccacctccctcccggacggggtggctgccgggcggaggggctcctcacttcttagacggggcggttgccaggcggagggtctcctcacttctcagacggggcagctgggcagagacgctcctcacctcccagatggggtcacggccgggcagaggcgctcctcacatcccagacagggcggcagggcagaggcactccccacatctcagatgatgggcggccggacagagacgctcctcacttcctagatgggatggcggccgggcagagacgcttctcactttccagactgggcagccaggcagaggggctcctcacgtcccagacgatgggcagccaggcagagacactcctcacttcccggacggggtagcggccgggcagaggctgcactctcggcactttgggaggccaaggcaggctgctgggaggtggaggttgtagcgagccgagatcacgccactgcactccagcctgggcactattgagcactgagtgaaccagactccgtctgcaatcccgcacctcgggaggccgaggctggcggatcactcgccgttaggagctggagaccagcccggccaacacagcgaaaccccgtctccaccaaaaaaatatgaaaaccagtcaggcgtggcagcgcacgcctgcaatcgcaggcacttggcaggctgaggcaggagaatcaggcagggaggctgcagtgagccgagatggcagcagtacagtccagcttcggctcagcatcagagggagactgtggaaagagagggagagggagagggagaggctattttacttagtttcattcctgctctaaagttttgtaataaacttccactcctgctctaaaacttgcctcggtctctccttctgtcttatgccccttggtcaaattatttcctctgaggaggcaagaatcaacattgctgcagacccatacagattcgccactggtaatatactctggtgccatgtgacttgtgactcagatatgttcggctgcta

SEQ ID NO: 10144 - DNA, 800 bp, Artificial sequence
  DNA replication origin
atcgtctgggacgtgaggagcccctctgcctggctgcccagtctggaaagtgagaagcgtctctgcccggccgccatcccatctaggaagtgaggagcgtctctgtccggccgcccatcatctgagatgtggggagtgcctctgccctgccgccctgtctgggatgtgaggagcgcctctgcccggccgtgaccccatctgggaggtgaggagcgtctctgcccagctgccccgtctgagaagtgaggagaccctccgcctggcaaccgccccgtctaagaagtgaggagcccctccgcccggcagccaccccgtccgggagggaggtgggggggtcagccccccgcccggccagccgccccgtccgggaggtgaggggcgcctctgccccgccgcccctactgggaagtgaggagcccctctgcccggccaccaccccgtctgggaggtgtacccaacagctcattgagaacgggccatgatgacaatggcgcttttgtggagtggaaaggggggaaaggtggggaaaagattgagaaatcggatggttgccgtgtctgtgtagaaagaagtagacattggagacttttcattttgttctgtactgagaaaaattcttctgccttgggatcctgttgatctgtgaccttacccccaaccctgtgctctctgaaacatgtgctgtgtccactcagggttaaatggattaagggcggtgcaagatgtgctttgttaaacagatgcttgaaggcagcatgctcgttaagagtcatcaccggccgggcgcggtggctcacgcc

SEQ ID NO: 10145 - DNA, 741 bp, Artificial sequence
  DNA replication origin
caaacctgtgccccaaagatgagggcccaggaggacctcgagggccggacacaggtgctgggggctgggggtgggggctagggggggcagggggggtggggggctggagggcctgtgcaggccttcttcctggaggccagagataaacgttctgatgaacttgataagagtgactgtcccaaattgaatgtggcaactgggggatgggtggaggtgggggtgaaggagcctgcagctttgggactggctgactccaggttggggttcaggagaggcctaatctcccggccagtgacaccccaaggatctccagggggcagaggtgggaccggattggacttgtccacagtcttgagccctcttggccccctctcctgtggtctccaagacttctgacttaagggtccacttccctggctaaaatggcaggtcctgagggctctagaagctggcacagtagactcatccctgcgggaagcaatgcaaagtgggagaaaactgtggccaggccaagtggcacccgggtggatggactgttggggagggcgggaaccccgctctcagttgctgacaagccacttgggctgcctgattgattctggggcagaatggattttgcctgtccccatcacttcaccctaagctacttatctctgctgcctccagcatgaaaccaccagggacccctcgaccccgctacccacagagcctaagtttgacatgttgtacaagatcgaggac

SEQ ID NO: 10146 - DNA, 724 bp, Artificial sequence
  DNA replication origin
gccctctcttgggaaacaagaacaggtccagcgcccaggcgcagatgtgggcagggaagggcacatgtggcagaggcttgggtggcttttactgtcctagtgagagttaatacattacctctgcccgggcccccctttcgcaatccagagctgggcatctggttacagatttacttcaaacaatgcctgatatgtggagtaaagtcctcctccttggcctttgtcaagtcatcccctcttctcctcaggaactgctcaaacctgtgccccaaagatgagggcccaggaggacctcgagggccggacacaggtgctgggggctgggggtgggggctagggggggcagggggggtggggggctggagggcctgtgcaggccttcttcctggaggccagagataaacgttctgatgaacttgataagagtgactgtcccaaattgaatgtggcaactgggggatgggtggaggtgggggtgaaggagcctgcagctttgggactggctgactccaggttggggttcaggagaggcctaatctcccggccagtgacaccccaaggatctccagggggcagaggtgggaccggattggacttgtccacagtcttgagccctcttggccccctctcctgtggtctccaagacttctgacttaagggtccacttccctggctaaaatggcaggtcctgagggctctagaagctggcacagtagactcatcc

SEQ ID NO: 10147 - DNA, 3416 bp, Artificial sequence
  DNA replication origin
agagatccgcctgcctggggccctggccttgggtcgccggcccgaggtaacctcgcgagtgcgagcgcgcggccctggaggagagaacagggatgtagaggcccagcgcctggtccccgacggcgacggtcggaccagccctctaggcggcgcccgcagctcatcccagcgctcccccgtagggccagcaggggtccgatcgccccgccccggctcccctcagatgcaagccagcccgagccctgggatagcacccaaaccgaagacaccacctacggcccccgagcccgcggctgccgtccaggcgccactcccgcgggagcccctggcgttggcgggcaggacggccccagcccagccccgcgctgcctcggcgcctcccacggaccggtccccgcaaagcccctcccagggagcgcgcaggcagcccggggccgcgcccctggggaaggtcttggtggaccccgagagcggccgctactactttgtggaggcgccgcggcagcctcggctgcgggtgctcttcgaccctgagagtgggcagtacgtggaggtgttgctgccgccctcgtctcccgggccgccccaccgcgtctacacccctctggccctggggctcggcctctacccgcccgcctatgggcctatacccagcctctctctgccaccgtccccgggcccgcaggccctcggcagcccccagctaccctgggtctctgaggcagggcccctggacgggacctactacctgccggtgagcgggacccccaaccccgcacctcctctgctcctctgtgcgccgccctccagctcaggtcccacccagcccggcaagggttcattgttcccgctgtgaggccccgggccgatccccatggagttggagcccttggatgcctgggaggttctggcatccaagcccctaccctcctctccttccgtcgcctctgtctttaacccatcccagtcagtcgtcggacaggaagtgatcttcagagaatgaatctgagccccgaggctggtggagctggagtcacccaggaagtggctgcctacttcctcccccaacaaaattatgtatccctttcccaggcattcccagggcgtggtgtggtgtggtgtgtgggtgtgtgtatatgtgtatatgcgggcaagcaaatagggaaagtgaggcatccctgggcttgtccccaggagccgatcagaggaggtgctgtggctgccgtggggcagcaggaacgggagcagcaggagacagggcggggaactgtctgccctccctgatggtgggcccagctgaggtgaggctggccagtgcccctggtgaggtggcaggaaggactctggctgtcgagtctgctcttaggaagaggagctgagctttggccctggaggttactggggggaaagtggccagtacagcccaggccaggctggctccgagaaagagctaaggcgggggacagcaggtggaggcaaagcaaggaatacagggagggcctgggttgggggttagcctggaacttggggtgggaagatggggagcctggccctcagagctgagctgactcatttttgggccaggggtggggcttcagtcccccaccccctacatcgggagtaggtgaaatggtcatcaggaagctctgagaagagggagggttgggctcttgtcccacaggagcctcttgacccctctgtgtggccagaaggtgggttagggccagcagtagaagcgatacccctggtggagtatccagagggatctgaagctcttggcaggttccactccccagtaacagatgtggcaacaatggccagagaggggctggccctacagaccagtcacagcaagggacagggcccagagcctgcacttcagttgccctgagattccaggagcctctgagggagatgaggggggtctgcatgaggtgggaggtggtgtgcgtgggggtctgtatatagttctgaaccggaaatggctggcccttgccagcctggtgtgtgatgtgatgagtttgggaaggacagtttccatgagaagcagtggcagggatggggatggatgccttcgttgttccaggcctgtcagggggcccaggtccctagcagtccctgccctctgccctggactggaagctgactaggagagctacgaatcagaacaactggccattttctagctggagatgccagctccgatggcatggagggccctggggccaccccaggtgtctttacctcatcctggtgtgtaataaatcactgaccatggagccatcatggctgaaataactggtgtgaggtgcctgatttcctgccacagcctctcaacaccctccacagtgcccttccacgcctgggtatggcctgggtggaggggacctcagggctagggaaggagaccatgtgtgtcttggaaacactgtagcatccctgtctccctgaacttgcctcccaggaggctggcagccacacctcattccttctggtggttgagtggccagggagccttggggtcaatcaggcttgggtttctcagcatggcccctctagctatgtggccttggatttgtcacctctctctgagcctttgtgtcggaagaggcagaataaacatgacagtctcatttctcagaaaggtcaatgaaacaaaaaaagatgacggcagccaaccaactcttcccacaaggcactcagcacagtgcctgccacttggccagatcacaggatgtgggcagtatcggcccctatgtgttcctgcctaggcccagcccctctccttgcctcagtgctccctatctgtgaaatggagctgagatggctggagccagggtccagctagaggacaatgcccacgtggcatcttcggggccctggaggagggagtgggaggaggatgggaggggtgaggtgtcagttccccattggtctaggccaggtgttctgtggcggtccccacaccacacaagcacacacacatctgcacctcaaccacagactacacttgctgaactggctcctggggccatgaggctgtcactgccactgctgctgctgctgctgggagcctgggccatcccagggggcctcggggacagggcgccactcacagccacagccccacaactggatgatgaggagatgtactcagcccacatgcccgctcacctgcgctgtgatgcctgcagagctgtggcttaccaggtgagtccttcaccactgtcaccctgccctgctcacaccccttctcaagccagacccctccacccacctcacattccaccaccggcctttgatccccaatccctaccactgggcatcaagccacagatgcagcctttcatatattccatgcctcagtttacccatctgcctgcctaacagcagacaatctgggagacctcctcagt

SEQ ID NO: 10148 - DNA, 1611 bp, Artificial sequence
  DNA replication origin
ccttccccaggggcgcggccccgggctgcctgcgcgctccctgggaggggctttgcggggaccggtccgtgggaggcgccgaggcagcgcggggctgggctggggccgtcctgcccgccaacgccaggggctcccgcgggagtggcgcctggacggcagccgcgggctcgggggccgtaggtggtgtcttcggtttgggtgctatcccagggctcgggctggcttgcatctgaggggagccggggcggggcgatcggacccctgctggccctacgggggagcgctgggatgagctgcgggcgccgcctagagggctggtccgaccgtcgccgtcggggaccaggcgctgggcctctacatccctgttctctcctccagggccgcgcgctcgcactcgcgaggttacctcgggccggcgacccaaggccagggccccaggcaggcggatctctgtgcgcttgaagggcttcgccgtgctgttctctgccctccgccgcaggaccccgttgggctgtgaggcgtcccgggcgaccgtgtcgaaggacggttcaggaggctcgtaggggtgcggcaccaccggtagaaaatccttgatgaaaacggaagtgtagtgagccggggcggggggccccagtgctggcggctcttgcgtcttggattcgccgccctcctccccgcaggggtcggcaggaggcgcaggcagcccagagccttgtgctcctgccgggaagcctggcgcgtacgtggtcttcaccaacttgcgcacgtctcgaggccgcggaatggccatgcgcgggcgtcccgaggccgcctctccaggacccaagacttccgggcacttatccgcgtccagggtgcccacagggtggctgccgggcggctcgggtgctgctacctctggggactgctgactccctccaaaggcaagatctgaaatttcccgcgtggatggactctgcatctctgttggttctggagtgccgggtgcggacggtgtaggcggtgccaactcctcctgagttaacccattctgagcttcctgagtaaatgctatcgatgagcccggccccatgggatcccatgtctcttggggagatgggccccaagttccaataggacgatctggagcctcccacgggaagaaggccggcggggacgggctgctacgtggctccaccgcatccgcgactgccgaatgtggaatctcccacagggaaggggcttcgagggacgggctcctttccccagcaacacactgattccactgggaaaggatcggaggggaagggcttctcctgctgacagtttcctcgacggcaggattttgattttcccactcggaggaggcttcagggaacaatgggctactcaccctccgagtagtccgatcccacggggacaggttctggggcgacgggcagcgaggaccccgtacagccccatttggagtctgccgtggcggggacgggctccttggcctcacagccctactcggaacctccgaggggatcctacactcaaaaggcggactccgtgccctctgaacagttcgatccggcgcctctcgcgggaaccgagtcttccgcgcctcctggatcttctcctctgact

SEQ ID NO: 10149 - DNA, 1374 bp, Artificial sequence
  DNA replication origin
aatattccaccccactcccagtgtcctggtaaatttaacttcccaacttgactacagggccggaagccctgaccagaaacttcaaagacagtgggttccagaaccacaaggaatttgggaagtcagtttccatcacatgacaataatgttatacctgcaaattgcatttgcacctgctgacacctcccccaaacgggagcttcacaatgggaggaagagaaaagacaatgctgtgtgtggttttaaggtggagaaacaatctgggaagggacctcaatttgcacaagttgcacaggcagggctggatgggatggagcagcaacattttttcagaagccatcaccgagtgccccctaggtgatcatggggacacacccaggcagaggacccacttcaggggtcagattagcccagtgtagcctgtcctgggtcggtttgaggccaagtgcacaggagggggcagtgctcttgctccagggccagctggggcctgagtcatagcaggaccttgaagccagaagtttaagggcaagtggtgcccacagttgtaagacaatgacaggtggtggttgcctccccaccagcgcctgtccccagggcaggtcctaaggctgtgggggctgaagttagggccttgtgaatacctgggggagcacagggctgttctggccgcaggggcctttggagctgggaccacaagctacttcgaagcttcctgtaggaccccacatcggtatccagggcctgttctaggtgctgaggcagactgaaagctagagctgtccactccagctccttccaataggtcccaccgagggcagtgggtccagccagtggtagtaccttcctgaggccctgaggagtcagggaagcctctagcggtgctcctcactctactgaaggggatcaggaagagtgtaactggggtcaagaaaggtggtgtgtgcacccttaagagctctagctgaggccagcaatggcaatgggggtcccctgcagtgatgctaaggcacccggggctgaggggaagatgaaattgctggccctacctgagtctcctggcctgaaggtctggttcacccgctcacagcctgaactgcacacagcagtgcctgacttcaggcggatccctgctgggcttcagtttcctcacctgtgataggtggagttgggcctaactcctggctccaaggctttgaaagttgggcctgccattccctcacctgcctgtcagccaaagcttggagcccaccccaggtactccggcttgtgcctgagaagggggttagttgggcatgggggctggacagggaagggtgcagggcccaggtcttttctgctgccggcgccgctggctcaggagtggacgcggcc

SEQ ID NO: 10150 - DNA, 2172 bp, Artificial sequence
  DNA replication origin
  misc_feature (2172)..(2172): n is a, c, g, or t
aaaaaaaggctgggcatggtggctcatgcctgtaatcccagcgctttgggaggctgaggtgggtggatcacaaggtcaggagttcgagaccagcctggtcaacatggtgaaaccctgtctctactaaaaatacaaaaattagttgggtgtggtggctcatgcctgtagtcccagctactcgggaggctgaggcaggagaatcacttgaacctgggaggcggaggttgcagtgagctgagattgtaccactgcactccagcccaggcaacagagcaagactccatgtcaaaaaaaaaaaaaagtaatatataccttgaataattgctataaagatttgagataatattataaaatatataccattgtgttcggcacataagaagtattcaataagtggttcctaagcttagagataatgtctttttatattagaatctgaattcctacacttttcatgatggggttatagagggttagccctggtgttgaagagtttcagtccatctcctgtcatttgattgttccctttcaggtctgcccctgtcctgcccaccccagccctggcctcagaggagcctgtcaggattgtatgtgtgtggtatgtgtgtgtggtgtgaggggtgtatatgtgtggtatggggtatgtggtgtgaggtgttgtgtgtgtgtgtgtggtgtaatgcatgtgtggtgtgtgtgtatgtggtgtggggtgtgtgtggtatggggtgtgtgtgtggtatggggtgtgtggggtgtgtgtgtatggtatgggagtgttatgtgtcatgtatgtgatgtgtgggggagtgtgtatgtgtggtgtgtgtggtgtaaggtgtatatgttgtgtgtatgtataatatggggtacatatgtgttttttatgtggtgtgtgggtttgtggtgtgtgtgtggtttggttgggtgtgtggtgtgtgtgtagtatgaggtatgtgtgtagtatgaggtacggggtgtctgtgtgtgatgtgtgtggtttgggtgggtgtgtggtgtgagtgtgtatagtatgaagtgtgtggtgtgtgtgtagtatagggtacggggtgtgtgtgtgtggtgtggtgtgtgtgtggtgtctgtgtgtatggtatggggggatgtgtgtggtgtgtgggtgtgtggtgtatgtatgttgtttgggtggatatgttgggtatggggtgtggggtgtgtgatgtgggtatgcgtggtgtgtttgtggtgtgtgtgtggtttgggtgggtgtgtggggtatgtgtgtggggagggtgggtgtgtatagtatgggtatgagggtgggtatggtgtgggtgggtgtgtagggtatagggtatggggtgcatgtgtagtataggatgtatgtatgtcgtgtgtgtgtagtatagggtgtggggtgtgtgtgtttgtgctgtggatgtgtggtgtatggggcatgttgtgtgtttatgatgtatgtgggatgtgtgtatagtatagggtgtatgtgtggtgcatggggtgtatgtggtgtgtgggtgtgtgtgtagtgtggggtatgggatatgttgtgtgtttgtggtgtatgtgggggtgtgtgtatagtatgggatgtgtgtggtatgtggatgtgcatggggtgtgtgtgtatagtatggggtgtgtgtggtatgtggatgtgcgtggggtgtgtgtgtagtatatgggtatgtgtgagtagtgtggggtgtgggatgtgtggtgtgtggtgtgtaggggtgtgtgtgtatgatgtgtggggtgtgtgggtatatgtgtatagtgtggggtgtggggtgtgtggtaggtttgtggtgtgtgtgtgtgtatagtatggggtgtgtgtgtgtgatatgtgtgtggggtgtggtgtgtgtgatgtgaggcctgtgctgtatttgaggtgtgtgtgtggaggggtgtatagtatggggtgtgtgtggttcgtggggtgtgtgtggtaggtgggtatgtgtgtgtagtgtggggtgtggagtgtgtggtgtgtttgtgatgtgtgtggggaggtatgtatagtatggagtgtgtgtggtgtgtgacgtgtggggtgtgtgtggtgtgtgggtgtgtggggggtgtggggcatgtgtatagtatgggttgtgtgtatggtgtgtgatgtgtggggtgtgtgtggtgtatgcatagtgn

SEQ ID NO: 10151 - DNA, 1377 bp, Artificial sequence
  DNA replication origin
  misc_feature (1)..(502): n is a, c, g, or t
nnnnnnnnnnnnnnnnnnnnnnnnnnnnnnnnnnnnnnnnnnnnnnnnnnnnnnnnnnnnnnnnnnnnnnnnnnnnnnnnnnnnnnnnnnnnnnnnnnnnnnnnnnnnnnnnnnnnnnnnnnnnnnnnnnnnnnnnnnnnnnnnnnnnnnnnnnnnnnnnnnnnnnnnnnnnnnnnnnnnnnnnnnnnnnnnnnnnnnnnnnnnnnnnnnnnnnnnnnnnnnnnnnnnnnnnnnnnnnnnnnnnnnnnnnnnnnnnnnnnnnnnnnnnnnnnnnnnnnnnnnnnnnnnnnnnnnnnnnnnnnnnnnnnnnnnnnnnnnnnnnnnnnnnnnnnnnnnnnnnnnnnnnnnnnnnnnnnnnnnnnnnnnnnnnnnnnnnnnnnnnnnnnnnnnnnnnnnnnnnnnnnnnnnnnnnnnnnnnnnnnnnnnnnnnnnnnnnnnnnnnnnnnnnnnnnnnnnnnnnnnnnnnnnnnnnnnnnnnnnnnnnnnnnnnnnnnnnnnnnnngtgtggggcatgtgtatagtatgggttgtgtgtatggtgtgtgatgtgtggggtgtgtgtggtgtatgcatagtgtggggtgtggggagtgtggtgtgtttgtggtgtgtgtgtgtggtgtgtatagtacagggtgtgtgtggtgtgtgatgtgtgggggatgtgtggtgtgtgggtatgtgtgtgtagtgtgggaggtgcagtgtgtggtgtgtttgaggtgtgtgtgagggtggtgtgtacagtataaggtgtgtggtgtgtggtatgtggggtgtgtatgagatgtgtgggtgtgtgtgtagtgtgggatgtggggcatgtggtatgtttgaggtgtgttggggtgtgtgtatagtatgggatatgtgtggtgtgtggagtggtggtgtgtgtgtgtagtggggtgtgtggtgtgtttgaggtatgtgtggggtgtgtgtgtgatgtgtgatgtgtggggtgtgtggtgtgtctgatgagtggggtgtgtgtgtgtgtggtgtgtgggtatgtgtctgtagtggggtgtggggtgtgtggtgtatttgaggtgtgtgggagtgtgtgtgtgggggtcgtgtggtgtgtgagatgtgcgtctagtggggtgtgtggtatgtggtgtgtttgaggtgtgtgggaggcgtgtataatatgggggttgtgtgtgatgtgtgatgtatgtaatgtgtgtggtgtgtggtgtgtgggtgtgtgtagtgaagtgtagggtgtgtggtgggtttgaggtgtgtgtgggtgtgtgtagtgaggtgtagggtgtgtggtgggtttgaggtgtgtgggggtgtgtgtgtgatgtgtgaaggtgtatggtgtgtggtgtgtgggtgtgtgggtgtggaaggcag

SEQ ID NO: 10152 - DNA, 861 bp, Artificial sequence
  DNA replication origin
ttggtcctggatcctcttcctgtcatcatcctgttggtctgagagagggtaggggtcagggaagggctctgagacgatgagaagacaggacggacaaccagacgccatgcccgtctggttgagggggaggatggcagcgctctcgagggtgaagcacaggtttctgactcgggctcctgggaggagcgggcaaaggcgtggagatgtgagccacaggcgccagccagtggtcccaggtccgaggcaggacctgccgcccgagaggcgtgggagccgcacggagcagccgccgcctgcctctcttgtcctactctggcgcgagtccatccgggcggcgcggctgctgagagcagcgccctctagcggaggccgggccttggccccgggccggatgaagtcaccggccggaggcatgccgggaactgcgccgccgcggcagtcttcacccgctgggggtggtctgggcgcagctgcggcctggcctgtagggtctctgtccaaactgcgagccagtgcacgcgcgagtgtagggcctcctgacacatcaccgggagctctgcggtaccttctcctgcctcccgcggccacggtggtctcagaccccttagatcccacattggatcccttccacctgtcctcacactcctccggcttctcttaccacattttggcccttcgacaccctcgtgctccccgcctcatgcctcatatctccgggccagtatttcatcgggtcacctccacatcccactcgcttctctctgtcccaactgcctgtgtcttcattcatgccaacatcgactccaggctggatggccacaccagttaccaccagtccggctcttcaacccattttttgcc

SEQ ID NO: 10153 - DNA, 1819 bp, Artificial sequence
  DNA replication origin
ccgccgctgcactgcgggagcccctctctgggctagctgaggccggagccagctccctctgcttgcggggaggtgtggagggagaggcccaggcaggaactggggctgcgcgcatggcactcgagggccagcgcgagttccgggtgcgcggggtcttggcggccccgcactccgagcggccggctggcgccgtgggcccaggaagtgaggggcttagcaccctggccagccgctgtggagggtgcactgggtcccccagcactgcaggcccacctgctctgcgctcaaattcttgccgggcctcagcacctgcccgcagggcagggctagggatctgcagcccgccatgcctgaacaccctccccctacaccgtgagctcgcggggctggagactccccgacggggcgccaccccctgctccgcggcgccccatcccatcgaccgcccaagggctgaggagtgcagctgcgcagagcgggactagcgggcaactccgccccggcccagcacaggatccactaggcgaagccagctgggctcctgagttgggtggggacttggagaacttttatgtctagctggaggagtgtacatgcgccaatcagcactctgtgtctagctcagggttcatggatgcagcaatcagcactctatctagctaatctggtggggacttggagaaactttatgtctagctaaaggattgtaaatacaccaattagcactctgtgtctagctcaaggtttgtaaacacactaatcagcaccctgtgtctagctcaaggtttgtaaatgcaccaatcagtgctctgtgtctaatctagtggggacttggagaacctttatgtctagctaaaggattgtaaatacaccaatcagcattctgtgtctagctcaaggtttgtaaacacaccagtcagcagtctgtgtctagctcaaggtttgtaaacgcatcaatcagcaccctgtgtctagctcaaggtttgtaaatgcaccaatcagtgctctgtgtctagttaatctagtggggacttggagaacttttacctcaggctggaggattgtaaatacagcaatcaacactctgcgtctagctcagggattgtaaatgcaccaatcagcaccctgtcaaaacagaccaatcagctgtctgtaaaatggaccaatcagcgctctgtaaaatggaccaatcagctctctgcaaatgggccaatcagcaggatgtgggtggggtcagaaaagggaataaaagcaggctgcctgcgctagtagtggcaactggctcaggttctcttccacgctcacgctatgggagttttgtttttttgatctttgagataacttgctgctgctcattctttgggtacacactgagtttatgagctgtaacactcttcgtgaagctctgcagcctcaatcctgaggccaccgagaccatgaacccatgggaggaatgagtaactccagacgcgctgccttaagaggtgtaatactcactgtgaaagtctgcagcttcactcctgaagccagtgagaccacaaatccaccagaaggaagaaactccaaacacgtctgaacatcagaaagaacaaactccggacataccatctttaagaactgtagcactcatcatgagagtctggggcttcattcttcaagtcagtgagaccaagaacccaccaattccagatacaccacagtatcattgtactacacggctctcagcaccactgaccttggtatgggaaaaagcacaagtgtgcataccatcttattctccttttagaatatttcaccggcgggggaggggggaggtcac

SEQ ID NO: 10154 - DNA, 1141 bp, Artificial sequence
  DNA replication origin
agggccggggcccactcagctcctgggcctgccgcagcggtcaccgcatcacccggcggcggcccctttattcgccgccgccctagccgccaccgccgccgccgccgtagctgcctcttcctcccaggatcagcgccgcctcctaaaccgccgcagatccctccgccagaaagcaaaagcccaagcctcgggctcggccggcctctcttggtcggacagccggagggattgcctgtcttcctccctgctgcaggtggaccgagggacgcgcgggcgggcgggctgcgccgccggggtggggccgtcggagcacggggtgggcccgaccgaggggcaggtcgggaggcgcggggattggcgggccaggggagggagggccgagccgcgccggcggcggagggatacgggccgcccctgtgagtaagctacgcaccgccgtcgccgccacggccccggagggcgtgacgctgcgaagccctgggcggagatctcgcgagatctagagcgcgagttctgcaggctccagcgccgcgaccgttgacttcattgctgatggaaacccacgcgcgtgtcacaaaagatcaataaatattaaaaggcgaatgttgtccagatctcacgaccgtccccgtactagtcccgggaggaggcacttaggcccactgcagcgctcctgaaggaggaagggacttggccaaggtcacagagctcttctgaagtcctgggacttagcacatctctttccagaggccgcgtggctacagctcgggcacctgccacgagggagatgtctcatagccgctcgggttgcagtgagattggccttccggaccaaggccccagatggagaggatttgaatgttgtgttctcagccactggcatgtatgtgtgccttcgaggtgtccagactctgctcagcttagtgaattgcaaattgttacaagcaagcactgtaccagctgcgtcagaaaaaaaatcacagtgtgtgccccaaatagttaaaaccaacggctgggcgcggtgactcacccctgtaatctcagcactttgggaggctgaggctggcgcatcacctgaggtcaagagttcgagaccagcctggccaacatggtgaaaccccatctctactaaaaatacaaa

SEQ ID NO: 10155 - DNA, 1111 bp, Artificial sequence
  DNA replication origin
gccctcagcccgtcccgccggacccgctttcctcaactctccatcttctcctgccgaccgagatcgccgaggcggcctcaggctccctagccccttccccgtcccttccccgcccccgtccccgccccgggggccgccgccacccgcctcccaccatggctctgaagagaatccacaaggtaagcggccggaggtcggctgcgctgctggccagctgagcaggctgcggcctgcacttcccgccgtagtctccgtcgggctcgcggcctccttggatcttgctgccggtgctggcccctcggggcggcctccataccccactcccagtgatggcgcccgtggaggccccggcgcgcagcccgcgcttaggccggaggtgctctcgcggcctcagcgttcctccccggctgcccttccaggcccgcatggtgtggactcttagggcttctctccagtctgggactgccgctgcacttgagggccattgtcgggccaggatggcggggttggggccgaggggggcgctggggcgttgggcggccccttcgacagaggtcgaaagggcttctcgccccatttctgttccctcctcccacacctgccctagctccctccacaaaaccgcctgagctcgggctgacagaggaagccgttttgcccgatccacaagtatatcctgagttcacttacctcttgggtggcagcacacatcggtccaccctgcttgtccagaaactgttaagagttggaagttcagaagaaaaaaaaaaggtgacttaatgagggaggagggaagtagagggagaatcattttattccttgaggttgctgtatgtagttagaaactaacacttccgttttgcaggattggatctaatagaaaagctgtacattggcaaaggtagaggtagaaacctgaacattgaaaaccaccagagaaattatacaaaagttcctttcacagcctcttcgcaaaatggacttgacgctattaggtgatatgtttaccgagactcttaactgggaaggggttttactagattttgtattaaaaaggatttctttgctctttaaagtgaagggttatttagttatcaataaggaggttttc

SEQ ID NO: 10156 - DNA, 808 bp, Artificial sequence
  DNA replication origin
gcgcacccgacacagcgtccctccccatacccggcccagcttaaactcctgtggtgacaacatccaccagcgctgggaagggggcttgggtgcagaggcctagggcgggcaggccggcagactggggtcgggccacgccatcgggggcttcctcgcgcggtgtgggcggtccagcccgagctccgggcgatccaggccggctcttcgaggcgcccgcgctggcggcagcccagggagtgtgtggaaatgacaccgccagggcggcggagatcccccctcctgacattggctggaaagtggagcagctcgtcagggacaatcaatggcgatcgatcgccgcgcggcgcgggcggacggtgcgggggaggggcggcggggccggcaggggtgggggcacccgcggccgaggtcaaacaacacactgacccgcaaaggggcacagcggctgaggggggggggggtgtcacacggacacacaatttgtgaaaggaagcaccaccataggccacccacaccacaaaggaggcacgctcaccacacggagtgacaccacaacagtctctgacacaagtcagaacaggacacaacagggtcagacacacctaatgatacaacatacagtcacactattcacaaccagttcaccataccacaacagatgtccctacactagacacctacaatatcaccgggacacaaaatgagtcatatagtagctggtctcaaccacacagcagtagggagttacatactttgggtgcacaacagtcacacaacaaagcaaaaaagtcatatagtcatatcatcc

SEQ ID NO: 10157 - DNA, 1204 bp, Artificial sequence
  DNA replication origin
tcttggcatagtagttaagggagaccacttctcagcattcggaaggaactggttgggagcaggtgtccacgatgtctggggaggggtcacttcgtgtggtcttggatatcaggagtggcagagaggcaacacattccagatgagctctgccctttgacacctccccccaccccaccccggctgggtcaaggccccaaggccacatatagaaggcgtggaaggtgggcaccagctgctgctgccaggagatccatgctccataagccctcgcgccagcctcggagacagccaggctgcgcagagcagaggagaggaagcagcgaggtgggagacagtttcgcttctcccaccgaggccgcgcctgtggctgcaggcgcccggatcgccacagttaactccctgttatctgggccccaatcgatctcaggctgtaacgtttaaccctaggctgacttccccaaccgccctccccctctccctcccctgcttgggtctggggactgcgttttcttcgcctcgcagaggaaggtcggccttgcacaaatccgcccccacgaatcccaaagaattggagaaaacttccactttgggattatatgcagttgggattatatgagcccggggcttgcaccatgggtacgtgaggtgaagacatctgcagcagcaggattaattagcctaagatgggcatatggaggccactgatggagtgaaagcgggatatgcgggcccaactctgtccccactgggcgcctactctggcaaggctgagttttccttctgtctttcaatcagtacctattgagcgctgctgttccaagcattgtttcgggttttgagtgcgtaggccatggtctcagggcaccaaatgtacgtagtcgttttagccccgggactcaagagttgaggctgatgcctgcctgagagataaaatatcctttctcggatcagtttcctcacctgagaaatgggaacgggaatctccgccccttttctcccggggccctagtgcccactgaatccattaaggagctcttggaagggtggggtcttggaacacgcgtctacctcccaggaccctcgactaggaatctctggcccgccgcgcacctgagctggggggcgcggccaaattctccctcccggtcctcgaagcttctggccccgctctagagggggcagaaagatagcagatttccccgga

SEQ ID NO: 10158 - DNA, 1150 bp, Artificial sequence
  DNA replication origin
gggtctgggacggcggcttgggcgccgtggagtggggctgggacgctccttgcggggtgccgcccccctcccccccactactccagttcgcgggcgctggggcagcgggcgcccggggtcctcacctcttggcgttgggcgggcgctcagcctgcgggggcggctgcttgtagatctctggcgcgcactccccccatcagaccccgctcgcagccctgtgttgaggggcgacgttaactgctctgggcgccctcgaccacgcgtggctgagcctcccccaccacttggaagaagcggcggctacttctgcatttttcctccggctcctcgcccccgctgcccgcggggtgcccggcgggctgatgaagtttgaccttttttttccatcaaagtatctcccccaccaccacggtgccccgcggcccctccctccctcctttcccagccttggggagtcttttgagctgtctcccgagccccgcgtgggccacgcagcgtgcagagcctgggagggagaatgggggtgttcctctagctgcggaactgtggggggcgtacgtccccggcgcctgccacgctgcactggccccaaatttacccatgaagttcggcccgacccccctccccttcgcttccccggagcggagtgaggggctgaaccgccgcgagaggaatgtgttaattttctggctgggggaagttgtcctcgcccggaatgggctgctttccggcggggagcgcggggtgcgcctggctttgtttatttgtaggatcgacggaaagcgagtgaccccggtttttaaatggggggccaccttcgggacctgtcagaagagctgaaacgcccaaagtgggagcaagatctctttttgttcttttttcccccccgggaatctgaaggggtgcgcggagttgggctggtgcctcgggctgcaaggaagcaccagtaaatttggggggttctgtagtgactcattcggaaagacccgctccctgaagtctcccgcgacgggggtctgaaggtttggcaaccgcgccctcctttgccccctggactttgggtggtctgagagtcgcgccttcggatggggggggagctaagggggtgaccagcggaccagactcctgacccccacctttcctcgcgcgg

SEQ ID NO: 10159 - DNA, 1047 bp, Artificial sequence
  DNA replication origin
tctgcagctgtcacccccctcccagaacggaaattgtcctctccttggggaggagggagagggggtgatggtttgatttttgccctgggaagagatgggaacagctgaaggagattggcctccgagttcccagccagcccccggaacttgggtagaacccccctacccctcatcctcgcagtagctgggtctctcccagggacgcccctagtcagccttggcctccctctccatgccacctccctttccaaggtgagcctctgcagaagacagacccttggctggctggctgtcgggttggtgccttatttatgtgtgtatctggtcctggccgttttccccgctcagcaggtgaccctggccagggcctcctatctctcccgcgacagagcctgttgacttacccgagggccagtggcctcgtctttatcacgtgaggcctggaatgtccacccagctgggctaggctgggctgggctgggctggggtgggtgggggaaggggaggggaggattctgcatccagggcaccggccagcacaggcccatgttccatgggttcccactgtgaccctcaactcttgctgcccctttcctgctctgcctgcctcctactcatttggcacatgtgaaactgagacccataggagtgtgggggcaggcttgtatctgggtgaagaaacaagtccaggggaatgaaataccctgccttcttcaggactgactgcaccttgttgtttatgggaggatggagtggagggagtcttgctaggagggagagagggatgtgggctgggctgactttccaggttgcaggatagggtggaggaatgagggaatacgggtgagccagacccaagcctgggttcctagagcccctgtctggtggcttgatcatttagtccgaattaacaagcatgatgctctggggcatgccctaattgaacaagaatgggggggttcacacattgttattacgttactattgcccactctttatatgttattcatttgttggcccaatatgtttgtattgagcacctactgt

SEQ ID NO: 10160 - DNA, 978 bp, Artificial sequence
  DNA replication origin
taggggttgccccacaggaacccaggcccccagtgcccgaacattacgcccgtactggcatggcacacaagtgttcctgctggcaggctgggcacgtctgaggaggtcagaaaaggtcacaggcaagggagggagtgctgggcccaagggcgatgtagggtctgccagacagaggagggcgggtacagggctccccgggggccaccaggcaggcctggctctgccctgctggggccggcagctggaggggagtaaatatagctggggcgtcccagccacattcctgggaggccagtgaggcccgcctgcccgctgctctaagcagagcgcagcagccagggcccagagccgccactgccctcttcccaaacaaacagaaaaataaataaaaccagctctcacggccggccggcacagctggtgggggagggggcaggaaggggtggacagtggttggggggtggacaggcaggcggaccagttgccgcggtttctgttccactgggaaggaggaggccaacaaaagagggaaatggaggaaaagggcagggagatggtcagagatgtcagcgaaggggagagaatcccgaagagatgaagggtgtcacaaggagaggtgtggggaggtaggtcaggagggatagggaaagtgtcaggggcaggcacagtgggggacagttaggagaaggcagaggcagcctctgggtcagtaattcagcggcagggatgcccaggggggcggcggggggtggcaggcagagacaaagggggctgtgtgggctggggtagggggccggcttgaagggccatgaaatattgaagagctaggccagtgagtgacaaaggtcataggaagcaggagactagccagggagcaatggggaaccctgaggcggagggctgccccacctctggcctgtctctccaccacctccatcacagccagtctccccagctctcctcctgcgatggagggac

SEQ ID NO: 10161 - DNA, 1183 bp, Artificial sequence
  DNA replication origin
tatcagtcatcccccagccttctccgctccgcctgggataagcatatctctcccgagactgaagagagcctccaagccaggtaccccggcatggcccagagcctactcagacctgcacgccacgatggggttcagggatagggcgtcctgggctcgtctgggttaagccaggcgagcagagctggctcccgccccgagaaacgcggccagctctggggcacaggccccagaacggcaggaacagccgccatcacctcgggcctggagcgggcagcgggcctggagcgggcagtgggcggcgcgggaggtagccgggcctaattagtcggcctgggacccgggcgggcgccggggcggcagacgcggccgccagagccgcgcaggcacgtccgcgtccggctgggaggcggcagggagccgggaggcgccctgagccgcggcgggacgggcagcctgggaaggcctgggccaaggagattccgcaccgagaaggctggcctcccctcattccacggtgccaccaggcgcagcaattagaggctttcaaagtttgtccttaattggtttcatttttgcctcataaatgattcatggccccagaggtctgggaggcggagggagtggcaggggaaatttggggaggtttttgcctcgggccaggccccctacctgaggttggggagggtgccgcaggcccagcccaggaagggatgagaggggctgggaggcctcgggcaggtgggaccctgcagcaaaaattaaaacccaggccctctccttggagcgctgactaattaggaactgcaacttcttttcagcacaccagagctctgcatccaggcctggagccaccgcagctgctggggccctgggagcatgaataataatgtaatgataacaaaataacagtgtcagtagtaataataaggatggcgagaacaacatatgcgtgatctctttcagccacccctgctcccccaaacactaagatctgttttacagatgaagaaactgaagctcataggcctgccctctgaccctcagtctgatgccacaaccccttaacccccaaacccccaagctcttaagagcacaggactgactattcaccctccaggaatagtgccaggagggtcaggagctgcagggcctaaggaagcctaggaatggtcctgaggcctga

SEQ ID NO: 10162 - DNA, 1731 bp, Artificial sequence
  DNA replication origin
ggggccatgaatcatttatgaggcaaaaatgaaaccaattaaggacaaactttgaaagcctctaattgctgcgcctggtggcaccgtggaatgaggggaggccagccttctcggtgcggaatctccttggcccaggccttcccaggctgcccgtcccgccgcggctcagggcgcctcccggctccctgccgcctcccagccggacgcggacgtgcctgcgcggctctggcggccgcgtctgccgccccggcgcccgcccgggtcccaggccgactaattaggcccggctacctcccgcgccgcccactgcccgctccaggcccgctgcccgctccaggcccgaggtgatggcggctgttcctgccgttctggggcctgtgccccagagctggccgcgtttctcggggcgggagccagctctgctcgcctggcttaacccagacgagcccaggacgccctatccctgaaccccatcgtggcgtgcaggtctgagtaggctctgggccatgccggggtacctggcttggaggctctcttcagtctcgggagagatatgcttatcccaggcggagcggagaaggctgggggatgactgatagggggagtcgggaggggatgttgagccctgaggtgttgcactgagcacggatccagttcctcttggctttgccacaaacacagtgaccttatgtagagtccttagcctcggtttccccgtttgtaaaccatcagcaccagcccattttctcctgaatttgggatttagggagctgggctttgtatacccctcccagtctcctctcttggggggttgctgagggggtggaggtaatgtctggacctagcagggcctgccttactgccatgagccctggatgccagtggccagcctgctcgctgtgctgagggccaggcaggccctgggcactgaggcacgttgtttgctgaaaccaaatttctgtgcttgtgtttttccataattatattagcaggtgggatttttcctcggggaagcagtgggagggggagcgccatggcagtgtccccgcccgctctaagcgtgagctcacactcagctctgcccgcctgccgtaatgattttttaattatgcagccagtgctcggaattgctaatccccctccagccctgcatcccctcctgcaactcacaccccagcccctggctgatgtccctagagtggcggtgcccagccccgtgcccatcactgagtgcttgggacaaccgccatagcgggagagagggtaggtcaggaagggccggaggggcgcccctccgccatctgcaagtgacaagacttgtggctctctttgtctcccaccctacccctagacccagcatggctcacacctgccaggacagctatggctttaaatgagtttggggagtgatcggtgcccacaccaagtgatgtggccacactcatttcatggacattagcctgtcttcccagccttgtgtgaccccaaggacacaggcacacaagtacaatttttgtcacacccatactcacgctttacttcccttctacacacacactcagccccacagccaagctacacacacacacacaatggcaggctctgcgtgcttctcacacatgtagccttacctgagggcgggggcaccctcaggagaccccactgctgcctcctgtgccctgcagtggccctgctcccactcccttgcctccagaccccccaaccccatcc

SEQ ID NO: 10163 - DNA, 1217 bp, Artificial sequence
  DNA replication origin
ggacccaggacaccttgtccaggctcagggacttgagggtctaaaagacaaggaaacagccctaaggagggaatcccagaaggcagctgggcatgcccacaggagagggaggcagagggaagggtagaggagaagtggcgaggagaccagatcagacccactgtgtagcccaaggcctgagaagaggaggtggggaggagatggggaggagtctggggaggagggctggggacgagggtggggaggacactggggagaaggactgaggaggagatggggaggagcctggggaggagggcttggggggaggtggggaggaggctggggaggaggtggggaggaggctggagaggagatggggaggaatctgcggaggaggcctggggaggagggtggggaggagtctggggaggagggctggggaggagggtggggagaaggactggggaggaggtggggaggagggcttggggggaggaggctggggaggagggtggggaggagggtggcaagaaggactgtggaggaggtggggaggagggtggcaagaaggactgtggaggaggtggggaggagggcttggggggaggtggggagaagacaggggaggaggacttgggaggaggtggggaggaggctggggaggaggactggggagtaccgaggaggaggtggggggtaatgggttcttggccccagagcatggctgcagggcccaatgcctcctgtaggctccagctaactggctgagctggaaggagggagactcatacctggggccaccttcctggcagtggaggccaccccgtgcctctaccctaaggctctggccagccccagaaggcacggagcctgcccccttctagccagcccccaccacctgtgttgccactctggtttccttaaccaacggatcctatcaaccagcatttactgagtatctactgtgtcccaggccctgtgcttttatgctttacatgtcttagcttctgaatgcctccccagaaccccgggagacagaaactatttgccaatttcagacatgaggaaatttaggctcagagaggttcaagctgtcagcctcaggtcaaacagctggtgcctagcaggggtagagcttgaacccagagcccaagtgttagtcaccctgttctgtggccacttttgcaattgacagagtggcccaaggcaggtgacctaggtacccctaaggctgc

SEQ ID NO: 10164 - DNA, 1036 bp, Artificial sequence
  DNA replication origin
cctggctcatcttctccttcagaccttaggaaaaactgatgtcctggtcccagtggacccctgaccaaaagccccatttgccctactcatggaagaggaggacatagaggggacgttctcccaggtcccagtcttctactctagggcacacagccatccccttccaggccaggaagggcctggcagtgcccaggcagcaggggaggagtcagggctgcgttgaagcggagcgggaatgagcgggagggaaagctggcgggcaggcgggcggcggcgggcgcatccatcatcggccctgccaggaacacatccagcccccaaaaagaaatactgcgcctgaggagggacaacaaagggctccgtttcatcagcaatgcggagccagcgccccgccgccccgccagccgcggtcagcccacaaaggacccctttgtccatgcaggagccggccagccgggagctgggaccaggggctgacgggcggggacagagcacggggggctgaggggggacgagtcatggaaagctggggggcagaggggcatgcgggggcagaatagagacaggtggtggggacagaatcatgagacagagaactagaggggaggatcagagaaaaggggagctggagaggaaggggcagagggtcaaggttagtggagacagtgtcatgggaagcagtgtctggggtaacagggttcagagacccagggacccaggacaccttgtccaggctcagggacttgagggtctaaaagacaaggaaacagccctaaggagggaatcccagaaggcagctgggcatgcccacaggagagggaggcagagggaagggtagaggagaagtggcgaggagaccagatcagacccactgtgtagcccaaggcctgagaagaggaggtggggaggagatggggaggagtctggggaggagggctggggacgagggtggggaggacactggggagaaggactgaggaggagatggggaggagcctggggaggagggcttggggggaggtggggaggaggctgg

SEQ ID NO: 10165 - DNA, 1075 bp, Artificial sequence
  DNA replication origin
acacgagagcacagtcttgtccccagcctcccagaacttgcgttctagtcacgttcaagtaaacaaatagttgaccatgatcacttcagagagcatgaggagccatgaggacattaaagtaggtcatgtgagactgacttcagggaggggtccatatgagctattgtcgtcaggggaggcctctgaggagaagacatctgagctggagcctgaaagaccaggaaaagccagccaagcaaaggagagggggcagagcatgccaggcagagggcacagcaggcacagaggctccaaggctgcaaaggctccaaggctgcaaagaacgtgcctcttgaaggtgaggggaaggcctttgtaagcccaaagggtatgcctatagggctgggctttgcaggccccctgaggggccagggtttatgcaaagtgccatggcagccttcagtgggttttaagctgggagatctgacttaaactttttaaagatccccctggccaccctgtagaccagtggaaaggatcaagcagggagacctgggaggaggggctgggggttgggatagcgagggaaagatggtggtggagaggttgctggcttagagatattttggcagatgaattggatgtgtgggtgaggtagagtgatagaagtttgctgaaacaggccggatttgaacctaggtcggtctttgggagcatggaggcccagcttaagaggttaaggataaagctatggagcaagaagccagggttgaaatgccagtagtgatatttactagctgagtgaccttgggtaaacatttagatcaatttcctcaagcatttgaaaagaaaaggatgggatcataatccagattgtcattgtgaggtttgagtatgatgtaaggtggaagtgtttagcattgagcctgggaggagtaggtgctctatagatgttggctgttattgtgggggttgttgctactccacccacccccacacacctgcctcttagtaccagaacagtcctcaacacacagcctggcctttccacccgacctctggctttgttttcatttgctaagggtagaagctcctc

SEQ ID NO: 10166 - DNA, 964 bp, Artificial sequence
  DNA replication origin
gtctctgggagagtcacccccaacttcctgcccccaccccgcctccacgccccggctctgagacttcctgcctccccggctccgggcagctctggctgtgggaagctggcggggcgggggcggcccgatcccctccctctgtgcactcgacggggcgctgggggtccgggaggaagtgtgcacgctggggggcacggctcagcccagaagccgccatccggtgggtcaggtgcggcctcagcctaggagggcgggcgggcaggcctgttgctaatggtgctgggacgggcgtgggggggcggggggatggtagcgggggagcctctgggagccccgtttccagggttccgggtgcggacgtggcgagctctggagactgcaaccccgcccgccgcgccccaggctggcccagtccctaagcagcccgcacgcgcctcccactagccgcctgtgcgcctaggctgaggtgctggggagctcccgaggcggaactcctagcctccgggctaagcgcgcgcccctattcaaagtctttagggccttggctttcacagccaagaagaaataactccaaccacagattttcagaaccacgtgccaaacaccatgataggcgttgaacgtattttgtatcaattaggcctcacaacaattccattttgctgatgaggaagctgaggcgcagagaggtggtgacttggccgaagtcacacagctagtaagttatcgaggcggggctgggctctgactccaaagccagcgttgttagcctcgggtggtcgcgtcttagcaagagctctgcagttgtgcgccaatataggtcgattacccagggcatccacgaatgcagagagccccttggcggcgtcttgccgcacgtgttcttgtcttggggttgggcacgtgtttcgtggtgcagtcccgcgtgttagagcccggggacagaggtatagcctagcgcact

SEQ ID NO: 10167 - DNA, 1020 bp, Artificial sequence
  DNA replication origin
ttcccatttcaccttcccaggcggcgggagcgcttcccccgcagcccagccgggaaattgccgcccctcacgccgcgtggcgccccctgaggaagctaattagcgcagcccagggagctggagacagggggacagagccccggggggccaggacccgcctcttttgtgtgggggggaagcgcctacaaattgccccccatctctccaggcgcgcgcagcccagcgcgggccggggcaccgggcgcaggcgggaggtcgcatctgcagctttggcgcaatgaatcaggcgcggccgccgccgccgccgccgccgccgagcgcgtctggcatccggagtctcccgggatcgaaaataatttgggcaaagcggtgggaggtgtgtgcgcgcgcgctccgaggggagggcgggggagcaggccgggcggggtgcgcggggcggggggaggtgccatccgacagccccgctgtggtgagaacagagttgacacttctttcctttccacttactgcggcaagtactgcgaggaagcttaaccctctcgctacttggagggttagaggcgctgggagcgccctcatgagggcgcgccgtaggggtgggttccaggtgtgcagactcctttggggtgggctattgtagcgggctggagttagccttctagctcctcagacgagcgctcctacccgacattcctcaaggcatccttctggggctttcttaatccttccgtttgccttccctgcatctggctagtgtcagcgctatggcctcagtttcctcacctatacaagagggtgggggttctatagcagcttccctgtcggtctggtgaccctggtttcgtgtcgctctctctggcttgatccctgggcctggcaggggtgagccggttagggcagccgggggtgcaggagtcagaacctgaccctccttgtctcccgccagcgctctgggcgccgttcatcaaaatggccgggttcctgtttttgcctctgaaggcagaaatgtcactgccgctg

SEQ ID NO: 10168 - DNA, 1432 bp, Artificial sequence
  DNA replication origin
catgagggcgcgccgtaggggtgggttccaggtgtgcagactcctttggggtgggctattgtagcgggctggagttagccttctagctcctcagacgagcgctcctacccgacattcctcaaggcatccttctggggctttcttaatccttccgtttgccttccctgcatctggctagtgtcagcgctatggcctcagtttcctcacctatacaagagggtgggggttctatagcagcttccctgtcggtctggtgaccctggtttcgtgtcgctctctctggcttgatccctgggcctggcaggggtgagccggttagggcagccgggggtgcaggagtcagaacctgaccctccttgtctcccgccagcgctctgggcgccgttcatcaaaatggccgggttcctgtttttgcctctgaaggcagaaatgtcactgccgctgcattaagcacgctcggcgggaactcggtttggagcgaggagctggcgctcagccctgccaagctgcctgccgcaggggggtggggatgggctggctggccagccggcctggctggggtcagtctttgtctacgaggggctcccaccttcctgtcgctctagcccgacatggcccactcccctaaaccgtgctggttgctcccaccccactcaagtttggcgggggtcgggggaggcgggggagggattaaaggggaggatctgtgcccctctggctcagggatagcagggaggtgattgggcagaactcatttcgttttccccacccccataattggcaacacctctggaattcatggatcgtctccccattaatgttgcccatttgatgaggaaggaatggtagccaggcctcagggcatcctcagtcttctgacctgaagtttccccagaagggcttgggggagagtgtgcatttcaccttttcctagcttctttctggccaagggatcccaccaccccaggaattctcaaatcctggtgcacagcagaccacttgcccttgtgagcacgcagatgtgaggaggagggggcaggccagtgtggagagtctgatttagtgggtctggagtggtcctgtcatctgcacacctcacgagacccgagggaaggctgccaccctcactgagaggcatattgggagtcccacagaaatcggaggtgatggagtctagcaagtcactgaacaatgggagattgagagagggatcactcagtaaggtaggaacttggtggttgagagtgtgggttctggactcaggaggaccaagcttaaatcctggctctgccactaattgactgcatgctggagggcagatgacccaaactgagccttggtttcctcaattgtaaaatgggggtaacactgatggtccctaaccccaccaaaacaatgtgtggcttctatgggacagtgcatggaaagtgct

SEQ ID NO: 10169 - DNA, 780 bp, Artificial sequence
  DNA replication origin
cccaacagaagtcccgaggatccgcagggggccactgacacccacccctatgtattcaccccccccaacataccccagggctcctagaaatcaggtgactgctcccttctctctttatttattctctgttttttcccttttcaggagacgataattattcagatcatcgcggtgatttactcggcaatcagagccgctcgatgcggtggccgcggagccgagacagacgagcattgcctaggaggacgggccgggggctcagcgcccctccctcccacctgcccggcctttgttctcttcgaggtctgcacccgcgctgcctggcgggcagtggaggcgcccacccgcgcggacatggcagcaagctcggggtcttgggaatgagtgtgcacatgagttcgcccgggggaggggagtttgggggctcgtgtgttgctgggtgctggcttgaaaatgatggagtacctgtgtgcatgtttgggggtggtagtggtggtggttgggagtgtactaatgcacgagcattgcggtcaggtgtgtaattggaatgtgtgcacctgtgtgattaccgggggcctagggtacatctgtctccacaggcttgttcagaagtgcaatgggcaggtgcccaaatatgtgtattttaggcacatagcggggaggagaagagagttggggctcttgtgctgaagctgtctgaggtgatcatggaatcatggatgtggcagggctgggttctagctcagcctctcgaaccgtgtctggctgggtaggtggggt

SEQ ID NO: 10170 - DNA, 655 bp, Artificial sequence
  DNA replication origin
accagcatcttcatccctgaggaaaggaatccaagcttcactcttggtacgcctcagtttccccattatttaaatggagacattactttccacacaggattctggggaggatccatggtgagatgatgttttggcacagggccagcacatcctagctgctcagaatggggcagtggctgctgctgttgctactattactgctttgtttaaaacatagctgcttccaccaaagctgccatccagctgagaagatcaggacaacacacccaaatcagtcagagaaaatgcaatcagacactggaactctgggagagaaggatcctggagggctgggcagtcaggaagaagttctcagaggaagtaacctggggctgaacttcagagatgggagagtgaagccagccagagtggtgggtagagggcatgctaggggggaaccgactgagcaaagccctggaacaggagggtgccctacaggtcaggtgggcctgagtgtgtaagaagcagagaagccagctggggtcggttgggtgctccagggggcctgacttaccctggggagacgaagggggagactggatgctaactgccacctttaaggaaggactgtctgccctgaggcccatcccacctgcactccatcccaacagaagtc

SEQ ID NO: 10171 - DNA, 1135 bp, Artificial sequence
  DNA replication origin
cctgcagccccagctcactgggcaagtcccttctcgtgtccaaatcccgtttctcgcgctgcagctcaggaagcacgtgggatctgcagtcagggtcctggctgtctctaatcaggcaggttagttagattggtctcccaatggctgggctgagtaacactgagtttgctgatggtggtgggatgggtgggttgagtcataacttcttggaatccagtgtctagcccaggagaaaggcaagaatgaagacaggagctggtggcaaggaagaaaatgcccctttctccctcaaaggggcctgtgcatgtgatgctttatggggggtagggggcggaggggttggtcaaagactggccagggttgtagcaggaggggcagcccacgcgggcaggggcgctgccgtgttataaatcaccctcgactcaattagagcctgtgaaaggttgtgcacacccagcagaaagctccgcgcttggcgggcagccagctctctgaggggggctgggggcgagagcttgtgtgtgcctacgtgtgtgtatgtgtgtgcctgtgtcttactgtgcagatgtgcttgtgtgcccttgtgtgtgtttctgtgcctgtgtgtacctgtctgtgcctgacctatgtgtgcctgtggtggggggagagtatacatgcctgtggactcttgcatatgcaatatgctccaatgtccttgtgtgtttgtcaccaggtgcatctgtatgcacctgttcatgcctatttgtgctgtgtgtgcacttgtgtgtgtgttggatgggtggctgtcctcgtgcccatgtgcacttgagtgtgagtgtgtgcgtgattgtgtctctccatcgctttgcctctgtatgtctccttgcctgtgtgcacccaggtgacagtgcatgctggtgatgagttgagctgggctggatgtgtgggtgggagtggaagggtgttcttatggtagggggagagttatatgtttttagggagaggcagaaacagaaaaagagacatggatggatggaattatgggccggcagagagagagtgagagccagaggaacctagtagagagagacgtgaccagtaggagaactaagctttgaggagtgtgaggggcttggcagtgtcgaggatctgc

SEQ ID NO: 10172 - DNA, 990 bp, Artificial sequence
  DNA replication origin
gtgagctgtgattgcatcactgcattccagcttgagtgaccctgtctcaaaaaaaaacaaaaacaaaaacaaaaacagagggacctccttagcagtagagtttgattgggagccaaggtgtgtatgtgtttttgtgtgtgtgtgcagtggagagggtccgggctgcccccaagggaatccacatgataatggcagccaacatttagtgcttgcttattgagtcgcagacagtcccgtaggggaggagttgaaccccattttatagacgaacaaaactgaaattctgacagtttaagccatctgccccagcctcatggatttgaggcagcgccacccacgccccttcccactgtcaggtcctgggtaggtagatggatcctctggggtctgtgttccagcgacgccacctcatctctgctgtgggtcaacccagtcttgggctctcgctcgaatacacttgaacatgtgtgagtgtgggtgtgaaatgggtggctgagagggtatatagggtgtgttccagagacgctagtggggaggggatttgtgctttgatgtgtgcgtgtcccagcatgcctgggtgtttgtgtgcgtgggtatctttgggacatgttatggggtgctggtctctatattgttgcatgtttgtgtttgtagctctgcctgcgtcattctgtgtccctctctgcacagcttgtgtgatgtgtgtatgtccctgggagcctcctccctatttgtctctgtgtgtgtgtatctttgatatgtctgtgtctgtcctgcttctgggtgtgtttccgtgtgagcatctctgcggccctgctgtgtgtgtgtgtgtgtgtgtgtgtgtgtgtgcgcgcgcatgaggctccgtgcctgtttccgaagtgactctaggtgccacagtgtgtgatgctgtgactgtgtctctgtgtgtgactgtgtgtgagactgtaactgttctgtgtgtatgcgacacaccgtgtgcgtgactaa

SEQ ID NO: 10173 - DNA, 1012 bp, Artificial sequence
  DNA replication origin
tttccgagtcggcggcggctttgtgtgcaccggccgcggtctgggggcggggagggaagggagggttatttctcccccctcttcctttttattgggtcattaacaacggctcggactgccgctgcgccccccctttcatgtctgccgcgcctcccgccattatctgcctccgccgcgcggcgtaattcgatgccaatcaggttggggcgcagaggcagccggatcaaagccggggccgcggcgctggagggagtggggttggggagcaggctgcgctcccccggggtcggggcacccaccagggttcccgctcaagcatctagggtcagactgggaagtccttgcccaacccgtgcagggttcagaaggttgcttggggtgaccaggtggtcagtggctgggctgcgcggttcagccaggcaccagggtcccttgggggtagtttcgtggagggagcggactttaggtggagattctaggcggagggaccagcttgggcacaggcgaggaggcaggactcagcagagcgccctaggaatagggaagaacccagctggtgggattcttctggctgggcgactgtgttgtcttacaagggttaggagcaatggaggggcttgagagggggcgggcaaaatcaaagttggccttcaggatcctttatctggcgatgtcctctgtctgctagaggctatgccctgactcagtttcctccgctgggaaatagggaagctattagcttcccgcactcttccacaagggatagtgaggtgatgaaggtgataaaacaacccaaaacaagcacaactcaaatttcttgagcacttcctaattgcaggtcaggcccgagtctccattcatccacacaacagctctacaaggttggaactcatgtttttacagatgaggaaacagaggcacagagagggaaagtgacctgctcaaggtccagggtagtgaggggcatggctgggattggaatcaggcccatagattgcatgaagcggattct

SEQ ID NO: 10174 - DNA, 2247 bp, Artificial sequence
  DNA replication origin
agggtcatttagcctttctgagcctccgtttccatagctgtaaatcaaggataataataatgcctgacagatagtaagcattcaataatttttatttttatttatttatcttttttttgagacggagtcttgctctgttgccaggctggagtgcagtggcgtaatctcggctcactgtaacctccgcctcctgggttcaagcaagtctcctgcctcaacctcccaagtagctaggactataggtgtgcaccaccatgcctggctaatttttgtatttttagtaaagacagggtttcaccatgttggtcaggctggtcttgaactcctaacctcaggtgatccacctgccttggcctcccgaagtgttgggattacaggcatgaaccaccacgcccagtccttcattcgttttttcttaagacagggtcttgctctgttgcccaggctggagtgcagtggcgcaatcatagctcactgcagcctcaaactggggctcaaacgatcctcccacctcagcctcttgactagctaggactacaggtgtgcaccacaatgcctatctaagtaaagaaatgttatgtatagacccaggtatcccctgtattgcccatgctgagcgctcaataattgttgcctattgttagttgaagtaccaggttgcttgttgaggtcacagaggggtcaaccaattgtcaccctcttctagcttggccctagatggccttttttagcgtgtccaagagaggagggtcatctaccctgcagacagtactccactcagaaaggctacagacccctcccggcagacccctcccggcagagccagccccctttcctgccagggggatggcaggacaggaggcctggctggggaggtggtggggctgtggcagcagagaggggaggcaaaggttggcagagtggggagagatggcctggggggagagcagcggagtcgctggggagagagggaggctgttgcgctataaataccttccaggtaacaggacccataaatgaagggagggaattagtcacattctgcagcgcctcagagagaggacagggagcaatgacctgaatccacggaaggaaaaaaattaggctaaccttgttgggtgagggggaggttaggggccggatgctgtgcctcctcagtggggtgcctgaacaggctctgctgggcgggcccagggaggaataaccctggcaggaggggtctggaagaaacatcttgtctattccctccagatgtgtgaggtgtgtgggactcttccttttcttctcaaggatctcctggcctctctctgaacctcacacccattcctcctgggaagtccttccaggagtctagcccagttgttcttcacgtcactctgaagcatgttttcattcactgcgctcactgtctttaagccctggctccccctggggtgcccaccttgtcaggcatctagctctggggtcattccctgggttcccaatcaggcagaaggatctttgccggggaaggcaagaaggccgtgtcctacttccactctggactcaagccgagtgggcccacttgtcccttgctgggatgatgaccatggcctgtgctctagtctcctagctccagcttcacctgccctgggccagcccctcacccccagggttgccagagcaatagtcaggcatgccctcccttgctcacaccttccctgctcctctcggaatggaggccagtcccctcggcctggcacagcgagcctccaggattggcctccaagcagcttcctaaccacatcttctgcctttgctctcacacccagcctgccagtctacattctccaggtctttgcaccagctgttctttcagcctagtgttcctgcctcttgctatgcctggtcgacttgcgttttctcccaagacccgagcttgagtctgaaattctctctgctgcctccccagctgagttgggtcctccctcatctgtgcttcggaaattctccagcaaaggtagtctggggaagtcaccaagatccaattgggaagtccagctctgcctcaccctgactacatggcctctggtgaatagatgagctctcctgtgcctcagtttccccatctgtgaaaaggagttctcacagtgcttcccaagggttttacagtttaggcaagatcctgcatgaggagggctgagcacacagtcagcgggtggctgttgttggggtcacagtattgatcacactgtttctgtgtctgcc

SEQ ID NO: 10175 - DNA, 1187 bp, Artificial sequence
  DNA replication origin
cacagaggggcctggcttgccgtcaccccatcgccgccagcttgaggacaggcccaaaaaaggaggacagggaaagagagagggaacgaacgcaccaccccgggccagagcggcgtcctctcatcggcctaggaagctgtactgctcagcagccaccagagggcgcgcgccccttctcagagccaaagccacgacggcggcggtggcggcggacccggaggggtttgcagaagatgcggggcaggggtgcggtcactccgggaggaacccccccggaacgcagccgcaccctgggctcggattcagcccttgtaagaagacggccttggatgctgcccctcgaccctctccccagccgcgccccgcgcttcggtctcctgctgactactcgctctctccccctcctggccgctgcgagcactgcggcccggcggagcttgggcttggagggtgggaggtgggcaagggggcgaatggggatttatctggaaataatgtggcaaggggctgcatggtgggaatatactgggcagaacgagattgtagtggttagcactaggtgaacagaagtacgaagaggtggggaactacagtggatgtgcagggtactgggccgattaataggagggcactgggggccaccgggcaggtactgggggcagtgggtggtccctgggggctatttaagtggtaccaagcctaaactggaaagagggcgctgggtggtttcctggtggtaacgggggccctgagtgcatgttggaagtaccactgcgtaggcactgggggtactgaataacaactggagacattgtgtgctgggaagaactggaaggcagtgtgaagatagcgagcagaaggggcactgagtgggaaccaggggtgggagggtcacggaacccgcagtgggaagtactgagtgggtctggggatatggcacaactgagagggtgagggggcgttggaagggttcgtggcaggtactgggcattatctatgagaagtggggacatgggtggacatcgggtgggtcatggaagtcactggggtcacactgaagccctggaacagtatggcacttccctggctgtgcctcagtgcccctcacaacagcgccactttcacagccaggacttagatcagaaatgtcccttcgccagtgagggtatcctgccctgaccagaacc

SEQ ID NO: 10176 - DNA, 1071 bp, Artificial sequence
  DNA replication origin
tccagataaatccccattcgcccccttgcccacctcccaccctccaagcccaagctccgccgggccgcagtgctcgcagcggccaggagggggagagagcgagtagtcagcaggagaccgaagcgcggggcgcggctggggagagggtcgaggggcagcatccaaggccgtcttcttacaagggctgaatccgagcccagggtgcggctgcgttccgggggggttcctcccggagtgaccgcacccctgccccgcatcttctgcaaacccctccgggtccgccgccaccgccgccgtcgtggctttggctctgagaaggggcgcgcgccctctggtggctgctgagcagtacagcttcctaggccgatgagaggacgccgctctggcccggggtggtgcgttcgttccctctctctttccctgtcctccttttttgggcctgtcctcaagctggcggcgatggggtgacggcaagccaggcccctctgtggtggctgggtagagagcctggggtctggatgaagggagaacattgggtagggaggtgtggaaccagggcctggggagagggaccgcggagcagaatggtggtgggggtggatcgctgagtccacagatgaaggactaacagatggatctgaactcaggaagtctacaatctgagctgtgattcgatgtgctgtttgtagaagggggcgatacaggattggtggcagtagggtgaggcctcccttccaggcctggcagttctatctggccctaagcctttcatgggatacttgttgatggacctacccttcgatgactctgtttctgcctctgcccgtctaccagcgcctagccttcttttcacctgcctgggcctgtttctcagtcttcagcagtcctggaatggtggggggcaccctctccctgtcccacaatatggggttttctctcctctgtgtatgggggaaatggatggagctagagcagaagggacccaggttagactcttgcagtctgtcctgagtttaggtgaccttggcctgtaggaccctccatggttagatctgtgattttgtgcccatt

SEQ ID NO: 10177 - DNA, 669 bp, Artificial sequence
  DNA replication origin
acaggggagggacggggcctgattgggtagtgatgttgctgtgtccaccatgggagtgtggtgcttgtggatgtgtgcacatggaggcgtggagtgtgttcctggacatcaccaggagcccagatcatgatttgacctctatcgagaccgtactgtgccgccgccctcctgcctgcagtgccattggccgccccagccaaggttgcttctggcgcccaccaccagtctgggatcagcaagatggatctggaacccatacccaggaggtgaggctagactccaagaagaacagccaacacttcgaaggtttggagacaaggccttgaggcactgaggtcagattactccacaccctatctttgcaaggcagcaggggacgcaggagtgttggggcactgtctccgggagtggcgggggctgctgcagtacctgggagggccgcgcgggggcgggcgaggacgccgagctatgagaggagggagggcgcgcgaggccgagtggggagcttggagcagcgggaaggtcaggggcgcccatctgcggcactctcggtttggctcagtttctgcctacaagtgtctgtgcgtgtgaggagaaaataaagtcatgagctcatcaccatcccagtggcgtctcatttaatcgtcataccaacatcctcacaggccc

SEQ ID NO: 10178 - DNA, 2138 bp, Artificial sequence
  DNA replication origin
ggcgacgccccccacccgcacgcggccctctccccggcccgtcccgccccggcctggccgccagcggggaggggcgggtcccggagccccgcggccccactcaccgctgctggtccccgccgcgggtccggcctctcacggcggggccatcggaggccgccgggctgcctgtcccgccccgccgccgccggtcggagctgcccgcgcccgcccgcgtcccttcaggtgccggagccgcgatgtggagaggctgagcgagggggacggacggcaggagggagggagcggagccgtgagctggaggaggaggaggagggaggagcgggaagggcggggaagggcgggggcactgcgggcgcgcgagcggcgggcgcggagcccggagggaagcgcggcccccagccctgtccgcttgcagcgcagcgctcgccccgggaccccgagcgtgccggggagagcgcggcccaccttgtccccctctgccccgcgcgggccctttaagaaagggggggaggggagcgcccggggttctgccccctcctagccacgctgggcccctgccgtcctcgaaccctcgggcagacccaaccacctccgccctccaggcaggacccaccggtctagaacctgagctctcgggacccgccaggccctggaggtgaaggagggggcgggtcctggccctcctcccgcggtctgttcagggagtgacccctgcccccagccccccgacacacacgccagcccccgggagacgccgccaagggaggagcagggagtgcggggggccaaggtgaagaatctcagagagggagactgagcccctgagacctagagtcacacgggacgggacggagacctgggctgtggggtgagaaggagcctcgggacagagtgggatgggaggaggcaggagagaggagaaagagacaaaggagaaagaacctgagggaggcgggaggtgaggggtgggtccaaccaagaatccacatccctgtgccaggtcaaggggaagcctccctgggcagatataaggagacagagagagacagagggtgccctgggcagaggaaaccatctcccaaggcacctgtcccacggtgtctccccaagggcaagtcaaggccctgaagccgcccccctcagcccaggactctaactgaagaagagggttgactggctgtacctgggctagacattaagaacttcctggctgtgaggcacctgcagagtaagagtccgcctctcagagaggcattaaagggcccccacccacagggatctaaggagggcgtggggagcaggcccagtgcctgggagaagggaaatcaggatagagtcaggccctgccactggaggccactttctacccctctcccctactccagcccctggggggttcaccacacccagttgcttccatctccagacctcagcagatgatccacactctgcccggtggggccttgatcctgctgtgctcagtgaactcctactgaaccctcaaattcctccttaaatgccccttccttcatgaagtcttctctgaccttctttccacccatgaacacacaaacatggactcttcttagggagcaggaagaggatttgctgacctcttagggtggcagtaattggaggtgtggaatctgagctgtgcgtagtctccctcccttcaagctgggcaacagcaggagctgggacttcatcaaccatggtgacacctctgacaaccaagcatctaccaagtgctcttcatgtgtcatatttaattctcaaaacaatcctacaacccgttttacagatgagaaaactgagacttggagagcataagtcacttgctcatgatcccaggagatctgaatctgtgagcacagctggtcaattaagagggcactcagaccacatccttcactgcccatcaaaccctaggacattaccgcagagcccagaaacaagggagccactctctgtgcaggtgcccaggatcttaaagggcacagagggagcttggcttccctgctgtcctgcattctacccccctgccctctgctacctgtaggcagagaagggtggcgaccagcaggggctgtggagggaagtgctcatggcagggcttagataccacattccccacc

SEQ ID NO: 10179 - DNA, 1818 bp, Artificial sequence
  DNA replication origin
ggggacaaggtgggccgcgctctccccggcacgctcggggtcccggggcgagcgctgcgctgcaagcggacagggctgggggccgcgcttccctccgggctccgcgcccgccgctcgcgcgcccgcagtgcccccgcccttccccgcccttcccgctcctccctcctcctcctcctccagctcacggctccgctccctccctcctgccgtccgtccccctcgctcagcctctccacatcgcggctccggcacctgaagggacgcgggcgggcgcgggcagctccgaccggcggcggcggggcgggacaggcagcccggcggcctccgatggccccgccgtgagaggccggacccgcggcggggaccagcagcggtgagtggggccgcggggctccgggacccgcccctccccgctggcggccaggccggggcgggacgggccggggagagggccgcgtgcgggtggggggcgtcgccctcgccctcggtgcccacccgggtccgctaacaaagctacatttccagatcaattccgcggcgtctggagcatccgaaggatacggttgtcatggagatggggccgagagaggaagcccgggctggccgggtctgggccggggagagggggcgccgcgggaaagcccgagcccagcctgagggacggtgggggctgccgggccgattgtctcccggctccgccacccactaccctctccccgcttttgtataatctgggggtacgcgtgtgcgtggggggtgccagtggcagcctggtggtcggggatcggggcattgggtaccggggcctgccggcagccaccttcacgaggctgcagctttgaggatttatttctgtttccagtttcccaactttgacagccctgcttggcggccaggcctccccggctctgcagctagagcgggggctcgcacgggggcgtggcagtcagggctgaggaggcacataatggccgaggcggcagcgggagggaggggtcccaggagcgggctgctggggctgggtgcagagggagtccagactggggacaaccctgcccagcgggccccctcggaggaggaggtattcagctgttcctagaggatgcagggactccccggaatgatcactgggggcattgtttttgcataggcccagggggccactgtctcaagcccacccctttgtcttggggccatcttgggggggccaggaagagaacagggagcagaagcagcagtcacaatggaagagggcctaagactcctggcagcctggggataagccaggctgaatttgatggggatcagcgagagggctcaggatttggccagggcaggtgggcagcctgggtttggactttcctgggttccccagttcctttttctagatcctacaaacaagagctgcttaatagtggttgggggtgggggggttcactgggctgggactgcctccaaacccaacccgtggcccagggcagttgcagtcgttctttcattcttccaccctctccccaggactttaggaacctgtctcccagggaagctacaagttctggggcctgggatctccgaatcagtaaaatgtgcctgctgtcctcccagcagcccctttccccaatatatgcgggaagcagggaacaggggcttttgagtggggctactgcaaagtttggtcctggtggaaacatagcaggtccctagggtttggccagagcccccaaaagattcccacgcagtggggtgagtaggtgggtgtggcccagctaaaggaggatgactgggttgtccttggaaggcctccctcactggtgcctc

SEQ ID NO: 10180 - DNA, 874 bp, Artificial sequence
  DNA replication origin
gttctctcctctccagaatcttggccctttttgtctttgttgcctcagcaattttccaatatcttaagaaaacccatggtttttattgttttcagtggaagtgttggtgtgctgcaggctactgtatcctgagctgagttgtaaagattgcgctagaatgaggaagattggtctggcaaggtgttcagcggggtcagctcatgatcagaggtgtgggtgctagactgagtgccttgtatgccagcccaatgctgaggctcaactgtgcaggcactggagagccgcagaaggtactggctgcaaagcaacattttggaagcaaatactggccccaatgtactggtggcctttgatctagaggcatgtagccttctgaagagggtcaggtgggagagaacaagcatgaggttgggcagaggggaaaggtcggtgtgagaggctccacagagggaagagtaaaagggctgctggtgccaagatgtggggagggtggacagtggtgaggctacccctagggacagcccaagagtttggtggtggcggcacggggttgcggcttggggcagagtgtccagggaaggggagtttgggctggggagtaggagttgggatggatggctcataggtaagacaggctacggtttgaatgggggaggttttgagaaagtcctggaggaatgtgagaagagggaggggccaggctgggggacagatgggagaagagaacgggagcaagagagacagggagaggaggacagcgagctgtcagacagggcagtgctattatgcagcagttggttgcttgggattggatttcgagagtactctgcagttttggatgccttgaggcacctcagagtgtaagggctggcca

SEQ ID NO: 10181 - DNA, 1407 bp, Artificial sequence
  DNA replication origin
cagaaaatgaatccaaaggggaattcaacaccaggtgtgcgccagctagacacaggtatcaggccctggattgggagggatcagcaccatggagagtggtcagaatgtcggacctgcacccccacactcccccacccagggatgtatgctccccatacctgtgcccatcgtcactactcacatggcccattccagcttttcattcttgatggagttgtaaagggtctgggagagggaaaagagagaggggggaattcaggtgaagggtcaaagaaaccctcatctaccaccaataacatgggtacagtgagggagcaccttttcagccaatggggcaaagtgggtgtttgattcatacttatttgctggatgggtaagtgagtgggtgggtggatgtacggatgggtggtatttaattatgtgatcacttaatgtcaatctcccgtaggagactgtaagcttcacaaggtcagaggctgtccatttgttcactactgaatttccagtgcataatccagaacttgacatacagcaagtgctcgacagggtaaatgaatggatgggaggatgaatgggaggatgggtgagtgaatggatggatggggaagtggacaggtggaagatggaaggatgggtggggaaacaagcaggtggatgggtgaatgaatagaagatgggtgggtagacagagggtatatgaggaagatttaggggtgtatgcatgaggatatgggtgggcaaatgaatggcagggtgttgggtggatgattgagtaaatgattgggttgatagatttgaggatgaatgggtgggtgggttggcgggtaagtgaatgggtggggaaatgggtgatgggggatgggtgagtagatgtggagaagtttgttgaggtgagtagatggggagtgtttgaggagtacagggtgtctgtgtgggtgacgggtgaatgggtgagtggttgctatgcgaggagtgggaagggagggtttggggagatatatatatatatgggtgatgggtgaatgggtgggtatatgggtaggtgaatgattgagtggctgggtggatgcatgggaggatgagtggatgggtgcagaagtggttagataggtgaatgggtagtttgggagaaatggataggtggatagtgggactgggattgtttgatctcacaaatatgttcttaacaaacgcttctcaatggtgaagaatataatatagtaagaagagtgatggagacaatgttctatggaacattggggtttggatggagacctccgaactcattattcaactacgcctgtagtatcatcagattcttcaaacccactatttaaaaatgaagctggctgggtgtggtggcttacgcctgtaatttcagcattttgggaggctgaggtgtgagga

SEQ ID NO: 10182 - DNA, 2036 bp, Artificial sequence
  DNA replication origin
acgtcctgcgggacgcaccgcgcgcgcgcggccgcggcggcggcgggggcgcgcactcctgcgtggtctcgtactcgtcgtcctcggggatgcggaaggggctggcaggcaggctgcccaggctgccgccgagcgcgcaggtcccgcgccgcggtccgggccccgccgcggggtaatagtagctgtcatagctgcgctgcatgtctgcgccgggcccgggcccgggcccgggtccgggtcccgggccggggggcgccgggtgccgcagtaacggctgctgctcggccaggcggtaactgatgggcgccgccggcggcagcgacacggcgtgcgccgagttgggggacgtgatctcgaaagttggcacctgcgtggccagcgagtagtggaagtccacgggcgagaggcgcgcgggcgtggtcagggccgacacgtacctgcggggagaggcagaggcatgggccagggccaggccgggccggcgcgggggagggggggttgggggtggggtagggtgggaggggcggacccagacttgccttaaccttgcccgagaccccgcctgcaagaatgacggcagcaaccctcagtggccttatgcaatttcctaaacctctccgagcctcggtttccttatctgttacgcgggcataaccatggtgttgattccatagctctgttgggatgattccagattgtatcagtgggatgtgttagccctgtgcctgaccctggtaagctttcatgaatggtcacttgctgtgggaatgctcaccgtcagggggtcaggctcacgctggggtacatgttccatctggtttaataccgcagctctgtaagacccttccgccagtcccattctacacgcaggaaagtaacactcagaacgtttaattctacacgcaggaaagtaacactcagaacgtttaagtgacttattcaggatttacacagccaagaagtggcagagctgggatgtgacttgaggctagtcaggaaccaggactcatactgcccaattccagaagccattagtctccattcagatacccctgtgacctggcctcactgccccacagggacaattcctcccatgccctgatggcttcagtgagggaaatattcctccttacagtgaagtcaaaacctgcttcaggggagtaccaagatcccatgaggtgtctctgcttgtggctacagacccatccccacaccaccagctccttcagaagtctggccttgctaatatctcccaggctggatcccgggtacctgtccccttttgtgctccacatcccccttgtaagcccatcagtcttctgccccaccgttgtcacctcaggacaggggccacccacctccacgcttcccttccaaactgcacagctgggcatctcactgctctctggaaccagcctggagtccccattatcattttttctgaatcgcctgactcctccctcttccctttcccaccggcacatctgattaaccaccaagtcctacccattcccttctccggaagcacactctccaccccatcctgggcccgactgttcacatgtggtcatctgggtccaccccagggtctctcctccttcactctatgcagttcccagagcaatcttgtaaagtcacagctctgctgaagccggtcttcctgtttacccacccagggtcagtctgtctggcctcagcttgcctgttcaggcccagctcctctgctccctacagcccactctgttccaggcacctcactcatcagccctgttcttaagtgcctctgttggaacagctcaagttgttccccgtgcctagaatgcttttcttcctgctctcctgcctctccccttcctaccacccattaaggagtctcattgctgtggttacgattcataaatagctacacctagtgagcatcagctccatgccagggatgagacaaagagctctgtgcacatgatctcaggtggccttcacttgaaccatgcatagtagcttttgttctccctgttctacagctgagggaacaaggt

SEQ ID NO: 10183 - DNA, 1322 bp, Artificial sequence
  DNA replication origin
gcggcgggggcgcagcgcggcagcggagagctgaggccgtcccaccgcctgggaccccgtgcagaatgtcggagtccaggaggaggggccgcggccgcggcaagaagcacccagaggggaggaagcgggagagggagcccgatcccggggagaaaggtagggcacctccgcgcgcccagaaacccggtttccctgggagaaacctgccgcccgctcacccgcccccagcgcagcgcgggtgagtctaggctgcgctagcggccgccgcggtgacaggcaccgagggcgcgcgtgcctgcgtgcgagcgggtcgtcgcggccgggagagcaaggggctgcgtgccaggagcccgacagtggctgtgcgcgcctctccccgggcggccgcgtccccacgcaggggcgggcaagaggcgctgcacgccggtaccggcctgcaggcgagcagccctgagcgagcggggatggagccgcggataccgacagaaaggcggcggctgatcagacgctgggcccggcctggccgccgagcgctccgggagctgtcactgccttcccttcctcggagagatcggagccctcgggcttgcccctacccatgtgccacacctccctccgttctgctcggccactggagcgtgggcaacagcgcccgccaactccggagactcggaggggatgccctgccccgctcgcgaaccccagagagaaggggagccgctgcttctgtgacagttccctgggaactggactagacattgggcagttgtctctctctggtcttcgggagtgactctcttgggcccttggattctgtccctgcctggaggagcagagccatgatttgcgacccactttcgtgccctccctgggcggttgcagagtcaaagaggagtgcactggtctcgggcttctcagaggcggcccggggcatgcacatcctctccgtagaaccaggcttgcactggggcccaattggggaaaccctggattctcggttcttttcttcaggcaagcgttttgttaattttgtgctaattttatgtgttttgtacgagtcacaggcaagccatgttcaaatgctttatctccatttaatcctcataacaatcctgggagcaggtggtcctatctccattttacagagggagtaacagaggcttactgaagttaaagtaacgaagtacgttccagagataagactgggcttcaaagtagcattctcaggacaaaggtcctgagacttgctgggtctctatcccctcactggagtgcccaccagatcagcaacataaaaatgccttcaaaagagcgtttgacgg

SEQ ID NO: 10184 - DNA, 1472 bp, Artificial sequence
  DNA replication origin
tcacccgcgctgcgctgggggcgggtgagcgggcggcaggtttctcccagggaaaccgggtttctgggcgcgcggaggtgccctacctttctccccgggatcgggctccctctcccgcttcctcccctctgggtgcttcttgccgcggccgcggcccctcctcctggactccgacattctgcacggggtcccaggcggtgggacggcctcagctctccgctgccgcgctgcgcccccgccgcctgcagcctcagtgcccgagcgcggcgcctttcttataggcggtcacaccctccgggggaggggagcagcgagccttaactcttcccctcccgcgccctccaccctcgccccccctccaccggctcgggccgcgggggcgtgtgggcggccggtctgggccctaggccccctccctgggcccaccgaggtaggcaagaccggcgcctaaacagggcgccacagacctcctcgccgaagagggggcttgagctgggctgggggcctgagcatgattggggagggcggagtagagatcccccagcgagggccaggctaaggacagcatgggggtggggagacagcgaggaaagggcccaggaagggaccaaaatgaagcccgctagccagcccagcggggtagcgagcacccttggctcttgcggtgggtctccacaacctcgaggcacccccggccgtacaggcgggttgcctgtgcctctcatgcctgcaggtctggcctcagccccgtgggataccgccatctggggaacacctttaatgcaaccaccatttgtgcctggcagcaaggggtctgtggcccaaaagcccctcccagccagggcgggctgcactctgcagggaacctgggtgccccaggtggcttgtagcccccctcccacacactctggctgcaactccgacagcccaggctgccggcaccagctggctcctctctgcaaggcctgcggaggtgaactcagacactgactccccacccccgccccggtcccacaaaccattgggtaggggctgctggagaggacagagtcctccctcctgcctgggtgtggtgctgaaagggttacatagcaaaggctctccctcttctggctcccagaaagcctgagcctgcggtttgcctgcctagctctgcctgaggtgtccccttacagccatcccaaccagaatccaagtcaaagatcatctcacccagtcctctgtctcctcaggaagggtccgaaggcctctctggacaggattctccttaggagagcctgaagcaggcttaggactctgggtcaaggccagggactcgagctccagggctgtctggggatgcggccagaacttgaggccaaacttgtggggtgggaacacagaaagggggaagctggaggtgatggccccgcaaagggctgatcttggggcgcaagtctgtctcatcaggggccagctctggtggggggggg

SEQ ID NO: 10185 - DNA, 1499 bp, Artificial sequence
  DNA replication origin
caggaccaggcgtacaaggcacccgtggtggtggagggcaaggtacaggggctggtcccagccggcggctccagctccaacagcacccgagagccgcccgcctcgggtcgggtggcgttggtaaaggtgctggacaagtggccgctccggagcggggggctgcagcgcgagcaggtgatcagcgtgggctcctgtgtgccgctcgaaaggaaccagcgctacatctttttcctggagcccacggaacagcccttagtctttaagacggcctttgcccccctcgataccaacggcaaaaatctcaagaaagaggtgggcaagatcctgtgcactgactgcggtgagtcgccccctccctttgctggagaaaggggggaggggcgaggtggtggagaatgggggtggggcggggaggtgctgcaggtgcccgggcctggcagcgtccgggcgctgggggggtggggccgcccctgggcagggcgcctggcacgggtgggtgagggggttggggttggagagaagaaggatcaggctcaaagtgtgccaggggtggggggcggagggaggcgctggcctgtgccagcggggatctgcggctgatgtatggcatgtggggctggaaagctgccatcatagcccagtagcggaaggaaaaacggagaggtcctggcggtgctggcctgaggctcagtgagtcaggagtgaccctcggaggccttgcctgccctgctgccgcgggcctgccgtgcccaggctggcagggtctgcgggagcagctgggcagactcccaggctgtgaaggcctccgcttacaagttctcctagggaatggtcgcccccgccccctccttcctctcctgggctcgttgctctgctcatccacaccgctggcgcaggcagagttggactttttctgctactgttttccgtcctccatgtggctccagtttttttcttcatcgtgattgcctgtctttgctaagcaggtagcacatccttctcttaagactagcaagcagacacctttttttttttttttttttagctgtttctgggggaattacaaggtctgttgattgtgatgatgatgaaagagagtaacttctgctgaatgctttaagttcagctctaacgtcttactcgccggatgtatttgactgcatctctcatcttcatgatgttggatgctgcacaggaatgcaggtgattagaaacaaaacactgaaatctgtagatctctgcagctgggaatggaagtctcccatgtcaaaagtcaaagaaatgtcagtctaagagctttttcttcttgtccctgaatccagtacttacttcttagtaagatatttcaaatcaaattgtcccacactggagtatttggtgtaagcctgtctcgtgcttattcaaattgaggtttcgttttgtcccaactaaagctgaatttgttggcatgcggtatgacttgctggactgtgtaatcgctgaattatgatagatgtcct

SEQ ID NO: 10186 - DNA, 1961 bp, Artificial sequence
  DNA replication origin
cttctctccttctttcactggagatttgctaatccttattttatgccaggcattgtgttggaggtaataggaatccaaagatgaataggatatatatagtccctgacattaacgtgcctggcctgatgggagatgcagacccattaaatggctgcttgaaatacggtatgggccagtatcccaacagtaatactatgtgtgaagctcatggcaatacagaggaggaagggattaattccatcatgtatgtgttggtgggagtagaggtggatatgtaggaagggggatgcggtataatgctgagctgggccttgggaaaataagttttccatgtggtcaaggtggaggtgaggctttctggacacaagagacatcatgtgcagaagcacaccaagaaagagcatgaagtgctgaggattgctagagtggggggttggctctcaggatatgaagctggctaggcaaagggagcccatgaagagccttgctgaggagtttgaacttaacttctgagagcagtagcatggccaaattgtacttacattttatttttagaaggatcactctggcattggtaggactggagataggtgatgaggtgaaaggagtggagaccagttagaaggcttagaagttgtccaggtgagagatgatgagggcttggacttaaggtatttgcagcagagttggagtggaagtagataaattggagattattttaaaagagagacccaaaggccttggtgattaattggatgaggaagaataaaagatgagatgaagggacttattgtaatggattgatgtagtctaaaagaataaaacagtggcattaataattataggggatttggagtgaagtggaagaaataatgatgttggctttggatgtattgagtttaagatgtctcttagctaggaggaaaggtgtagctctctctacttcctttccagaatagcagtcctagcctaagtcactcatccttggaccagtttcctgtggagcccagtgcggtataaaattccccaagagctcactggcattcctgagctccacatccttcaaggttaaaagctgggtgttgaaaactccctggaccctcattgataggctaatggattatggacctgtgtgtgtgtgtgtgtgtgtgtgtgtgtgttttaaatcagatgctggctccagtgcagcaaactcttctgcctcttgcaagcatcagccttggaaacaaaacaaaacaaaacaaaaaaaaccttttttatggagcagcctctggccctgacaggctctggctctctgttggctcccaagaagccccccacctttcttagagatcagatttttaaaagatgaggttgtacagtgctcagccagatccccacgtggccgctgaagaaagcccagagtgttggggactgggccctttctcagctaccacctctgcttgggtgtcctcaatgctaagacaagacaccttgtggcccaactctttccaaaatgacggggctgggattctcccccacctcaagtcgaatatccagcgttcaccaggcggtggcaggaccgagcacgtggtatcatttaggggctgggctccagggtcctcctaggaaagaggacagcccaagaggcgagaggctggccggccaccctggccatggcaacctctctggctcctacagctgctggccaaaggcagggggcacgccctgcgtcccattaccacgttcataggatggtgccaggagcccgttatctcttcttcgccttctcctcacgcaccacccccactgtcatgccgataaatcccgggagcaaagggtggcacgattcctcccgcgcccctgcgggctgaaggcgggcactaaagcagtgcagtcccaagcttcccctgcagaagccgcgctccctactcggtccgggggcagagggggcgcgagagagcaagtgggcgggcgtccca

SEQ ID NO: 10187 - DNA, 1038 bp, Artificial sequence
  DNA replication origin
ctgggtttttatctcttggtgtggagccttcccttcagagagccatttcagggaccactggacataggtgggtggttctgagacgggtgcacaggacagcgcctgtttgctccttggtggccaggtgcttcttgtttcttttcagtaggaagtcgcaaacttcagcccagggctgaagtagctaatgctgagtagaatggggctctttctaagagaaaaaggaagctgtgaatacctagcaggcaagtttgttcaggaggtgaagagatatggtaaggggggctttgagggttcaggaatcagcaaggcttattccctagcctgctcttggtttcttgatcgttagtccactcttttctaggaagctgggcaatcatattcccagttgtccctcgggctaagagtgagggaggcaagtctccttacttttgggggaagcgggagatgctcaatgggaatagaacccacaaatggaataggtatacttttctcaggatagaggcaacgatctgtgcttgagaaagccaggggcagagctgtgtgatctgtgtctctcagctgcctgtagaaggtgatgggggagagagtgggcgcattggcaggggggggtcccctggagataggccttagctttccccagagtgccagggctgcagactgcagtgagagagtacaagcactcaatacctatctggaaataagccctaggttatacgtcaggtctagtaaaagagaaatcaggtatctctgagctcctctactcctgagcccctaataccagagaagatcctttttagctatcaccgtccaaagactcactggttaattaatggtcagcaacttagctgtctgcataaaaaccagcgaccacttaatatgttacttttgggagtgggatctctccttgacacaagtttctgggaagagtaaaaggggcaagcgaacctgctttaatgaatcccgtaaggaactgcgtttcccaggaaattcctgacatttttagctcatgaatttccgaaagcctgcttggttttctcc

SEQ ID NO: 10188 - DNA, 1243 bp, Artificial sequence
  DNA replication origin
aataagccctaggttatacgtcaggtctagtaaaagagaaatcaggtatctctgagctcctctactcctgagcccctaataccagagaagatcctttttagctatcaccgtccaaagactcactggttaattaatggtcagcaacttagctgtctgcataaaaaccagcgaccacttaatatgttacttttgggagtgggatctctccttgacacaagtttctgggaagagtaaaaggggcaagcgaacctgctttaatgaatcccgtaaggaactgcgtttcccaggaaattcctgacatttttagctcatgaatttccgaaagcctgcttggttttctcctccattctgggtccttccagaaaggaagaagagtgggctagggtctgaatgctcacagggcctggttcatccgcagagctggccagcaactcaggctgggctcagccctgagcagggtgccccccttccccaaatctcagaaggaggagggggaggcgggcgggcaggcagtcagtcgtggtcccaagggggactggctgcaggtttttgggtgagtgtggagtttctttttgattgttgcatgtggggaagggcagagtcgacgggaacagtcactgcgggcaccctagccctggtgcgtctactgtcctctgctcggctccccccatcggtgagtgcgcccgcccgcccgactgtgcggggctgcggttggggggaggggggagcgggatcatctgaggccagagccactgccgtgtgtgcggggagggggagcggcgggagagagaggggagggacaggctaggtgtctgctgctccacgccactgctgccggcgccccgacctcatccccagcagccccctctgcagctaagggttaccaccgcaccacctctcttctttgcctgcctcagcggccaaggctctgcggtaggagacaacccagccgggtggcgggtgggcctgtctaggtttgggtttgggtcttgctgaggcccgcatgagagggggtggccgtgactcggtgtcccctctttgcagggggctctgctgcgccgcgcaggcccctcctcctacatcctctttggggggtcactggaaagcagagcttaggcccactctctgtgcttagtatggcagactccttctcacccctagtcccctaactccccaggccgaggccgcctagggtctgcccaacagcgacagccacggtggtggtggtggtggtggtggtggt

SEQ ID NO: 10189 - DNA, 708 bp, Artificial sequence
  DNA replication origin
caccacctctcttctttgcctgcctcagcggccaaggctctgcggtaggagacaacccagccgggtggcgggtgggcctgtctaggtttgggtttgggtcttgctgaggcccgcatgagagggggtggccgtgactcggtgtcccctctttgcagggggctctgctgcgccgcgcaggcccctcctcctacatcctctttggggggtcactggaaagcagagcttaggcccactctctgtgcttagtatggcagactccttctcacccctagtcccctaactccccaggccgaggccgcctagggtctgcccaacagcgacagccacggtggtggtggtggtggtggtggtggtagcagtggtggcggcagcagcggcagcagcagctgcgacgctgcgcgtcctgctccctctcccccacccagccagggttgtagggtgagggccggtgggtgggcgccgcctggcgggcgggcggacggggggctggcagcggggagggggcgcaggtcacgtgccggcgggcgggtgggcgcgtacagtagggcgccctgctactgtactggggagtcagtgccctgttaccgggtctcgtctgtctcgtctctcccgcagatctcgcgagagtggctgactggctgtgggggttgcggcggcagcaggcggagccggggagggaaagcagcggcggctgaggcgactgaggcg

SEQ ID NO: 10190 - DNA, 1157 bp, Artificial sequence
  DNA replication origin
ggcagcgagcagggtggtgcggcgctgggttcgggcggctccctggggcaccccggctcgggctcaggctccggcgggggcggtggtggcggcgggggcggcggcggcagtggcggcggcggcggcggggccccaggggggctgcagcacgagacgcaggagctggcctccaagcgggtggacatccagaacaagcgcttctacctggacgtgaagcagaacgccaagggccgcttcctgaagatcgccgaggtgggcgcgggcggcaacaagagccgccttactctctccatgtcagtggccgtggagttccgcgactacctgggcgacttcatcgagcactacgcgcagctgggccccagccagccgccggacctggcccaggcgcaggacgagccgcgccgggcgctcaaaagcgagttcctggtgcgcgagaaccgcaagtactacatggatctcaaggagaaccagcgcggccgcttcctgcgcatccgccagacggtcaaccgggggcctggcctgggctccacgcagggccagaccattgcgctgcccgcgcaggggctcatcgagttccgtgacgctctggccaagctcatcgacgactacggagtggaggaggagccggccgagctgcccgagggcacctccttgactgtggacaacaagcgcttcttcttcgatgtgggctccaacaagtacggcgtgtttatgcgagtgagcgaggtgaagcccacctatcgcaactccatcaccgtgccctacaaggtgtgggccaagttcggacacaccttctgcaagtactcggaggagatgaagaagattcaagagaagcagagggagaagcgggctgcctgtgagcagcttcaccagcagcaacagcagcagcaggaggagaccgccgctgccaccctgctactgcagggtgaggaagaaggggaagaagattgatcaaactgaatgaaacccccacacacacacacatgcatacacacacacacacagccacacacacagaaaatatactgtaaagaaagagagaaaataaaaagttaaaaagttaaaaaaaaaaaaaaacctgttaactccaagggagcaccacccacagaacctccaccaactgacagtttctcttcttgacttgccacccatcgctg

SEQ ID NO: 10191 - DNA, 1356 bp, Artificial sequence
  DNA replication origin
ccttaaattccggcgtcctccagtcacagtgtcccaggtgcggcctactcaatcacccaccccaaaacctggaaagccgcgagagcagagctggagctgccaggagggcagcggaggggagggaggggagctgggtgaacccctgggcagtgttctgtgcgcgacgagccaggcatgctgacggcctgaccacctgtgcgggcgcgcagcacctacggccccccacccctaggcctgggcgcacagagccaccgagagggcttgagggtggggctggaagtctctgcccggctggtctgcggcggcggagggaagttgcttcttccctggccgggcctctccggagcgcagtgccggcgcgcccggagtccgaggagccggcgggcaccccattcgccccctggcggcgccggggacacgccgggagccgttgtagccgccgcagccgcagccgccgccgcggcggaatgagctgtccacagcagcactgggtgccgcccgaggtcacgcaagaatctggcgggaggctgggaactgggaaggcaggccgcctttgaaggcatggggagagacgatagaacaaagcaactatgagatttgggggcttcccctggatccacatcctccaagtcccgcatgggcttccccactagtgtggtgactaacacccagggatctcatccctgagtggtcttccctccctcacccaatctccctcttgttctcaccctttctagaaaatgtccccatatctctcctccttctgcagtgacctgacaatgacagccttgggagacccagccacatcccggccctgccacaccccaaagaactctgaggtggggccaggaggtcattaggagaggagcagcattcaaaatgatcctttgagtgcacattgggagcctggcattgcccttggccttatgggaggtggaagatgttgacctcctggtgcttccaatctcagaagacaaacacactcaagagacaatggcatagcagtggcctggcagcaggagcctcaggggagggcatggcggagatgggctggagtgtgaacactggagttatcagaacgtgctaagtggacaggatttggaaagagaaagagagtattcctggaccaatctggagcatagtggagggctgtcatgagaaagctagtggggccaacctcaaaggccctataaaagatctgtttctgcagcgctagagacagaggggaggagcaagagctggaggctgcaagcccctctgggaggcagcagcagtagcctgctctgaagtgatggctgaggcagggagaggaaagctgccactttcacagtcctgaggggcatgcctgtaggtggg

SEQ ID NO: 10192 - DNA, 1076 bp, Artificial sequence
  DNA replication origin
acccgaccgttatccagtcggttcgtggagaggagaggtgaggtgcagcggacctggcccgacccagctgggaccagggcggggatcaggcacggacagggcgcgtccccgggctccctggggagcgccctgagaactggggggcacccgggctggcctggctcaggcaggggttcgcgcagcccctggggaggggcagggaggcagggaagctgctgccgccagctggatccctcccggcgccccgcggctactctggggctcctggtcgccgcgccgcgcgtctcggcggtggactcacagggtctccgcgtcgctgcggttctcgtctcacgaggagtcggcgggctcggagcggggctcgccacaccccgtcccgggggacgtccgcgggaggcttctggatttcttcgccttgggctgcgatttctgaggcgctgctctgcctattccgagctgggccagccgggggcagggggcaggtcgcgagtcccgcgggtgggagcggagcggaagtaactagtgactggaagtaactagggaacgcaaagccggcgctcggaggccggggtgttcagagaaggcgttgcgggggaaaggaatcccggctgctgttgagagccgtggattgggatctgagcggacctgttggaggaagtgaaatctgagcggggtcctgacgggtgggaactaatctcccggtagcagtggaggttgcaggggggagagaaggaggggaggacccctggggaaggagaccatgaggaaaaacgatttggggactgactggaccgtctgctgggctgttttgggggaaaaaaagtttggagaattaggttagggaggattaggaaaggacccttgagtgcccacctgagaggcactgtgtgctgtggggagccattgaaacgttggctagattggggtagggggaacactgaggaagttggtgtgaggggaacactgaggaagttggtgtgacattccggcaaaaaggtgacaacactcttctctgatgggattcctcaaaccctgcttatgaaatacttgtaaccgacaagggtaggggctcaggc

SEQ ID NO: 10193 - DNA, 1090 bp, Artificial sequence
  DNA replication origin
gccgcgagccgggcagcgctcattcggccgaaggagctacgcgggccacgctgctggctggcctgacctaggcgcgcggggtcgggcggccgcgcgggcgggctgagtgagcaagacaagacactcaagaagagcgagctgcgcctgggtcccggccaggcttgcacgcagaggcgggcggcagacggtgcccggcggaatctcctgagctccgccgcccagctctggtgccagcgcccagtggccgccgcttcgaaagtgactggtgcctcgccgcctcctctcggtgcgggaccatgaagctgctgccgtcggtggtgctgaagctctttctggctgcaggtaagagggctgccgacgcccccggagatcggggggatgggggcgttgtgctgggggcatgggggaaggtcgccgcagcgcacccggcacgggccacttggtggggcccttgcgctctggcggacgggcgtcggcatcggtgcgtgttggtcaggggtctgggcgggtgtctgatgcggcctggcctctcgcccgcagttctctcggcactggtgactggcgagagcctggagcggcttcggagagggctagctgctggaaccagcaacccggaccctcccactgtatccacggaccagctgctacccctaggaggcggccgggaccggaaagtccgtgacttgcaagaggcagatctggaccttttgagaggtgggtgtggaggccccccatccttggaccttggtgggctgttgaagaataagcagatccaagattcttgctgtttgggcaatactgtgggttgagggtattcatggagaacctcggggaaaagctgatcggcctgatgggcactgggggatcctggaatataggtcccactctctctctcttgtcattgcctcacctgctgggttgctgcccttctgggtactccggggcaaattgaatcagacgtgttgtctggggttgttacgttcttcttaggtaagctgggtgataggaacaaggaatggttgagatgctttccctagagctactatgtaaaaatgggcgccagttctaattcccatatcaaatgactatt

SEQ ID NO: 10194 - DNA, 1100 bp, Artificial sequence
  DNA replication origin
ctcccgacgctggcccggcctccccaaagagcctcacggtgcggatccccagaccgacccctcccggcggaggcggctccgaggccccagctggggcggatcgcggagccacagagtccaggtcctcctcaaaggaggtgccgccgcctccgctatcagtcagcattgttcgcacccggagccggagacggtgccgacccactcgcggtcaccgccgccgctgatctcgggaacgagaagagcagcaagaggaagaagcgtctcctttcccccgtcccagcagcgccactaacttctcactgcctaacctgctgcctcccgccccctcgactcgccactggctgcaataccctggcggctgcagatcattggccaaagtgacccgtcgctcaggctcttcgtcacgcgccgctcgctggctcgcagccgccaagctgcgttgacccgcgcaggcctaggcggttgcgaacacccgcctcccactcttcaccagctgacttccgctcttttcctatgtctattggccaacccgcctgactatcgcgtcacgaccttaaagtggattagttggccttgtggtcagtcatagtgaccccgaacaatgggagaattcattggcgccataaagtgtcggtcactttgtcgcgggacgtcgcgtggtacaattggcctgtgggagtaccattgatcccgccctcatctgaggtgacgggaaagggccgggaaatttccacttctgaataaaatgactgctgaagtgatgacccgcaagaattggtcaaatttggagtagacttcaccctgcgcttggtgaaacttctacgtcaaggatgcaagaggcgccgaagtaacgcagctcccacctgtcgctctccgctgggcgccgagactatggccggagaatagctgcaccgggattggagaaaggaagccatcagtcttaggaaggctccaccttcctgccattgcctggttggaggagcgtagcgtcagtcactagagcagtcaccacctctgggacaggtgaagatgtgtaacctatttgccgggggctatttgggagggaatagaggacggggagcgatgaggggacagtcgag

SEQ ID NO: 10195 - DNA, 723 bp, Artificial sequence
  DNA replication origin
caaccgcctaggcctgcgcgggtcaacgcagcttggcggctgcgagccagcgagcggcgcgtgacgaagagcctgagcgacgggtcactttggccaatgatctgcagccgccagggtattgcagccagtggcgagtcgagggggcgggaggcagcaggttaggcagtgagaagttagtggcgctgctgggacgggggaaaggagacgcttcttcctcttgctgctcttctcgttcccgagatcagcggcggcggtgaccgcgagtgggtcggcaccgtctccggctccgggtgcgaacaatgctgactgatagcggaggcggcggcacctcctttgaggaggacctggactctgtggctccgcgatccgccccagctggggcctcggagccgcctccgccgggaggggtcggtctggggatccgcaccgtgaggctctttggggaggccgggccagcgtcgggagtcggcagcagcggcggcggcggcagcggcagcggtacgggcggaggggacgcggcgctggatttcaagttggcggctgccgtgctgaggaccgggggtggaggtggtgcctctggcagtgacgaggacgaagtgtccgaggtaaggctccgggaccctcgcctcccacacattgtgaggcgtgaattctctttgggtaggctctgggccggggccatcctcccgcttccctggtggagcccttctgtgacagcggtcg

SEQ ID NO: 10196 - DNA, 1026 bp, Artificial sequence
  DNA replication origin
cccggccagccgccccgtccgcaagggaggtgggggggtcagccccccgcccggccagccgccccgtccgggaggtgaggggcgcctctgcccggccgcccctactgggaagtgaggagcccctctgcccggccagccgccccgtccgggagagaggttggggggtcagccccccgcccggccagccgcccgtcggggagggaggtgggggggggtcagccccccgcctggccagccgccccgtccgggagggaggtgggggggtcggccccccacccggccagccgccccgtccgggagggaggtgggggggtcagccccccgcccggccagccaccccgtctgggaggtgaggggcacctctgcccggccgcccctactgggaagtgaggagcccctctgcccggccagctgccccgtccgggagggaggtggggggggtcagccccctgcccggccagccgccccgtccgggaagtgaggggcgcctctgcccggctgcccctactgggaagtgaggagcccctccgcccggccaccaccccgtctgggaggtgtacccaacagctcattgagaacgggccatgatgacaatggctgttttgtggaatagaaaggggggaaaggtggggaaaagattgagaaatcggatggttgccgtgtctgtgtagaaagaggtagacatgggagacttttcattttgttctgtactaagagaaattattctgccatgggatcctgttgatctgtgaccttgcccccaaccctatgctctctgaaacatgtgctgtatccactcagggttgaatggattaagggcggtgcaagatgtgctttgttaaacagatgcttgaaggcagcatgctctttaagagtcatcaccactccctggtctcaagtacccagggacacaaacactgcggaaggccgcagggtcctctgcctaggaaaaccagagacctttgttcacttgtttatctgctgaccttccctccgctattgtcctgtgaccctgccaaatccccc

SEQ ID NO: 10197 - DNA, 1498 bp, Artificial sequence
  DNA replication origin
ggacggggcggctggccaggcggggggctgacccccccccacctccctccccgacgggcggctggccgggcggggggctgaccccccaacctctctcccggacggggcggctggccgggcagaggggctcctcacttcccagtaggggcggccgggcagaggcgcccctcacctcccggacggggcggctggccgggcggggggctgacccccccacctcccttgcggacggggcggctggccgggcggggggctgacgcccccacctccctcccggacggggcggctggccgggcggggggctgacccccccacctccctcccggacggggcggccggccaggcagaggggctcctcacttcccagtaggggcggccgggcagaggcgcccctcacctcccggacagggcggctggccgggcggggggctgatccccccacctccctcccggacagggtggctgccgggcggagacgttcctcacttcccagacggggtggctgctgggcggaggggctcctcacttctcagacggggcggctgccaggtggaggggctcctcacttctcagacggggcggttgccaggcagagggtctcctcacttctcagacggggcggccaggcagagacactcctcacatcccggacagggcggcagggcagaggcactccccacatcccggacgatgggcagccgggcagagacgctcctcacttcctagatgggatggcggccgggaagaggtgctcctcacttcctagatgggatggcggctgggcagagacgctcctcactttccagactgggcagccaggcagaggggctcctcacatcccagacgatgggcggccaggcagagacgctcctcacttcccagacggggtggcggccgggcagaggctgcaatctcggcactttgggaggccaaggcaggctgctgggaggtggaggttgcagcgagccgagatcacgccactgcactccagcctgggcaccattgagcactgagtgaacgagactccgtctgcaatcccggcacctcgggaggccgaggctggcggatcactcgcggttaggagctggagaccagcccggccaacacagcgaaaccctgcctccaccaaaaaaacacgaaaaccagtcaggcgtggtggcgcacgcctgcaatcgcaggcactcggcaggctgaggcaggagaatcaggcagggaggttgcagtgagcccagatggcagcagtacagtccagctttggctcggcatcagagggagaccgtggaaagagagggagagggagaccgtggggagagggagagggcgagggcgagggcgaggtccttgaactttttcatagctccagttgaaattcatgagagtggtgatgactctttgttttgtttttttaaattaaccagcctagaatattctttttatttttatttttatttttattgagacggagtcttgctctgttgcccaggttagagtgcagtgg

SEQ ID NO: 10198 - DNA, 1610 bp, Artificial sequence
  DNA replication origin
agatgagattcatgaattattgaggggaagctgagaggcatagagggcatggactgtggagaggtggtgagcgcaggggctggtttggcccaggcaactcagcctccttgaggggccctcatggtctctcccaacccacatgccatgctgaccgtggtggtagaagtggagtcggggaggggttcaggtaagatgccctccccatttatactcagaaggaatgcagtccaggacagcctcttggaagagggggagggttaggccaccttaggttggaaaactgaggcaaagtttgagggcagaactcaggaatcccagagccagttttcctcatgagagctgatatgcagtctacctttctcaggccctgaggacagctgtagccccacacacctggtggggcccacaaacctctgtttgcttcattttgggactctagagactcaggtggatgggcgttgtgtgtgtgttggggtggggggtgggggggaggggagtggggcggggagtgcaggggaagatgggaatatcatggttgaccccagccctgcccacaggaacaaaacttcacctttgacagtcctgggccctgatgctgctcaggtagggaggtctgggagggtgatgagaggagggtgggagccctcaggcccctggatcctggagtgccagctgcctccagagctcctttgctcagggcacctgagtcagtggactgtgcctgtgtgtccctgcaggaggcagagcaggagctgctggcacgtgtccaatccacactgggctctctgggccgagggtacagtgtggccctgttgctccgggggagggaaacagaggcaccccgacttgtgcctcaggtgagtcccagaggagccaccagggcgcaggcctcatgcagctcaggggttaccttccccggagacttctgagaatcttccctccccacatcagccctcactggggctcctacagcaagcatcctgttggtccccgcaagatgttttgccaaggtcaatttatgcagctactgggaggtcatggaaggtgggaaggggccgggcgtggtggttcacacctgtaatcccagcactttgggaggccgaggtgggtggatcacctgaggtcaggagttcaagaccagcctggccaacatggcaaaaccccatctctactaaaaatacaaaaattagctgggcgtggtggcggacacctttaatcccagcttcttgggaggctgaggcaggagaatcacttgaatctgggaggcagaggttgcagtgagccgagatcatgccattgcactacagcctgggcgacaagagcaaaattccgtctcaaaaaaaaaaggcgtttttcgggagtcaagatggccgaatacgaacagctcaggtctacagctcccagcgtgagcgacgcagaagacgggtgatttctgcatttccatctgaggtaccgggttcatctcactagggagtgtcagacagtgggcgcaggacagtgggtgcagcacaccgtgcgtgagccaaagcagggcgaggcattgcctcactcgggaagcgcaaggggtcagggagttccctttcctagtcaaagaaaggggtgacacacgg

SEQ ID NO: 10199 - DNA, 955 bp, Artificial sequence
  DNA replication origin
ataaaatgcctcaaccacggagtctgcgtgtgtcagtgatgcctagccccgccttccccagcagaccaatgtagggatggaaaagggagaaaaacagtaaacttgtgaccctgaggttcttgtctccagcgtccaccctgcggcttgggagctcctcctcgggaggcagcccccgtacatacgcacccgcgactttgcagctttcacctgaaggtctgagcgaagcccgggcggcgcacgtgcagtggatacctccacccccctgggaggcggggtcgcgctcagagccaatgagagcttgcggggtggaggggtagggaagcttccagaggccggtggggaggaagttataaagagggtacgagggggccagctggagagccatgcagtccaagcgggattgtgaggtaagcggctggcgacttgggggccggcgagccccgccggagcgggggtcggctttagggaccccagtaccacaggagaggtgggggcgcgcttggcgatccgccattccaaccttcctttccctctcagctgtggtgtgagagggtgaatccagagaacaaggcggcgctggaggcgtgggtcagggagacaggcatccgcctggtgcaggtgaacgggcagaggaagtatggcgggccacccccaggtacggtagtcccagcccctccgcctgtccggctacaccagccccctttgggggaggggctgctccgagccttcactgtcagaaactgcgaactacccggatttataccccccagcaaaggaggaactgtggctccacgtccacccgccccgtcgagggagggggccaatctcaaggtgtacctactctgtgccagcccccttgttagcgcagtcacctaattatgccaaccacccagggtacgggtgtaaacccatttcacagacctttgttcacatcgcctcccacccccgcgcgctg

SEQ ID NO: 10200 - DNA, 1148 bp, Artificial sequence
  DNA replication origin
gcaacccggccccaagcgccgcagctcaagccccagcgcgcgagccacgttgcccacgagcgcgccgggtgcctgctcctctggcacagagtatcgcagctgggaggccgcagggccaggtagcagcagcagcaacagcagcaggagaggcagtagcagcagccagggcatgggccgccggagccgtggatgctctgtcgccgcaggtctggtgcccgcctgctccatagccactggccgcggcggaggcagccgggcagggccggaggcggcagcttccccagccgtgccccacgcccgggccccgcctccgctcgtgccaccctgcgcctgctcccccaccgctcacgctctagaaagcgcctggggccgctccctccgtaggccctcccaagggctcctggccccaccgtcctcgctgactccccatattccagctcctccgctcgcctccgagtcgctcaacccggctcggcttcctgctgctgctgccgctacagctccagggggagggaaaaggaaacagaagggaagacagagggggagggggaaagggagcggtaggagggctcagcaagtcctgctctgattccgcgccgaagtggcggacagcgaacccggactgctcagcctctccagccccatctccttcaccctggacctgccggatcccagcggaccgcaggaacacggccactccctttctccctacccccactgtccagttcatccagtctccaccgtctctcccctgcttaacgggtctttaaggagattagtctgggaaaagcagtcaagcccctagaagtctggctatcagctccccaggaaaagatctccaagcgcaattcaggaaaataaactgaggggccttagctaagtatgggcacccaggcggcggatctaacattaaaaggaaacaacgcagggggaggcgctctggggttactggcgatgggaactattcacctgactcccacatcttccctggacactcttaagtactgcagaaagtgctcaactcctagggcaaaaggagggggatggcaaatgctgccctctttccgggagcaagcctaaaaccagcatcctgggatccaagactcaattctgctctcggccaagtggcccttattttcagtgtgtgc

SEQ ID NO: 10201 - DNA, 1825 bp, Artificial sequence
  DNA replication origin
ggggcacggctggggaagctgccgcctccggccctgcccggctgcctccgccgcggccagtggctatggagcaggcgggcaccagacctgcggcgacagagcatccacggctccggcggcccatgccctggctgctgctactgcctctcctgctgctgttgctgctgctgctacctggccctgcggcctcccagctgcgatactctgtgccagaggagcaggcacccggcgcgctcgtgggcaacgtggctcgcgcgctggggcttgagctgcggcgcttggggccgggttgcttgcgcatcaaccatctgggtgcgcccagtccgcgctacctggagctggacctgacgagtggagcgctcttcgtcaacgagcgcattgatcgggaggcgctgtgtgagcagcggcctcgctgcctgctcagcttggaagtgctggcgcacaaccccgtggcggtgagcgccgttgaggtggaaatattggacatcaacgacaactcaccgcgtttcccgcggcccaactaccagcttcaggtaagcgaatcggtggcgcctggagcgcgctttcacatagagagtgcgcaggaccccgacgtgggcgccaactcagtacagacctacgagctcagccccagcgagcacttcgagctggaccttaagcccctgcaggagaacagtaaagtgcttgagctggtgctgcgtaagggcctagaccgggagcaggcagccttgcaccacctggttctcacagccgtggatgggggcatcccagcccgctcgggtacggcacagatctctgtgcgtgtcctggacactaacgacaactctcctgcctttgaccagtccacttatcgcgtccagctacgggaggactcacccccaggcacattggtggtgaagctgaatgcctcagacccggatgagggctccaatggtgagctcaggtactccttgagcagctacacgtcggaccgggagaggcagctcttcagcatagatgccagtaccggggaagtgcgagtaattggggggctggattatgaggaagcctcctcctaccagatctatgtgcaggcgactgaccggggtccagtgcccatggcaggtcactgcaaggtgctggtggacatcgtggacgtgaatgacaatgccccagaggtggtgctcacggacctgtatagcccagtgcctgagaatgctacacccaacaccattgtggccgttctcagtgtcaatgaccaagactcaggccccaaccggaaagtgagcctgggtctggaggccacactgcctttccgactgaatggctttggaaactcctatacactggtggtgagcggcccactggaccgagagcgggtggctgtctacaacatcacggtgacagccacagatgggggaataccgcagctcacatccctgcgtacactgaaggttgagatctctgacatcaatgacaatccaccaagcttcctggaggactcctattccatctacatacaggagaacaatttgccaggtgtgttgctctgtactgtgcaagccacagacccagatgaaaaggagaatgcagaggtgacctactcccttctggagagggagattcaagggctgccagtcacctcctatgtctccattaacagtgccagtggcagcctttatgctgtcaactcctttgactatgagaagtttcgggagttctttgtgactgtggaggctcaggacaaggggagcccaccactgagcagcactgtgactgccaacgtatatgtggtggacatgaatgaccatgcccctcacattctgtaccctacctcaaccaactc

SEQ ID NO: 10202 - DNA, 1045 bp, Artificial sequence
  DNA replication origin
accaggagcacgtgcagcgtggcggtggccgagcgcggaggctcgccattgtccttgaccagcaccaccagcctctgcttggcagcgtcgcgctccctcagcagcctggcggtgcgcacctcgccattgtgcgcccacacgccgaacagcccgggctccgtggccttgagcagctggtacgacagccaggcgttctggcccgagtcgccgtccaccgccaccaccttggtcaccaggtagcccggctcggccgcccggggcaccagctcggtgcagggcgcggagccgttctgcagcgggtacagcacgaagggcgagttgtcgttggcgtccagcaccagcacgcgcaccagcgcctcgctgctcaacgccggggagccgcggtctgcggcgcccacgcggaactcgaacgcctgcagggcctcgtagtccagcgactggagagcgaacaggtggccgttgtccgcgttgatggagaccagggaggcgaggggcaggtgcgggtcctggggcggcagcagcgagtaggtgacctgggcgttggtgcccgagtctctgtctgtggcgctgacgctgccgatgtgcagggcggggctgttgttctcgcggacgaacagggtgtaggaggtttgggtgaaggcgggggcgttgtcattgacgtcggagaccagcacggttatgttgtgctcggttttcagcctgggtgtcccgaagtcggtgacggtgatggtgatgttgtattcggatctggtctcccggtccagggccgtgcttatcaccagagtgtaaaagttctcaacagaaggtttcaagaaaaaaggaagatcatcttggatggagcacaccatccttccgttgtctccggagtcaggatctgaaacgctgaatacagcaatgagggtgtcctgcaagttttctgggatctgattgataagtgtcgacatagttagttccggaggattgtcattcaaatccatcacttggacaaataccacacaagttccagataggcccccaccatctgtcgcctgaatatttactgtgt

SEQ ID NO: 10203 - DNA, 925 bp, Artificial sequence
  DNA replication origin
gcggtggccgagcgcggaggctcgccattgtccttgaccagcaccaccagcctgtgcttggccgcgtcgcgctcgctcagcagcctggcggtgcgcacctcgccattgtgcgcccacatgctgaacagcccgggctccgtggccttgagcagctggtacgacagccaggcgttctggcccgagtcaccgtccaccgccaccaccttggtcaccaggtagcccggctcggccgcccggggcaccagctcggtgcaaggcgccgagccgttctgcagcggatacagcacgaagggcgagttgtcgttggcgtccagcaccagcacgcgcaccagcgcctcgctgctcagcgccggggagccgcggtctgtggctcccacgcggaactcgaacgcctgcagggcctcgtagtccagcgacctgagggcaaacaggtggccgttgtccgcgttgatggagaccagggaggcgaggcgcaggtgtgggttctggggcggcagcagcgagtaggtgacctgggcgttggtgcctgagtctctgtctgtggcgctgacactgccgatgtgcagggcggggctgttgttctctcggacgaacagggtgtaggaggtttgggtgaaggcgggggcgttgtcattgacgtcggagaccaggaccgttatgttgtgctcggttttcagcctgggtgtccccatgtcggtgacagtgatggtgatgttgtactcggcttggctctctctgtccagtgttctctgtgtcactagggtgtaaaagttttttaatgtgggcttcaaaagaaaggggagatcattctggatggagcaaatcatcctaccgttgtccccggagtctggatcagaaacactgaaaacggcaactacagtttccggggcattttctggggtagggctggagagcgtagacatgg

SEQ ID NO: 10204 - DNA, 907 bp, Artificial sequence
  DNA replication origin
cgtggcggtggccgagcgcggaggctcgccattgtccttgaccagcaccaccagcctgtgcttggccgcgtcgcgctcgctcagcagcctggcggtgcgcacctcgccattgtgcgcccacacgccgaatagcccgggctccgtggccttgagcagctggtacgacagccaggcgttctggcccgagtcgccgtccaccgccaccaccttggtcaccaggtagcccggctcggccgcccggggcaccagctcggtgcagggcgcggagccgttctgcagcgggtacagcacgaagggcgagttgtcgttggcgtccagcaccagcacgcgcaccagcgcctcgctgctcaaagccggggagccgcggtctgtggcgcccacgcggaagtcgaaagcctgcagggcctcgtagtccagcgacctgagggcgaacaggtggccgttgtctgtgttgatggagaccagggaggcgaggggcaggtgcaggtcctggggcgggagtagcgagtagttgacctgggcgttggtgcctgagtctctgtctgtagcgctgacactgccgatgtgcagggcggggctgttgttctcgcggacgaacagggtgtaggaggtttgggtgaaggtgggggcgttgtcattgacgtcagagaccaacacagttgtgttgtgctcggttttcagcctgggtatccccaagtcggtgacggtgatggtgatattgtactcggctgtgctctctctgtccagtggtctctctgtttccaacgtgtagtaattctcaactgaagattttagcacgaatgggaggtcttccggaatggaacaaacaattcttccgttgtccccagagtctatatcttggatactaaaaaccataaccacggtctctggcgtattttctgggatt

SEQ ID NO: 10205 - DNA, 967 bp, Artificial sequence
  DNA replication origin
atactggttgatgacaacactggcttgaacaaagtgaccactctccaatggctactctccctctcagtgggccgcaggttgctagggctcaggctgtggctgttttccccgccgaaaaggggcggggtcagtcggtgtgttaggaaaaaaaatgtatatatatatatatgttgtctgcctccccacagagataacaacccgtggaaaaacatgccgttgagcgggaggaaggcgaaaagataggctgggttttttggggggtgggggagcgtggaggatagggtgggctttttcccctccaatgctgcgacgcattaaccctgctgctgttgggacgttctctgctcagcctattggctgagcccgggagccgctgtctgccaatcgggtggtgaaaggcagacaaatctaccccgccaccagcaaaaacggcgcgtaacccttgcggcgccggccgaaccgcgccagagctggcgcggggaaagggagataggtgtctccagctgctgtggctgtttggggcgggtcggcttcatccgcgtctcaggagcaagtagagaattagcgggcggcagcaatgctccgcaaggtgagaagctggacagaaatctggcggtgggctacccttttgttcctcttttaccacctgggttacgtttgtgggcagatccgctacccggtcccagaggagtcacaggaagggacttttgtagggaatgtcgctcaagatttcctgctggatacggacagtctgtcagctcgcaggctgcaggtcgctggagaggtgaaccaaagacacttccgtgtggatttggacagcggagccctgctcatcaagaacccaatcgaccgagaggcactgtgtgggctcagtgccagctgcatcgtgcccctggagtttgtcaccgaaggtcctttggaaatgtaccgagcagaggtagagatcgtagatgtgaatgatcacgcc

SEQ ID NO: 10206 - DNA, 1882 bp, Artificial sequence
  DNA replication origin
tgctgggagctggggagaaatcgaagaggaaatctacagaccggcgaagcgtgccggagccggcgcctaggaggctggctgcaggggtggatctgtgactgcctcctcccgggacccccgacacccgcggaaatcgcccgaaattcaccggaagctcgaaggaggccccggccttttttgagtgtaggggtgggggtcggtcccacctcccctcgcccacagtcgccaccacccccggtgctcggagccccatcccttaatcggccactctggtttcgcgcaaacggtccaatgatcccgagaatcgggtggagcgcagccagcgaccaagccggccggagaggagtggatgcaagttcaatcccttatgaggacgggcggcttctccagtgccgcccccaggggtcgcccggggcggcgccgagcccctcacctggctccgctcccgcagcgtattagagcgggaccggatggcgtcaggctccagcgccagagctgtgggctgctgaacgctgaggggtcttagaaaagtgaagtcactgccgtccgaggccggtgaaaagcacgtcctgtagcagtggctctgcgagtctgtgggccgcagcgtcacctccatgtacttgagcgtgccgtccgagctcacctgcaggttggggctggactgcttatagaagtccggggagggtgagtcctggcgcctgcagcactgccctccacccccgtccccgtctgcgtttccctgaaggcacttcgctgacagaaaggtgaaggtgactagggataagagactgacggtcgctagagccacaatgaggtaaagggtaaggtctgaacgctcaggagggtgtatgaggaagtcactggatttgggcatttcctcagggtcctcatcctccagaaccagcagcactgtggctgtggaggagagtgaagggtcaccattgtccctcaccaggaccaccacctgctgggtgtcagagtcatcctccagtaaggcccgggctgtgcgcacctcaccagtgtgtgtagacacgaggaacagtcctggggctgtggactgtggcaacagtgagtaggagagccacgcattgtggcctgcatcagcatccacggctgtcaccttggtgaccaaggagccaggaggagcagagcgagggagacgctggggggctgagtgttcccagtctggccgtgggtgcagcacagctggggcattatcattctcgtctaggacaaacacatgcagagatgtgttggcatgcaatgggggagagccggagtctcgaacccccaccacaatctgcagcatctgcagcaattcatagtcaaaggtacgctgggcaaagatccgtccatcctctgggttgacatacacaaaggaggaggctggggctccctgaacctgatttcctacaatggagtaggtgaggcgggcattatccccagtgtctggatctgaggcagccacagtgcaaagaagggagcccggaggccggttttctaggatgtaagcagtgtaaagctgctggttgaagcggggtgcattgtcattgacatctgaaatgttgagcctgatggtgagatgtttgtgtagggaaggtgaaccagcatcgctggccagcagctcgatgatatagtgggatgtggcctcccggtccaaaggctggctggttagcagcgagtagtggttctcagaaggcttaatctgaaatggcaggtccggagagatatcaaggctcacttcaccatttctacctgagtcccggtctcgcacattaaacaaccccactactgtgcccactggtgtgctctctaggacagggttggccaaagaggccaatagcacctctggggcattgtcattgacatcccccacatccac

SEQ ID NO: 10207 - DNA, 902 bp, Artificial sequence
  DNA replication origin
gcccaacgcggagccctgccgcgcctcggccactgggcagctctgcctgtccgcctgctcgaggcttctgggttgaggggtcgccgacccttgagacggagtcccgggaccatccggacctctggcccaaggatcgtagagtcctgcccgcccggcacttagagcggcagtcgctccagcgctcctggccccgcgcctcgctcaggccgccccccaggcgacccggcccagcccggggcgcaggtgggagaggtgagaggaggctccggagtcctcgcctggtcctgggcggccgcgatctgggaccctcaggcgcgcacaatcagctacgagtactcctgagcccggcggagggagcggcagaggggagctgcgagtggaccggaacaggcctgtgaatctggccgcgagcgagtggcagtgaaagctggtattcgcgtaagcccacgtgcgaggagtgcgtgcgtgcgtccgcgcacgtgttggcggggcgtggcgagcccgtgcaacttgtgtgggccgtgggggtggccagcagggaggacacgcatgagccccgcgcgcacacctaagtcccgcagacaggtgcggttgggtgatgcggggatagggagggtaacagtgaagtcacagatgctgggagctggggagaaatcgaagaggaaatctacagaccggcgaagcgtgccggagccggcgcctaggaggctggctgcaggggtggatctgtgactgcctcctcccgggacccccgacacccgcggaaatcgcccgaaattcaccggaagctcgaaggaggccccggccttttttgagtgtaggggtgggggtcggtcccacctcccctcgcccacagtcgccaccacccccggtgctcggagccccatcccttaatcggccac

SEQ ID NO: 10208 - DNA, 1353 bp, Artificial sequence
  DNA replication origin
gcgtgggtgttgtccactggtctatccggtacgcctggcgcagctcctgccctcagatgccccgaccgagcggagagtcaggaatcttctccgagggctgggggaagccggctttccgcacctttgagggacggagtggcgggatcttcggagcttcctagagaagtgaccacggcctgcgcccggtttggggcaagcggctggatgggatggctcggcttcccgaggatctgacccccggccggagacaaatggccctcgcatcctaggagctatgctgccagttccctgcccaacccgggacgctcaaagccccagataccgggagagctgagccgggcgaggggcggagctcccctgggggcgtggcctgggtgtggatggaggcggggccgcaacgcccagttccgcagaggccggctacgtgcttgcgcagcacgcacggccggggaggggctggcggcggccgcgggcggcgggcggcggaggtgcggggcctgctcccgccggcaccatggccaagaccgtggcctatttctacgaccccgacgtgggcaacttccactacggtgaggaaacagggatatgcatgaggggttgggacacggaggttttgaggcggggttgcaactccaggggtgagagctgacgaactctcttctccccacccccaggagctggacaccctatgaagccccatcgcctggcattgacccatagcctggtcctgcattacggtctctataagaagatgatcgtgagttccgccgcctcggccgggggttggggggtggggcgagctgtggccgtagggataggtgggctggactgagtgcatgaagtgcgacccgcccctagagtatcggggagctggatagaagtcaccaggagtaccttgaaagtgcagggtgttgggggtggcgtcctctgcttaatggaaagtactttctcacctcaggtcggccaccctctgactgtaggcacactagcccttggcctagggttagcgtgatgtggggctggtttgaagacagaaggtgtgttcctcctctgcattttagagtgtggatagggccttggcctcaggaattagggttaggggagcggatatcactgtatcagggtgtgaggtttaccctcagttcccactcctcttttaccacctttctttacctccaaggagctagggctccagggtggaacgatgctgccgtctttgtaaatgtgtatgtgcgtgtggaacagaggcgatattttagatattcctttttcagcctggaatacctctacatggttctgcttaatcgctatccagtttttcatctaccagacatacacatgctgtcttcccag

SEQ ID NO: 10209 - DNA, 1726 bp, Artificial sequence
  DNA replication origin
tctccgctcggtcggggcatctgagggcaggagctgcgccaggcgtaccggatagaccagtggacaacacccacgccggaccgcctgtcccctacccggacccagactcggcgccgcacattgccccgggggggcccggcgcagtcacgcgcgcgcagagctcacgctctccgccccgcacacctgcgctccgccccctggtcctgggcccgcgacgggtgaaggcatttgggaagccagggcggctgcggaggcgatctccctgacccagggccggagttgcccggagcctgccaccgctctcagccagcccgcatccttctctgttcttccctccccccgcctgccacggcgcgggtatccgcagccacagcccggggccggtgaggcggcgaagggggaggggaggaatcaagggatgagcgccggaagggcgtcgggggccctgagccgcactaggacgcccctggagccggaaccccagcagaagccggaaccagaaccaaatcaccggtaccgggtcggccaggtggtcagggtgggagaaaccaaaaagggagaggggtgcgggagtactgagaggaaggggctgcagaggcctggctcaggccggcgtggaggaggtgcgggcgctgactcaggcaggatttctgctcccgccgcctaagaatgccgtcccatctcgtgctgcagtgtccttgggagggacagaagcgcgaacaagctggaaaggggaacgctcggggcgtcggggaagcgggaccagggtcgtggtagagagcttgcgttgccgctgacctcttgccgaaaggcgaaacagcactcctggcccggacagctccctggttgggtagggggtggggccggacctcagccggacgtcttagacgtgcttgtttcagatcctgaggacggcattcctacccctcccccattcccagctgcagccccctaaacccaggaggcgccctggcccgcgctcgccccccagggcctcatgtcggaaccacagcctgacctggaaccgccccaacatgggctatatatgctcttcctgcttgtgctggtcttcttcctcatgggcctggtaggcttcatgatctgccacgtgctcaagaagaagggctaccgctgccgcacgtcgaggggctctgagcctgacgatgcccagcttcagccccgtgagtgaggagcctggaaccctggctcagtcacctttcacccttctccccacacctctgcctccctgaccaacagacccaggccaaatcctgatcaaacctgctcaggaagcctagtgatgcactcttgagttagcaagtggggtgacaccactctgaaagcaaaactagagaaagcagcatgggcaggaacggtcctctggatggtagtcttgggcttgcattggtgtccccatcttttctggtccctgaaatgctgaggtccagcatgatagcaagtaggtaaaagggtatgtcctaagcaataaatgatgggagccaccaggtaatattcccccaaagctgactcattcctgcttccttgccaatctctttcatccttcagctgaggacgatgacatgaatgaggacacagtagagaggattgttcgctgcatcatccagaatgaaggtgggtctagcatagccccttgctccctcttctccaaccttctcttgccctgacctccacctccactgactccctcttttccttcttccctcag

SEQ ID NO: 10210 - DNA, 1126 bp, Artificial sequence
  DNA replication origin
gctttttcaccaggcactccagaaactggctggcccattcctgaagagggaagggcaccggagcggtgagatggacagcaggtgggccctatggagggggagggccacagaggccaaaaagtgatggggagctcagccccaggaacctgtggggatgaaggcctagcaagtggggaaggcacgtgagctgtaggtagagctgacacagcagcagcagaggagctgacccagcaaggacactgtgggtggggtggagggcaggagtgaggcttgtggctgagctaatgggctgatcgattgatgggctcccagacaagggaggatgggaaagcactctgtctcccatggtgttggtcagggggcagggggtgggggtggtctcatgaagctgtggagtgctctcctcctcaacacagaccttctctggggaggggcaggacagtgttcggtgcctggcgctgcctgctggatgccaccgtggctgggggccaaacccgactccaggcgtctgaccgataccgtgacctagcagggggtacagggcggagcgccaaggagcaggtgcttaggaaggtatggctcagaggttggggtgaaggaagagctggcttgggaccaaaggtggtctaggtaaggactttgtgtatgcatcccaatagggaacagagaacctccagagggcgcaggctgaggtgctgcagtctgtccgggagctgagccgaagtcggaagctgtatgggcagcgggaacgtgtgtgggccttggcacaggagaaggcggctgatgtccaggccaggtggggtcatggagagtgaggaagcccaaggttggggaacagggaggtggggctgtctaggggtggagccaagtcaccaaagctgggcctgactctgatctcatattctcccacttggggtgggcctgactcctttctctcatctgcacaggctaaaccgaagtgaccatgggatcttccactctcggaccagtctccagaaactgagcaccaaggttcgagggatgagggcatgagtgggggcagggaagagggaggcagagtagtctagtggtttggaacataggtgcatatgtatgaaagactgggttgaatccaggctctcctact

SEQ ID NO: 10211 - DNA, 1050 bp, Artificial sequence
  DNA replication origin
cacacacacacacacaccctgatggcctacacacacacacacacacacacacacacacacaccccctgatggcctacatgaggaaaacagcacacccggggctcaggcagcacagaggaatacagggttgacaggcacaccgctggagcaggcacaatactcacaaagaacatggacagggtcctccggttgtgtagtcgccgctggacacaggtggggtggggacaaggggaaggaaagacataaagacacagtgaggactagcaacaggagacaggggtggggaatgggggtgaagaaggcagaagggagggggacagtgagcatagggtggcaccaggctagcaggcacaccactgcctactgcaatgtgacaagggctacacgacaggaatcgggttggggcagggtggggtgccttaccagggtctgattggcagagaggagggtggctccactgtcatccccacggataggcagcaaaggcatagtgccaaacttctgacgggcaaggtcagaggaggaatggcgtcgtaagaccactggctgctggtcatcgtgctggtgggagcgtgaggggttggcatcagtgggcatgaaaggcactgaggaggacagctgggccccagggggaccacagacccagccctcagccttttctttcccctcacctgggctttaaggatgctggtggtccaatcccacatttcatcctcgtcagtgcaggacaagtagctggggtgatcagaatggaatcagagggagagagagggtcacagctataggaatggagcatacaaagagggaagagaaaagacagggtgcagaggtgggccagaggagaagccagggcaggaggtactcacaggtgcatcttctctagtatcaatgtgaagccccacctgggagacaaagaacagtgatggggcagtcagaaagggcaggggggtgaaggcaggaaggccctggaagtgcgggctggggaagaaaactcacggtgttgggggctttaacttcttgcggattcccaggtagaccttggcaccttcc

SEQ ID NO: 10212 - DNA, 1672 bp, Artificial sequence
  DNA replication origin
tgcgcttgcacaaggagtggccggggccccgcggagggaaccggccgggcggggcggggctgggcccgtcgagggagggcagaggggaggcggggccggcgcggcgggacccagaacctcggacgagcggcgggcacccgcgagcggacggcggccgcgtagtgaggtgaggacccccgcgccccccgggtccctgcttcccagactcctccccatcaccttctcgagggccttcgtgggctcccaggccccctcggcgccggcggccctccccatccctgccacgacccgcccctccctcctgctgcccggcctctgccccatccctcctcgccccctccctcgtcgcagcctgcgctgcccgccactgcccgccccgcccccgccactcctgtcccgcgagcacctcagctcccagccccgtgctgtcgagcccggcctgagtcaccgggaaaccgggccctgagtcagggcccgaggctcagcacgcgggccctggcttgggaatgaggcccagctggagagaggcagagggaggccagcagtgatgctgggacggagagggcgtcctggtcaccgacagagcacaagagtaacagggagagagcctaggccgaggcggaagacagaaacccaggctcagaggcagacagagacacagatacaactcaagatctggttagaattgtagactgagtcaaggacaagcttaataacagagagcaaaacagggtgggacaaggagagggacaaagaagaattgagaggttgagatggaatggggcagggacagtgacaaggcagagataaaactcaggggccacagaattagagacaggtctatgaaatagaccagggtcagggtcggggtcaggctggtggaagggggacagagcacagagacctgagcccaagggaatgagcagggaaaaggcaagctcagaaaaggaaggcttggagaaagcagaggtggggggatggcatttcacactgccaaatcgctacagggcatgtgcacacacaggtgaacagcatgtgaacatgctgccggtgggcagagagtccagaagcctctggagtacccctgaccagaggtcaggcctcatctctctggcatccccatccttattcttcaattagcctccacccagggccgggaccccacacattaggactggttagggctctcccggcagcctgaccaaagcaggcaggatgtggaggcggccagggctggagggacaggaaggaagtctgagcagagacaataggtggaaggggaggagggactgggaacaaccaggattaggacggcaggcctgcatacatcggctctggaaacaagagggagggggcgtctgcacctccttcctcctatctaggctgcccctctccctaccttactccagagctgattggccacatcattggcccctcctctgcatctccctatcccactctgacccacagcattctagcatcttgtcccatgcttactcagttggatgtgcagtcaggcaggagcagagctttgacccagacccagggtgggcaggaactgaggggccaactctagcactgacttactgtgaacctggggcaagccccttcccctctctgggcctcagtttccttaacttcaaatgaagtcccttccctaagtagagagcca

SEQ ID NO: 10213 - DNA, 903 bp, Artificial sequence
  DNA replication origin
agcctcgggccctgactcagggcccggtttcccggtgactcaggccgggctcgacagcacggggctgggagctgaggtgctcgcgggacaggagtggcgggggcggggcgggcagtggcgggcagcgcaggctgcgacgagggagggggcgaggagggatggggcagaggccgggcagcaggagggaggggcgggtcgtggcagggatggggagggccgccggcgccgagggggcctgggagcccacgaaggccctcgagaaggtgatggggaggagtctgggaagcagggacccggggggcgcgggggtcctcacctcactacgcggccgccgtccgctcgcgggtgcccgccgctcgtccgaggttctgggtcccgccgcgccggccccgcctcccctctgccctccctcgacgggcccagccccgccccgcccggccggttccctccgcggggccccggccactccttgtgcaagcgcaggcctccaaagggtttgggcttcttgcccaaccgccgcgcttatctccgagtctgcccccagtctgccctctcgcaggccgagaaaggaccagaacacgttgggacgaagacaacctcagggagagggacaaagaggcagagaccgggacggagactgggacggaggtagaaactgagaaagggagagtgccagggacggctttgcatcctctccgctgctcccatgccctccagtcctgccaaaagggaggaggaaaggtcgagccctaatcccccagggcacctctcccacgcccggaagggtggctggaccctggcaaccagtttagtgtggggacggaagctggacatccagaattgagacttggcctgggcaacaagcgcagaggcccagcagaggggtacccgtctgtttctccc

SEQ ID NO: 10214 - DNA, 862 bp, Artificial sequence
  DNA replication origin
tccagcagcaactcccccatcatatccacctaccccttggtggccacaagactccactacctgggataagagggggctgctgtccctgccaaggcttccataaagttggcctgtcagcaggatctgcggggagctgctagtctcatccctgacactccagcgtggctgaaagagggactgcatcctggccccagtactctagggatttatagtcctagggacccgtcccgctcctccttgctgctcttgggcctgaagaagtgagttttcagggattaactgatttaaggaggattatgcagggctagggggaatgaattatcagcggagagaaccgcagcacccacctgctggagcagccagcagtgcagcatcactgaggcctgcggatgatatttcaggaggaggtgggtagggtgagagagacccttcaggctctgagggtagctcccaggtgtgaaggtgctgcgttggggaggggaggggaggggagggtaaaggataggggaggaaaggagtctggggaaggagggggccggtggaggaggaggatgaataatttggttaggtagagggggaggccacaggagggtggatagactgatagaaggaaggaagggagggagaagggaggggtgggtgaagagagcacagagggagaagctctggatggagaggggaagataaggagaggtggggatgccaggacagtcgaataaagcagtgcaatctcaggggagtctgtagggaagctggcgggagggaagtcactagggagtgggggctccatgcttcgggaggaggggtgatgggggcctctcccaccctaggctaacctgagggaaggggcatgggcttgaac

SEQ ID NO: 10215 - DNA, 878 bp, Artificial sequence
  DNA replication origin
ctgcactcggtgctgcctgtccactgattggccgaggctgccgtttccatggtgatctacggcaaagcccaggcccccccacccccttagcccccgcgacaggccctattcagtggcgagagccccgacagtcaggttaataaaacaggagccgcgtgaggagccgggctgtgggccgaggtcccagcgtggtggcccgcccggaggagagggggacggatgggggcagggagcgaggagcttgcttgctgcccagtcgccgccctccccgactctgccaactgcaggttatggggctgcaccagctctcggggacttggggttcgtctcctggaatgcaccttcccatagtggcctctgggggcagtgtcccctcccccatgggttccactgggcccctctaatcagaagggttggagttctggggctggggctgaggaaagggagagatggagatggggtaaagaagaaaaatggcagggaaagactagaatgggaatcgggtgggagactggggtgagatggggatggatgggagtggagtccaggttggggatggagaaatgaaaaggggaatgaggaaggagatgggaatgaggccagggggaggaagggatgagttggaggaaatggaaggtagagacctgcgcatggagaagaggctgggatggggagagggagggagctggtggaaggtgcaaggtggagaggagcatgggatgcaggaagaaggtggagatgagaaattgggatgggagctaagatggagtgagatgaagaaggatggcgtgggagagagggtggttaagaagggtacgatgagggatagagtgtctgggaaataggcacagcctctgactagctcacctctatgccca

SEQ ID NO: 10216 - DNA, 841 bp, Artificial sequence
  DNA replication origin
gaggggagaggacctggaccctgcatgggagaagggccagcgtggtcatgaggtcagtgatacccccacttggggccctggccaggaagtccacgctgaaggggtggagagtgaggccctggaatgggccatttgggagctggccggcggctgggggaggggggccggccggccagtagggggctcacaggtagatctcgcgcttggccgtctgggcagatgccggtgtggctgcgggtgggaagtccgaggtctgggtcagggggatttcctccaaggtggccgagtccttgcaggaatcatggctactgtgggagaaggcactgtaggagggcaggaggcgcacgggggccgttttggtgttccggtcttccggggggctggggctgccggcgcccgcaggctcctgccctcctcggtcctggtaaggcacgaaggtggagagtttgagggcgctgctcttggtccggcggctgggagatgactggccaggcatccagcatgtgtcagagtggccaaactcactgcactcccgggtacatgtgcctgtcatggcgacatcaggcaaagggcgaaggtctgtaggagggagcggggaaggacaattgtcagacatacagcctctgcaaagctctgcttcatggcctcccactggcatctacaccccacctcaggacaggagtatgcgccccttcctgaccgctgaactcacaggcacacacaccctcaaagagacacatgccctcccaccatcgacctactggcctactgtacacacgcacacgcacacacacataatctatcttttttctttttctttttctttgttttgagatggagt

SEQ ID NO: 10217 - DNA, 1109 bp, Artificial sequence
  DNA replication origin
ccaccccgcccctccatgcgcgatctcatgcccgtctcatcctttttgtgcccgcgcagagccggctggccggagcaggccctgaggcagagtgccaggtatgtgggaactgctctggggtctggggtctgtgggactctgcccagcacccagcctcacccacccagtgcccatgctctgctctgagccatgttgcgtcccccaactctgctctgagctgtagagccttggcactttgagggttaacaacagagctgtcccctcctcacctggcactggcaggaggccaagccatagtgggtggtgccaggggagcccctgtcccaggcagtgttgcttagccatgtcccttgggggtgggggggggtcactgcctggtgctgtccctgagcaagggcaggacagggacagctgtgacaggaagtactcatggcccagccgttcccatggagacccccgctgcccagcaactacaccggctactgctgatgtcaggcagccaactcctgttcccgtgggtgttctgggcagggagctggggcaaggccaggggtggtggctggtttaggggccagagtgaggtggggaggggctgcatgagcgtgcttgtggatgtgagtgtgtgcctctatgtgaataccccacacagaagctcgtcccttccccctggctttaaagcaaggtcttgcaggaggagggtgggttcaggaccaccgggagcatgtgaagcttgagggggttctgaaggaagcaatgtacccaatttcatctgaggatagaggtgcccactgtagtagatttgtgtatccatgcctatctgtgtgtgtgagagggagagagagagagagttgattgtgtcaatcaattcaatgaggatggaggtttcctcaaccccacctgaggatagatttgcacatttaagtctgtctggagatagatgaggcagtgtgtagatgagtgtgtgtttgtgcacctgtctgagggcagatttggtgggtgtgtaagaagagcactggggggtaggtgacgctggaaggaatgtgtctatttagggcttggtggctcatgcctgtaattccaacactctgggaggctgaggcaggcggatt

SEQ ID NO: 10218 - DNA, 680 bp, Artificial sequence
  DNA replication origin
ttgaatgcatgactgagtccctacagtgtacccagatgtgcaaaggtgcattgttagggggcaggggatgagtgagtgtacagagtactgtcccttccttcgtagtgctttgtgtttgcctggaaaggcagagaactcaggaataggtgcacaatactgaagctgaacaacacaggcgggcggtgtcccagtcagccccatgattcattgccttgggattggagcagacaataagtggctgtgagttggaggaaggagaggtcaccgtgggcaggagaggactgtgaaggtttcctggagggccagagcctgccctcagtgggattgatgtggggtgggtgttccaggtgtggggaaggtattccaggtaaaagtgaggaagtggggaaaggagactgaaccagaagcctccaaagaaactgctgatccaaagattttggatttgaataaaggagggactggccatgattttgttggagaggagggggcattcaagacagagacagtagctgggtctagctgggatctgcaaatgcacgacctcaaagccaggggagatgggcagaagaagggggttattgttgtgatggggtacagcttgtggttgactagggcagaggttgggagaggcaagtgtgaagtaggggctggatatacggagatggatgtcaaataagagc

SEQ ID NO: 10219 - DNA, 1248 bp, Artificial sequence
  DNA replication origin
gattgagcgtagggcaaaaaaccccctctgctcgccacgagagggtcggttttatgagaatgtccccgcctagccgggttcgcggctttgtgattccggcgccggctccctccccgccccctcctggcgcccgctgcgccgctcgcgccggctccggcttgcgggggaccctaggccgaggccggagatgccggggaggagggattccccgcggtggcctgggtgcggggggcgcaagggctccccccactagccgaagcgcgttctcaccacgccgcgccctagccttgccttgggttcctggaggctgggcgctgccggggtgggggtggggccgccagagcccaagaaactgccgccgtcccccccgccaccccctaatctccgcaacacacacacacactcggcgtcctctgggaggagtcgctccgcgcgctgggtgtgtgctgggagcgcccgctgaccaaggcggtgcggactggggctgcttgggtcgcttcgtgcaggaagacgccgcgaggcttctagcacctgctctgggtcaaccctcgggagctgccagggaaggggccgcccagaaagtttttatgacaagccggaggtctagctgtgtttgtagggggtggggggcgcgggagtaggtgggtgttactttattgacgttaaggtctgggggaattggaacctgtaattacaactagactagggcatggggtggaatcgaggggagaggcagactggcccccagaggtagccagaggcagtgtgatagggaggcaagtctggattcagttctggccgcatttagtttttaccccttctcctacccacctccaattcccaattccaaaagggacttcagctggaagtgggtgtcttgctggtctgccatcttcttagcagaggggctgctgctgtggctacttctgcaggggagctgggcaagcgatagtaagctaattgctgagaagggggttgaagggccaggagggggccgcgagggtgggggaggagctaagtgggaatcagggttcggggaggggtgtagggaaagaagaaggtgagggctgcccctgccgtgagcaaggatagttggtgcagagattctgttcaacaatgtattgagcaccttttatctgccagggtccatggtgggtggtgaggatgcagtagtaagagacataccatcattgccttcataggacttaccaaccagcgaggggattggcttgtttattcatcgaacca

SEQ ID NO: 10220 - DNA, 907 bp, Artificial sequence
  DNA replication origin
cccttccctggcagctcccgagggttgacccagagcaggtgctagaagcctcgcggcgtcttcctgcacgaagcgacccaagcagccccagtccgcaccgccttggtcagcgggcgctcccagcacacacccagcgcgcggagcgactcctcccagaggacgccgagtgtgtgtgtgtgttgcggagattagggggtggcgggggggacggcggcagtttcttgggctctggcggccccacccccaccccggcagcgcccagcctccaggaacccaaggcaaggctagggcgcggcgtggtgagaacgcgcttcggctagtggggggagcccttgcgccccccgcacccaggccaccgcggggaatccctcctccccggcatctccggcctcggcctagggtcccccgcaagccggagccggcgcgagcggcgcagcgggcgccaggagggggcggggagggagccggcgccggaatcacaaagccgcgaacccggctaggcggggacattctcataaaaccgaccctctcgtggcgagcagagggggttttttgccctacgctcaatcctccaaggcctcagtgccgcccccagtctttcctggcagaagaaatagtagccgaccactgttggggaaactgaggccagaattctgacttacagagggtagctggggggaaggggtgcgagaccacctcgcctacaaattctgctcctatgcctgccgcgatctccgttctggctccagggcctgcccgcgcacacactggcctacagcggggaccaggcggagggggcgctcaggtgtgagacgaacccaggtgtgcgggacccaccaaggtgtgtgggacccaggtgtgctggagacccaggtggctcagaaaactcagctaaatggctggaaga

SEQ ID NO: 10221 - DNA, 1398 bp, Artificial sequence
  DNA replication origin
aggggtgcgagaccacctcgcctacaaattctgctcctatgcctgccgcgatctccgttctggctccagggcctgcccgcgcacacactggcctacagcggggaccaggcggagggggcgctcaggtgtgagacgaacccaggtgtgcgggacccaccaaggtgtgtgggacccaggtgtgctggagacccaggtggctcagaaaactcagctaaatggctggaagagggtcgcaatcaccgtcccaggctagcaccctctacaaaggaacctggggccccagagctccggggaggcgggatggcttggccagccaggtccagcttgttcccggaacaccagccggttcggcccgggagtgggggttggggaggcgccgactgggaagccggcaggccggcccagccttcccgctgtgccgatatttacaataataatgtcgcgattaacgtggcggggcgcttggggctcgccgaacgaccccggcggcttctcctgcctgaatctggactccgagagagaggaacggagtgtgtgtgtttgtgtgtatgcgctgcagggtgtaatgtaatgtgacactgttggtttaaggtgtgtgtgacacccagtgttaagatgggtgaagcagtggattctgtgtttgtgaccgtgaggcgctgctgtaggtgccaattcctgtgttagagtgtgtgccatcaagcgtgtgctgagatactgggttgtgtgtttgtgtgggtgcagtagaggggtgcaaggagacctgtgctgtgtacctatgttctggccaagaagtgggtaagatgatatatgctagggtgtgttccttaaaggaatgtggggggtggctaggttttgagggttcatctagtgaactgtggctgtgacactcgtacatgagggcacgagattgtgtttgtgtgtccacgtcgcggggtgtcacacccggttgtgttattgctctgtaaagccacgggttgtgtgtcggtgctgctgatcgtgcagacactgaagcggattctgagctggcgacggtgccccagtgggcgctggtgtgcgggaggtatgtctgtgtgcacatatgcagggatgtatgtatgtgtgtatatatgtccacggtctggccctctgggtgcccgcgagaagctggaagcggctgagtgagccgaggtagttgcccaacaagtgtgtatgtatgtgttgtggacaacggtccttgcttgctccgtcctccgggagacccccaccaaactgggggccgcgcgcttccccaaacccatcctccacgccgcgcgctcctggagtctccttatccccgtctctccgagcgcgcccaggtttgggacgcggggactagggttctgctcagcaccccctcccctccctcggcttctcgccgcg

SEQ ID NO: 10222 - DNA, 774 bp, Artificial sequence
  DNA replication origin
aggagagggagttcccaagctactcagagacctctagatggcgccagagagccagagctgaatgggagaaaccgagtattggagtgtgtgagacactgcgtgtgacaccgtgtgtgatttggtgtgagtgtgatagggagcgtgtggcactgcgagggcgtgtgacacaggccgtgacactgcgcggcctcgcggggcagggacccggtgactgtataatgtaagtcactggcaaatacgtgtggccgcagcactacgccgtgcagagggcaggtgatcaggggaccctcgaatagcctaagctcaggagcagcacttcgtcttcacgcttgtgtatcttccccatcctcactctagagcccccgggtcccattagcctcctcctcccacggtcccctccatagccccacccccacggcttgctgcggccaccgaggctgaccgctctgcggcttcggccggagggggaggggtggactttccccgagcgcagcgggaagggagggccacacagggcgatcggggatctgggcgggaagagggtggatatggaggagcaggtgcccagggaagaaggcgctgtgggagacacttcccttgcctcgacttcccagggggcagacagagctggggacaggtgtttgagtagggtaaggaggggaatccaggagcggtcctagatggaggcttgggtgggataagtgtaaggtgaagctcagaggagggcacggcctgtgtactgggcctcgggcagtgaagagatggcagagggag

SEQ ID NO: 10223 - DNA, 1276 bp, Artificial sequence
  DNA replication origin
cgtgtaagtgggtagcagggctggcggggaccttcctcgcgggccggagcgcggagcgctgccccagccctacggcactcggggtcgggaccccggggagccgccctcacacattttccaggagggatcggaggggcgatggggtggtaatgggggtgggggacacgctgtaccccaccgacgaccgcgcgggccaccttcgcctctttccttcacactcccactaaccgcagtgctgggggaacaaaatgtcctccttctggagcgattaccttttcccttttgtgctttgggggaaactgaagacccagaggggttcgcaaagcaaggtgggccagtaggaagacccctccgctagtccagagagagcacacagctccccaggcagagctcattgccccacctgctctagtggcccagcatgatcccatgacctctctacttctggaggaagagtcttggggtagacggcggggagggggtagggtatcccgttccggtaggggcagggatgagggaggcggggctgagccgagcatctatctggatggtaacagccaacgtagaaaatactaagttgtttacatgcattctctcatttcatattacccgtcgtgaagtctgtgaagtaggtactattgtcccaatttttacataggaggaaacggctcagagagaacttaggtcctttgaccgaggtcctgcaggtggtaagtgaaggagctgagattagaacccagatctgcccccagtggcgcctcctcgtggtctgtgggtggtggagacgactggcctagcctcttagctcctctgtgaatagaaaggcctttttcctggctcagacagcttgggaaggggattgttgctgggtaagagaagcttctcccaccacctccatctctttctctgccccttaccattgattcctttctgtcatcccctctcccccactgcaggacaagatgaagctcatcatcctggagcactattctcaggcgagcgagtgggcggctaaatacatcaggaaccgcatcatccagtttaacccagggccagagaagtacttcaccctggggctccccactggtgcgttcttggatggagagggtgccgtggataagggtggagagagtaggcaacaggggccaggtacaccggctcactcagccaagggacttcacgggggctctggggtactggtgctgagagagcaccttcctgccccttccacatacaaaggacccagcttcccttatgggttggtttagtcgctgcc

SEQ ID NO: 10224 - DNA, 1223 bp, Artificial sequence
  DNA replication origin
cagcccccccgcccggccagccgccccgtccgggagggaggtgggggggtcagcccccccgcccggccagccgccccgtccgggagggaggttagggggggccagcccccccgcccggccagccgccccgtccgggagggaggtgggggtgtcagccccccgcccggccagccgccccgtccgggagggaggtggggggggtcagcccccccgcccggccagccgccccgtccgggaggtgaggggcgcctctgcccggccgcccctactgggaagtgaggagcccctctgcccggccagccgccccgttcgggagggaggtgggggggtcagccccccgcccggccagccgccccgtccgggagggaggcggggggggggggtcagcccccctgcctggccagccgccccgtccgggaggtgaggggcgcctctgcccggccgcccctactgggaggtgaggagcccctctgcccggccaccaccccgtctgggaggtgtgcccaacagctcattgagaacgggccaggatgacaatggcggctttgtggaatagaaaggcgggaaaggtggggaaaagattgagaaatcggatggttgccgtgtctgtgtagaaagaagtagacatgggagacttttcattttgttctgcactaagaaaaattcctctgccttgggatccttacccccaaccctgtgctctctgaaacatgtgctatgtccactcagggttaaatggattaagggcggtgcaagatgtgctttgttaaacagatgcttgaaggcagcatgctggttaagagtcatcaccactccctaatctcaagtaatcagggacacaaacactgcggaaggccgcagggtcccctgcctaggaaaaccagagacctttgttcacttgtttatctgctgaccttccctccactattgtcccatgaccctgccaaatccccctctgtgagaaacacccaagaattatcaataaaaaaataaattaaaaaaaaaaaaaaaaaagccacccctctaatgtgattattttgtctggagattgggaatgttatcacacactctgaatgtggatttctccatcagccagtgcacaaccaacaatacagcaaagtatcaaatcattgaacaatcctgcttgatagcaaactgtcaaatagttgctcacaacaaagacaaattgaaactctgacaataactctcttggcaggatgacc

SEQ ID NO: 10225 - DNA, 1505 bp, Artificial sequence
  DNA replication origin
ccgggcggggggccgacccccccacctccctcccggacggggcggctggccgggcagaggggctcctcacttcccagtaggggcggccgggcagaggcgcccctcacctcccagacggggcggctggccgggcggagggctgacccccccacctccctcccggacggggcggctggccaggcggggggggctgacccccccatctccctcccggacggggtggctggccaggtgggggggctgacccccccatctccctcccggacggggcggctggccgggccgaggggctcctcacttcccagtaggggcggccgggcagaggcgcccctcacctcccggacggggcggctggccgggcggggggctgacccccccacctccctcccggacggcacggctggccgggcgggggggctgaccccccacctccctcccggatggggcggctggccagggggggggctgaccccccccacctccctcccggacggggtggctgccgggcggagacgctcctcacttcccagatggggtggctgccaggcggagaggctcctcacttctcagacggggcagctgcccggcggaggggctcctcacttctcagacggggtggttgccaggcagagggtctcctcacttctcagacggggcggccgggcagagacgctcctcacctcccagacggggtctcggccgggctgaggcgctcctcacatcccagatggggcggcggggcagaggcgctccccacatctcagacgatgggcggccgggcagagacgctcctcacttcctagatgtgatggcggctgggaagaggcgctcctcacttcctagatgggatggcggccgggcggagacgctcctcactttccagactgggcagccaggcagaggggctcctcacatcccagatgatgggcggccaggcagagacactcctcacttcccagacggggtggcggccgggcagaggctgcaatctcggcactttgggaggccaagacaggcggctgggaggtgtaggttgtagtgagccgagatcacgccactgcactccagcctgggcaccattgagcactgagtgaacgagactccatctgcaatcccggcacctcgggaggccgaggttggcggatcactcgcggttaggggctggagaccggcccggccaacacagtgaaaccccgtctccaccaaaaccagtcaggcgtggcggcgcgtgcctgcaatcgcaggcattcggcagactgaggcaggagaatcaggcagggaggttgcagtgagccgagatggcagcagtacagtccagcttcggctccgcatgagagggagaccgtggagagggagagggagagggagagggagaggggtggcttttaaagcttgttatttgtggccgagtgtgatggctcacacctataatcctagcactttgtggggctgaggcagatggatcacttcaggccaggagttcgagaccagcttggccaacacgg

SEQ ID NO: 10226 - DNA, 962 bp, Artificial sequence
  DNA replication origin
tgccaagccccggcgtcgagttggccgcgggccggccagagaggcctgaggcggccagcgggcagggcagagccagggaccggagttcggggctggagtcgggcgccgcttacctgctggtaccggctgccgcaggccggctcgaccgccgccagcgccgccaacgccaacgccatggcgcagccggcagcagggaagcagagcgagcgagcgagctagctgaaggggcgcggccgctgcggcttgggagcgctgggaggccgagggggacgcgccttgggtgggtctcgatggccgccgccgctcccgggcgagacgctcttctcaggctgtaagcaccgccgccgccgccgaggctccgacgcggcccctggggaagaggcggggactacgacgacggcgctgcgccgccgccccacccccgactcgcgccgccctgcccggcccggcccggcctagcctagtcctgcgccgccgccccgaggtgcaccggccctggtgtagttgctccgacgacctgagcctccgaggctcaagtgttgtattcgattccactaaaaacgaattactaacaggccagcccaaagcaagggcgatgctgctgatgagcacctcgtgccaagcactgagcttcacctacgtgccctcatccagccttcagcacaaccgccctgacgcagggaccacaaccccattctcgaggtcgttggcaaccagagaggttgacaatcttcacagcagcgacctgatccctcgtgtctggcagcagaatcgtggttcttattcactcccttcttttatctgccgtactcataaaccaggggtcagccagcgacagggagggggccaaatccggtctgccaccatgactgtgaaaagtacatgaaattcaagtttcagtgtccataaataaagttttattggaacacagcagcacccatttgtttggtatggcctgcaaa

SEQ ID NO: 10227 - DNA, 1476 bp, Artificial sequence
  DNA replication origin
tggcctggcggcggctccggccacagcccccgcattccggccgcgcgcccccggaggtgacgccttgaggaagctgtatttttttgggggggagccgcagggaaccgttgggagaggggccctgtgtgtgtccctttaagagccggagcgctgcctccgcctcgcaggcgcccggagcctcacaaaagaacaggatgttgttgatttgtcaccaaaccacagagaggaaatgattgtaaatttcctttaaacatccccaccgcgctccggccgcccccgcttccgcctcctccgcccccgcccggttcggcacagcggggcctcagcgctcccgcggggcgcctgctccccggccgggccacgggccgagcggctcctgggcgcctgcgggaggagcccccggcccggccgctgccccagctcgcgttccagttgctttttctacagttgcagcggaggaaggtcctgggcttttgtgtgagcccgcgcgccgcccttctctccgggagcgaatgggaaccgcgcgcggggagctccgtgctgtgtctagggagcgccttagcgcgccatccccgtttagcctcgcagcttccctgtagaggcaacaaccgttatctccttcgttagggtctggagggaaactgaggcccaggttagttacgtgagccgaaagtcaccagctcttggaacgctttgggggctcttggaacacaccatgcaggtttaggtcaccccagaccttatatttgtgaatcagtgagcgaccggaacattctagaatccccaagtcatcaaaagtggcaatttacattgcgaagtccaaagcaatgattgccaagtccaagttttttcgtgggggaacgtccctcaccacttccagccgggcatccacttttcagaagctgtttgggtctcagtttctactttcactccatttgcttgtaagatttcaggaagcctctggtggagtaagtgtttgctcccaacctgtggcccatgttggagtggtgtggtctgtggtctaggaaagggctgcctttgctgtacagagtgttcttttggagcaagtaatgcttattccggcataggctgcactgggcttcttgaactaaaagcagcagctaatgtcctagacaccgctgaacagaattctctcatttcatcctttgaccagccccaggaggtagaggttgcttttctctttaaacagttgaggaagcaggttcagagaggctgaggaaccggaccagcttgcacattgtaagtggaagacaaaagactcatttagttaccacattctgattactggtgatgtctctctttaatactttgtcttattactcgcttgcggagacaggtggtgaagagaatacaggatatttttgttgggtcttgttacctcaacttccagggagctctgggccggactccactttctgggaatagagttaggtggccagtgctctcagactggaa

SEQ ID NO: 10228 - DNA, 1439 bp, Artificial sequence
  DNA replication origin
ctttctcatctttggcaagtgaagaacaattgtttttgggttgtaattatctatcagatagctgtctggacctgctatcaagtctaaatttgtagatacacctatcaaagagatcacattcacttatttatacatttacttatttattttacaattttttgtagagatggggggggtctcgctgtgttgcccaagatggtcttgaactcttgaccccaagcaatcctctcacctggcctccaaaagttatggattacaggtgtgagccaccatgctccatttatgaatttaatacattaattgctttcttaatatagatgggacacctctgacccctcctgagtgaaaaatccatgttcccaagcacccaggccttctatcctatcacaaggcatggttatcgcttgtttgcttccatctcacctaataccaccagcagctaaattcattctgttattcatctttgtattcttaccatctaggctagtgcctgcacatagcagacctatttaaaaaacaaaccaacccaaacaaacatgaagcccccacgtagctgaaggagggctgctggttcctagacatagagataatttattcaaggacagtccctatcctccaggagttaacaattcagcactagacaccctgtgggacccagcctgacaagtgcaacgagtgagatgccagaattgagtcctgcggtcgaacagagggactacagggcaacgcactgggcgtgggaggtggagatggctctgggaaaggatccattcatttattctacatttatcaatcaccgtagcacacacagcacatagtaagtgctcaatatctgttattaaatgccagccactgtgctaggtgccaggatgcaacagcggacaagaaaattgcaggggcacttgccctcgtggggcttaccgtgtagcgaaggatgacaggcagtagactgtcatcttattatgtaaaattgtgctagatgcagagcaggaaaataacaggcggctgaaattctagtaatgatgtgagctccttcggctgaggggaaccgtgggcgggttctgagcaggagtggccgtgagggggacggaccgtagggggcgggaagactgcaggcaagagctggtaattttaagatgcaaataacatttttctgcctgactggaagaggagcgtttggtcgctcgggattctcccggagcagggggctgtattttgagtgtaaaatcggttgccccgcagtgcagggcaggcggtggtgaactgcagccctagtccccaggtttttcatgcttggcacatcgaggctcttcggcccccaggaccagcagactcgccatgcgtggctcggattcgggctggagcaggcgggcaaggtagcgggggcgggtgcacagcaacgctcacccctaggtttcggggtctgcaacgctgggagg

SEQ ID NO: 10229 - DNA, 1346 bp, Artificial sequence
  DNA replication origin
gattggcccggcggggattaagtcatcgctagcaggttcgagcggcccagacaccggcggggcggccgaggctgctgtgagagggcgctcgaggctgccgagagctagctagcgaaggaggcggggaggcggcgtctgcactcgctcgcccgctcgctcgcttcccggcgccgctgcgggtccgcgctgcgtttcctgctcgcgatccgctccgttgcccgcgcccggaacagcagcacctcggccgggtccgagctcggttcgggagtcttgcgcgccggcggacaccgcgcgcggagtgagccagcgccacacctgtggagccggcggccgtcgggggagccggccggggtcccgccgcgtgagtgctctgggcggcgggcggcccgggccccggcggaggcgcgccccccggctgggcgccgcgcgcaccatggggctcccagcgctcgagttcagcgactgctgcctcgatagtccgcacttccgagagacgctcaagtcgcacgaagcagagctggacaagaccaacaaattcatcaaggagctcatcaaggacgggaagtcactcataagcgcgctcaagagtgagtgtcccgagcccctcggggacgcggctccggggcgggaggaactgggaggtggcgcttagcccgggttgcccgcgcgtctgccgggtttctgctcccggtacactgggggacgggtgtcgacgcctccgaggcaggaaggatacgtaaagcgggcgaaccagcaaccatcagatgaagagagagacccgtcgctccgccttttgcgttcagggatggtcgggaggtgacccagcgcgggtggtgctctggggcagcgcgggtgggcgtgggcgtgcgcggcacgcaggtgtcccagcagtggggccagagtgccgagcgcgccgcagccagcgggcagatcccatcgtgtccacagctccagctcccttaggggcagagttgctcagccttgagtgcccaaccgtgagaatggagcgtgccctgccgagggggcgctgcctccccttgggaaaaggtgggttgtgactgcttcgctccctgtacgcagctccagcctagtcaggccgccgggttccctgggtggaatgcttggttagcttgcgattccttggagtattggcagccagtaatctctaaatctggaatcagtacgtgcgcaggttctgattcttgtgtttagcagaaggtgataggggtgggagtagagaatcagagtgttcctttactctaaactgtgggcgagggtttaaaaatagaatgtacatatcccaactctctccctctcctgctcccaagctctcctttttacctctt

SEQ ID NO: 10230 - DNA, 1146 bp, Artificial sequence
  DNA replication origin
tttttatttttattttttttaattgagacagagtctcactctgttgctgaggctggagtgcagtggtgccatcttggctcactgcaacctctgcctcctggattcaagtgattcttctgcctcagcctctcgagtagctgggactacaggcgcatgccaccatacctggctaatttttgtatttttagtagagacagggtttcaccatgttcgccttgctggtctcgaactcctggcctcaagtgatctgcctgcctcagcctcccaaagtgctgggattacagacatgagccaccatgcctgaccaggctttttaaaatgtgtatttttttccatatcttatattgacagatacacacaaatatacacaaaaatattttgtgtgtgtgtatacataagtgtatggatgtatctatagatagatagatagatagatagatagatagatagatagatgatgactgattgatagatagatagtaggtgggtaggtggatggatggatggatggttagatggttggatggatggatatatagatagtaggtgggtgggtggatggatggatggttagatggctggatggatggatggttagatggctggatggatggatggatagatagtaggtgggtggatggatggatggttagatggttgcatggatggatggttggatggatggatggatggacagattgatagtaggtgggtggtggctagatggatggatggttagatggttggctagatagacagtaggtgggtggatggatggatggatggatagtaggtgggtaggtagatggatagctagatagtaggtggatgggtggatggatggatggatggttagatggttggatggatggatggatggatggatggatggatagacagtaggtggtcgggtgggcagatggatggatggttagatggttggatagatggatagataggtagcaggtaggtgggtggatggatgaatggatggttagatggttggttgggtggacacatagatagatagatagatatgctatattagtttctagggttgctgtaacagtgtgccacaaactggaaatttattatctcacagctctgaaagctggaagtctgagatccaggtgtgggctgagtagg

SEQ ID NO: 10231 - DNA, 939 bp, Artificial sequence
  DNA replication origin
ggcgcgtgagggtgcacacgcggggggctgacagcccgcaacttggagactgcggccggggccggcgttatctgttagaagtgggcgtgtcggagagagaactcaacaggtctggacgtacttctcttttaacctcgcacttttttctcttctccacccccgccccgcaagggcttgctctttagcgtttgttgttaattcgcgcctgaggtttctaagtggccccttttagaaaaagaccccctgtaaccgtaatggttttgtgctgcgatttttacaagtgctagtttgacgtttggggttgcagacttgataattgcaaccttgtaataccacttaagaccctctggcatggttcattagggccaattaatgtggctgggttatttgcaacttaaactgggggataatgtcgcttgagggagcgttttcgttttaggaaatattgttttggtttcgggtttgaaggcagctgtcaaaaaagcggcatggaaattcattgggctccattcgatacctcgtgtttagagatcgttatcgcctcagataaacggggcagagaggtggggagataagcagtttaccctcaagatttgtagtggcaagtccacacccctctctctaccttcatattcacttttcagtgagggccagtgacatttatgctgcctaacgtcatcgcataggaaaagttaccttttattggacgggatttgactatagtgtcccaaatgcgcttctccgtcttagcccatctcttaaaacaccctgattaacgatatactaacagtcttactctcttgagaataggctgagaattgggataggtgaaggtttggataggtgaaggcagagaaaattattttgaacattttactggatacagttgtacctgaatttatatgaatgtgattttacggttctgtgtttttccatttt

SEQ ID NO: 10232 - DNA, 906 bp, Artificial sequence
  DNA replication origin
tgggaccggagacaactcgggggccgccgcgggagcctacaaacttttattagcctcggggagtgggggtggggggctggcaagggccgggcgacggtgacgaaagggcagcgcgcgggtgacagcgctggcctcttcctctccctccgcaggcgtcccctggccgggccgagggggaggaacctgacctcggacggcgagcggagccctgtcgaactgccgggggcttcgagcctctcattcctcgcgggaatcctggcctcttttctccccctagtgtcccctttccctccaagggggtcgcccgacacccgttttcgtggtgaacgctaagccgcgtctgaattttactcgcccgaatatttgcacgccaccccggcgcgcccgagcgcgagcccgggctccggggaggccccggcggcgcctggcttgaggagggcgtgcggggcgcgtgagggtgcacacgcggggggctgacagcccgcaacttggagactgcggccggggccggcgttatctgttagaagtgggcgtgtcggagagagaactcaacaggtctggacgtacttctcttttaacctcgcacttttttctcttctccacccccgccccgcaagggcttgctctttagcgtttgttgttaattcgcgcctgaggtttctaagtggccccttttagaaaaagaccccctgtaaccgtaatggttttgtgctgcgatttttacaagtgctagtttgacgtttggggttgcagacttgataattgcaaccttgtaataccacttaagaccctctggcatggttcattagggccaattaatgtggctgggttatttgcaacttaaactgggggataatgtcgcttgagggagcgttttcgttttaggaaatattgttttggtttcgg

SEQ ID NO: 10233 - DNA, 924 bp, Artificial sequence
  DNA replication origin
ccagctcctcgggagcctgaggcaggagaattgcttgaatccggcaggccgaggttgcactgagccaagatcgcgccactgcactccagcctgggcgacagagcgatactgcgtctcaaaaaaaaaaaaggagattgtcaatacgcggttatacaatgtctaaatgctgggctgttgaatgccactgacagtaaaaaatatctgtgcatagtggcaagccataagtagcacctcagtcaccgtatagtaattaactgcgtatcctggcatcccgacaggcaaccagctctaccgggtgaaaaggttgatggccaagggactccaacctaaccagggcgcactcgcggcattctgcgatcccgcactgcatcatggactttgtagttcaacatgccagtgacgtcactgccggttcccctctgagtgggcctatcgggtagacttccgataacccgtttttctctgggaattgtagtcagttagcgcctgctgggtgtctgctcgggtggtctgggaactacaattcccggcgggctgtgagatgccttggctgtagttagtaaggagccggatgattgcctcagcaggtgtgaagcgtgtgctttagtttcgtgggaggcctggcatccccgagagggaggggaaaggtaaccactcctttgtggaggtcgccagggtcattgtcgtggatttgcacagtcggctgggcggtgcaatggcggtgagtttgagcgagaagaatccgcaggggccctggagccggactggccagtctctaggggctctccatgtgctgtcctgaagggaaagtccttttctaaaagagagccacgcttaaggcgtgcctttcgtagagactttgctttttcttgctagtttatgaaccacgaactgatgtctgttaactttacggagtacttggat

SEQ ID NO: 10234 - DNA, 1462 bp, Artificial sequence
  DNA replication origin
gcctgccggcggggcgagcgagccttttcattggtcttgccctcagggccccctctctcttactggttctcaggcctgccactcggcactgtctcccgcccacctcagccttcgggctaggttgagtgagggctcttgggttagttcctgttaggccccggccgggggagtaggttgaagtctcctaagatgcccggtgggctggggcaccgggagctgtgaagggaacgtgagggggcggcgtagtggagacccacggcaggcctgaagaagagcggcggccgagcccgccttccctgcaccatgctcatagaggatgtggatgccctcaagtcctggctggccaagttactggagccgatgtgagtgagccgggctgggccggggccggcgaacgtgggcgttgggggctcgcgggggcgtgggggaggggaggtggcgtggggggcggcgctgaggggccgcggccgggaggtcccggcgacgccttccctgtagtactatcaccattgtggtgggggtgagggtgggagaggagcgctggggacggagaggcgccgtgaatatggggactgggggggcaggcaaggacagcgaaggcttttcaaacgcaaatatcggggtgctggaaggggtagcaggggccgtgagggaatttaaaacattgctgtttgagaactgagagagaggtaacggggctcttgagggatttttaaaatgtgaatattgagatgtcgaagggaatagcagaatatcaagggtttgataaacattattattccgggactgaaaggtctagaagcaaaatatcgagggcattttcgaaatatgagggcagaagcggatagcagggacattgaaactgtatagcgattattggtaagttctgagggatcaagaatattgaaggatttgaaaaatactatggagtagatgaaaaggatgtgtgggcattgaagggttttagaaattattggggaggtgataagtgtgatagcaaggatattaagggattttaaagtattattgagggcttgatagtgctaggggaactgatgacttttagatacatagaggttggaaaaaagaggtttctgtaagtttagttgaaggttgaaagggctacactggtatgcagcattaattggtggaggagtatacctaacagtatgtagggatttttagatacaggtggtgttggaggaataaaaggagcggtagaaagaataagagatttgtaagtattcttgtgccattgagaggacagttttgtaaatgtttttgtaagattgagaggacacctgaagataattggggtgtagtatgagggaccgaaaagaatgagagacctgtcttttaaaaatattttgggtggtgttagtagaaatgttattgggaggcttgaaagaggtaacagatgtatcaacattttgttttataaccttttttttttgaaacaatg

SEQ ID NO: 10235 - DNA, 1203 bp, Artificial sequence
  DNA replication origin
tgttcttctctcggtaggcggcctcggcctcctccaaccaggcctggagcaccggcttgagagcgatcatgttgttgtgcgagagagtgagagactcgaacctgcagatggtgctttggctcagcgagcccacgccggggatcttgagattagccagagccgcgcccacgtccgcctgggtcacccccagcttgatgcgccgctgcttgaagcgctcggcgaaggcttccagctcgcgcgggtctgactccacgtcgctgaggcatgcaggcatggcgctatgaggggccacggtgtgcgggtgactcatgcccatggcctggtgcaggtggcccatggcgcccaggtggtgtggatggatctgtgcgggcatcaccgagtgttccggagcgcccaggccgctcacactcagcgtgggcgagatgtgctccagcaggtcgccttcgaggccctggtgcacggcgtggtgagggtgtgaggtgagcgcagctgggtgggagatgggcacggtggacgaagtggacgtgcagggcacgctgctcatggtatggtaggtggcgtcgggcttgaacggatggttcttgccgtgggagacgatatccaccgccgccagagcttcggcgcgtgccagcaggctctcatcaaagcttccaaatatattaccctgcagctgcaagcgagaaggcgcacagcacggtcagtagggaatactgtcaacacaggattaaaacacattttcaagcaaccgagatgcctctcctcaaagcccaggtcataaaaattaatacggaggcagcggctctgctggaacagacgtgtggatcagagacatgaatgagagagagagcgcgccgggagagaacgcgggggagacaaggagaggggttcagacagcggcgattgttctgggcgacatgaaaaaaacatgaagctagtgcctgtcaaaaaatgtgccttagagcggtaattatgctccactacgtacctgcggggctgggagacagactcggcgcatggcctcggagccagagtgcagactggagaatttgggttcttgcagcaccgggtgcatgccgaaaggctgcttggagttcatggccatcatcttcgcgctcctggcagggtggcagcgggtgacatggaatcaggcttgtctagcttgcttgccgctctccaagtgagcgctgctcagcgcccgcgctc

SEQ ID NO: 10236 - DNA, 1722 bp, Artificial sequence
  DNA replication origin
tatcgcaggggttgtacaccccgcgtgagattgtctttaatattcaaaggcggaggggatgctattaactaccaatatcgcagaaagtgtacaccccccagggatattgttcctatgatccaggagagaagagggtaataccttaaatatcacagaagtggtacacgcgtccagggatattgtttctaattttaacgtggaagacaatgatatgacacccaatatcacagggagtataaacactcctgtgatattgtttataatattcagaggggaagaggatgatattactcccaatactgcagagggtgtacacccgtgtgtgaaatagttggtaatttccagagggggagatgatattactcacagcatcgtaaacaggctgtgagtctaccgtggattgtaatagcggggtgtgggggcggggagaggaaggggttattactccccatatggcggggggtggctcaccaccctgcgatgtggatcgtaatagccaggggggtaggggggactattactccccgtaaggcagaggggtgtctcacccccttgccatatggatcgtaatagccggggggttgggggcagagggggtgctgtaaccccccatatcgccgggggttgcctcagccccctgcgatgtggatcgtaatagccagtgggggagagggtgtcctattactccccatatcgcaagggggtgcctcaccccattgtgcagtggatcgtaatagccggggcgggcgagggggatgctattactccccgaatcgcaggggtgtgcctgatggacctgcgatgtggatcataatagccaggggttggagagggggttgctattactccccctatcgcaggggtgtggctcacccccccgccatgtagccaggcgtggaggagggtggggtgctattactccttatttcccaggggggtgcttcaccccctgtgatgtgtatcgtaatatccagggagggaagtgggggtgctattactttccatatcgcatgggggtgcctccccaacttcccggcccgggctcggattcccctgaagagacacgtcctgcgtcgccatggtggtgggcatgggggtggcgggtcggagcctgctgatcttagaaagggaaaggcgagattgccattaagacttcccttggggttatgacgggagaccaagacagtggtgagaattttacaggatcctaacaggaaagatccttaaaggactgtggtctggtagattttttttttctttctttccgttttattgcacagggaattgaggcacaaagacagaaaatacttgcccagtgtagcataacagttagtggagagaacctttggtaggcccaggtcgcctggctcccagcctccaaatttcccaggcacctttgttgcccttgctctctgtgggtggaagtgggggccggacggggcagagatgaagaccgaagtgctggcggtttctctgttcttatccatggcaggtctccatacagctctttgtaataatcaacacgattgaaatagtttcttattgtttccatctctaacccaagaatcacacacacctaagcctacgcagattgggcacataggttgcctctgtcatggtgacggtgggcggggtcaatggagagtgtgggtctattctaggtgtggggtgaggacaacttcttttcagctccacctttccctgccatgtgggaatgccagc

SEQ ID NO: 10237 - DNA, 1194 bp, Artificial sequence
  DNA replication origin
cggcacccccgctgtccctggcgcccagtgggggcggcagcgggcagggcagcggggaccaccggggctgggggctgttgagcccgtggagtccggctcggttggggagaaggacgatgcgcggcgagcccaggtgatccggggctggggtcctgcgcccgcagcccctggcccgcgcctcacgctcgccggctccccagcgcgggggctggagcccgcacccgagggggcggcagggagggcgcaggcagcggctgggagcgcagcggcagcggcggcagcagaagctcggctcagcggctgggggtggccgctcgaatctgccagggcacctcgctccctcgcctctggcagcgggtatgtgcggcaagtgcgccgggggtcgggaccccaggagcccacgggtgccggtggggacgcggcgggggcggggcagcacgacggggtcgggggcttgggggttctggactcaggacacccggctttgcggcagggtgggcttcggggcggctcagggtgtaggtgggctggctggttgtatacaacgtgtttccagcgtgggatcactgtaggcttggggctggtgctttccacttgtgtatgtaagtacttgtgaaactgcatgtgtgctcactgactatacaagggaggttgtgtatgtaaagatttgtgtgtgtgcgtgtgtgtaagagagagcgcgcacaggctgtgcatccatagccaagtgtgtaactggatgtgtgtgtggactctatggctggtccttgatgtgcagcccagagtgtgctgtgtgtgtgtgtgtgtgtgtgttagagagagagagacaagatagtgtgtcttgagcgtccactttgatgtgtgtgtatacgtagccatgagtgtgtgggtacgatgtgctgcataaagccttggcggtcactgccggtactcgcaaccatcctgcagttgcctttcacagaatcccaatcccgatttcagatgcatttcctcacagcttgctaccctgtgcggcactgtgctgttagttgtctttgaaagaagtggatgttggtacaaggaagtggcagctggcagaggtcaaaaagtggtaggcatgagcttgtcttcctagagttcaatgttaagagaaaatcttggcttgatttccatttggtccaatcaaatgaagaaacagaatgtttcttagggtatagg

SEQ ID NO: 10238 - DNA, 1269 bp, Artificial sequence
  DNA replication origin
atgttttcagaggcattttctgtatctggcattctattaggacttgtaaggagatacacagacatgtgagatatgcccttgagatgcttgtaatttagttaggggcaaagcataaacatataataatataatttgaaaactgggcagactatgaaaattgaaacctaactggaaatgatgagaagcacctggataagttgtgctttgaaggataagcacttccttccctgcagggagagaaaagggctctccaagaatggggaacagaagaaccaaggggcaaggttgggaagggagtgttgtggtgaggaaggctgtggggtgagcaatagggaggacaatgacatgtggcaaggaaaggtgaagccagggaggcagcttaggaagagtccaaaggccatggtcactatgatgggatggcatagaggcataggaaaagacagactgctagatgtcctgccttggatgccaggggtggaggtgtctgtaacagagatgggggggtctacaaggaggtgggtagggtggaagaggaattagattatgtcatagacaggaagaagagtcctgggactatattcctgggggaggttgaaatggatgagtaagaggaaaatttggcttaagaaaagatgttttttcagagattggagatggggtggtaggagggtaacaccaatgatggaaccagtcatgcatgcaaatccactgataatggctgctctgtaacatgcccttgtcaaaagcataatctcctctaacccccacagtggttccttgagacaggtctctctgaagcttacataaaggccaacttgcttgcttaggcccacatggccctaagagcagagcctggatttggacccagagagtcggtctagagggcccactccctaggcctttatgctgctcccttgtcaaaggctggggatggcaaccacacatgcaagagagaggttagggccaccctccccagttaactcacagaatgaatcacaggcatagaggaaaattgggaagtggggttagggagaaaggtggtggtagggtccttcagggtgagctggggatttcaggaaagaagaagttcagaaaaagcactgtgggaaaatatgttaggaagaaaaatgagaaacaagaagcctgactcagagcaggatggggagctgctcacaggggccagagaaagtcgtgtgaggtgaaccctggagacccacagtaaggctcatgtcctcctcgccgtggcagctctttcaagttctaggaagg

SEQ ID NO: 10239 - DNA, 1199 bp, Artificial sequence
  DNA replication origin
caagcaaagccgcacacctcctgggtccgggctggggcaggccgcgcgggcgcgggaacgaacgcgtgcggacggggaaaagggtcctccaagcccaagtgggagcgccgcggagggcgagcgagcggcagggcgcggcggggcgtgtgcggcaccacgggacagcgggctgcggcccagggggcgaggcgtgctcgggtctattccgggagcggctctgaggggcgggcgcgggcgcgggcggggcgggggctgccggcgagcatcctgtctgggggaggggaccgcagagagcgccggccgctgggctggcctgagagcgcagcgcgccggccgctaccagccgcgccggagcccctgcgccctgcggcccgctccccggggaccgggccggcgccatggaccgaggccagggtaagaggggccgcgacgcccgcacttgttgcggcgccgggcgggaaagggagactggacgatctgaagccggagaggaggagggagagaggcgggcggtggggcgggggctgaggaacgctcggaggggactgggagacgcggcgcttatgcaaaggtgccttcggctgccgggacaacccggtgcgtgtcaacgcccgtgtcctggggccaactcgcctctcgtgtgtgaaatcagagttttcataggctaacgatttgtaacttcataaaagatccccctctagtttccggaggacagcgagctcctcccacctcattccactctaaaggggaaaacaaggtgtacaggttcaactcccgaaacacccgctgtgggcagcccctagggagaagctctaggggaccgaagtttgcagctgcctagggcattgcgagaaggaggagcgccgtgagcaggcgcgcgtgtgcatgcatgtgtgcgccagggagggaggaggcgggggtggttctatcccgcaccagctgtgtcctcggcccagcccttctctctggaccagcgacaaagttggactagatggtctccaaggcaccttgccgacccttttccagtgtatttggtagacgtttcacagaagtggaggggacttactgaaattgagattgacataagccgagagggcagcattcgtagggggctagcgcacatttttttctgtttgttttgttttgtttgagacggagtttcgctcttgttgcccaggctggagtgaagtggcgcgatc

SEQ ID NO: 10240 - DNA, 992 bp, Artificial sequence
  DNA replication origin
atacagagctaataacgcagaggctggacataaccgaggtcttcaaagcttcactttggtctgtttcatccctctgccgcagctgggccctggtcctgatgctgaggacccgaagcgggcacacctgcgccgggcaagaatgaacccagccaatgaggagcccgcatgcggggggcggggcggaacggggaagctgccaatgagagagcctaccccgagagagatggagctaatgagggcctcgtgctggagagggacggcggcttggccaatgcggagctgggtctggcgcggcaggaaggcgggactgccagtggggcgccggggcggggcggagagccgagcgccaacccgctagcgcctgaatccggcgtgctgcccgctcgccgcccgccatggcccgcgcagccccgctgctcgccgcgttgaccgcgctcctcgccgccgccgctgctggcggagatgccccgccgggcaaaatcggtgcgggaaggacgcggtggggttcccagctggggagggccggcgggtaaagggttctcagttctcagctaggtggggtataggagggcggctgggtgagggaggggtcctcggaaaaggagctgggtggaggagaggcgccgaaggggacgcggcagggaaggtcctgatggggccggggcatggcatgtgaagagggccacctaggacggaaaagaggcctgggcaggactggccgcggatctcaccgggaggtccagggtcgctgagcatctgccatggtcctggctgttggctaggcgcccgggtgacagaggacagagaggctgggcgatggcattcacagaggttggttgagggctctctgtgtagcagacgtggtgctgtagttcctgctggggtagagccctcacagtacagggaagtccgtgctgagctgaggaagtacggtgcatgcagaggaggggcgcttcaccctgtctttgcggccctgggagggcttcctggaa

SEQ ID NO: 10241 - DNA, 1163 bp, Artificial sequence
  DNA replication origin
ctacagtttggtgattcgggcaggagcaaaggtatccagtaataccggggtcagcattcccaccgggtggcctaaatgccggctcctgttttctggatgacgagcccgcggagaaggtggcttaatgagaggccgcgggagggtgggtgccggcacgtcgctaaactccgcctgcaatccttcgggttggctgccagccagggcacggttccgagccggccggggctgactccgggagcagcgaacagaaaacaacctggctccagaaagacaattaacaaaggctggagaccagccaccccctcgcggcgcacgcacgcaggcagctgcgtgggcatagccgcgcccgccagcgccctcggtgggcacagccacccggagcggcgcgggtgccgggagctgggcgacgcgcccctcctgccccggctgcgctgttgcccgggcggccgacctccgtgcgtgagcgccggcaggcaccttgcgcgcgcgggtgagtccgctgggcgtttggggcctggtcaagcaggatggggctggagaggggtgcaggaaacagctgctgggaggatcagaaaagggaggtgggacagaaaggcaggatgcgacgacctcccgggtcccaacttgcttggtagctagctttgtgtcttgagccttatgagaatgtaagccacctggtccatatggcctaccctagtcgttttacaggtgggaaactgaggcccagggaggttagccggcctggaaaaacattattattctttgttcctgtttctctctgccttcttccgtgcaggatttcagacagcttttagaaagaatgcatacattataacaacggaaaaatacaaacaatggtaaagaatccttgccaagcaaaatataattatgaatagacagtcaaggccaggaaaaaagagaacagaaatccgtgatccataggtgaggtgacttggctaaggtccctcagaaaagtcgtgccaaagctgggactagaagtcagaacgtccggcttctgaacgccagaaacttacagtggggaagcagacagcctgcccaggcactggttcttaaccttctgggggtccctgaccccttagagatctgtgtccactcccagcagaagggttcacacaaagccttgtgcacagtttgagatttga

SEQ ID NO: 10242 - DNA, 1308 bp, Artificial sequence
  DNA replication origin
cccctactgggaagtgaggagcccctctgcccggccagccgccccatccaggaaggatgtgggggggtcagccccccgcccggccagccgccccatccgggaggtgaggggcgcctctgcccggccgcccctactgggaagagaggagcccctctgcccagccagccgccccgtccgggagggaggtggggggtcagcccctggcccggccagccgccccgtccaggagggaggtgggggggtagccccccgcccggccagccgccccatccgggaggtgaggggcgcctctgcccggcctcccctactgggaagagaggggcgcctctgcctggccgcccctactgggaagagaggagcccctctgcccggccagccaccccatccgggagggaggtggggggggtcagccccccgcccggccagccgccccgtccgggaggtgaggggcgcctctgcccggctgcccctactgggaagtgaggagcccctctgcccggccaccaccccgtctgggagatgtactcaacagctcattgagaacgggccatgatgacaatgtggaatagaaaggggggaaaggtggggaaaagattgagaaatcggatggttgccatgtctgtgtagaaagaggtagacatgggagacttttcattttgttctgtactaagaaaaattcttctgccttgggatcctgttgatctgtgaccttacccccaaccctgtgctctctgaaacatgtgctgtgtccactcaggattgaatggattaagggtggtgcaagatgtgctttgttaaacagatgcttgaaggcagcatgctccttaagagtcatcaccactccctaatctcaagtacccagggacacaaacactgcggaaggccgcagggtcctctgcctaggaaaaccagagacctttgttcacttatctgctgaccttccctccactattgtcctgtgaccctgccaaatccccctctgcgagaaacacccaagaatgatcaataaaaaaaaaaaaaagaaagaaaaagaaaattggaaaggcttcaggattgtcagttaaatataattgtttttgcctgggtctactgacagacaggtttacattgtctctattacttttttttttttttttttttttttttttaatttgttttttgtttttgagctggagttttgctctcattgcccaggctggagtgcagtggtgagatctcagctcaccacaacttccgtctcccaggttcaagtgattctcctgcctcagccttccgaatagctaaactacaggtgtatgccaccatact

SEQ ID NO: 10243 - DNA, 1211 bp, Artificial sequence
  DNA replication origin
atggggtggctggccgggcagaggggctcctctcttcccagtaggggcggccaggcagaggcgcccctctcttcccagtaggggaggccgggcagaggcgcccctcacctcccggatggggcggctggccgggcggggggctacccccccacctccctcctggacggggcggctggccgggccaggggctgaccccccacctccctcccggacggggcggctggctgggcagaggggctcctctcttcccagtaggggcggccgggcagaggcgcccctcacctcccggatggggcggctggccgggcggggggctgacccccccacatccttcctggatggggcggctggccgggcagaggggctcctcacttcccagtaggggcggccgggcagaggcgcccctcacctcctggacggggcggctggccgggcggggggctgacccccccacctccctcccagacggggtggctgccgggcggagacactcctcacttcccagacggagtggctgccgggcggaggggctcctcacttctcagacggggcggttgccaggcagagggtctcctcacttctcagacggggcggccgggcagagacgctcctcacatcccggacggggcgacagggcagaggcgctccccacatctcagacgatgggtggccgggcagagacgctcctcacttcctagatgggatggcggccgggcagagacgctcctcactttccagactgggcagccaggcagagaggctcctcacatcccagacgatgggcggccaggcagagacactcctcacttcccagacggggtggcggccgggcagaggctgcaatctcggcactttgtggggccaaggcaggcggctgggaggtggaggttgtagccagccgagatcacgccactgcactccagcttgggcaccattgagcactgagtgaacacgactctgtctgccatcccggcacctcgggaggccgaggctggcggatcactcgcggttaggagctggagaccagcccggccaacacggcgaaaccccgtctccaccaaaaaaatacgaaaaccagtcaggcgtggcggcgcgcgcctgcaatcgcaggcactcggcaggctgaggcaggagaatcaggcagggaggttgcagtgagccaagatggcagcagtacagtccagctttggctcggcatcagggggagacca

SEQ ID NO: 10244 - DNA, 1429 bp, Artificial sequence
  DNA replication origin
aatctcggcactttgtggggccaaggcaggcggctgggaggtggaggttgtagccagccgagatcacgccactgcactccagcttgggcaccattgagcactgagtgaacacgactctgtctgccatcccggcacctcgggaggccgaggctggcggatcactcgcggttaggagctggagaccagcccggccaacacggcgaaaccccgtctccaccaaaaaaatacgaaaaccagtcaggcgtggcggcgcgcgcctgcaatcgcaggcactcggcaggctgaggcaggagaatcaggcagggaggttgcagtgagccaagatggcagcagtacagtccagctttggctcggcatcagggggagaccatggaaagagagggagagggagaccgtggggagagggagagggagagggagagggagagccccacctgttattataataatgatgtcatttggagaatcattttctgtggaaggtaatgaaaacctcaatttggcagaaattcagtaacttagagcctgtaagaagttaggaattgggtgttgccctaatggggttaattcttgattaccctatagatgctcacgtggctacattaacctctctgtgcctttgctttctatctttccagtggaggcagcaagcctgccagggctggcctgagaaggggaatttgagcctcctctttgtacatatatttgacttggcactggttccaggccagtgtagccaccataagcagttaccaaggcctctggcaatcttgctttgtccggctccccagccgatgccagtctctgcccattacacccttcatatctgaacagtttgggaattatttagaaacggccttatttgtagtcctataatccagccaatatgacagccataaagattgctttgtcgttccttgagctgttgattgaagggtgtggagggaaacagaaactggattagtcaagggctttgccccaaggttgcccaaagtggtacactggtcgtaggggacaggctagaacccagggctcttggcagcccagatagtacattctccctcctgtgggctatttccaagagctgtgtgtgtctctctgtgtgtgtgtgtgtgtgtgtgtgtgtgtgtgtgtgtgttggatagagggggtagttattagtcattcagccatagtccttctctcaacgaggatgttgtggacggccaccaaaatgggttcagtattaagcttcgtgacattagatttggcagttatttcttggctatgacactaaaggctctggtaacaaaagaaaaaatatacatataggactacatgaaaatctttaaattttatgcaccaaaagacactatcagcagataagaaagcaacccacagattaggagaaaatatttgtaagtcatacatttgataagggattaatatc

SEQ ID NO: 10245 - DNA, 1560 bp, Artificial sequence
  DNA replication origin
ttccattcccatttccaaagaactccttgcacattctaagactcattaatgtgatgtgctaaggaagggccatctgccttttgaattttgtaccatgtgcaactattatttattctcaaagagccaaatacttttttgaaagacactttcttcttaggatctcaccttttactggaaagaaaaaacaaaaacagctttgtaattttaatccattttatctctttctcctatcagcctctccaaggaaggagatagtatggagatttgtttttccttctattggaattatgccttccctcttagaaagcagaagccattgcagtgagtttgagtttgaaatgacattattttctgactttgccccatttgttatgtgcactgtcccattcattcattcaataaacaaccagatgctgtgtggctcagtgggaggtagagtctgtgggctggagtgatccggggtggcttcatgggtggggtgggaattgacttggaaaatcatgagaggggaagggtagaaattagttcagtcaagaaaaacagcagggcagttagaaagtaggcgtatagactggtaggtgcagggaatgaataaccttccattcaatcaacaagcattgctgcggctccacacagtcctggccacgtgctaggcactgtgccagagactggcaaatggtcgcaggcagttccaatagaggggaggcatgggagaaacacaggtcatggggagagaggctgccaggagagattgacatttcagctgagacaggaagaatgtgtgggtgaggtgagaagctatgcttcaaggagagggagcattgtttatgaaattcccaagtcgggggagcctgatgaggaaatggaggaagtccgaccttgcgagatgcaagagctggaggagtgaagtgaggaatgaggctgggaggggcaggggcagggcaggtgtgtgtagggcgggtatggcagggcaggcgtgtgcagggcaggtgcgtgcaggtcgggtgtgtgcagagcaggtggggcctcggaggtcccagaaggaggaagcatgtaatcctgagggtaggagaggctgagggtttttttttagcagcaaagctacataatcagaactgggctttcgaagggcacctgggctgggcctggacaatatgctgaatggggagaaatgggaagcagagggcccatttgggaggggattgcagcagtgcagcagaaccttgacaccttacaggctgtgggttggagaagagacctgtgctagaacaagagtaggcggggatggaacttgggacctcacagtggggaaggcagagacaagaggacttgcaaagggcagcctctgagacaggtcagggtggtgacagggctcctgcttgggggaacctactggatgggacctgagtcaccaaagatgaatcctcccttctccaaaaggagtgtggcaccataggttgtcccaagggcgagacaggtgctactggtgggcagtgtccaagatgggcatgacagagttgactcacctggcagaaaagttcatccctttctcaattcccc

SEQ ID NO: 10246 - DNA, 1030 bp, Artificial sequence
  DNA replication origin
tggacgaagagctctcctccttcttcctcaactatctcgctgacacgcaggtacggccggctggggctgcgggcccggggccaggggtgctgagctgcgggggccgcagctgcagccgcggaggccgggaggcagcggtgggagccctggggtaactgggggttccaggctgcagagccccccttccaggcgccctgcgatgcgctccgttaccggggcagggagccggaggtctcccggcgcgtgccggagcgctgggggcgctacggccgctggggagggtctagccttggccgcttggagtctgccaccccgcgggcaaaactggggggtaccgcgcttcctttgggaggtggaggcgcgccacggtgtggggtaccctcaggctggcgctgggtgctggaggcgcgccgtcagcgcccggcacttgctgccgtactttcacgtggacttgtggccccggcacgggtgcatgcccgggtctccggagtcccctagtcctccaggctgtagtccccagagtgctgttgctggccccccgcggctttctacccgcgcccgcagcgcggagtttcctgccagttgccggctaaaggcataagggtctgcggggcacgtggacatgcgggcggagacagcgtcttcctggtttcgctatcgggcggagccccctggggggaaaagccaggctggatgggggcggaaggactgtctgggggcgcctgggtccccctgcggtgcgcggccccggtgcgcgctccacgatgcagggggaagggaaggcgaggcggagtcccaggcactggctgagcccgggagccccactggcgacacgcgcgtgacaggagagggtgctctggtgtgccggggcgcgggggagcgaggaagctggtggcttggagactgggagaggggtgctgctgggacaagcagccaccaaaaatgtcagcacgaggcgtgcgcggcccccaccccttcccccattttccccacccaatgcctgttgcaagcataaagtttggctccagag

SEQ ID NO: 10247 - DNA, 1042 bp, Artificial sequence
  DNA replication origin
gggcagcctcttgcacagcaacctcaaatggatagactgtgtctggagcaagaggggagagttggagaaggccgtccttagctggccccgagctggagatggactgtttccttgctcattgcctgcctccctcatcagcctctgagctctggggaggcactgcttccctgcatagggcacgtccctggcacacggtgcataatgcctgcacatacttgtgaatagatgcatgagttagagtgcagggacaagagtgggggccagtttcttcaggctgctttctctctgctttctcagagactaccccgtcctactgcttcgggggacctgccaggcaggaggggcttggactggcccagagaggtggaccttggtactgctaggatctgctccaaaggtggagccaaccccagctccctcggtggggggtgggggaggagccgcctaaaggagcaggggcggggggcgggcgggggggcggtgcgggtgcgaaggctccctctcacctgcagagatgggtatgaaggcccaggagccactccccacgctgttgtgggccctgcactcgtaggtttggttgtgctctaaggtctcaacagtcagcaggctctgcaccgtcaccttgtggaagggctcctggctcaggacctcagggtatgggtcatcccagacctgcagcacttgggcctcatcacacctggcaaaagcagaatgtggctcagagcttcagggttcccagcgccagcatgtccctcccactcacagggtgcccagcccctgagcccaggtgagggaggtgagtggagcccacttacctatcagtgtggccactgcactgcagccatgtcacgttgggctgggggtacccagaggcagcacacaaaagggtgccagagccgttgatgaatgtccatatgacgcttacctctggggggtctgaggaagaaaggaggaggccccaagtcacactttccccgccacctcccaatctcccagtacctacttccctgtgccctgccccagtcaaccccatccctccagg

SEQ ID NO: 10248 - DNA, 919 bp, Artificial sequence
  DNA replication origin
tctgcactgggagctttggcagggtaaaggggaagaagagcaaaagcacaagaattcagttacggcttctaatcctgtctgctttctagtacaggcatacagtcatcactcaagaaatgtttatgttcattcacactttgggccagacactgttctagacatcgaggatacagctgcaagtgaaacagatacaacaacccccgactcatgaagtgtgtgctctagctgggagtgggcaagcaatgagccaagtaaattattaaaaaaacaaattatatagcatttgcagcttcagatagggtgttcaccaaggaagatctcactagaaagctgatatttgagcaaaggcttaaattgctgaaggagcaagccatgcggccattttggagaagggagctccatcctgcagcgggactgtgcttgccatgttcaggggacaagtgggccagtgtggctgcggggagagagtgagaaaaaaagtggtctcagatgaggtcagagagctaaagtgggaaggtgagatgaaaggaggctaccgcagtggtccaggctggagctgatggtgggtggactagagtggtaatggtgaaggcagcaggaagttgttggtgtttggatggatgaatggactaatggatggatgaataatagatagatggattgttgagagagacagagaagagaaaagccttgcccccaaaagctcacagactacttggagagagaagaaagctacctggagggagaaccagatgcatgaagcagtgcagatgtggtgcctaatgagtgtgtagtctggaagggcagcaaaagtcgagtggagtgagaggttcctgtgtcctggagcactgagtagagactccctcatgggggtgaatcttaaaggataaaggggcctctataatgaaaaggaggagga

SEQ ID NO: 10249 - DNA, 1288 bp, Artificial sequence
  DNA replication origin
gccggcaccgggctaaagtctggagggggcccgaatgccagcgaagctgggctggcggcaggggccgcggggcccgggccgtaggcggcggcccagtcgtccttgggcgcagggaagggcgccccccaggccgtcgggggcgcgggggccggctccacgtgagagtagctggagaagtcggggtactgcgggggcgccgggggcggggccggggggccgtaggcttgcgggcccaggccgaggctggctggcctggctgggccggggtacacgggcgaatccttgtccagcacatagcccacatacatggtggccgcggggtcccccgcgcatgctgggccctggagccgccgctgccggccgccccgacgacgagcaaccgctcacctgaactcggctgtcctgccgccgcgcccgccccacccaggccttttatagctccgggccgcccgcggccccagccgaggcgggtttgcatttcaaagcggggggaagcctccgggccgcgaatcaaagggggaaacccgtcgggggcggggggttcaaaaggagacaaattgccgccccaagcgggaggtggactggccagggcctggagggggtgggggcgcggagggcgcgtcttgggcgagggtcgaggccgcgctgcgagtgggaatcgcttgccagggagcggcctagcggcctgaacaccttgtccttccggtggccgcgtggacggccctgcagccccattttacaggcggaggaacaagctcccaggggccgggggattctaggccaacttcacacagtgaccagcttgaggtgaggggcaacgcagacttcaaacagggctccggtctgtaggatcgcaggtccttaatcttttggcggggaggggtcacgacccctctcgtcatggaagctgtggatgtttttccctggggaaatgcacatatgcacatacatacacgagtcttccttacagttgggggactgcctgggttggccttctagagaaagttctcaaaaggcagtgtgtgtgtgggtgtgtgtgtgtgtgagttaggggggtcttctggggacattacaggaaacttttagtaaattatcttgatgactctctaccctctttttttaattgagaggtttcaagcatacacaaaagtagaattgtataatgaactgctgtgtacccatcaccccgcttcaacaactattaaggttttgtcacacttatttcacctactccccgcttttctgaagtattttaaaacaaattccagacatcatgtcattttacccc

SEQ ID NO: 10250 - DNA, 1642 bp, Artificial sequence
  DNA replication origin
ttccttctccagagcctcacagactgggaactgcaggatcctgagcactggtgctgccaccacctcctctcatagaacacagggttcttaaccccggatttatggataaagcttctggtagcctccagaacccctgaaattgcccaatgatgcaacatttgtacctttcagcagatttttcaaaggagtccttttgtaacttaaacaagggtacaaaccactgcataatctcccttctctctaatttcacagacagtagaactgaaacccagaaaagatgactgatttaagaggagctgttgtgtagagaattagagcacagacttagtggttagtccacctgggttcaaatcccagccccactagttacaggttatatggccttgggcaagtacttaaactctctatgccatagtttcttcatcttaaaatgggggtgataatagtacctacgatgatgttttaagagttaaaggagttaatgcatgcaagatcttacttaggtcatgcctggtccgttagttaagtgttccaaaacattagctgttatttaatcaaggccacagaagcaagtggcagagtctggttccctgcatctccctggaggcagataggaggttatgtatccccgggacttccaaaaaggggatatgattatggccagaacccgtagctcctgatcaaggccaacccagcatctgccccgaggcaagctgggtgtgtgtggggagatgggggtgaagagtgcgaggaggtgggagaagtcccaggattattcgcagctggggtaaggggaggaggggctggacatcaaagggtgggcaggccagcttcccgcccccaaggctaggtggcctttgtcaggacaggccggacacagtccggacaatggaacgtcgtgttcactttccggccaacaggagtcactaccgagccaaggcagagccagttgcatgacaaaggggggacccataacggaggtcaagccgcccctcattaaagttgggccctttgtcctgccccctaccctgcctttgaagagggcggatcagagaggcctgcctgggggcaggaggttcacaggctcaggagccaaacagtagccccccttcccactgctcccgcttcccctcccccggggtcaagagttcagggaggaccctgagaaggtaaggtacagaccccttgccccagtctggccaaagagggctctttttcagcctgaaggatatgacccagcaatgtcttgactgtgtgatggggagacccagccctggccaggaaagtcacctgccctgttcacacagttagttaatcgtcccttctggggcgaacctgccgcctttgcctagggctgggttaggagtggaagaagcagatgaagagcacggagtcggtgttgctaaatgagtgtgggacacgagtctgggagcctgcgttctagttcgggtcttgctccgcggccgcaggcgcatttccgcacttcgcagggggtctcggtttccctatctgtacagagagagggttaggctgtgctgctgaaggctccgatagcctgagactgaggagagggagccaaagagcagccccccagggcgagagtggacaggagggccacactcccgggaacccgagcagggcc

SEQ ID NO: 10251 - DNA, 1512 bp, Artificial sequence
  DNA replication origin
ctccctgttatccagctgagtcgggccttccccagagcccgaagctggtctgggtgcatcctcagaccttccccaggggcctcgttgggggcgggtctctccaaccctcctccaggtgcacccccagcgcccccgccctcgtgccctaccttgcggaggtgagctccctggagcttcttcatcttggagagcgggtggccggggctcagctgccccggagcgcagagagcgagggcacgagagatggtccgctggccactgcgcctttgcccccgcggctcccgcgcaccggctggggcgggcacggacgcaggcgctgccgtctggcggctgcgggcgtggagcgcgggcagggcgctgcgaatgccttgtctgtccctgcgcagcgcccgaggctggggaagggtgcactgctgcgcccgcatagacacccagacagacagctgacggacggacggcggggggatgcgcgcgcccccgcacgcagagctgcggattggagagccctgagcgagtggggaggggggttcgcgacggaaaccctcggctttctgcgtgaccttgggcaagcgacctgccctctctgggactccctttccacagttgggcaaggaacactaacagcccacccccctgcgtcgtctttgctgtgcgaccttaggggataagaatctctcctctcttacaggagtgtgagcaattcaggaagatggagcatagaaaacatctagcacaaagagcctgacacatagtaggtgctcagttaacatttattcactgactgtgggttgcccacgccaccattagtccaattattcaatctatcagtatttattgagcacctaaaatgtgccaggtcctgaactaggtgtcctattttctcaacctggagagacaggtgtcgttactcctattctacagatgaggaagctgagggacagggaagttaagttacttactcaaagtcacggggctaatgagtgacaccagggacagagtcaggcttcatggacctttaggctagtagagtcttcaactctcctcctttccttaagatgaaagcaaaatggggaggtttgggtgagcagaagggacaggcaagtgccacagtgtcactgtgatctgtgacttagatgattagtaactggtttcctgtccagcagcagtatggcttctggaaagttctaatttcatatctgtaaaatgggccacgagccgcccatgcattgttgcctcagaatgttctgagggtccagtgagcctgtggctaggatgggaaatgatgagctggagcaatggcacacgttggtttgctgggactgactgatagacactagcggatcagtatatacattacaaattgtgtccttttcaccctcgcaagtgtcccagtttagacattaaccatacatctgtttggctcactatcagttgacacggtgggaggcctttggggagagatgagaataaggttctgctctctcccacctctggagcttgaaaaaaggttgg

SEQ ID NO: 10252 - DNA, 1548 bp, Artificial sequence
  DNA replication origin
gtgttccttgcccaactgtggaaagggagtcccagagagggcaggtcgcttgcccaaggtcacgcagaaagccgagggtttccgtcgcgaacccccctccccactcgctcagggctctccaatccgcagctctgcgtgcgggggcgcgcgcatccccccgccgtccgtccgtcagctgtctgtctgggtgtctatgcgggcgcagcagtgcacccttccccagcctcgggcgctgcgcagggacagacaaggcattcgcagcgccctgcccgcgctccacgcccgcagccgccagacggcagcgcctgcgtccgtgcccgccccagccggtgcgcgggagccgcgggggcaaaggcgcagtggccagcggaccatctctcgtgccctcgctctctgcgctccggggcagctgagccccggccacccgctctccaagatgaagaagctccagggagctcacctccgcaaggtagggcacgagggcgggggcgctgggggtgcacctggaggagggttggagagacccgcccccaacgaggcccctggggaaggtctgaggatgcacccagaccagcttcgggctctggggaaggcccgactcagctggataacagggagggtcagggtcacggtctgcgcccccacctctgcccctgccatctggggttcgggatgtagtatgaggggagtcctggttcactgggccaggcctatgaacaggtgtctgcagtccccggaggcgcggggtaggggcggccggggccaggcacccacctcttccccaattccaccctgctgctccccgccaggagctgattgccgggtgtggggggtattggaatacctgagcgttgagctggactcatctgaggggtggggagtgggaggcggtcatccatactgaagccggctccctgagcctgcgggaagactctcctctttcctgcctgctccctccccgcccccttagcttgcctgctgagaccccaggctgcccctcagcagggctgaagggaggcaaagacagggagggggctatcggaggcaggaggatatgatcaatgaagatggaagctggtatgggagagtggctgtgggcccagacctcaggctctccctaccttgccttgtgggattggacctctcagccaagctgtcaggatatggggagggggaatactgggggacgttttctggcttgtaccagtcctaactaaggagtcagatctcctgaatactatttctgccgctgccacttgcctggtgactttggacaagttcattctctaacctgaacctcctctggctaagccctagcctggaggcaccaaaacaggccccactgggtgtgtgaggtgtggggaagaatgctaaagggctggtagatgtgagaagactgttctcaggggctggtgttatcaacctccctacatacacacacattcacactcacactcactcacacacacactcattcattcaagttctctgctctggggcagctgggcttggaaccactgtggtgtgtcttttttctttttcttgttt

SEQ ID NO: 10253 - DNA, 2064 bp, Artificial sequence
  DNA replication origin
agtcagaggatggtagagagcactttttggaagctgccacgccgcgtctcaggctggccgggctgagctggggaagagggagcaaaggcggcgcagggcctgcgcttaggcagcgggaggcagctcggcgcgggcctgacctccccagagcgccccgctgcggccgagcagatccggcccagccgtccggcagccagtcccggaccagacactggaccgtccccggggggcgctgaactccctcgcagcatccgagccggcgggccggtggtgcgccctgggcgcgcgaggtggtgaggccccaggagcccggcgcgccgggacgcgcgggccggcttggcgatgcacaccctcactggcttctccctggtcagcctgctcagcttcggctacctgtcctgggactgggccaagccgagcttcgtggccgacgggcccggggaggctggcgagcagccctcggccgctccgccccagcctccccacatcatcttcatcctcacggacgaccaaggctaccacgacgtgggctaccatggttcagatatcgagacccctacgctggacaggctggcggccaagggggtcaagttggagaattattacatccagcccatctgcacgccttcgcggagccagctcctcactggcaggtaggcgtggctcaaggccccggggctgggcatctaaaccccaaatcaacccagttgatagatttctcctgccagtaccaccccatgctgggatctgggaaatctcctgttggctgtgtaatcattagtaagtccctcgccctctctaggcctcaattacccttcctttacactgaatgggcttcatcatctttgaggtcttcttgctttgatgttccaggacactcacattccacacaacgtggagacatctggtcatccctttgttagaggaacatggcagcctctgacatttactgctgcttctatttatggaccccgagaccctgagcaagtcatttaatttctctaagcctcagttttcttgtccataaaatggagcaaagaacagttttcatcttgaaaaggagtggcaaagttggaatgagttgtgtgtaacctgcttggctgtcaatatatggcagcctctatgtctcctgagggattcaggtccccatactgcttgatgaatacattgggagaagaccaaggaattgataggtggaagagaaagacacataggataccatgacctgtgtagccttagggtggttacttcatttctctgagcctctgttttttcatctgcaaaatcctcccaagttggctgggagccccaagtagacatgctgcttcctccacaaggaaatgtccacaggcgaggcagcaggattacaggattaaaagagcagggaaacaggaggtgggggtatggaaggcaaactctggccacttaggagaaaatcctttggcagtgctgaagctaattctccttggatggggtccaaggcatgctttctcccaagttccacccaagagccactaatgtgatctcaggaaccagaagccttagtctccctgtttcttagtctcactatttcttggatgggagaaattgaggcaaggactcagggagggcctagtttggtgcccgtgcccaacttcagggtctgtgggagataggattgagaggccaggtgtttggcgggggtcccggagctgggcatcaaatggcgtcctttgttccttcgatctggcacccagcgtttagatccaggaatcagaaggagaacagaagaaagaaggaggggtgtggggtgtgtatgggttggggtggtggtgcaggttagtggtgtagtggtgaagaccaatgttgacctgcagaagagggtggaggagtctgcattcccaagagttatacacaacttagcgtttctgtcctaagaggtgacttttggtttaagtagcggaatgagcagacagcaggagggcagtgctccagtcccctgatctgcgaagctaactgaaggtggccggccagtgcctgccctcccccaccctgcagctggctccatctcattgatgcttacag

SEQ ID NO: 10254 - DNA, 1362 bp, Artificial sequence
  DNA replication origin
tgggccggatctgctcggccgcagcggggcgctctggggaggtcaggcccgcgccgagctgcctcccgctgcctaagcgcaggccctgcgccgcctttgctccctcttccccagctcagcccggccagcctgagacgcggcgtggcagcttccaaaaagtgctctctaccatcctctgactcccctcttccttcttgccctggatttctcccgcctcctaatttctctctcctctgctttcccggcctctcgccccacccggagtccttaaaacagcccagctccctgcagggaggtgggcaggaccccagaggggaaggggagggaggcacaagttgggcgggtcgaggggacacggcgggagagaattcgaaaaagttgtaacatctgccgggccgggccgagccccaggtggaggggcgggacgcagagcagcggctccacctcccgggcgggaagccccggccctctcggcctgctggctccagcgcccgcccctgaccgggatggggaaaggagggagtggggctgcttggaattcgatggaacagctccagaatggctgggtcagacattcctcgatcatggagtcttagcctctctgagtgccagccctggaaggaaagcccatcatttcctagtccaaccgggtcattctacagatggagaaactgaggcccggagatgagcctcaacgcgtctaagtcacagaacaagtcagtggctatgtctctaaggctcaccgtggctgttggagtggcggctcccttcggtgagccggtagagaaagcgatggagaatggcaagcactttggcaagcccccgcggctgcaagtcaggaagcttggttgtagccttgccagctcccctctcctcaacccctccctcctcctcgttctgcagttcccaactagaatcttagaatgccagcgctggaatccagagggcaggggctgttttatccatctcgtatccacagggtgcagcacacagtataagctcaatcagtatatgttgcatgagtgaatggatgaatgggccccaatggtcacctaggccagcctacccaaggaaacctccacaccagagaaggcaagcttgggggactctggaacccgatgagcatcataaatgagtagagcaagagatagttgtcttgccctaaggagacacaggggctgcagcaagttaaaaaccacagcctggcttccagctgactacagtcaggcaagaatacggaccagtgtttccagatcttctgatttttcaagaggaataccctctttatctattaggagaactattccaattgtgaaatgttagtgactaattgaaagcaaaatttaagcactttgtaggcca

SEQ ID NO: 10255 - DNA, 2101 bp, Artificial sequence
  DNA replication origin
tgtaagggagagtcagagagaagaaacctgagcagagggaagaacctgtgcaaagggcctagggcagaaggtacagctgagagaatagacacaaaaaggcctttgtagcatagtccggagggagagcagggggactggggagtgtagaaggtgggcagagggcagactccatgtgaaggattggccacatcagggttttttttcctccatcctaagagccattggaagccactgacggtgtaagcccaagaggtacaggatgaaatctgaattttactgtgacctgtgtgcctgcccagtggagagtggagtgtgtctggtgggtatgagtagatgtgggaagacaagtcagggttaggagtgcaggcaggcatccagggagaagacagtgtatgtggggggggggggcgggtggtaggtggcgggggcagcggggagggtgctggtggcagtggagttgaagagagtggaaggttcccagagttaatcaggaactaaagttttcacagaggtgtgttggaatgggaggggaaggaaaaggcaatgtcagaatggaccttgaggtttctgtgcaaacaagtaggcagtatttttcactgagatagaaaaaactagaagaggactgagacaggggggtggtttgattgaggagaggaggatgtggacagagaggtgaaagtatatattctatgttagacatcttgagcttgaaatgccttacagtcaccacatgcagatgttgagaaggttcttggaaacctgggtttggacgtggcgtggaggtctgggctagagatgaagatgagaagttgtcgatagacagatgataattgcggctgtggatgaggagaagcttacccagggagaagaatgtggagagagaagagagatggcccaggatgaagttttgaggtacatctacagattagggctgtgtacaaaaggatctgcctgcaaaggctgatcaggagtggctggacagcttggagaaagcccaggagagtgggcttatggaaggaggccaagggagacattttagaaagctgggaagacttgatggagggaatgctctgagaggtcagataggaggagggtgcagccctgggctttggtttatggacaggcgtggagattgttggggacttagggagggctatttatgtgtggcatgatggagggggtcagatggcagtggtctgatgagtgcaggagggatgagggaggcagtgggtctttcgagaagtttttgtataaaaaggacgagaaagataaagtgctagggccaatatgtatgttaggggaggtgtgtttcaaggtagaagaaacctgagatttgtttaaaagtgaatggcagatccaggagagagaggttaaccaagagtgtaagaaataggggagataatcagcgagtaaagttctctcaagcatgtgcgaggggctgggatcaggcatgtgggttgggggggttcgtcttggggaggaggagggatgagttctctagaacccaaaagcaggaacaaagagaggatgggtgcagatgtagatgtaggtttatagtgggatgttaagggagatttcattttgagcttctattttttctgcaaagtgggaggcaaggtcttctgctgagagtgaagaagaggtggtgaggagtttgaaagaatgatcattcagagtgttgagaagcaacttgcccacaaaatccccaattgcctgacagccttggctccccagttgaggttggtggtccttagtgtatgtgtgtctcgtcctgtcctgctgagtgaattcctccatcagggctcacctacccagctgcaggctggggagatgtatgtacatagtgggatttatccaggcctagggctttgccagatgggtggggaaaaaagggcacaggagtctaaagtattggcaaagagatgctaaaattctgggtcctgggatctacactgggtagcgagggaagcaaggcagatggatgtttgcagggagagagtggaatccttcacgggccaggccttatgagggacccctgagatcagagagggctgggagctggaactggtggtgacacccaggtttctgcttgggtggctgg

SEQ ID NO: 10256 - DNA, 2582 bp, Artificial sequence
  DNA replication origin
ttgttagagagtggtaagtgctatggaggaaaggaaagttgtttctggagatgcagggttgggggcaggttgtagtctttgatagggtgttgggatgggcctcattgacaaggtgagatttgagcataggcctgaaggaggggaggaagttcaccaagcccacaaccgggcagaaatcacagccagagcagaggtcccatggtgggaatgtgtccggcctggttgacgaaccacaaggaggccagcattgctggggtggagcgactgagaggaaaagggagagggagggacagacgggaggtcacgaggtgtgcagccagatcctgcagccacccactggactttggctttatgccgagtgaagccgggagccgtgggaaggctctgagcagaggagtcgcctcctgactcttgctgtgaaagggtggctagggctgctgcgtgggggatctgtacaagatgggcagatcatccccgtgcctcatgggctgctgtgaaggtcacggggggacactggacaaggaaatgcttagaaacaaaaggccctgactgtggttacagggcttccaggagagagagctgagtggctctgctcacaaccgtcttattgaagggtcagtggagctcaggagagggttataatttgcccagggtcatatgttctacaaccaattcaagatcggggacttcccactcttctcccagggcaaataccatctggcaggtggctaagtagtgcagcctttggacctgtgatggctgtagtgcggctgacggggactgagtcctcccttgaaaatccattcactccacaaatatttgttaagtgccggttatgggccaggcactgatctggactagaagctgggacctagagatattgggagacacctggcaagggctaagtcctggtctctggtggggctggtttctggtggggctggtctctggtggggttggtctgtctctggtgggtttggtctgtctctggtggggttggtctcgtctggtggggtttggtctctggtggggctggtctctggtgtggttggtctctggtggggttggtctgtctctggtggggttggtctgtctctggtggggttggtctctggtggggtttggtctctggtggggttggtctgtctcggggctggtctctggtggggttgggctctggtggggttgggctctgctggcgctggtctctggtgcggttggtctgtctctagtgcggttggtctgtctttggtggggtttggtctctggtggggttggtctctagtggggttggtctctggtggggttgggctctggtggggttggtctctggtagggctggtctctggtggggttggtctgtctctggtggggttggtctctggtggggtttggtctctggtggggctggtctctggtggggttggtctctggtggggttgatctctggaggagttggtctctggtggggctcagtcggtctgtgcaggagtcaagtgttagaggccacactactgaaggctggtgttggacttagggtcaagagtccatctggggctggggtcaggtcacagctggagtcaggcagcccagtcaagaggctgtggaaagtcaagctggagaggcaaggcctgctgggggctgtggaggtcaggagaaggccacacaccacgggccagactgtgtatggtaggggtgggaccaaggtgccactgagcttttacgtttaggtggcaaagaagatgatgtcattcataaaagcaggaaggcattagttcatttgaggaacagaaagagtgcagtgcatctgatgagcggggagaggcgtttcagatgaagagacaggctgggaccaggtcatgtagcctggtagtctcttggggaattattccaagaacaatgggaagccctcagagggccaggcaggaggttctgggtctggtttgtctttgaaaattatgcgtagcacacagatttaagggggccggaggccaggcatggtggctcacgcctgtaatcccagcactttgggaggcggaggagggcagatcatgaggtcgggagttcgagaccagcctggccaacatggtgaaaccccatctctactaaaaatacaaaaattagcccggcatggtggtgcacatctgtaatcccagctacttgggaggctgacgcaggagaattgcttgaacccatgaggcggaggttgcggtgagcagagaccacgccattgcactccaggctgggtgacaagagcaagactccctctcaaaaaaaaaaagcagggagggtggctggggggcaggaatgggaccaggagaccagtgacgggccaaagtagtttagagatggtggtgactttgagtggtggtggagaagaagaagggggcagattccatagctgtcttgaaggcagaagtgtcaggatttgccgtgggaggaagggagaaggaggtgaaggtagtgcccaggcttggggctgcgcaaggcatggtgctggcctccactgagatggggagatggagaacaccttctggagtaggtagaaaccagttttgttctggctgtcttctgctgtggca

SEQ ID NO: 10257 - DNA, 720 bp, Artificial sequence
  DNA replication origin
actgcactccagcctgggcgacagagcaagactctgtctcaaaaaaaaaaaaaaaaaaaaaaaaaagaaaagaaaaagaaaactcccagctcacgaaacagcacgtggaaaggtcttgaatcaaaggggacctgggatcattcagggattcgggagaagtctctgtgctgaggggagggggtgggtgggaggtaagatcaaaggttggggcctgggccttgggggcggtgggtgagaggtctccctcgctctgacccaacggaggcagatcctcggtttgatcctgggcccaactctgctcagtgaggaatgtcggggcggggtcccggggtgcggccccacccacggtgcgtggaatacaggggcggggaacgcccgctcttcccgaagtgcccgctagatggcgccagatctccgtgctgcaggggaaggacccgcctcggcggggcaggtacacgtggagggtggagggtggagggtggagggtggagggtggagggtggagggtggagggtgggcggaaggcgcagggtgaggtgtctaagcccagaagatggttgggacgtcctaggatgtggttgtgatgtgacgacggccttgatgtacattctccctttgtgtcccatcacaccccaggagctcagattattattctcattttactcagcgggaagctttaagtaggatgaggtcagggctgcgcccaggtcactcagctgg

SEQ ID NO: 10258 - DNA, 1137 bp, Artificial sequence
  DNA replication origin
cggtgcgtggaatacaggggcggggaacgcccgctcttcccgaagtgcccgctagatggcgccagatctccgtgctgcaggggaaggacccgcctcggcggggcaggtacacgtggagggtggagggtggagggtggagggtggagggtggagggtggagggtggagggtgggcggaaggcgcagggtgaggtgtctaagcccagaagatggttgggacgtcctaggatgtggttgtgatgtgacgacggccttgatgtacattctccctttgtgtcccatcacaccccaggagctcagattattattctcattttactcagcgggaagctttaagtaggatgaggtcagggctgcgcccaggtcactcagctggttcagggtggtgaagtggacaaagatggcacccggcctctgtgtgccctgcctgccgcaggccagctcgcagagggcctgcgctcagtccatccaaagggaagggcagtgccagggcagcccaatggctggcagtgccagggcatggatcccgagtcgtttattcattcagcgggtttattgagcacctactgtgtgccaggcactggtgagcgataaagcaacggataacacagacatgggtctccttccccacggaagggacaacctaatggggagacagccaggcgttatacagataagcctgccaacaactttattattagagattgtggtaagggctatgaaggaaatacgcacacctgagaagattccaaggtaggctcactctcgaggtgggcagggctcaggcacagggagggctcaggaggagatatggaagctgagacctgaagcgtgcgaggtgcagccatgaggagggctggaggagcagccttaggggcagagaggacagcagtgcacaggctgccaaaattgggaggagcccgaggaactgcaaggaggcggggctggggccaggagagagaagagtgttagggctgtccctgagggcaggggccagatcctctgggcctgctaggccctgccttgtcaaggagtgtagatttattattatcgttgttgttgttgttgttgttgttgttgttattattattattattattattattattattattattttgaaacagttctgctcagt

SEQ ID NO: 10259 - DNA, 1430 bp, Artificial sequence
  DNA replication origin
gcccgctctcctccccctcccgctccctcccggtgcccagcccccagtcccggcccggcgctgcgccggggcagctcgcagcctccccctcgtcccgcagcggggaggggtctccctggagactgaaggttggggcgcgctgcctcgccccctagcccagaggggcgtacccgtgcgccgagagcccccaagcccgtctccccttacctcctcggcccagcgcctacctccccgaatcgcggccgctgggagcggggttcgatcccgtgatgccgcgtgggtgccggccagagaagagctccggaggccggggcggccggcgggcgtgcggtgagcgccccggggcgggggccggggcgggaccgagcgctgctatcggggctggatttctcgacttccacccggattctccctcggccctcccggccgattcggtgctgctcggcgaccacgtgacgcgggctgcctttgacccctatctccgagcgggtagggggcgggggccggagggggtgtcagatgcaggacccacgagggccggggcggctgcccggcgtccccgaggcggtgacccccgggaaacaaagcccggggggaaaccaacaagttattcggggtcagagacgaaacagcgctgggggtcgggagaggcggcagagagaatgtgggagacaaagacccgcgcccgcggcggctccgagggccctgggaacgctctggctgggctcgagagggcctccaggctcttccacccctgggcttgtgacagctctccaggacctcctgggacagctccccgaccaccagtgctctgccagaatgacccctcctgggcagaccctccctcccccaacacacacctttgccctgactctcgaaaacccctttatcgtgattatgtggttcatttactggtttcattgtttactagaatgtcatctttcccaacaagttgttcccagcagaatcctctctcctggcacaaaacaagcagatgaagaggtaaatgaccttgtgcaaatctcttctcccgctgagcctgccccccaacccctgttattctagctatcccaaggactctgcaaattaggcaggatgacagtggttgttcccgttaaacagatgggaacaatgaggctcagagagatgagatgatttggcaggttaatgagagcctaggctggcactcggatcggcctgctcccagtggagggctttctgccacccatgagccagcctgtaaaatgagcagggtggggttggatgagtgaatcccttaaggagcttgtaaggatgcagatcacccggccctggagatcctgagtctgggaaacagtggattggtggattcctaaggacctttagaggctcaagattatccaactgggccgggcgcggtggctcacgcctgtaatcccaacactttggga

SEQ ID NO: 10260 - DNA, 1368 bp, Artificial sequence
  DNA replication origin
agacccctccccgctgcgggacgagggggaggctgcgagctgccccggcgcagcgccgggccgggactgggggctgggcaccgggagggagcgggagggggaggagagcgggcgggaggaggcggcggcggcggcgtggagcgggggtgggagcggcgggaggcggccgcgaaggggttaaccctggcccgggccggagcccggaggcgcacgcacggcccgggggacccaggcgtcccgctcctcgccgggagcgccccttcccccgagtggcgccccagccgtggcaggtaagaggccgagagggcccgggcctgccagtcccctgtcgcccagccggtggggcccgagcccggcgtgcaggccgcgcggggcccccagcggccgccggcgcaagtttggtgcgggcgggcgccgggcgggcgggtggagtcggccgggccccgcgcgcgggggtgggaggacaaagggtagggggccgcgcggggccgggggcaggctggggtgcgggcgagggcagcgcggcagctgtaggtcacggataatgtcactcacgaggaatgccccctccccctcccctgctcccgaacaggggaaacttttgtctagcgagggagggggttagaggccgggtcctggcttcgcgaaggctgaggcagccggaccggttttctgcgggctctgagcggcctgctgtctaactcccctcctccctcagggtctcgggagcaagaagttctccctttgcacgcagctctttaacgccctgggacaggggtgaggagggggcgccggtgggacgggtgggctctaggaccggccgggaatctggggactggccacttggctttttgcagattcgagcagcccggtgtgccctgcgaggctaagggaatacagagccccaccccctgaacgcccattgttgccctccccacccaggagagctttcagaatggcctgcgggcagttttgcccccaggtctcttcagagcgacctggctgtttgtcagtttccagcggtgtgaccttgagtgggttccttaccttcccctagcctcagtttcttcacctgtaaaatggggagaatggtatttgctagaatgaggatgagaggagtgtgtggtatttcagtaaatggtgtcatgcttatattcaacaagtacatttcacgtttactgtgtgttagggcgctggactaattcattgctttacatacattctctcatttaattctcccgcattactattaaccacattttacggaggggcaaactgaggcgcagggttgtaaaggtcacacagatagaaagtggtggagcttggattttacctccctctctcagcctgtgtctcagccacagatct

SEQ ID NO: 10261 - DNA, 1249 bp, Artificial sequence
  DNA replication origin
gaagaattttccaggcagagggagctgcagggcaaaggcgctggaactggagggcatgggtggccagaggcagggctgaaagaatgagaggatggtggaggagaggggccagagggcatgtggagacaggtagggcctcttggccatggggaggactttgttgtttgagtctgagtggaggggaagctgctggcgggcccgatgtgaggactgactggtttgggtacacattttagagagactgctgggggtgagggtggacgcaggatgactagctgggaggctgctgcagtcttgccacgagagaggttgggcgagtcagtggtgggtggggacggcgggggagcaaccaggggttggttctggatttattttgcaggatgagctgatgggatttgctgatggattagatgtggggtgtgagaatagagtgttgaccgcaaggtttctggcttgaggaactggaaggacagttggacagtattgctatttaccaagacagagaaggctgtgggacaagcaggtttgggaagagcaattaagatttggggtcagctgtgctggggtggggcctatgctggtgggggaggggcatggtgcacatgggtgctgggtcctgcatgttcctgttgctgtcaggaacagcaacaggggttgtgtgaggggccccaatgctaggagtctgttctgtgagaacaaatgtttcctggtcccttcatgtccttttctctctctgcaaacctccctctgcttttctcttccttttggacgaggaaaaaggcagattctgaagcctcattgtcactgtgatggtcctagcctttctgcctggcatgcctcctgacagggagttccttctggggtaggcaaggttgggggcggaagggtggggtggaggttcaggccttatcctggctctgctaccaacagagctctttgccttggtttcccctcctgtatggagaagggttgaggtggccccagggttctgagggtggcagggagcatttgaggaggccacatggcacagtggttaagaatctgggcttggggtcaggcaggcatgggcatgaatccttgcctgctgcttggctgtgagactgtggacgagtaacataacctctctgagcctcaattttctcatctgtagaaatgggccagtgatagtacctgcctcacagggttactgtgaggttgaatgaggaaatgtccataaagcacttagtgccaggtgcagtgactcgtgcct

SEQ ID NO: 10262 - DNA, 1136 bp, Artificial sequence
  DNA replication origin
aatggccctcgctgacccatcataccaaaggacaggggggtcagggagaccctgggtggggggagcacccaataagctgtgctcacctggttcttagctgggccaagtcagcttgagggggacatcctaatctatgtagaagacagcaggatgccttattctttaaacagtcctctagaaatggtctcagctgagttcagagaaccactgaaaggctgggagcatagcttgataagtgacacccatgtgggcatgtgagtgcagcccccgcggctctgcagatagttgaatttgaagaggaacgagagaaaaccagtctgcaaaggtgatgtccccatctccaacagaggaaagaggatgcagtccttcctctgcagaaatggattctgaaattggagcaactcccagaggtcccagagctctgctcccagaagtgctccaggggctgttctagggggtgggtggggaacggaggggcttcacacagtcatcctagtgcatggggctcggaccacaagttagccagggtggaaaaggagagggtcccaggcagggggaaagatgagcacggcctggagatgagagacagagccagcgccgcggaggagctgaaagccttagtctgcagggtggaggttaggggcaggggtgcagcaggggttacaggagtctgtactttaccccacatgacaggaccgccatgatggctcagtgaggagaggcgtgacaaggttagggccctcccttgatgttttctcactccctcccataatttctcagacacccaggagccaggcttggtgggtgctgggagagtggcagggaggaggacacgggtcctgggcccttgggatggggccttcggaggctctgtgggagggaagggaggctgagcagggttgccagtgagggagacagctccgtccactgaaggcccgaggagaaggcactctctgctcccccaggcaggctgcccagtgccacccacccctgtgggaaatggtgctccctctacaggacacagggtgggtggagttgaggcaacagcaggagctgttccatctgcagcgtcgcatcccagttctgcctctccctggctgtgtggccgtggcctggttgcctaccctttctgagtc

SEQ ID NO: 10263 - DNA, 1046 bp, Artificial sequence
  DNA replication origin
agatgatgagagcagagcagccacacgatcagaggaattctctgaagcccatgaggccaggaggagaaatgggaactgccagggagggttcctgcattctgagtctccccagtgtgaacaggggacatcccaaacccaggccacctgcaggtctgtgtttcacaggcccttgtgtggggtgggcttacgctagcacattcctaacttcctttagcagaaatctaaacacacaactcttgatgcaaaagacagatgaaagtggaaccaccctggtcaagggggtggggaacccggggaaacttcggtgaaaacctagaccagcatttctccaaccgtggttctgtttcaaaattgctggggctgtggagggtacttgccatcagtcctgtgccaagcccaccagctcgtgccctcaatgggagtggtgctggaatgtgggtatctggacttttaacagcatcccacgtgactctgatgtacatggccactgccatggggcttcgcacgctcaatctgaatggcattttgctcagtgaaaggtggggagctgagccccagagctgccatacagcaccctgccttgttgctgacccactggtgaagtcaggggatggcagcaggtgggtggggacatggtcacccttctcagtgcccatttgcctaagttctaccaagagagacagttattctagttactggggctgagacatagcggggaagatgggcctgagcacccaggtctgaaaggagagccaggaagaggtagggtgggaggtggtaccagttatggggacagaatcacaaaggcagatttcaaagtgggtagtgggtgggttagagaaaagaaaaggggacacaaagaaactgtctccctcctagccgaaggagataggaggattttaggacagaccgaccgacctagcgatacagaaaatgataaggaaacggagagacagacaaccaggcagcagagagtgaggcacagcgagaggaaagagaggtgcccccgcctggagatgggaggctgagcgggtggaggagggagt

SEQ ID NO: 10264 - DNA, 1875 bp, Artificial sequence
  DNA replication origin
gggggcgtcgggcgcggagcctgggcctggcgcggggcgggggtggcggggacctcggggcggggcgcgctgacggacgcggccaggtgtgccgaggcggcggcgcccgggagctcggggaccgtgcgcagcggctggaggtgagtgaggggcgctggcctggcaggggtgcgggcaccgcgcgagcctcgccccttcccacctgcgctattcccggcgccgcccaggaggaggtggcacatctgggctccagtcctcgcacgcggggtgaccttggccaagtcgcttctacactttgggcctcagtttccccatctgtaggtggggggctggaggggtatcgaggctttcgagcagctgaggagcgggaggacgccctgacgccgggaagctaccctcctgggctgcgtgggggctccagcccttgcgcccctccccgcaagcggatcagggcgaggcagccccaggcttacaggtgggcaacagcccagagtctgtctccccaagcccgttctgggaaaagtcggaccgacttgacccaggataacccaggcgggttgggctctgcccagaattgaccaacatgggcgccgtgggggcagcgggaacggccagtgctgggcctcctcactcctccctgcgggcggggcgaccgggctctggggtctggctgtgccggtggggcacacaggatgccagagcagtcacaccctggggaccacccagcccaagccctacctggagaaatccaggcctttccccagcgcctacagggagaggggaaactgtcctgcgctgcccgcctcacaacatctttgcaattgccctccttgccaaggtgagagagaggccccagaggtgaagttagtggagggctcggctcctttctaaccgctgcgctgtggaatcaggggcactgtccagagccctggcaggacctctttgaggactcaggaaaaggtctcctttgctccccccattaccccaagttatgggcgtattccggaaggtgccagggaactccgtccatggggtccaggttgtctggaagggacaagagctgagtgggaagcagcatgtgccccatcccccatcccccaccctgtcctgaatggcaggtggcactggaataaaccaacttgttatgtgatcttggagcaagacccttgctctcttggcctccggtgagagggtttggcagggtagcccctgagggggaaattgcactgtggacagcagtgctggtggtagctgtagggctagtcagagggtgccctaccccctgtccattagaaagtggaagtgaaactggatgctgatgggggtctagggtacactggggcaaggggttggaagccttactggcgccagcctgccttgtcaccaagcccaggcctggcccattccatgttggggggcacagccacaaactggaactgatgtgctcccccactacttgccatattgtctcaggcaggcagatgagatccctcaggggagttgaaaaccccccggggagctgaaaaaccctgtttgctgggtggggcatccccttcctctgtctccttaggagatcttggtctggttcctccccttctctggtcctcagtttttccatcagtacgaaggggatggcctaggatcactctagcttgatattcaaacttcccccaggaatgttgtttaccactctggcttgcagcccccactttccaggcctgccccgtctttgcaagccatgggccggctcccctcaaccccacaactgacacctaaattaagctgtggttggaaccagcatttacatggctaaataaggcctttaactccttccctccctagtcagctgttgcccttatctactccccatccctt

SEQ ID NO: 10265 - DNA, 947 bp, Artificial sequence
  DNA replication origin
gcggtagaggaagggcctgggaggcgcgggcagcgggctccggggactggtgcaggacgaaggaccggcgggcaacgggctccgcgggatgggcgcgaaggctgcccccggcacagcagccgagccggggcgggcgggctgtggcgagcgcatgcgcgggggcgggggcgggggcgggggcgggggcggtggcgccctcggcggggagaagggccgcgggttctcggcgcccgccgaccgcggggaggcgctcttgcgccgggccgcattgatgatgtttcgcgccagaagcgcctgcagctggcggctggggggccgcgcctcggtctcaggtcgcagcggggacaccgagcgctcgctccacgagggagacatgggcggtggcggcggcagcggcggggggctgctcatgctgctcccgcgacctggctcccacgggcccgggctcacccagccgtctaggctgctggggggccgggacgcgcccggcgtccagggtggggaggtgggcaggctctcccggcggtcctggggagagagcagagagggtggggcaggcattagtgctgaggtcttccacaccgggctttaggaagggacggagtccgatttgtccattacaccgagaagggaagccaccgatccaagtcaggtagtgcctgcaataaaacgcaggcgcccaaactctcagcccggaacgcctgaagagtccccgctgtcttgtgtctgcctccgtgttaagaagactcgctttggagagagccgccttaacttactaactgagcttgggcaagttacttcacccctctgggcttcagtttctgcttctgtaaaatggggtgtgataacagtacttaaccttatagggttgttgtgagggttaaatgagataactgatggaaaagaacattacatatatcggcacattccttggaagaaagtgctca

SEQ ID NO: 10266 - DNA, 1097 bp, Artificial sequence
  DNA replication origin
gctcatcggcccctaaattcaagcccaactagcccaccaccaccacccacccccgacttcctaatatcatggaatgcatttcaagactggaagagccctcaggggtcatctgagccaatcctgtcccctgctagaatctcctctatgcatcctggccatgcttttcatatttcccgtaacaagtaactctttgtctctctctttcccaataagcaaccccaaactgagggcaatcaggtaaagtcacatggtagctctgtatctcttctctccccagttcagctttgagcccagaacctgccatgaatgggcccagaaggaacagatgagctggaggcccaagtcctgggcctaagggaaatcactgccttataattctcttatggctgcagataagatgtcctggacagtctgaactgggatggagaaagtagcatgacagggacccggggagaattttcctgcctcttccctccagaggggatagtgggacaccttgagctggcctgggagacctctctaaaggtcattgtgataaaaatagagcttgtctgggaagggatggaaaacagctgctcctgcctgggacttggtgccagggagccggatggtcaggccagtgcctggacatgcgacacaggcctaggaccttctgaacacaccccgcttgccagactccagacagcagagccaggaggggagggacgagtatggaaccctgaaggtagcaagtccaggggtccatatacacactgccccgcctcatccaaggcactaactagtgtgtgtgtgtgtgtgtgtgtgtgtgtgtgtgtgtgtgtgtgtgagagagagagagagagaaagagagagtgtgtgtgcatcggtgtgtgtactgatgggaaggggaattttgacgtttgtggattgccttggccaaagccaccattaaacagatgggaaagctgagggtcaaacaaggaagggtcttacccagggtcacacaacagctgaatgagagcaagggctagaactcaagcttgcgtccctaacccatccccaaccccagagctctcctctgctgacccctcatctctggggctgcccaaagaggccag

SEQ ID NO: 10267 - DNA, 1801 bp, Artificial sequence
  DNA replication origin
aactcctgatctttcccagaaccttctcctccctttgccttccccatctccgtgaatggctgctctatccttccagtggctaaggccagaaaccttgcagtcatcctctctcactcattgcccatacccatggcttacctttaaaaaatatcgagaatctgaccatttctcactacctccaccattatgggcaaagacctgcatggggaattcatgcaataaacacaaatggccaaagaacttcggaaacagtgctaaacttcactgagcaacaaacacatgcaaattaaactctgaggtgtcatttttgcccatcaggtgggcaaagatttcaaacaatcatgacacccggtgtcggcaagcttggtgagaaacaggcattcttacacacagcatgccatgcttcgagaggtggggcctggagtgtatgggggatggggtggtgagagcccgctctggcctttcctggcagtccctacgctggacctgggcaagaagctgagcgtgccccaggacctgatgatggaggagctgtcactacgcaacaacagagggtccctcctcttccagaagaggcagcgccgtgtgcagaagttcactttcgagttagcagccagccagcgggcggtgagtaagccaccattgtgctcatggggaaaatgaggaccacagagagccactggttagcctaaagtcaaacggtaagccaggctgaggactgtgatgttcccatcagattaggctcctgcctttcagtgtgatccttgaaaagtgttatctttttaggcatctctccctggatacagaacaaagtaaacaaagtggattagggggttgaggataagccgtggagtgaagggactctggctcctaccaaaaaaaaaaaaaaaaaaaaaaagctaagacaggcatgcactctaggctaaatttgcagcaggctggatctagtttagacttgggcctgatctaagatggaaaatgtagaatgcccttttttcttcttcccaccggagaaaggaaaggccatggaataatctgctggtggagaagaaaggcaagaagggtttttcccttggcttcagaaaggcagcaggcagttccagatacttctaaggaagccagggctattccatccaccctccacttaatttctgggctagacaggaggcaactgagagggagtgatgtggcagaaaaataaagatggcaaaacacccgcctttgctatgtgcctaagacaatgctagctaagcactttgcaggtatctcatttaatgctcatagacccctctgaggaagagatcttcatcaccatcatcctcattctatcgagaaggacattgaggctcagggaaattaagtatcttgcccggactcggcattacaatagcaattaacatatatcgagtatttctcggtcccaggcactgggtttagcgttgtaaactagtaactcatccttgttccccgatgatgggcgttaggattcttgcctccccccgacctttttttttggtggagggagaaccctggtcccctgccccgctgagcttctctgcggtttattctaccccctcgttcccagatgctggccggaagcgccaggaggaaggtgactggaacagcggagtcggggacggtgagcgtggaggggagctccctggaagggaagctgggggaaggggagcgcggctgggggcgggaggtcgtcggtggcctctgagaacccgcccctgtgcccaggttgccaatgccaatggccctgaggggccgaactaccgctcggagctccacatcttcc

SEQ ID NO: 10268 - DNA, 1106 bp, Artificial sequence
  DNA replication origin
tcaggcagataaagtgcccctggcaaacctcaattttctgtttctcaacaaagctttggcgacttataagaatttgcgggaaagtgtccagaacccggagtcaggagccctgacttctagccctgaagggccgcgtgaccttggccaaagcccctaatccttctcagtctcagatccgggggctggaaactgaggaggttctcccggcaagcccctcgggctagtgacattctaagattccaagagctaaggagctagaggggtggggtggaggagggaggcgggcgcgccggattggcctctgcgcgccacgtgtccggctcggagcccacggctgtcctcccggtccgccccgcgctgcggttgctgctgggctaacgggctccgatccagcgagcgctgcgtcctcgagtccctgcgcccgtgcgtccgtctgcgacccgaggcctccgctgcgcggtgagtgggctgaggctggagaggggagtcgctctgggaaccccttcccgggggctgcagggacacaagaaataagcgcccagtcatcggctgatgggtaccccccgccaggagcagggacgggagggcgcggtaacccgagagtgtcgcagactgggtgtgtctggggagcgcagcggagcaaatctggggtcggggcggagaggcgcgggcggagggcgccctggctagggggaggggagggagtcccgttgctgcagagggtctggttgagggtcctgggcgccggagctgagccaggggctggtcctgccggccttaatttgggggggctcaagagactttgaaggtccggggttggggtcagctggacgccagtcaaaggacccgcagagaagggtgtggctgaggcccaagactgagagcaagagcgttggaccctccagctgcttataaaatggcttgtgtgtggtgtcgggggagggctgcctgcgtgcagagagctgaacgtccggtcgtacatacctcagggcctcattggaccccatcccctttgggccactgcttgtctatgaatgcagtctcccaacggggctccgaggcctcctatggtgaggcaggggcactacccttctttctgcatcccc

SEQ ID NO: 10269 - DNA, 975 bp, Artificial sequence
  DNA replication origin
tctgtaagttcaacttggttagaatccgcatataaatgagataataaaacagaactaccatatgagccattatcccacttctgggtatatatccaaaggaactgaaatcaacatttcgaagggctatctgcactcccatattcattgcagcattactcacaatagctaagatatggaaataacctaagtgtccatcaacagacacttgatggataaagaaattatccatcaacagacacttgatgaagaaattatccatcaaattgaatgcataaagaaaatgtggcatatatacacaacagaatactattcagcctttaaaagggggaacatcttgtcatttgcaacaacatagattgaatctgaaagacattgggctagctgcaataagccaggaacgaggctttttcaggtgaagggattacagaacttccctttcccagggatctgcagcacggtgtgaatgagaagtgaaggaagaagcggtgtcaatgagaagtgaaggaggaagcttggagggtacggggactgttgtctcagtggctcataaccaagggcagcggggtcacaggcctgggtatttgtcaccagatgggcaaatctggatcctctggcctggaaaagctctcaaaccctcccaactctcaggaagacctcagggcattcgagcaggggaagagatgaggcagcaggccttatcatgggggacataaggagtgggggtcaggagtaaggtgcagggttaacaggactgaatctctgggggcaatgccttagttttaaggctgtctgcattttcactccggcgcttggagggagggcaggagagtgcagacgtgagattaatctctccaaaaagggcctggagcagaacaagtctttagaggccaccctcattgtacagaccagaatcccataattagttactttggaaggctctagtgcagagaaccaattctagagaacggagtggcc

SEQ ID NO: 10270 - DNA, 902 bp, Artificial sequence
  DNA replication origin
tgggatgtgaggagcccctctgcccggctgcccagtctgggaagtgaggagtgcctcttcccggccgccatcctgtctgggaagtaaggagcgtctctgcccggccgcccatcgtctgagatgtggggagcgcctctgccccgccgccccgtctggggtgtgaggagcacctctgcccggccgcgaccccgtctgggaggtgaggagcgtctctgcccagccgccccgtctgagaagtgaggagcccctccacccggcagccgccccgtctgagaagtgaggagcccctccgcccggcagccaccccgtctgggaagtgaggagcgtctccgccccgcagccgccccgtccgggagggaggtggggggcgcctccgcccggccgccgccccgtccgggatgtggggggcacctctgcccagccgccccgtctgggaagtgaggagcccctctgcccggctgccaccccatctgggaggtgtacccaacagctcattgagaacgggccatgatgacgatggcggttttgtcgaatagaaaagggggaaatgtggggaaaagatagagaaatcagattgttgctgcgtctgtgtattaagaagtagacataggagactccattttgttatgtactaaggaagattcttctgccttgggatgctgttgatctatgaccttgcccccaaccctgtgctctctgaaacatgtgctgtgtccactcagggttaaatggattaagggcggtgcaagatgtgctttgttaaacagatgcttgaaggcagcatgctcgttaagagtcatcaccactccctaatctcaagtacccagggacacaaacactgcagaaggccgcagggtcctctgcctaggaaaaccagagacctttgttcacttgtttatctg

SEQ ID NO: 10271 - DNA, 1012 bp, Artificial sequence
  DNA replication origin
tctacttcttaatacacagacgcagcaacaatctgatttctctatcttttccccacatttcccccttttctattcgacaaaaccgccatcgtcatcatggcccgttctcaatgagctgttgggtacacctcccagatggggtggcagccgggcagaggggctcctcacttcccagacggggcggctgggcagaggtgccccccacatcccggacggggcggcggccgggcggaggcgccccccacctccctcccggacggggcggctgcggggcggagacgctcctcacttcccagacggggtggctgccgggcggaggggctcctcacttctcagacggggcggctgccgggtggaggggctcctcacttctcagacggggcggctgggcagagacgctcctcacctcccagacggggtcgcggccgggcagaggtgctcctcacaccccagacggggcggcggggcagaggcgctccccacatctcagacgatgggcggccgggcagagacgctccttacttcccagacaggatggcggccgggaagaggcactcctcacttcccagactgggcagccgggcagaggggctcctcacatcccagatgatgggcggccaggcagagacgctcctcacttcccagacggggtggcggcggggcagaggctgcaatctccacactttaggaggccaaggcaggcggctgggaggtggaggttgtagctagcgaagatcactccactgcactccagcctggacaacattgagcactgagtgaacgagacaccgtctgcaatcccggcacctcgggaggccgaggctggcagatcactcgtggttaggagctggagaccagcccggccaacacagcgaaaccccgtctccaccaaaaaaatacgaaaaccagtcagtcgtggcggcgcgcccctgcaatcgcaggcactcggcaggctgaggcgggagaatcaggcagggaggttgcagtgagccgagatggcagcagtacagtc

SEQ ID NO: 10272 - DNA, 878 bp, Artificial sequence
  DNA replication origin
gtggggtaagctaggggacaacagcggctccggccgccgcctgagcccttcaagatcagcatccggtcaagcggctgtgcagccgagaagcaacccgggactgcaagtctgcgtggcggggacggcgcaaccactcaccggcatgactgaggcagcggcggtgtggcggcggtgtggcggcggtgtcagcagcgcctctctggattcggagggcgggttcggctgcgcttccgagagtgcgcactagaggcctggtcccggaggcccctcccactccgggcccggccgcgagggaggctccgccccctccagtcctgatccctgccggccgcgccgcctcctttctgcgggccgggcccgtggtcacccggcctggacggagagaggaggtgagaggggcgctgcgttggcctccatcgactgtcggcctttttcagaacgcctacttcgggtcaagcttgtgttagggaatgccagagaagggcaccgccttgaacaggacatcatccatccatccctaaaaggacagtttcactcatttattcaccgagtcaatttttattaagcgccagccaacgaggacgcagcggtggaagagcagcagcaggaggctgcgaaggacgcaggcagtgatagtgcagggttagcagagctgttgtgacagaggaggaagggccctgactgcagtggggtgggggcggttgtggaagagaggcggcctggggagaaggcaataatctggacctcggttagcctttatcgccctgttacaggctttgtctctaaatacagtcgcattgggggttagggtatcaacataggaatttgcggggacacaattcatgtccatgtcagagttcagtccctagcagagccat

SEQ ID NO: 10273 - DNA, 1337 bp, Artificial sequence
  DNA replication origin
gcacagtgccggacacacagtgagggcgtggaaagaacattggttgttactaccactccgtgcactcgctgctccctctttgctctctgcaaaaccgaaggcgcttctgcgacgcgcggaccgcaagactccaatcagactttagtgctgcccccaccctaaacgaaagcctccttctggtccgaaccgactggatcccttggccaggggaggaaaaggtgccgcgggcgcgtggcggagagggtggcgggcgggaaacgctgggcgcgggacccctggccccagagaccgccctggggcccaggcggcggccgcggcttactcctgccccgcgaggccgttggacgcagcacgcgcacgcggcggacacggccacgcgccccagccgggacgggagcgggagcgaggagccgccgcgcgcccgtccgtccgccgcgcgcgcctgcggccgttggggtgggggttggggtgggggacgcgactggcgcggccgccgcgagcgccactcagacttctccctctcacaagtgctgcggctcggcttagtcctctggcctccctgccccgcccacaccccggcgtacctacgcggctgagctggagaggaactagctctgcaccacagcaccgaggatagtacaaacccctcacgcaactgcgtccgcacacacgcgtgctccgccgccggtctatataactgccactcaccctaacttgttgcggccaggtcgggcgacgggatgaccaatcccgaccgcgtcctcagggctcttcgaacagtaattgggcactgactcggggatgaaggcgtggctcttgattggctttgactcctgcctatgagactgtgaggatctcgtttccctagtaacagatcggcactaagagagaccaataaccgaaaagtacaatagaaaggcgagtgagcagttctttgactgatactcaaagtagccaataaatgtgtggggctgctcttattcgttaacacgtcttcccctgggcggagatccgttttccatgcaggagcggttgcgccacaaggtggggcccgtgtactttggggaagtaaacccctagcaactaggaggcgggcgtccgagaggccaagacagcctgtggccaatcgcaacgccggaaggagctgatagacacggaggttgctctgctcggaagagaccgagccccagggccgccgtgccctctgggcggttgtgaggctgtgcagcctgcggcttctgccctctttctttccctgactggttgggtccggcctccgaggcctgtaccccgccttttccgcataggtttgtacctggcgaaccaactagtaaagt

SEQ ID NO: 10274 - DNA, 814 bp, Artificial sequence
  DNA replication origin
gcccggccgtgaccccgtctgggaggtgaggagcgtctatgcccggccgccccgtctgagaagtgaggagcccctccacccggcagccgccccgtctgagaagtgaggagcccctccgcccggcagccgtcccatctgagaagtgaggatcccctccgcccggcagccgccctgtctgggaagtgaggagcatctccgcccggcagccgccccgtccgggaggtggggggcagcccccggccggccagccgccccggcagggagggaggtggggggcagcccccgcccggccagccaccccgtccgggaggtggggggcagcccccgcccggccagccgccccgtctgggaggtggggggcgcctctgcccggccgccccttctgggaagtgaggagcccctctgcccggccgccaccccgtctgggaggtgtacccaacagctcattgagaacgggccatgatgacgatggcggttttgtcgaatagaaaagggggaaatgtggggaaaagatagagaaatcagagtgttgctgtgtctgtgtagaaagaagtagacataggagactccattttgttctgtactaagaattcttctgccttgggatgctgttgatctatgaccttacccccaacccagtgctctctgaaacatgtgctgtgtccactcagggttaaatggattaagggcggtgcaagatgtgctttgttaaacagatgcttgaaggcagcatgctcgttaagagtcatcaccactccctaatctcaagtacccagggacacaaacactgcggaaggccccagggtcctctgcc

SEQ ID NO: 10275 - DNA, 1282 bp, Artificial sequence
  DNA replication origin
ggttgggggtaaggtcatagatcaacagcatcccaaggcagaagaattcttagtacagaacaaaatggagtctcctatgtctacttctttctacacagacacagcaacactctgatttctctatcttttccccacatttcccccttttctattcgacaaaaccgccatcgtcatcatggcccgttctcaatgagctgttgggtacacctcccagacggggtggcggccgggcagaggggctcctcacttcccagaaggggcggccgggcagaggcgccccccacctcccagacggggcggctggccgggcgggggctgccccccacctcccggacggggtggctggccgggcgggggctgccccccacctccctccctgccggggcggctggccggccgggggctgccccccacctcccggacggggcggctgccgggcggagatgctcctcacttcccagacagggcggctgccgggcggaggggatcctcacttctcagatgggacggctgccgggcggaggggctcctcacttctcagacggggcggctgccgggtggaggggctcctcacttctcagacggggcggccgggcatagacgctcctcacctcccagacggggtcacggccgggcagaggcgctcctcacatcccagactgggtggcggggcagaggcgctccccacatctcagacgatgggcggccgggcagagacgctcctcacttcctagacgggatggcggctgggaagaggtgctcctcacttcccagactgggcagccgggcagaggggctcctcacatcccagatgatgggcggccaggcggagacgctcctcacttcccagacggggtggcggccaggcagaggctgcaatctcggcactttgggaggccaaggcaggcggctgggaggtggaggttgtagcgagcggagatcacgccactgcactccagcctgggcaacattgagcactgagtgaatgagactccatctgcaatcccggcacctcgggaggccaaggctggcagatcacttgtggttaggagctggagaccagcccggccaacacagcgaaaccccgtctccaccaaaaaaatactaaaaccaatcaggcgtggcggcgtgcgcctgcaatcgcaggcactcggcaggctgaggcgggagaatcaggcagggaggttgcagtgagcaaagatggcggcagtacagtccaacttccgctcggcatcagagggagaccgtggaaagagagggagagggagaccgtggggagagg

SEQ ID NO: 10276 - DNA, 988 bp, Artificial sequence
  DNA replication origin
gccatccgggagagagttggggggtcagccccctgcccggccagccgccccgtccgggaggtgaggggcgcctctgcccagccgcccctactgggaagtgaggagcccctctgcccggccagccgccccgtccgggacggaggtgggggagtcagccccccgcccggccagccgccccatccgggagggaggtggggggtcagccccctgcccggccagccgccccgtccaggaggtgaggggcgcctctgcccagccgcccctactgggaagtgaggagcccctctgcccggccagccgccccatccgggagggaggtgggggagtcagccccccgcccggccagccgccccatccgggagggaggtgggggggccagccccctgcccggctagccgccccgtccgggagggaggtgggggggtcagccccccgccccgccagccgccccatccaggaggtgaggggcgcctctgcctggccgcccctactgggaagtgaggagccgctctgcccagccaccaccctgtctgggaggtgtacccaacagctcattgagaacgggccatgatgacaatggcggatttgtggaatagaaaagggggaaaggtggggaaaagattgagaaattggatggttgctgtgtctgtgtagaaagaagtagacatgggagacttttcattttgttctgtactaagaaaaattcttctgccttgggatcctgttgatctatgaccttacccccaaccctgtgctctctgaaacatgtgctgtgtccactcagggttaaatggattaagggcggtgcaagatgtgctttgttaaacagatgcttgaaggcagcatgctccttaagagtcatcaccactccctaatctcaagtacccagggacacaaacactctgcctaggaaaaccagatacctttgttcacttgtttatctgctgaccttcccttctattgtcctatgaccctgtcaaatccccct

SEQ ID NO: 10277 - DNA, 1391 bp, Artificial sequence
  DNA replication origin
gtcccggacggggcggctggccgggcagaggggctcctcacttcccagtaggggcggctgggcagaggcgcccctcacctcccggacggggcggctggccgggcagggggctgaccccccaactctctcccggatggcgcggctcgcctggcggggggctgactcccccacctccctcccggacggggcagctggccgggtggggggctgaccccccaacctccctcccggacgggccagctggccgggcggggggctgaccacccacctccctcccggacggggcggctggccgggcagaggggctcctcacttcccagtaggggcagccgggcagaggcgcccctcacctcccggacggggcggctggccgggtagggggctgaccccccacctccctcccggacaggggggctcgcctggtggggctgacccccacctccctcccggacagggtggctgccgggcggagacgctcctcacttcccagacggggtggcagccgggcggaggggctcctcacttctcagacggggcggttgccaggcggagggtctcctcacttctcagacagggcggccgggcagagatgctcctcacctcccagacagggtcacggccgggcagagatgctcctcacatcccagacggggcagcggggcagaggcgctccccacatctcagatgatgggtggccgggcagagacgcccctcacttcctagatgggatggcggccaggaagaggcgctcctcacttcctaggtgggatggtggccaggcaaagacactcctcactttccagactgggcagccaggcaaaggggctcctcacatcccagacgatgggcggccaggcagagacgctcctcacttcccagacaggatagcggcctggcagaggctgcaatctcggcactttggggggccaaggcaggcggctgggaggtggaggttgtagctagccgagatcacgccactgcactccagcctgggcaccattgagcactgaggtaacgagactccgtctgcaatcccggcacctcgggaggccgaggctggcgggtcactcgtggttaggagctggagaccagcccggccatcacagcgaaaccccgtctccaccaaaaaaatacgaaaaccagtcaggcgtggcggcgcgtgcctgcaatcgcaggcactgcaggctgaggcaggagaatcaggcagggaggttgcagtgagccgagatggcagcagcacagtccagcttcagcttggcatgagagggagaccgtggaaagagagggagagggagaccatggggagagggagaccgtggggaaagggggaccttggggagagggagagggagagccatttttaatttttcaatgttttctcttttactgta

SEQ ID NO: 10278 - DNA, 772 bp, Artificial sequence
  DNA replication origin
aaatttcctaggagggatttctagggtctttccctcaggaattagttgtaggaataattgggccagtggagtgcaggagatatatccagcgcagcccatgcactcctagaaaaagtgacctagatcaagcagctggtggattgaggactattgtggggaccccctgccacctactgacttacagctgaacccacattcccagcagcttcagcctgggggctgggggagcgggcagaccgagctcagaaaggcaggggagggtaaagaggactgtggggttgcccctttcaggaccaagtgccacgtgtcacacacccccacctccacctttctgcacacacagaaaggaggataaggtgaggatgggaggaagggggaacaggtagggaggtcggctgtggaactccaagctagctcggtgggtattagcatagagcttgctgcctgtgtgagtgtgagggggagagcgagagagagcaagggagggagagagaggcaggctgcgaggggagaggagagggagtgggggagccagcgctccagctagcatgaggacgggcttcttttcccgtgctcagttaatctggctgtcagttggtgttaacgctgcagtttaagtgttcggattccaagggaaacagacaaacctcacgaaaggaaggaagcaagcaagcaaggaaggaactgcaggaggaaaagaacaggcagaacagcgagaagaataaagggaaagggggggaaacaccaaatctatgattggacctgggcttct

SEQ ID NO: 10279 - DNA, 1570 bp, Artificial sequence
  DNA replication origin
gccacattcttttatttatttaattaattaattaatttatttatttatttatttttttgagatagagtctcgctctgttgccaggctggagtgcagtggcacgatctcggctcactgcaacctctgcttcctgggttcaagcgattctcctgactcagcctcccaagtagctgggattacaggtgcccgccaccacgcccagctaatttttgtatttttagtagagacagggtttcgccatgttggccaggatggtctcgatctcttgacctcgtgatctgcccgccttggcctcccaaagtgctgggattacatgcatttttaaatctgactctcattcgccaatgggtataagaaaagcatgtacctcacagggtaactgtgagcatttaaagaggtaatgcatctcaagggctgcctgacatagagtaagcactcaataaaaggtaagcattattgtgatggaaatctaaagaaagaaaacagttccctgaggaggagttttagaaggcttcgtggaggaggtggcagtttaactagacacggaaggatgaacaagatttccaccgacctagagaagggggttttatgggtagaaggagctgcgtggtcaacagcacaagaaggaaaacacaaagcctgcaacaggctaagcgaagctcagggcagggcagggcagggcacggcaggagacagaacgtttgatcagccctagcaggtcataggagaggagcatgatggactctagagccgaggtgatggaagccttgaaggttttgctgcagaaatcaagaactgagctgtgatgtcagaaaactgaatccccatcgctcagcctggagctggaagaacttggaggcaagagttgccagaacgctggtcaaggactagtggcagctaggcacgaaggtcagcggctgagctagagaagcagagaatcaagaggacgaatgtgggggtggcagagagtaaggtagccaagggggtgctccgttccaccgcatcagggaggaggcagctaagtgaccagcgtcgagcgccccgaggaggagccgctggctggcatcaccgtcggagtccggctccacggccctccgcatcgcccagaagcccgactcctctgtcaaagccctcgccacagttacagacacattgcctggtctagtgaaattacgtgtttcatgtttcagctcccagacgtcagggctcaggtctgttttcatttcatcccagagcctggcacagtgtttggcacatagtggcgctcgccaacggtttgctgagagctttccgggaagggctcagtgcgcttaggatccaaaagcacgcgtgagaatgcagggcattctaactccaagggggttggacttgcgtgaggaaaggtgctgcagagaggctaccgtcacttacccacccgccggtttgcaggatctacagacgggcggcggccgggcacagctccctacagtttgcagagggcgttcacacctaacgccagggcccccctagaggaagaaaaccagggcccgcccgcggaacagtgagcgtgcagcacggctgtggccccgtt

SEQ ID NO: 10280 - DNA, 1124 bp, Artificial sequence
  DNA replication origin
acgctccgtgagagggccgagcctgcagcgcagagactcggcggtcgacgcgggggcaggcggcgcggggcgggcggctcggcggggcccgggggcggtggcggcggcgacgaccccctcgtggcggcggcgtggtggcggcgcccagctccccggccggcgagcggcggaagtgccgcggagttggagcggggccggcgccgcagccgcttctgctggctgagctgctgccgccgccgggcggacgggcggacgcgcggagctgggggcggcgcggcggggccggcggggcgcggcggggctgaccggccccgatgaggcggaaggagaagcggctcctgcaggcggtggcgctggtgctggcggccctggtcctcctgcccaacgtggggctttgggcgctgtaccgcgagcggcagcccgacggcacccctgggggatcgggggcggcggtggcgccggcggcgggacaggtgagtccccccgttgctacaggccgggaacacccccttcccgaattcacttttagcctgtggttccttcctccaccttctgctgtctgcctcctcagagtcagctccgagactcttcagctcttcccattttccggatgggaaaattaagtcctgtcgggacttgtccagggtcccacgccagtcagagactgagtccgaactagcactcaggacgctatttctcaccacatgttaccaccttcctttctgtccccgtctggtattccttgacgtcttccagcggatctcttttgaaggatcctatctgcatccctgtatcccaggatgactcctgccttgtgccaataggaatgaagattctggttcttctatttggtgtccaggtcctctctgcttccctcctcccacccccccccccccacaacccctacctgctgatcccagtgttctttgctcaggtcagcccttttcctgatttctcatctgcccaacgagacacccgggccttcctcctctccccatttattcaacacccccgccccaactctagccttttcctttctcagatcctgtggattccttgcagaatgtaaagatcatgctccctttaaagcttcaagcccctgggggtggagaagggggtaagct

SEQ ID NO: 10281 - DNA, 1195 bp, Artificial sequence
  DNA replication origin
cgggagggcgtcccaggaaacagccgctccccaaggactccgggcctgggttgccagggggtttcgaaggcccctgccggctcccgccttctttcggcagcggggcaaactcgctgccgggcagctcccccggggtggcgcggcctcctcgcgcggggcccggcctcgaacccgcggcacccgggccccgcggctcgtccggcccactccacccctgcagccactcggctgcgccccgagtcccgcggcagcccctgggccgcccggccgccgcccgccgaacgctccgcaccacaacagttcgctccccccgcccttcgcgggacagcggaagtcccgccttcacgcgaccattggtctcatttgctctctgggcggggctgccgccgccgctggcgcgtcccattgggcgtcgccgccgccagtctccggcgccaggctacttcctggactctgctgggatgggttcaaagtagagaaagtggaagaggaaagagttaccccagcgagaaccgggaaccgggctgcagactctccggcccgggggagggatggtgagcaggggcctggctggaccgagggccagactccaggaacagaggaacacattcggggacagacagtagagacgcggacggggacgctgagggacagacttggaggaggggcatatgaggggacctaaagaggatagaggtgctatcaggagaggggcggactaataaaatgaaagggccagggccagaggactcgcggatccgtgggaggaagggtgggtgaaataggacggaaagccagtcatggcgggaaagacagagggacaaccccatacagatacgtggaaagacatgcggaggaggtgatggggggatcttgcaaggcagtcgcaatattgggggtagccgataccttccagagtgtggagagtgggactggcttggacggcgcggaaagaaaaggagagggggaaaggagaccccgaggggtttgggcgacccctccactgggaagaatgggaagtccgaatgaggtctggagggtggactaggtgagccgcgggcaagagaaagggcttcaggggagatgaagtgaaggctgggagtggggcccaggggccaatctcggaatctagatggggaagggctgcggtgtcttgggctctccctggagctccaagctgtagttctattgcttt

SEQ ID NO: 10282 - DNA, 1667 bp, Artificial sequence
  DNA replication origin
tcgactacctgcatggcctgaggctgctcaccgctcctgcacccttggctggagcatgcaagccccaggactcaccagctcccttttccgcttgctctcacggccgccatccgccttcttgagttcagccttgaaggcctcgggatcgccagactgtgcatccttggccagcacgtccatcaggtaggcgatgtagctggtggctaggcgcagagtcttgatcttggagagcttggtgtcggccggcacgttggggatgcactcgcgcaactccgcgaatgcgctgttaatgctctcagtgcgtctccgctccttcttgggtcctgagcctttccgccggccaagacggccgccaagcgcctccagccgcccggggctctgcccaggcctggcgtcaggaccataggcggtggcggctgcagcggccgcgggcggcggcccgcccgcagggaagtccggggcagcgtcagccgggctcagcagccagctctggaagtagggcctttcctgatgacagcgcgaggccggaccgaagaggaagggttcgtggagcatggggtgcgcagggtgcgggtggtgatggtggtgatggtgtgcgtagctgcccacgaggttcatgttggagcggctactggcctgcgccgccagccctattaacgccgctccatgcgccccagagactgccgggggccacctgtgggctctggagccactactgggcgccggctttgggagagtccgggcaaggctgaaaatgagacgcgcagcccactgtcttcttaccggtttctgccgcgggcgaggtcgccgaagcccaaagacctgtttaacccttctgcggactcccctgcggatctggcttatataagaccgcggctttgatgtcaacctctcccgggagccaatggcaggggggcggggataaggaaaagggggagtggctatcccaggttttacgctcagcccgcgccactctagtccgccagcagggactgggaaccggccccgcctctgcccctcccactcagctccctgctctgcgggcttaggggggcgggctgctgggggtgttgagggggcgggcacggggactacgtacttgaggcacaggacggccaacgccctggactgttgctgccaccccctccccacggatccaaggaaaggaatccagaatcaccaagcgaaaagaaggcctacacctagagcccgccttttgattttacagacaaggaaactgaggcccagggaaagaaaggttcttgtttctagactgtctagaagtctaaataggaattccagcagttcccagtcccgagctccaactgctctgctcggcgtcagagctagaagatgagagggcgctgctgaagacaggataggccgctaacgttcttccctaacaccttccagccctccgcccccacccccaccccttagtcatcggccctttctggagagactgggagccgcttgtgcacggggtcgttaccagcccgccaattctgacccagcctcaggcagacgggcacgcagctactgaccagcgaagaagcctttcggaggcaggggtaggggtggggcgggaaggaggaggcggactccaggcccacgggcatcgacgggtttgttcccggcttgagggtctgagatccactccggcctcc

SEQ ID NO: 10283 - DNA, 1280 bp, Artificial sequence
  DNA replication origin
aggttcttgtttctagactgtctagaagtctaaataggaattccagcagttcccagtcccgagctccaactgctctgctcggcgtcagagctagaagatgagagggcgctgctgaagacaggataggccgctaacgttcttccctaacaccttccagccctccgcccccacccccaccccttagtcatcggccctttctggagagactgggagccgcttgtgcacggggtcgttaccagcccgccaattctgacccagcctcaggcagacgggcacgcagctactgaccagcgaagaagcctttcggaggcaggggtaggggtggggcgggaaggaggaggcggactccaggcccacgggcatcgacgggtttgttcccggcttgagggtctgagatccactccggcctcccgggtgcctgatccattccgaaggccagcccggctggcgcagagacagtctggcgtccgccttgggcccggggcatctggccagcaggtctcctctggtctgtccgcaggactcgcaccgagacctgggagcgcggctacgtcgggccgctctacccagatcatcactccttaagaatctttggttctttaaagacaccggccccgaagctcacacctcgagacaccagcattcggcgttagacacacgcagaggggaccaagactgcacagcatccgcgaggctcgcacaggcaaacgcgacgtccggcatctctcacgcatcagcgcagaggcgcgactcggctgcacgaccctccgagatttcaccccgggggtagggccattccctgccagccggactctctccactgtgggctttccccaggctcgcgttggaatctgggaatcccggagtggtgacgcttcaagctggggactctcggtcttacctcccgctgtggttcctttcttggccgatgtccacctacctgggtccctcattctctcaacctttctcagctcaacgccccctccctcggtgtggtagagggagtgtgcctctcttcaaagcaaagtcgaggggagggggaaaggagaagttaatgtgagtgctctttttagaaggcaaatcattcacccattcattcaacaattatttattgatgcctactatgtgcctatcatagttactagtccaaagacagagggagaaaggcccattctctccttgaacagatatggaacgtgaagcccagagaagaagagcgattttctcgaggtccggtagggagtggatgagtggaattccactcctggacaagagagtga

SEQ ID NO: 10284 - DNA, 1625 bp, Artificial sequence
  DNA replication origin
agaccccgtctcaaaacaaaatgaaacaaagaaacctgcttgtgaccagtcacagtggctcacacctgtaatcccagcactttgggaggctgaggcaggaggatcccttgagcccaggagttcgagaacagccggggcaacataatgagactttgtctctacaaaaaaaaaaaaaataattaaaaattaaaattagctgggtatggtggtgcgtgtctgtagtccctagctactagggaggctgaggtgggaggaaatatacatatacacacacatatatatgtttaaacacctgcttgtatgtaacaaaggccaaatggagctcatatctgaggttacttgattctgagtcttctcagcagctgtcctcactttgactcaagtaaactcttcaaattatatttcgtgccccagcctcttcctttgaggttggcaggaggcacttaaggccagctgtccaccatgtgtgatgctgagtgtggtccctaggtgatgatgagcagatagaggacgaagaactctttaccctgttggcaggaagggtagaagtcttcacaggcaatggcctttgatttgggctttaaagggtgtgtaagaacctacagggtggggaagagaagaggaagggctttccaggtatgcatggaggcacaatgtagggaaagacaatgacaagcttgaggaagtaggaggtggtagccaaatgtgggctgagaattataataacaagcacttagggtgagttgagtgtgttccaggaactatgctaagtgactcacttaatcctcagcctgtcctgcggaatgtgtgctgccacccccattttaaggatgtggaaatcaaggtttagcaataagcagcaactggcctaaagtcacatagctaggaactggtagactcctgaacctctgctttaaacatctctaagcacttccttaaggtgagggaagaacgcgaaactggggaatgatgttggggcagatggagataggccttctccaccgttctaaggggtttcagtgttattccagggcactagggagccagcgaaggtttccttcgaaagggaccagcagggctgggagcggtggctcatgcctgtattcccagcactttgggcggcggaggcgggtggatcgcctgaggtcagatgttcaagaccagcctggccaacaaatggtgaaaccccgtctctgctaaaaatacaaaaattagccgggcgtggtggcgcaggcctgtagtcccagctactcaggtggctaaggcacgagaatcgcctaagccccggagggggaggttgcagtgagccgagatcgcgccacttttttgaggcagagcctcaaaaaagaaaaagaaaaaaaaaaaagaacgaaaagggtgagcagggctgtgcctgacaacgctcacccgcggccctatgggggatgaaccgagggctgccgaggagcgctatcaggttggaggatgggtgcccattcacgtgagctgccccagggaacagggacggagggaggaatgcaagatcctccctgaccttgtgcagaccttcatgccgaagggcagtggggcggggctgagtctccgcaggatcccggagccttttcaacgaacggcaccccaagctg

SEQ ID NO: 10285 - DNA, 935 bp, Artificial sequence
  DNA replication origin
gggcgggcaggaggcggcgggacggcgcgcgcacggctacgcggtcctgcccctcgccccgcccctcgtctccgattcctcagagcacctcccgggctgggggtagggacgctcagaccggacgggggcgagcacgtgcctgatgcaattcgggagttgtcggtgggggcgctgacggggataggagagaaggctgggcgaggaggggaggtatcttaaagggccagcgcgtgagagcggcctcaggtggagcacatgggacccggccacgcggcctgccgggcctgctcgtgctctttaggctgggtgtcagattcaggggaaggagccattagtgtcattcctgacttctaggaggccgaagggaggaccctcatccgccccgaggacgcgccaacgccgccccctcccctgtgcccggcgggcctggccccttcggtccccgcccgggtgaccttggttgggtgagccgtccgcacctcagtgggttgtgctccgcgcctcgccgccgctgggcctggcctcgacactacccggagatgggttcaactccgggcctggaaagcgagtctttagcccttgcgggcagccggcgcctaggaagtgggaacggaattactaaagccctcacccaggccaggcccttctccccgccgcgaaaccttgtatttatgggcaggaaatgtcttttctttcaagtggatgtcgttttttttctaaagaattgctttgggcggagttgaaccgtccctggattgggacttctgagatctgagattttatcctggccctgcccccttaccatctctgcagcagtgacttccagcttcgtgggcctcagtttctctattgtaaaatgaaggagcagtgtatgacagcagtttcaaacttcagtgtacattcgattcaatacttactgacctcgtactgtgggg

SEQ ID NO: 10286 - DNA, 868 bp, Artificial sequence
  DNA replication origin
gcgacgccttcctccggggcgctgggccccagtccctgcagagaagggtcggggttcacgcgaggtgcggccccctcccagttagatgcagccgccgtaaatccgaggcccactagcggggcggggggggaggaaggccccccactctgcagtccaggcctcctaggcgtgcgtccccccccgcccgttcctcgcaagacgcccccaccccgagcccggcaggcttctagtcccgtccctccctcccccccgcccccggggcggcccgggcttcccggctcgggggctgcagcaatatggacggacgggggagaggcgcggcgagccaagcagaccacgcgatccgcggcaggcggcgggcgggcgcgcgcctcacgacgcggcgggcgaggggaggggacggcgcagcgggggcgcgccgctggccgggccctgggcgacgggcgggcaggaggcggcgggacggcgcgcgcacggctacgcggtcctgcccctcgccccgcccctcgtctccgattcctcagagcacctcccgggctgggggtagggacgctcagaccggacgggggcgagcacgtgcctgatgcaattcgggagttgtcggtgggggcgctgacggggataggagagaaggctgggcgaggaggggaggtatcttaaagggccagcgcgtgagagcggcctcaggtggagcacatgggacccggccacgcggcctgccgggcctgctcgtgctctttaggctgggtgtcagattcaggggaaggagccattagtgtcattcctgacttctaggaggccgaagggaggaccctcatccgccccgaggacgcgccaacgccgccccctcccctgtgcccggcgggcc

SEQ ID NO: 10287 - DNA, 1012 bp, Artificial sequence
  DNA replication origin
caaggagggcaccgggcagcaggagcgcgagagcccgcggccgctgcagctgcccggcgccgaaggcccggccatcagcgacggggaggagggcggcggcgagccaggcgctggcggaggagctgccggagccgcgggcgcggggcgccgggacttcgtggaagcccccccgcccaaggtgaacccgtggactaagaacgcattgccgccggtcctgaccaccgtgaacggacagtcccccccaggtgggtctccctccttgccctcctgggtccgggggcctcttccggggacatgggagtcccctcccccagcacctccagggccccggggtctgctaccggtcatggtgactcgggactttttaaaattgcctcctggttgatcctggtcgccgcgccctcccccccaccgtacactcagggacctgcccctgcccgagggcccggcctccgggaggctacggccaccgcctgggccgcagcggttagtgggcaacggtgtggttcgggcctacctcgtcggcagagggtgggcgctggtttcagtgaaacgatccccaccgcatgctggtgtaagagacggtttctggtttgaaccttcctctggaagcccctcttcccaccccgcccggcgctccccgttttggtagcgttgcgagcgtccccatgttgtaaatgtttaatgagcatatgtcacgggcaacccagtgcccggcgcggagtacatgctggccgcacggatgcggggattaaaagttaacaagttttgttctcggggagatgaaattgggctttagaatcgccatttggagacgggttgaggggtcagttgtggggagaagaaacccatcgtgtcatcgaattcggtggtttccctccccgatcccgggcaccttccgccttaagaaggagcccgatggcgagtgtgctgggggagccagttaggaggttggcggaaaatgtgaggcgggtgaggggcctgcggcgacttgaggggcgtgtggcggcgg

SEQ ID NO: 10288 - DNA, 1087 bp, Artificial sequence
  DNA replication origin
aaagttaacaagttttgttctcggggagatgaaattgggctttagaatcgccatttggagacgggttgaggggtcagttgtggggagaagaaacccatcgtgtcatcgaattcggtggtttccctccccgatcccgggcaccttccgccttaagaaggagcccgatggcgagtgtgctgggggagccagttaggaggttggcggaaaatgtgaggcgggtgaggggcctgcggcgacttgaggggcgtgtggcggcgggggagggagtggccggcctgggcgggcgggtgacagttgggcgccatgcgccgcgccggcggcccgcgggccgctcggcctcggcgttcggtgcgggccgcggcgctgggggtggcaggagggtgcgggcccgcggcgcggcccgagtgtgcgtgtgcgcggcgcgggtgtgtgcgcgtccccccttcccagcattcctctgcagccgggacaacgtggtgcctccccgcgcggggagcggcatgtgactgccgaccggcgctccgcgagtcctccctctccctcctccgcgttttggtccttttggaccgtgcccctttccggggggaggtaaggggtgcaggaaatcccagcagagccgtgtcagcgtggggggagaggcggtgcagaatatggagtctgctcttgcattgcctttgccgagaatagatcgtcggcttgggtggggggggcgcgcccactctcctctctcggccggcgtatagggcgggtctccattctttggttttgggtccgtttgtggtgggtcggttttaaaattgtcttgcagttggaatgatggcctctggtcgtagccctggtgcttttaaaaaactcacctgccgtagctggttgaggctaactggtttaaaccatcaaaaataaagggggagcttaatgtcttcaccgtcaaaggagtagaagcactgctagtcctagggaagccagaatagccagtcctgaaaacagcatgttgcaatttttatttcttttcaggttgcttcatttggaggaggggacatttggggtttactaacagtccttcatactgtgttctcttccttccccc

SEQ ID NO: 10289 - DNA, 1351 bp, Artificial sequence
  DNA replication origin
gcaactaatcacgcgaagagggccgcaggcgggccgtcttccgcaagcgtgcttccaggcctccactccccacctattcggcggcaccctgttacttctgctcctgcgcgctgcttcccgcgacctcacaggcagagcgaacacgcacggagtcgcaggggcgcgcaaagggggaggagcgggcgtgaccaggcgcgcgcgcgcgtctggagtgactctagagagcaggcgagtcgggcggatcgggtgggtagagtggtgccgtccggttgtttggtgggaggcacgtaagaccgctctgggcacgggggcgctcacctcactggctcgttcggttctaggagcagatccggggtagagggaaaagagctccgggccaggggctgccgtcgccgccgtcggggagtcagcccgccagcccgccagctcgtcagcccgccagccagcgcttcgcgggccctgtcggtcccggtaagcgggcctgcgcttaccggaaagaggagcgtaagatgaaagagtgtgagagaccattgggggtctgtagggggaaggggagtgggggcgtgtgtaaggggcagggtgtgtgaggaggagaggaaccccagcaaagagtagtaataataatggccaccgtcacacgataatattcgagtaatatgtgcggggactttacaaagcatctcatatgcttcattttaacttctactccaatcctccgaggtgcgtactgttatcaaacccattttacaagataggaaaaccgaggcacgaaatagattaagtggcttatgcaaggacacacgactactacgtggcctggcctggcttcgaacttagttatcttagtcctaaggcccgtaattttaactttgctttaccaaacaaaaacagaagaagaatggcgtgtcagaaggaggaggactgagtgtgatttgaagtggaaggatgatgataaacgagaagagaatgatgatgggagacggagtagtggggaggaggacctgaatttggaatcttgcgggcctcccccttctaaatcgccgcctcttccttagttcttgcggccccataactttttcttggtgttctatggctttatgaatggaggagccaactcacagacctgggccattcgggtggttttaagaagtttgaactgcggttcaatccagggcagtgccttgagacactgtttggaggtaagggagggtcagaggatcctcttaaacgctgctgctatttatttcttcaaacgtgccacttccttttctatcatatctatgcacggcaaagcctttgttcagtcctctagaataaggaagtgatgtttattgtttccttgtacacttgg

SEQ ID NO: 10290 - DNA, 987 bp, Artificial sequence
  DNA replication origin
tcctaaggagaaaaggggctccctagagcagatcgctgacttcctcaccaacgtgccatttggggcttttcagccgcccgcgcgttaagctagctcccagcataagcgcttagagatccgcagccgcctgggcgcgctaagagatcgtgggcagacctagcccttagggcagcctaagcgcgcttcactaaagaaaaaagactgttggtatattaaagaagtgtgtgtgtgagagagaaagagacagagaaagagacagagagacatgggtgggggcaccaggaaaggtagcccgagtaggaggtgctagtgaaatttatcttttgctgacggatccagcctccggaatgcccgattgtcttgatccgcggtgcggtgcgggttttaggggcgcacaatacagggtgtccagacagagtccaacaggtggcctgcgcgggcatcctgtggctaggcgcgggggaggggaacggctccctccccgagccccgggctgcctctgctgcttctaggggtgcatctgaacatggataaggaaatgcgctccctgctctcaggccctatttggggtgagtgtgtgaggcatccaaatgcctcctgtcggaaaacagcggcctcattgtgtgcccgattgaggtttcaacttgcaggcaactgagaggccattcagctgggcagcacggagttggctggtcctcggacttgagccatggccttccccacgatccctggcggcagtatcccagctcctccggctgggcggcgagccaaaactcatagtttcgctcctctgtactccactgaagggagggggagttgcctaaacaccaggcgtttttatcttgagattcatacacaagggcaggtatgggcatacacgtgttgtgtgcgagtgagcgtggagacaagtcgagtttaagagctggatggaagaaattagaaaactctgcaccctccagggagacaaattaggagagggcgcggttg

SEQ ID NO: 10291 - DNA, 1104 bp, Artificial sequence
  DNA replication origin
gacacagcaaccatccgatttctcaatcttttccccacctttcccccctttctattccacaaaaccaccattgtcatcatggcccgttctcaatgagctgttgggtacacctcccagatggggtggtggccgggcagaggggctcctcacttcccagaaggggcggtggggcagaggtgccccccacctcccggacggggtggctggccgggcggaggcgcccccacctccctcccggacagggcggctggccgggcgggggctgaccccccacctccctcccggacggggtggctggccgggcgggggctgacccccacctccctcccggatggggtggctgctgggcggagatgctcctcacttcccagacggggtggctgccaggcagaggggctcctcatttctcagacggggcggctgccgggcggaggggctcctcacttctcagacggggcggctgctgggtggaggggctcctcacttctcagacggggcggccgggcagaggcgctcctcacatcccagacggggaggtggggcagaggcgctccccacatctcagatgatgggcggccgggcagaggtgctcctcacttcctaggtgggatggcggccgggaagaggcgctcctcacttcccagactgggcagccaggcagaggggctcctcacatcccagacgatgggcggccaggcagagatgctcctcacttcccagacagggtggcggccgggcagaggctgcaatctcggcactttgggaggccaaggcaggcggctgggaggtggaggttgtagcgagccgagatcacgccactgcactccagcctgggcaccattgagcactgagtgaacaagactccgtctgcaatcccagcaccttgggaggccgaggctggtggatcactcgcggttaggagctggagaccagcccggccaacacagcgaaacctcgtctccaccaaaaaaatacgaaaaccagtcaggcgtggcggcgcgcgcctgcaatcgcaggcactcggcaggctgaggcaggagaatcaggcagggaggttgcagtgagccgagatggcagcagtacagtccagcttcggcttggcat

SEQ ID NO: 10292 - DNA, 943 bp, Artificial sequence
  DNA replication origin
gaagtgaggagcacctctgcccggccgcccatcatctgagatgtggggagcgcctctgccccacctccccgtctgggatgtgaggagcgcctctgcccggccgccccgtctgagaagtgaggagcccctccacccagcagccgccccgtctgagaagtgaggagcccctccgcccggcagccgccccgtctgagaaatgaggagcccctctgcctggcagccaccccgtctgggaagtgaggagcatctccgcccagcagccaccccatccgggagggaggtgggggtcagcccccgcccggccagccaccccgtccgggagggaggtggggggtcagcccccgcccggccagccgccctgtccgggagggaggtgggggcgcctccgcccggccagccaccccgtccgggaggtggggggcacctctgccccaccgccccttctgggaagtgaggagcccctctgcccggccaccaccccatctgggaggtgtacccaacagctcattgagaacgggccatgatgacaatggtggttttgtggaatagaaaggggggaaaggtggggaaaagattgagaaatcggatggttgctgtgtctgtgtagaaagaagtagacatgggagacttttcattttgttctgtactaagaaaaattcttctgccttgggatcctgttgatctatgaccttacccccaaccctgtgctctctgaaacatgtgctgtgtccactcagggttaaatggattaaggggggtgcaagttgtgctttgttaaacagatgcttgaaggcagcatgctcgttaagagtcatcaccactccctaatctcaagtacccagggacacaaacactgcggaaggccacagggtcctctgcctaggaaaaccagagacctttgttcacttatttatctgctgaccttccctccactattgtccta

SEQ ID NO: 10293 - DNA, 1226 bp, Artificial sequence
  DNA replication origin
gcggctccggcccaggccgcgcacctgctgctgcggctcccccgccgccgcgccggagctccgcgatgtgcccgcgcctcccgggcagagggtccgtgccgcgggacgcacggtgggtccgagggggaaaggggccgcgtggggcctgaggccgggcctcgggctagcccgggcacagcgccgagcgccccccgcgggccgggagagggggcggcccttcgcgcatcctcacggcctcatccccgtccccggcggcatcctagtccccgtgcccggcccgaggcctgcgagggccgcttacctggctctgcggcgggtccaggggaggggcctgaggctaccgcagggccccgcgccggggcgcaggatgctctgccccgctccgctgcgccgcgctcggccccgccccggccccgctgctccgcccgccgcggctccgcccccacccagcgcccgccccttcgccgcagcggctgtcacacaaagggcaggaaatggctgcggcgagggtctctccacgctctccgctgtaccgccggcgcacccaggacctgcctctcggtttcggaggaccgctcagcccccaggcttcctgccctgggggcgggaaagggagggaaggcttcttccacggcctccatcaccgggaaccacacctgcagcaacccgaggacgagagcttcggccgcgttcggatcttattggccccacatgatttccaagtgctcttttatcaacccagtctttattgattacctatcctgttccaagtaccgtgccaggacttgggtgtgcactggtgtacaaaagacagggtcctgcccccttggagttttatcacctgccaggagaaacaggtgtaaattaacctagcaaacgtccagttacagcccaaagtgctctgaggagaaggagcagggtgaagtgacagaagatgcaactggggctaggggaaggggccttccaccaattgagcttggtcgctgatagggctccttcgcttaagaataagttcttccgctcccttccagttccctggagaagagtccctgaagctgccacctcttttacaggggcctgcctcaacttcattctggaagaattgcctaacggacaaataggtggcaggaagcactgagaggacaggtacctttctcttcaaggcttatctgccgtgtcgggctctttaaagaagcaattatctgcccagcggtggctcacacctg

SEQ ID NO: 10294 - DNA, 1538 bp, Artificial sequence
  DNA replication origin
gacccgccgcagagccaggtaagcggccctcgcaggcctcgggccgggcacggggactaggatgccgccggggacggggatgaggccgtgaggatgcgcgaagggccgccccctctcccggcccgcggggggcgctcggcgctgtgcccgggctagcccgaggcccggcctcaggccccacgcggcccctttccccctcggacccaccgtgcgtcccgcggcacggaccctctgcccgggaggcgcgggcacatcgcggagctccggcgcggcggcgggggagccgcagcagcaggtgcgcggcctgggccggagccgccagcccgggaggaggcggtgctaatctcagggaccggagacacctgcagcggccgcgagcccggcagcggcgacatcctcgagtccaggtactgcagagcgctggcccctgcctctgccgccgtgaccaccgtcacctcccccagggccagcgagagccgcctgggcccgcctggcagccgcctcgggcacacagaacgtgtgatgggtggggcgaggggcgcagcgtcgatgtttgggggcggagggctttgatgagagaggagcaggtctgacccgcttggaagctttctggcctacactagcatcgctcaccaagctggctgcgggcacggtggaagtgggggaaggggatgagtgggctgactcctgggggaaaaggtggtttttttcttgagctctgaagaaccaggaagatgcttgcctgtctgttgtggcgtctacttttcaggtcagccctacccctcaccccaaagaacagcccacctatgtgcaaaagaagaggaggaggtgctctctgcttggggatgggggcaggtagcatgttccacataagtatggccctctatatccagaacccggctggaaaggacactgacagcccaggtgcctccccagcacagggaatctgattttgacctttgcttgcctactttccccagcacagtggaaacactcaccagggctgatgagccatcagctgtccttccagctaggccaagaatgggacaaggatctttttctgctagttcctgggtgcctgtgccctcagcatgggcagggagacggaggcaggcctgctggcaggaggggcaaatcaggagactgtcggttcctgtgttcccatttcctgcctcctgtctgtgtcccagttagggcagtgggtctcaccttactcttggatacaggctgtgccagcaacctgggtccctgagatcttagagggcaaaaatcaggtccatatctttgggcaggcctgtgaaggccttgatggttgctttctccaccattagaccctctctctgtggccctcctggtggcctcccacctccacttccatacagtgccctgcccttcccccagtctccagtgtcagaaatggttttcaagaaaggagccaatgattgtgtttatcttgaagagctaaatacaaaagaagttcccatttgatgcagagcaggtgctttacaagtcatttgaccggaaaagaaacagaggat

SEQ ID NO: 10295 - DNA, 1163 bp, Artificial sequence
  DNA replication origin
aggggctcctcacttcccagtaggggcggccgggcagaggcgccccccacctcccagacggggcggctggccgggcggggggctgaccccccacctccctcccggatggggcggctggccgggtggggggctgaccccccacctccctcccagacggggcggcttgccgggcggggggctgaaccccacctccctcccggacggggaggctggccgggtggggggctgaccccccacctccctcccagacggggcggcttgccgggcggggggctgaaccccacctccctcccggatggggtggccgccgggcggagacgctcctcacctcccagacagggcggctgccgggcggagaggctccccacctctcagacggggtggctgccaggcggaggggctcctcatttctcagactgggcggccgggcagagacgcccctcacctcccagatggggtcgcggccgggcagaggcgctcctcacatccaagatggggcggcggggcagaggtgctcctcacatcccagacgatgggtagccgggcagagacgctcctcacttcctagatgggatggcggctgggaagaggcgctcctcacttcctagatgggatggcggccgggcagagatgctcctcactttccagactgggcagccaggcagaggggctcctcatatcccagacgatgggcggcctggcagagacgcccctcacttcccagacggggtggcggccgggcagaggctgcaatctcggcactctgggaggccaaggcaggcggctgggaggtggaggttgtagccagccgagatcaggccactgcactccagcctgggcaccattgagcactgagtgaacgagactccgtctgcaatcctggcacctcgggaggccgaggctggcggatcactcgcagttaggagctggagaccagcctggccaacacagcgaaaccccgtctccaccaaaaaaatacgaaaaccagtcaggcgtggcggcgcccgcctgcaatcccgggcactcagcaggctgaggcaggagaatcaggcagggaggttgcagtgagccgagatggcagcagtacagtccagctttggcttggcatcagagggagaccgtggaaagagagggagagggagaccgtggggagagggagagca

SEQ ID NO: 10296 - DNA, 893 bp, Artificial sequence
  DNA replication origin
gcccggccgcgaccccatctgggaggtgaggggcgtctctgcccggccgcccagtctgagaaatgaggagcccctccgcctggcagccaccccgtctgagaggtggggagcctctccgcccggcagccgccctgtctgggaggtgaggagcgtctccgcccggcggccaccccatccgggagggaggtggggttcagccccccgcccggcaagccgccccgtctgggagggaggtggggggtcagccccccacccggccagcctccccgtccgggagggaggtggggttcagccccccgcccggcaagccgccccgtctgggagggaggtggggggtcagccccccacccggccagccgccccatccgggagggaggtggggggtcagccccccgcccggccagccgccccgtctgggaggtggggggcgcctctgcccggccgcccctactgggaagtgaggagcccctctgcccggccaccaccccgtctgggaggtgtacccaacagctcactgagaatgggccatgatgacaatggcggttttgtggaatagaaaagggggaaaggtggggaaaagattgagaaatcggatagttgctgtgtctgtgtagaaagaagtagacatgggagacttttcattttgttctgtactaagaaaaattcttctgccttgggatcctgttgatctatgaccttacttacccccaaccctgtgctctctgaaatatgtgctgtgtccactcagggttaaatggattaagggcggtgcaagatgtgctttgttaaacagatgcttgaaggcagcatgctcgttaagagtcatcaccactccctaatctcaagtacccagggacacaaacactgcggaaggccacagggtcctctgccta

SEQ ID NO: 10297 - DNA, 953 bp, Artificial sequence
  DNA replication origin
tgcccctccccagctttggcccccctgggaggagaggatgcgagggagagcggtggcaaggaggggagggcgcgaagcgcggagcccgcctggtccccagccctgccgtacgcaccgttctcgcagctggtgttgctgacccgcagctccatggggcccggggcacacgaaccgacgcgcgggcggacggcgcccgggctccccagctccggagcaggtggccgcgacttgtcccccgcgtggctcgcgcgcgagaagccgccggggtccggacccaggggtggggagagtgacgcgtcccagagtgggagagtccccggggaggagtcacccggcatcttgggcaattccgggggcagggggcccagggctggggccgcccgcagaggggcgcatgccttcctggggtgaggacgctgccaggctcccagctctggagtcaccgccccgtgctaggggcaagaggtgaggaggcgggttccccggcaccgctcctccgatgcctgcaccggcacccagctccatccccagggaaagagtacaggggacctagatggctggagaaggggcaactttcctgccgaggtggaagtggcaacataggggttggaagtgggtactgctgccaattgggaacctgggttccttcttttccttccttctcgccctcctaccctccccctctccttcctcccctccacctttcctcccttccttccatttcaccctcctgcccttcctccctgccttctgccctgcgacctcctttccttgccttacccgttcattgattcaacccaggtctgatctgtgctggtaggtaacaggtacatagtgagttaatgctcaatatatatttatgtctaatgaatagataataggagcttggtaaattaaatgaaagaaggaaatgaagtgattggagaccaaaatgagtcagactattccctgtc

SEQ ID NO: 10298 - DNA, 1066 bp, Artificial sequence
  DNA replication origin
tgcccccggaattgcccaagatgccgggtgactcctccccggggactctcccactctgggacgcgtcactctccccacccctgggtccggaccccggcggcttctcgcgcgcgagccacgcgggggacaagtcgcggccacctgctccggagctggggagcccgggcgccgtccgcccgcgcgtcggttcgtgtgccccgggccccatggagctgcgggtcagcaacaccagctgcgagaacggtgcgtacggcagggctggggaccaggcgggctccgcgcttcgcgccctcccctccttgccaccgctctccctcgcatcctctcctcccaggggggccaaagctggggaggggcagggccagcacgaggtggctcccacccagctttgaagatctgggttctggctgagacttcactttcatcttcgcagctgggatggctgagaggagtcagggaaggaaagtatgtcccctgggttgagatggggggttagtggggggcaggcattttgacgacagcagacaccctgagaggtggtgggggcggggggaggattctgtgtttttaatgtgtagttgcttcaggttttagtacctgcgcagtttgggctttctctctgggtcaatgggaggaccatcacaggacggtcttgtctttggaaaagaaaaagaaccacaggaaggggtaaagaaagacccctgacttcctattgcgttctgaccataaagcaggtagtggactaggccctttacccgcattatctcactgaatccttaaaacaactctagaaggtaggtaggtattattattttactatcttgctatccccactctaaagatccagaaactgaggctctgagcagctaataatttgctcaaggtaatacagtgaggaaatggaatatagatccaaggctggtggacagtaaaacctcaactccttccttggtgtggctccactttcctaccttgtcttggaactgcaggctgtggcatgtccctgtttctctaacctcttcccttctacagtgaagctttcaaagccagcctgttaggtgtctga

SEQ ID NO: 10299 - DNA, 1257 bp, Artificial sequence
  DNA replication origin
ctcgccagctcctccccggcccctccctccagccccctccgggctggagcctcccctcctccatcccctggcggaggcccgcggggctggaggcggagcgtctcggcagagggctgggagccgggtggggaggcgcggggcgagccggggggttccagacgcgcctccaccgccgggcagtgggcaggtatggctgagggcgtgtgagcgccgagcgctaagggccgccgccaccatgccagggggcgcaggcgccgcccggctctgcttgctggcgtttgccctgcagcccctccggccgcgggcggcgcgggagcctggatggacaagtaagtggccaggcgcggggggatggaggctgggtggcccggagacctgggagtagccttgcgggtccggagcgctgggaccgcgacccctgcgcctcccgcaactccgcggggcctgcgcccccgccgtccccagcctgggagcccgggctttgttcccacgttctgcgccctgggaggtggcagaggtcggggaaacccggcgcagccagaaaacagccggtccgctcactggctagccttcccttctcgccttctccttcctctgtttttctgcttttggcttctctttccgccgttctcggggcttatcctcctccgttttctcacggtccctcgtgtccgctccgcctctctctctgtctttctctctaccgcccgctgcactcgccaacgccgagcatcccgagcgccctgcccgtgtggcctgggagcggcttcctgggaccaggctcggtgcctgccacactggtggggtaggacataaaatgcccgcggcagactgtggtagccttggctaggggatggctcgctgggtatctgcagccacacacttcggatccccgagctggcaggagccctactgaaggccaagtcaaacgcacccatttcacagatggggaaaccgaggcccacaaaagggaaaggacttgcccaaggccacgccacgggttgaggtccgcggtggcactggaaaccagggctctctttccacgccaacccgacggccgccttctttggtcctcagtttccccttctgtgaagcgaaggggtctgactcgatgtttccagctaagatgccgggtgatgtccgtgtttctcaggactagtttcccagacaccaatcccctccccggctccatccctcgggggctataagcagatttcgcggaaggcttggtcccggggggcggtgcccgggttctct

SEQ ID NO: 10300 - DNA, 1563 bp, Artificial sequence
  DNA replication origin
acctctgccacctcccagggcgcagaacgtgggaacaaagcccgggctcccaggctggggacggcgggggcgcaggccccgcggagttgcgggaggcgcaggggtcgcggtcccagcgctccggacccgcaaggctactcccaggtctccgggccacccagcctccatccccccgcgcctggccacttacttgtccatccaggctcccgcgccgcccgcggccggaggggctgcagggcaaacgccagcaagcagagccgggcggcgcctgcgccccctggcatggtggcggcggcccttagcgctcggcgctcacacgccctcagccatacctgcccactgcccggcggtggaggcgcgtctggaaccccccggctcgccccgcgcctccccacccggctcccagccctctgccgagacgctccgcctccagccccgcgggcctccgccaggggatggaggaggggaggctccagcccggagggggctggagggaggggccggggaggagctggcgagactcgggggagcggggctggctcaggtgagggagaccgcggggaagggagaatccgagccccccaggaggagggatttgtggtggacgcggcctgtagagggtcggggactcgggcttctaggagttaaactggacccctctccgcacagcggcccgtttactgtcccgcactgtgccagacgccttgggtgacactcagaggtgattcacccagcgccgtcccccgggggccgccactctcggagacaggctcagaaagagttaacccaaccgccaggcacaaagaactaagtgctatatggacttctttttttttttttttttttttttttttttttttttttaagcaggacacaaatccaggagccattccttctgcctgggaggagggagtgatgaagaccagaggaatcccagaggagaagccatctgagatcgggaggaggagaaatggaacatcaggcggaggaaacagcccagacaatcgcactgggacgtgaaaacccttgggctgcatgcggggagaaaaccagaattggggatggttagggttttggagggaaacacagggacatgtgaccaaaaataataataactactgttacttattgaggactttctatgtactagaataagaaaatcatgatagctaagactgataaaacgctaagtgtcaaacgctgtcttcagcactttacacatattcacttatttaattaatcggagaaaataacttttatgagccagggactctgcatacattatctcttttcattagcccagtaatcccatggggtaggtactagtactatccctgttttagaaatgaggaaatcaaacctgagaggctaaaccacttgcccaagattacacagctaatgtcagtgcctagattcaaacccacatccgtataactccagagcctgatgcaacacaccttattttccaggtggagaaactgataatgagagagaaatgacttgcctaagatccctcagcaagttttagcaaagcctcgttgtagaatcccagcctcaaacctc

SEQ ID NO: 10301 - DNA, 1295 bp, Artificial sequence
  DNA replication origin
catcatcatgcccagctttttttttttttttttttttttttttgtatttgtgtagagacagggttttaccatgttggccaggctggtcttgaactcctgacctcaggtgacctgcccgcctcagcctcccaaagtactgggattacaggtgtgaacaactgcacccagccaaagcttatatttgaatagtctcggggtggtggagaggggagtaggaagaacaggaatcagatgaaacaggaatcagctgctggagtctggtgcctctggctgaaggcaggatgcctcctttgggctttatggggagaatctggtttgcacagtattttctctgtacgatcctttgacatctggaaatgctgttcccaagcctggaaggctgtgtgtgtccctccctgcttcagtgaggtttcttttatctgatgtgcacgatctttgcagtcaaatggctctgatttggaatctcggctctgccttgcagaaagaagaacgtcattttgccccttggagcttcaccttcctcatctggaaactgggaataattgtagtacctatcttataggcttgttctgagaacccagttagcttgacaagaacctagcccaaggcctagcatcttgtaggtgaatcggaagggggttctgttgggaattgtaattgttgcgttgtacctggagttgacacatacacttcaagaggcagcctggtgctggggagtgagccttggaataagaatctagaggtgggagttcagcttgtgtgattcctcagtttcctctgagaccctgagcaacatacattccctttctgagcactgatctgctctcttccctcatgttcagttaatcccctaggaggaggaaattgggttgagatagatccatatcctccagggggccttggagcatcccaagccagcatgtgcctgttgggaacctggtcaggagcaatggttggtcactggggttccaaccaagccttccacagttacttctggggggctgagtgcactcgttccacaagaatgaaatggtcaccaggaagaattcttccttaactttgtcacattagagggctgggagggcctgattccctggaatctgccttttcaacctgatttcccatacttcttcccatgggccagatcccatgaattctctcacttctccaaacaggccccttgattttccaccttggaactcactttcttcctcccttcctccctccctcccttccttcctttcttccttttgttcttcctttcttccatttttcttccctcctttctttccccc

SEQ ID NO: 10302 - DNA, 1229 bp, Artificial sequence
  DNA replication origin
tgacagaggtataagtagaccaagatttgatctgattttcagagtcagtaaaagcttctctgaatggccgggcgcggtggctcacgcctgtaatcccagcactttgggaggcagaggcgggcggatcatgaggtcaggagatcgagaccatcctggctaacacagtgaaaccccgcctctactaaaaatacaaaaaattagccgggcgtggtggcgggcgcctgtagtcccagctactcgggaggctgaggcaggagaatggcgtgaacccgggaggcggagcttgcagtgagccgagatcgcgccactgcactccagcctgggcgacagagcgagactccgtctcaaaaaaaaaaaaaaaaaaaaaaaagcttctctgaagaagtcccagttgagctgcattgaaaaatgtgtaggaggaattaaggagacaaaggaaagagtagcacgctgagcatgtttaaagacccttcagtagaaagagaatgatgatggggccaatgtggctgaaacccaaagactcagggttagagtggtaactgtttaatggcaaaaaccacaattatgtttgcaccaacctagcagcagtagtagtagtagtagtaggttagatcccaagccatttggggattttaaggctttgccaaggattttagacttttctcacatcagtgggcagccatggaaagaaagctttaggaaaagtgtgacaaccttagatttgtattttcaaaagatagctggagtgtagtggggcaaggctgacaaacagggagattatttacagggcctcggtagtatccaggtgaatgatggtgggagcctggaacagggtaatggcagtagagacccaaaggagtggatgaatttgggatgtataatattttggaagtagggccacagggcctggcgattaattgaaaccttaactagcacaagaaccgcacaaagtcgaagactcttcccagcaagatcagctaatgggttattgataagttgcaaaaccttccccatgctcccttggcaaagattcaaaagccctggtgatactcagggccgacagattactcaggccgcacaaagcccgtgcacaaggccgtgcgagtcttgagacccaagactttattccctggaggtcagcggactggaagcacaacgtttcttggacaacgccattgtcacagctccctgcggggaaaggatgactaaagacaacggcagggagagaa

SEQ ID NO: 10303 - DNA, 881 bp, Artificial sequence
  DNA replication origin
cagcccttgggtggtcgatgggactgggcgccgtggagcagggggcggcgctcatcagggaggctggggccgcacaggatcccacggagtgggtgggagcctcaggcatggcgggctgcaggtccccagccctgccctgcgggaaggcagctaaggcccggcgagaaatcgagcacagcgcctgtgggctggcactgctgggggacccagtacaccctccgcagacgctggcctgggtgctaagcccctcattgcccagggccagcagggccggccggctgctcccagtgaggggcctgccaagcccacgcccacctggaactccagctggcccgcaagcgcgcgtgcagccccgcttcccgcttgcgcctctccctccacacctccatgcaagctgagggagccggctcccgtcttggccagcccagaaaggggctcccacagtgcagcggtgggctgaagggctcctcaagtgccgccaaagtgggagcccaggcagaggaggcgccgagagcgagcgagggctgtgaggactgccagcacactatcacctctcaatggcactggtgggagtgtagcagtgaggatgacaagaggtcattctggttgccatcttggttttggtgggttttagctggcttctttattgcaatccgttttgtcagcaaggtctttatgacctgtattttgtgccagccccctctcatcctgtgacttagaataccttaaccatctgagagtgcagcccagtagatttcagcctcattttacccagcacctactcaagatggagttgctgtggttcacacacctctgacagcttgatttatttgtctgcctcttttattagcttttgctcatgcacacagttgactctccca

SEQ ID NO: 10304 - DNA, 1060 bp, Artificial sequence
  DNA replication origin
ggagccccgcgcgcccgcccagcccgcggctggatgtcagctctgacagcttcgacccgctgctggccctgtacgcgccccgcctgcctcccattccctaccccaatgccccctgcttcaacaacgtggcggagtacgagagcttcctcaggaccggagtccggggcggcgggcgcgggcgcgggcgggctcggggcgcggccgcgggctctggggttcccgccgcacccgggccctcgggcaggactcgtcgccgcccggacgcgcccgccccggaccccgagcgcatccagcgcctccgccgtctcatggtggccaaagaggaaggggacggggccgcaggagcgggccggaggggtccgggtcggagcaggaaggcgccacgcaacgtgctcacgcgaatgccctgtgagtccgcgggccgggcgggaagcggggcagccgccgtccggaagctggctgccgagggggcgtctgcggggcggcggtggccgggcgcgggtctgcacgtattgcgggagcgccttggtgaaaatttgcggggatcatcagtgactatggggtggatctgcttgagtaatgtgggtaatgagggcgtggggagggtcaccctgagtaagaaaaggggctgtaggagcaacagagggagagtggtaaggctgtagtggtcataagaagccgtgggaaaggtcttcagcggtaatcggggcccatggaagggtcacagaggtgatgagcctgccgagagggtctacaggattgatggaggacctggagaggtggcggggctacagagtttgggggacatcatagggacgtctacagaggtgatgagaggtcttagagaccacagtgagaggtaaggtggggcggaaaacgggagacgtgggggagcgcacagccaatattaggggaaggagagtatttggtcagtgggatttgaggatgatcggatggagtgtggggagatttgttcagatagcacaggcgcataatcccataacccctgtacattgacagctccttctcgagtgcgataagcagaagggctgcagagtct

SEQ ID NO: 10305 - DNA, 1441 bp, Artificial sequence
  DNA replication origin
cacagatacagtaacaatctgatctctctttcttttccccacatttccgccttttctattcgacaaaaccgccatcctcatcatggcccgttctcaatgagctgttggatacacctcccagacggggtggcggctgggcagaggggctcctcacttcccagacggggcggccgggcagaggcgccccccacctcccagacggggcagtggccgggcggaggcgccccccacctccctcccggacggggcggctggccaggtgggggctgaccccccacctccctcccagagggggcggctggctgggtgggggctgaccccccacctccctcccagaaggggcggctggctgggtgggggctgaccccccacctccctgctggacggggcagctggtggggcgggggctgccccccacctcccggatggggtggctggctgggcgggggctgccccccgacctcctggacggggtggctgccgggcagcggggctcctcacttctcagatggggcggctgggcagattcgctcctcacctcccagatggggtggcggtcaggcagagacactcctcagttcccagatggggtcgtggccgggcagaggcactcctcacatcccagatggggcggtggggcagaggtactccccacatctcagacgatgggcggcggggcagagacactcctcacttcctagactggatggcggccgggaagaggcgcccctcacttcccagactgggcggcctgtcagaggggctcctcacttcccagactgggcggccaggcagagacactcctcacttcccagacggggtggcagccaggcagaggctgcaatctcgacactttgggaggccaaggcaggcggctgggaggtggaggttgtagcgagccgagatcacgccactgcactccagcctaggcaacattgagcactgagtgagtgagactccgtctgcaatcccggcacctcgggaggcagaggcaggcagatcacttgcggtcaggagctggagaccagcccggccaacatggcgaaaccccgtctccaccaaaaaatgcaaaaaccagtcaggtgtggtggcgcgcgcctgcaatcccaggcactctgcaggctgaggcaggagaatcaggcagggaggttgcagtgagccgagatggccgcagtacagtccagcctcagctttcacaacttcagtggcatcagagggagaccggggaggggcacaactttggtgtcatcagagggagaccggggagagggagagggattagttttgaaatgtgaaaaggacatgggttcttttgggaggggttggggtggaatgatacggtttgactctgttggaaataaagctcagaatcttaaggaaactgagcactcaaacaaaggattttcagcgaagcaattttacttctgtgcagaggggtgct

SEQ ID NO: 10306 - DNA, 1157 bp, Artificial sequence
  DNA replication origin
atctgaaaagttacagggcctttgctctgaaggaaagtgaataagaaaatgagcatgtgtgtgtgtgtgcgcacgtgtgtgttttgtgtattattgtcaggaggcagggatggtcatggaggtcccaccccaaggctgcaacctacaaatgacacgtctcagccctggtctttggccttgacttacaccagatcagtgggaaaaagaaacagtaagtcctttctctatcctgcctgtagaaccagatgcctgggactcttggtggctttgctctgaaaccttctagctcagctccatttaggggcaaactgcatgtaggcactgagacctccgtttccgtgcaattttattgttagactgacaggctggctcctggtctgcatgtgaaatcagggacacagcctgcaactactcccactctatcagcagccagaaagaaggaaaacaaagataaggggaggggtgatggggggatggaaaccaggaggggacccatgagggaggggagggaggagcagagagaggagacaagggacaaagaacagaggtgaaagatgaagggtgtggggaagggagagtggggcaaggatgaccaggtgtccagaaaggaagaaaagggcaatggggagaggccactgggaagcagagaggccggcaggctggcagaagtgggaagaagacacaagtgaagggaggggagggaggcttccttaagcaaacaggaagacaggaggaagggaagtctagtaattagggaaaagctgaccaaaacccagaaaggaggagaagactactacagtaaggaagctgcagaaaagccaggcaggagatagagacaaggaagctttgaggcaggaggctctggaaacaagggaggcagagagcagagctgagctaagaaaggaaaaaatccaggagagggaaccaggaaaacaacacaaatgagagtgaaggaacagggaaagagccattaaaagaatgcttaccttatagtcgtaaaaactggaatgtgtgtgttttggcctgcggccattgtccaggaaacacagtgtggcttttaagcaagttgtggagtggcggcatccacatgttagtagctcgccctggtctgctgctttgcaatgcagctgtgcggagctgccctcttgttggctggc

SEQ ID NO: 10307 - DNA, 1342 bp, Artificial sequence
  DNA replication origin
gacggggcggctggccgtgcggggggctgaccccccgacctccctcccggtcggggcggctggcctggcggggggctgacccccccacctccctcccggacggggcgactggccgggcgtggggctgactcccccaccaccctcccagacggggctgctggccgggtggggggctgaaccccccacctccctcccggatggggtggctggccaggaggggggctgacccccccacctccttcccggactgggcggctggccgggcagaggggctcctcacttccaagtaggggcggccaggcagaggcacgcctcacctcccggacggggcggctggccgggcggggggctgacccccccacctccctcccggactgggcggctggccgggtggggggctgatccccccacctccctcccggacggggcggctggcctggcgggggctgacccccacctctctcccggatggggtggtgctgggcagagacgctcctcacttcccagacggggtggctgccgggcggaggggctcctcacttctcatatggggcggttgccagtcagagggtctcctcacttctcagacggggcggctgggcagagacgctcctcacctcccagacggggtcgcggccgggtagaggcgctcctcacatcccagacggggcggcggggcagaggcgctccccacatctcagacgatgggtggctgggcagagacgctcctcacttcctagatgggatggcggccgggaagaggcgctcctcacttcctagatgggatggcggccgggcagagacgctcctcactttccagactgggtagccaggcagaggggctcctcacgtcccagaagatgggcggccaggcagagatgctcctcacttcccagacggggtggcggccgggcagaggctgcaatctcggcactttgggaggccaaggcaggcggctgggaggtggaggttgtagccagccgagatcacgccactgcactccagcctgggcaccattgagcactgagtgaaccagactccatctgcaatccctgcacctcgggaggccgaggctggcggatcactcgcagttaggagctggagactagcccggccaacacagcgaaaccctgtctccaccaaaaaaatacgaaaaccagtcaggcgtggtggcgcgtgcctgcaatcgcaggcactcggcaggctgaggcaggagaatcaggcagggaggctgcagtgagccgagatggcagcagtacagtccagcttcggctgggcatcagtgggagaccgcggaaagagagggagagggagaccgtggggagagggagagtggggagag

SEQ ID NO: 10308 - DNA, 962 bp, Artificial sequence
  DNA replication origin
gccagcagccccgtctgggagggtggtgggggagtcagccccacgcccggccagtcgccccgtccgggagggaggtgggggggtcagccccccgccaggccagccgccccgaccgggagggaggtcggggggtcagccccccgcacggccagccgccccgtccgggaggtgaggggcgcctctgcctggccgcccctactgggaagtgaggagctcctctgcccggccagccgccccgtccgggagggaggtgggggggtcagccccccacccagccagccgccccgtccgggagggaggtggggggttcagccccccgcccggccagccgccctgtccgggaggcaggtgggggggtcagccccccgcccggccagccgccccatccgggaaggaggtgggggggtcagccccccacccggccagctgcccggtctgggaggtgaggggcgcctctgcctggccgcccctactgggaagtgaggagcccctctgcccagccaccaccccgtctgggaggtgtacccaacagctcattgagaacaggccatgatgacaatggcggttttgtggaatagaaaggagggaaaggcggggaaagaattgagaaatcggatggttgccatgtctgtgtagaaagaggtagacacgggagacttttcattttgttctgtactaagaaaaattcttctgccttgtgatcctgttgatcagtgaccctacccccaaccctgcgctctctgaaacatgtgctgtgtccactcagggttaaatggattaagggtggtgcaagatgtgctttgttaaacagatgcttgaaggcagcatgctcgttaagagtcatcaccactccctaatctcaagtacccagggacacaaacactgctgaaggccgcagggtcctctgcataggaaaaccagagacctttgttcacttgtttatctgctgaccctccctccac

SEQ ID NO: 10309 - DNA, 975 bp, Artificial sequence
  DNA replication origin
ggctcagaactgtcgcgggtggtcgctgtgaaaaagggaagaggggtgttttcttaaagacctgtcctaacaaagtttcgctgttccgcagaaatcctcacactcattccagaaatcctaaaggccagggctgctggctcagtgcgccggccggcgatgggaggctggagcgcctggggcgccaggcggccactgacagccggacctgcccaacacaagcgcgcacaggcacacacacacacatagaagaacacacacgagcgccccgcgcacacactttcacttccagcccagttacccaattcactctcactaccacccacccccatcctaatactcagtggggatgggaacagtgttggggacacttgtccccagcccagggaagctggagatgatgtaattagtcatcttccttcttccccttccgcactctgagtccgatagggcctggggccaccagatctcccactgtcccaagctcagctggtggcttaatggggggaaaaaggccatttctcacttgggaccaggagcctgggaaagagccttgggtgtgcccaggaaagttccctcaggtcaacctccaagggcaatgcctccaggccacacagtctagtgtctagggagctgcgagtgagagaagggctggaaggggccatggtgacaggggctggagaagacttttgggagatatcagaattaaagttgggagttgctattctaccggtagactaagaaaaaactgaaagacagagagggagggaaggagaacgagatagcagaaataagagaagactcaggggagaaatgggacgaaaaaacaggaaagccagagaggtaaggaaaggagaaagaggagaaaggagggaagctgaagaaagaagagaaagaaaatggagagaggaagggaggaaggaaaagagtgagggagaaattaagggaaggtgggggaaagaaatgagagaaggaaat

SEQ ID NO: 10310 - DNA, 1321 bp, Artificial sequence
  DNA replication origin
tttcaacttaaggaacagagagaggaaataaaactgctacctctgccatcggccgctcagcctgggtcacgactgcagcaccgacagctcattcttttgggcatgattcaagattcagtaaaactgcacactccgtattttaaaaaataaaaagacacacagtcctctccttccctttcagactagtttcctctttactgcagactgcgacgcaaggccatccactaatctttgatgcctgctcactgcacaggccccttcctctctccccgcacctcctcccacaacgcctgcagatctcagatgcgtttgaactacagtaaccccaacccagctcgcggcaagcaggcagcgcagcagcagtagcagcagcaaccgggccgccgccgccgcggggctaagagattacgttcagcaaaaactcttccaggaaagaggctcgagagctcccctcctatctcgccaagggtgctgactctgtcgcgccacgccacgtaccaaaaggctcgcgaagaaaaacgcgggcgaagttcagcatccccgaacagaaagggaactcattccagaaagggggttcacgggtctgagggtccttgggtggggaaagcagtattggagggagaagacagaagggatggcaagacagaggaaaccacggggacaaaaaggaagggatgaggagccctcttactataaaagggactgacggacgggatgcagagcaatgggcccccctcgaaaaatggactggcaggcccttccgcacccccaaacaacctcgcaccacctgaaagcggggagcttgagtttggggctgcgtagatcaaagcagggtaagacgaagggaaagagggaggggagcttggaagcaaagtgaacaaagaggcaaaagaggcaaagttggaaatggaaacgagaaagggagctggaaaggggccgctctggaagggtcttgaaaaaggcctagaaatgggatgctggggaggcaaagggggacagccccgaggaagggcatctcaggaatgtaagggagcgctccaggccctgggaagaggaagggatgggagggcggggaggcagccgaggcccgggagctggaacagagggggctttgcgcggggcccaggaggggagagcagggtcggagggaggcgaccaccgcgggaagagctagaggatgggagggaggggtgctgcggctgaagaggggatgtggactcctccaatgctagggagaagagggaggtgaagcgagataaaaggaaaggggcgaacagggagaagaggaaggagcctgcgacgcgatgggggaggggaggga

SEQ ID NO: 10311 - DNA, 1665 bp, Artificial sequence
  DNA replication origin
ccggggggcgcggggatgggaaggggccgggcgggcggcgtggtcacctcaggctgcggactccctccctggggagcggcgctgccggcgggcgggctccgcaactccccggctctctcgcccgccctcccgttctcctcgggcggcggcgggggccggtacggcacggctcacagcggcggctcttctgcgccgagcctcggatgttgcttctggggaggcggaggcagcggcagcggcagcggcccggcccgtacggtcaccatcgtccgcggcagcaggcgctcgcgggccgagccccttagcagccggcgccggcgtcggcggccatggcctcctgcgtttgctcctcccgcccccggcgctctgcggcggccgcggcccgacttccgcactctgcgcctgcgcgcggcccagccagcgcggcgcgcccctcccgcgcgcgcccgcgctcactcacaatcgcgcccgcggagtgctttccgcaccgcctccggtgcgtgggcgggagacataagcctagccaagcccatacagcccggctcgggtggctatggagaggcgtactgcagagacacctggacgcgcactgtgacaggcgccattctgacacacgtgctctctcactcccaaacaccacgggccgcaagcgctcacacccacactcacctgcagggaccacgtgggagaatttgaagggctgatcctgtcccggtgcattcgcagtagcaatgatgcgagaattcgttttaacctcgtcactgactggactagactgtaaactccttggcgtctgggatggctcagccgtgcccagcaccaagtgcaggcactcaaacccctgtggagtaagtgactggatgaatgaatgcattggaactgttcactgagtatctgtaacaattttgatcccatggtttggtacaaagaattttattgcagtatgaaattaaatggtgtttgtgtgtttgtcttgtcttggtctaaggttcaaaacaggctaatgtatgttttcccctccccaacgtagaggagttccactttgtctctgtgccagtctctatcacagaatgcgcaatcctaccctaatttaaatgtccacaccttttagggcaggaactgttgcccagaatacatagcctgaagcatattgtgtgtttacacaacgatagtcttctgggcttggcaagacttctcattccccatttgtctgccactctgcctcaccacgaccttctgcaacccccacttctatctcccctgccttccaccatcaccaaaacccctccactgtttcttgctttctctttcgttagttcctggggagccagttgctatgagcacctagcctggccttagatgttgaaagggccagtgtacacagaagatacacacccagtgatgggtaagatgttgcaactatactgggtcatgctgaaattgtgaagcctcaacttcttcatgtgcaagagaaattaatgtactgtaatctcgatgtctgtgttgaggaccctccttgtaaattcaagtctctggcctctgccctttgaatggtaaacccccaattctgaacactcttgtatcctgctgaaattgtgaaagcaagctctgtatttagaaaatgcaatccctggaggtatcagtcaaccaaactctgagtaactt

SEQ ID NO: 10312 - DNA, 885 bp, Artificial sequence
  DNA replication origin
ggaaatctgcgcccgcctaaaacccggcctggtcccagccaccgccccaggaacttcccccaccgcaggggcggaggtcgagagcagggatggagaagtggacctgcgcgggtggactccggggcgcgggtggactccggggcgcggggggactccgaggagcgggtggactgtggggcgcgggtaccgtctcgcagcgacctctgtcggcggctctggggatggcccgcatctgtctgcgtgtacctggtatacgtgcaggtacatgttcctgttcacgtgcagactgggcgggggatgggggggtccacaccggtgtacacctttgcatacctcttagcaacttgaaattccaccacgagagatatctttattccgctattcctgtgcatctgcacggagcccctagggccatagatttgtgtgcaaatgaaatgaggatgtagtctgggtgcccaagggggggtgccttgagtgtggttgtctgtatgcctccctgagggtatttcactttctgctcccatccgcccctatgagcgagtacctatgagcacaggatgtgcacatatttgagtcttattagtggtacacgcagttttatcatctccccaggtctgtgtctgtatgaaatgtgcatgggtgtgtgtgtgcacgcgtgtgttcccactcggggaatgtggggagaggtgcatggagccaagatgggtggtaaatagtatgtttctgaaattaaaggactaatgtggaggaaggcgccccagatgtactaaaccctttgcccttcatctcatcctctctgacttgggaagaaccaggattttgtttttaagcccttgggcatacagttgttccatcccgacatgaactcagcctcccgtctgaccg

SEQ ID NO: 10313 - DNA, 920 bp, Artificial sequence
  DNA replication origin
cgggcaagggctggctttgagcgccaagctgtggaacccaggccggtagcagccgaggcgcaggccccaggtctctccggttcccgcccgaccccgcgccacggtcctcgccgttttgctttcgagacacacctggctgctgccgcgcgccccgggcgcagccgcccttggcctggcgcccccgcctttttgcggccggcgctcgtggaagtttccgcggccggtggtgagtcactgccctttttttagcagccgcggtggatgtgcatcataattcacccaggctcccgagagcccggctgctgccgccgccgccgccgcagacgtcaatgcagacgagcccggcgctcggcccggtgcgagggaggagacccaggtccgcgccgctaggccgctgccccgctgaacagccgcgcgacgccctccccgcgagctaggggcggagggcgctgcggagcgcgcccaggaagctcacccctcgggggcgccttggagccgaggaagggcaggctgtgaagacagagcgggagaaaagccaggaagcaggcatctgggcgtccgtccacccctcattcagtcacctgctctaccgttagccattcaggctctcacactaagtcacttaagacccctctctttcatccatccacccacccacccatccacccgttcgatcattcatccacccgtccactcttctgccaaccacctaccggccttcctattcaggcatttgacatactaagttacttaaggtcccctctatccacctgtccatagcacacatttatttacatcccatctctctacctgtctcagttcatctatccatccattcatctatccatccatccatccatccacccacaccctcactcgtttaaattagtatctgttatgctggatactgggaacacaca

SEQ ID NO: 10314 - DNA, 1387 bp, Artificial sequence
  DNA replication origin
gcccagatgcctgcttcctggcttttctcccgctctgtcttcacagcctgcccttcctcggctccaaggcgcccccgaggggtgagcttcctgggcgcgctccgcagcgccctccgcccctagctcgcggggagggcgtcgcgcggctgttcagcggggcagcggcctagcggcgcggacctgggtctcctccctcgcaccgggccgagcgccgggctcgtctgcattgacgtctgcggcggcggcggcggcagcagccgggctctcgggagcctgggtgaattatgatgcacatccaccgcggctgctaaaaaaagggcagtgactcaccaccggccgcggaaacttccacgagcgccggccgcaaaaaggcgggggcgccaggccaagggcggctgcgcccggggcgcgcggcagcagccaggtgtgtctcgaaagcaaaacggcgaggaccgtggcgcggggtcgggcgggaaccggagagacctggggcctgcgcctcggctgctaccggcctgggttccacagcttggcgctcaaagccagcccttgcccggaagaaaaaaaaaaaacagatgtgatgtggcaggtgacaaaggggagagcaatagctcatactcatcgctctactacatgtgctaaggtcataattcacttaaccctcaaaacagccctgaaggcaggtcacgtgattatccctgctttacaatggggatactaaggccagagagagaaaggggcttgccagcggtggcagagctctcagtatacccaataaaatagtaatgtggcagcactgtggaatccctgccgtgtgcccaggcctgtgctggtgctacagagatggacaagagtggtcccgctgcgaggagctcaccgtatagcactctttctgagatatgtccagaagcatttacctggggggactcaattccatccccttccacccgacaaatattttcgagctctgctgtgtgcagagaacaatggcagaggagacagagggttacaaaggtgactaaggcagccttaatttattttttgtgcattcaccaagtagttagtaagcacctaccatgtgccaggtgagcgaggtaacactgacctgtcccagctctcatggagcgcacgttctagcagggaagacgggtaaacaaggtgtgagaaacgctacattagggggctggaggcacacgcaatacagcgaaggagcacccagcctaacctaggcaatcaaagaaggtttccaggtggcagtaactttgaagccaaggctgggaagctaattggaagttaagcatatggagaggaggttcgggaagagagtttcactcagagagaacagcatgtgcctaaccccagaagtgccagagatcatgacgggttt

SEQ ID NO: 10315 - DNA, 1241 bp, Artificial sequence
  DNA replication origin
ggaggaggaggagaggggacgaggcggcagctccaagtttaatggtccacgtcaggcgcgcctggccgggctcgcgggggagcggcggggaggagggggcggcagggccgggggcgcccggcggtgcccagctcgctcgggtctgcggaccgcggcgcgtcctccgcccagcgagcgccgaagagggtctgctttcaatgagccgcttctgggctgactgcacggcggtgacatcaggcgggggagcccggcgccctgactccgcgcggcactagggggcaatgcgggtccagccaaggcgcccgcagccccgacgccgccaccccgcaagccgggaagccagccgcgtcccccgccgctcccagggcgcgccctctgcggggggcggggcgggggcaggggccgcgagggcgggacctgggcgtggagatcgcgggtcacccacccctaggcggcccgctggggttattttccccgctagtcactcttccgtgtcaaaggtgggttgggggctgcttacctttaatagggggctcccggagtgggccccggatttaacgggatatgcaacttgtccagcacctaaaagagggaaagagaattctaggattgggcaggtgggagggacttgagtcggatctgaggccagccctcatccttcatctggctcccctcgccccgtgcaaactctttggccccagtaaaatctggcttctcttcatcctttcattcgctcaggcattcactcatttattcagccgattcttacggagtctccactctctgccctggctctgggcgctgtgaacatagcaactgaacaaaatagacggactcctgccctataggagcgtagcttctcccgacagaagacagacagtatactaaataagcaaatgatgaggtgtgtaatgtgatgacaggtgttaggctgaaaataaagtaaggagggggaaatgcagtggggtgtttgtggggtggatttgaaatgttaagtgggtgcttgggatgtcactgaagtgatatttgaggaaacatgaagggaattgagggaggaagctagctggctatctgggagtgggggtgagggaggtcagagacctggggaagggacgtagaggatcttggttatttgttgagttttttcctttctgtctgatatccatgttggacattcagtcacagggacgcactcccaaaggtgggtgaatggtacttagaagagaaagtatgggccaaga

SEQ ID NO: 10316 - DNA, 1695 bp, Artificial sequence
  DNA replication origin
acttaaaggctggttggggctgtgtggctgtaaaatgctcttattaacggataatgaacgtagtatatctgggtgatagctgtcagtgaagaggggagggagagaatgcagcctctgcaaagctcttgagaagcgtggcttctgctctagccctggaaatgctgaatgaatgctgcctttctgtgtacgagctgcctccctgcttcccaaatgccgcgtctgcagtaactacaaactattttgtatgctgcattagtgacgctgccttagccgacacatcattactactgaaataacgccggtgtgatattcaagcccagtgaatatcctttttaattattaaaccgaggctgttgagtgagtcattcctcataccagattttccttccctggttctatttccagaagctagtgccttagcgtgttctactaacacctgagttggtttttagccagctccccaatctgcaaaccctttgcagaacaaacaatattattcaatctccgaacacgcacagactgcataagaaacaaaacccacaaaaaactttagagtaagctcatcagtaaacccaaggtccaaaaatgcccagtccccctgctgctagtccccaacttaccaagcggtagagcgatgaagaagggtagccagcacaagatgaacataccgaccacaatgcccaacgtcttagctgctttcttttccctggagaacttaaaaagtttgacagctatggaactcctggggttgtggcccttggccttggtactgctaagggtgtcctcgtgaaagttcttggaatggatcctcagggtcagctccttggagttggacatctccttcatgactcctgcctctaggttcttggtggttctcttggccactatatagacacggcagtacatgactagaatgaccgccagagggatgtagaaggagcccagagaggagaagagggcatagaagggttcttcggtgaccccgcactccttgtcatcgttgggtgccggctccttccacccaaggagaggcccgatggagatgacggtggacaagacccagacactgagcagcgccaagatggccttcctccgggtgaccagcgtgggatactgcagagagtagcgcaccccgatgtagcgatcgatggagatggcgcacaggctcagaatggacgctgtgcagcacaggacatccacggctgcccagatgtcacagaagatccgccccagcacccagtagccgagcacctctagggccgctgagaagggcaggacggtgaagctcaacagcaggtcggccatggccaggttgacaatgaagtagttggtgggcgtccgcaggtgccggttgcaggccacagacaagatgactaggatgttgcccacgatggcaaagaggatgaaggcgcccagcaccaggcccacagagatggccctggtgatgtccagctggggcagtgtggagttgctcgaggtctggttggggccagtgaagttggcatttttcaactctccccagtgggcaggtgctgatgtgttgtggccggtgtccaggtcgggattcatcttagagtccgccctccatagccagggggatgattgggctcggaagggctgcggcgaaggctcctcagctgccctgaaactttgcttcccccgtggtcttcttcccagaggcgccctcctggcgag

SEQ ID NO: 10317 - DNA, 1038 bp, Artificial sequence
  DNA replication origin
ttttcctccccagggaaagaaagctgcgcacgggggccctaaaactgcccgggcgccaggggcatgttgcttttgaagcccggctgcccgttggccacgtcggccgcggcctcgcagcctccgttgctggcgccgccgtcggtcccggggctctcgggctcggtcaggagcttgaaggtgaagagcgggcccgagtcgtggcggccgcggcggccggggggctcaggcgcgggcaggctcaggagggcgccgggcgccttccactcggggaaggcgcacagctcgactggcggtggcgcgccgcggcccaggtagcccgggctcggcgaggccgagggcagggtccgctggctgccgctcaggcagctgccgctgtcgtccagcgagtccttgcgcgactgcgagcgctccagcgagccgccgcgcgtccacggccggtaggtgtaggcgcagccgcccaggcgacggcggcggcggcgtcggcggcggccgcggccgcggcactggcacccgaggatgcgcacgaaagcgcgcttgaactccttgctggagcatgggtagatgatggggttgaggcagctgttgaagtagcccagccagaacaccaccttgaacacggcgtcggggggcttcagggtggagaacaaggagcctgcagtggggaggggggtgggcacgggcagaaagacagcaatttgtgagtagtcaagctctcgccccaatatgcttctcctcaacattgtcaacctgcagcgttcctgccgccaggcctttccccgagccggttcctctgcccggaatacttccctttgcatttcaaaatcaatgaatcctacattcatttttagggccagcctcaataacttcgcctttgtccatgaaacctttcttgatctagttaaacagcatctaagctcctatagtttcctctggcagcacttgccaccttcaatctaagtgataacaataatcgcccacaattgcacatctcttttgggtcaggcactgtgctaggtgctttcccgatattagtttatc

SEQ ID NO: 10318 - DNA, 973 bp, Artificial sequence
  DNA replication origin
ttcaaactaggggctttcagaggcagcaaagaccttagagtcaactccaccattacacagatggggaaccaagatccagagagggaagtaagtctctgctcttcatacaataaatcagtagtaggactgagactagaacccaagttatcgactccaaagaatgctccacctttctgtgtgaccttcctcagtgcttttttccaggcagggtcacaagtcagcagagcttgggagggttcttgtgaccctgtatgttgctgggccccaaggatccatatcttatccagaaacgtctgcagtttggatgtcttttcgagttctgtgggcacaggcaaacaatcagtggagtgctggcctgggaatgcaaaggtgaggggaagggaaccagcccctctctctgcctgagcttcatcatctctcaggaaacaggcccatttaggggactggccggggaaccccagctggggttgggtctagggatcaggaccaagccagacattgctcagtgttggtcacagcaggaaggagccgcaggaggattcagattctgctaagggtcaaaagcaggcaagcaggattcattaggcaagtccagggcgtcacgttcagccacagggccagactggtgcagccctgtaggtcagtaaccgcaaaggcgtaaatgggacctaggggagccagcactaattgtcctcaagacgtggtgagagcggctcttctggggtggagactggagggcaggggaatggaaagcgaaggaccctaagacctaggaccgggtcaaatccgaagcggaaggaagaggaaacgcaaggctctgcctgccgctcgtccacaaaccactcaaagccgaacaggagaaatgacctttaatgtcgactttgtttccaaccccaccaaagtgccatccttcagtgaagtacaaggaggggcttgagaggtacgaagtcacgacacacacaacgcccccggt

SEQ ID NO: 10319 - DNA, 1059 bp, Artificial sequence
  DNA replication origin
ggaacgacacgacaagcgcgtcctcaatgatgtggtccagcgtgacccgcacctccgagcccgggatcagttgcgacaccgtggagtccccgcccgccggcggcacgagcgccggggctacgggctgaggcagcggcggctcctcgcgctcctcgggagccgggggctgctccggcggcgatgcaggagaaggtggaagttccggccctccctgaggcgcggctgccgccgactccgccacccgaacggacagtttctcctcagcctccagctccggccccaccgcctctgggctgcgggcgagctcccccggcggcggcggtggcggcgggagcggcggctcgtcggcctgaggagcggattgctgcccgtcagtctcgccatccggcacagacgcttcagtggccgtgaccgggagggggtcagtgccggcctcactgccggggatgggctccatctccggctcggcctcgccggcgcccccctccccgggggacgctgcagtcgctgccgcctctgcagccacggccgccattttcttcctagcttctccctcctccaactccggctgcagcggcggcggcgacagcgctgcttggttccctgggccttcccctccctcccgcgaacactttcgtcccgccctttccctgatgctcgtttctggcacctcgccattggttgcattctacacccctcccgcacttttgatattccattggccagggatggacgtctatcatctagtcagtccatccttcccacgcagagtaggaacttctcattggccagatgtgttgtcaagtgtggaatctgagtggaggaatagggggcggaatcaaagggggcgggggaagtcacaaaagaggagccatatactcatcgcctcttgctattggctggaagaggaaataaagttttatggttggcctacgctcctgcccattatcagccaggtctttggaggtgggagaaaggatggaatcatgtggcgtgccacttctttcaaaggcggccgaggggaggagtaacaagggaatgcgggaggggaaccgcttc

SEQ ID NO: 10320 - DNA, 1599 bp, Artificial sequence
  DNA replication origin
ggctgatactacaggctcataccactgtgcccggcctcgccagtcttatccctcaccctgtgttctcctgtttccagcagtcatccctatctgacatttttctgcacacactgcatcttccccagggcaaggttagctccattcctgcagaaaccttgcgtgtttactctccactaagtccccaggcttcgcccacatctggcacatagtaagtgctcaacatatgtctgatgagctaatggcccattaggcctggatcccctctctatgggaaatcatgaacttgcagcaaacagaatcatccaatagacactgggccctactatgcgcctggcaccgtgctagacagcagggcagccacagagacacaggctcagtcctggctgaggaactcactggcccactgggcagagataatgtgcttgtacagtaaggccaggcaaggcgcatgcgcccaggttctactgaaaggccgtctggggtcaaagggtagctggagataatgccagtgtggctcctggatcatataagaaatcccacgctggggttgatggctcatgcctgtaatcccagcactttgggaggctgaggtgggaggattgcttgaagtcaggagtttgagaccagcctgagcaacatagtgagaccctgtctctacaaaaaataaaaaataagccaggcatggtggtgcacacctgtagtctgaactacttgggaagctgaggcaggaggattgcttaagcctgggagattgtgtgtccggaattggtgggttcttggtctcactgacttcaagaatgaagccacggacccttgcggtgagtgttacagctcttaaggtggcacgtctggagtttgttccttctgatgttcggatgtgttcagagtttcttccttctggtgggttcgtggtctcgctggctcaggggtgaaactgcagactttcgcggtgagtgttgcggcacgtctggagttgttcgttcctcccggtgggctcgtggtctcgctggcttcaggagtgaagctgcagactttcacggtaagtgttatagctcataaaagcagtggggacccaaagagtgagcagtagcaagatttattgcaaagagcaaaagaacaaggcttccacagtgtggaaggggacccgagcgggttgcgactgctggctcaggcagcctgcttttattctcttatttggccccacccacatcctgctgattggtagagccgagtggcctgttttggcagggtgctgattggtgcgtttacaatccctgagctagatacaaaggttctcctcatccccatcagattagttagatacagagtatccacacaaaggttctccaaggccccaccagagcagctagatacagtgtcgattggtgcactcacaaaccctgagctagacacagggtgctgattggtgtgtttacaaaccttgagctagatagagagtgccgattggtgtttttacaatccctgagctagacataaagattctccacctccccaccagactcaggagcccagctggcttcacccagtggatcccgcaccagggttgcaggtggagctgcctgccagtcacgcgccatg

SEQ ID NO: 10321 - DNA, 847 bp, Artificial sequence
  DNA replication origin
gaccatgtggaagggctcttgttctcaaccccttgtgctggcctcagaaaggagagtcttttttttttttttttttttttttttttgagacagagtctcgctctgttgcccaggctggagtgcagtggcaccatctcagctaactgcaacctctgcctccaggttcaagcaattctccggcctcagcctcctgagtagctgggattataggcacccgccaccatgcccggctaatgtttgtatttttagtagagtcggggtttcaccatgttggccaggctggtctcaaactcttgacctcaagtgatccacctgccttggcttcccaaagttctgggattacaggcatgagccactgcacccagccaggaaggagattaaattctgccttcccaggaaatactctgtctgtgtatttgttcattcagacaacaaatattccttgagctcctgctatgtactgagcactgcactgggtgctagtcaaggtccctgctttccgggaacaaatagactgatggggtgggcagggagtggggaatatggaggtataggcagggaaaccggccatcagagcagtggtcagcatcaggacaggggatctaaagggactgccatcaaggtgggacatgaggggtcaggaaaggcctggaggtaaggaggtggacactggaatcaaaagaatgaacaaaaagcctgggagagttggagtgcggtggataggggtgttctacgcagagggtgtccctggtgagaggcccagctcagaaaggggatttctttctctctctctctttttatttttattttttatttatttaatttttttgagaccgggtcttgctcc

SEQ ID NO: 10322 - DNA, 1068 bp, Artificial sequence
  DNA replication origin
cgacagagcgagactccatctcaaaaaaaaaaaaaaaatttgtagagactgggtagtcatatgttggccaggccagtctcaaactcctgagctcaagcaatcctgctgttttggcatcccaaagtgctgggattacagatgtgagccaccatgcccagcggaggaagagaatcgttgatgaggttgatggtcttaattcactgatccacttctatgcctggcactcagctgggcactgcgatggagaagaaaagtgtaagatatttctgccatcatggactttatgctccacccaggagacagagagtaaacaagattttaaaagccaaatatgtagtctattagatagtgctaaggactaggagaaaaaaaaaagcagagaagacatatggaagggtcagtagttgaaactataataggtggctgggaaaagcccccctgctaagatgacatggagtaaaaacttgaaggatattggagagctggctgtacagatatgtggggctgggaagaacggcaagtgtggaggccctgaggtgggagcatgcccagaatgtctgaggacaagcaagaggccagtgtggtgggagcaggtggacagggtggggaccgtgggagaagatgaggtcagacaggttaacaaaggtgtaggcagatcacacagggccctgtaggtataggcctttactctgagtgagatgaagaatcactgaggggttttgggcaaaggaagaatgtgaattgcattttgatggagtcattctggctgggcaaagttggggagaggggcaagggcagatgtaaggcgactggttagggagcttttgccactatccagtggagagttggtggcagcttggaccagggaagtcgtggggcctggttttaaggccagatggccagtgtgtcctcaataaaagaaagcaggcagcatgtgtgggtacaggtgcagtaagaggaggcagaggtgtggtgtgggagcttgtggaagttcctctgatttttcctatgttcttagtgtataaggaagctagctgaatgtgaggaggggtgaggaagtattagacg

SEQ ID NO: 10323 - DNA, 921 bp, Artificial sequence
  DNA replication origin
tatctccctcccccaatttccccaccccaagcttgctgcctcctccgggtcccggcggccacggcgaggcggcctgagcttcaggaggaagggaagaggcagcctctgggtgtgcgagtcccctgggcgcggggaagggaagaagaggacgaggtggcgcggagaccgcgggagaacacagtgcctccggaggtgaggggctcttcctcattttgcctgccttctagggaccgctccggcttcttgtatccagaggtacagcccctgaacagccgggagtccccgtcccctgtcccggacgaggggccgggggcgccagctccgcacgccgcgggagtgggcggcgagcgcgggcctgcgaggtaaggagggatggcggcgggtggggagtgcgcctgcacgtgtgtgcgcgcgggtgcgcgcagcggagggggcgctgggggaccggccggggcgcgtcccacccggccacctgcccttcctgctctgtgcggtcgcccacgccctccagtcccccgcacctgcgctagggcgcccgtcacccgcatccctcacgcctccacgtcccatctccccctcatgcaaaccccaccctgcccactaataattcccactgcagaatcagaccgaaacctggagagacagcattgcctttctgctcccctcgcccccctcccctcctgctataaataacccggactagcgggtcaggaacgtcacacggcgagaaaacaggaccccgaggttttcttctctgggaatagggggcaaagggtgaggagaggagaaagaaatcgctcgtgagtagtgaagaaaagcttgctctttgactactagaagagaccagccattattttattcttttctttctctttcttccttttttatttttccgtgcctttcttattctgtacccgcctc

SEQ ID NO: 10324 - DNA, 1680 bp, Artificial sequence
  DNA replication origin
tgtggggtttgagggccggaatttaatttttggagttttatttaatgtagggagcagattgggtaataaaatgtatattgagcataagacggccttttgaccttttagggtctagggctgtaaagtgtctcagggttgctgccaaacgagccatgagctgggctggatttttatatttgatgaaaaagagcctaaatggtatctgatttgggataaagaaaaaggagtgttaaccttgactatgcctttagctccagccacctttttaagagtaaattgctgggcaggtgggggagggctagtcacggaacaaaactgtaagccagaccaggtgtgaggaggggaggcgataaaaagattatagggtggaggagcggaggctgaggaagaattgggaactagctcagcctggcgaggagcagcccggggaggaggggagaggtcagatgggtctatagaaaaggaagattagaaagactcagcaacgcttggggttgggactgaggggacaggcgggagagaaagaaggaagatttgggatgagttgcattgggaacagagactagagagggaccgatgtgtaaaagaatgcctggacgtcaggcatctcagaccatttgcccattttacgacaagaattatttagatcttgtaggatgaaaaaattgaaagtgccattttccggctatttggaactactgtcaagtttgtatcggggtcaagtggcattgcagaagaaaataagatgcttagattttaggtcaggtgagagttgaagaggttttaagttcttaagaacacaggctaagggagaaggaggaggaatggaaggtggaagcttgcccatagtgaaggaggcaagcccagagaaaagagtagagacacggagaaggggtgaggggttcttgccctccagaaaagcagagaaggggttggggtgcagaaatacgaggttggggcacagaaataagggatcggggtgcagagatagaggttggggcacggaactaagggattggggcgcagagatataagaggttggggcacggaaataagggatcagggcgcagagatataagaggtcggggtgcggaaataagggattggggcgcagagatacgaggttggggtacttacccctcccccagaaaagcgggacttgccactaagggtgaaggagaagtggttgggggtttcttgcccaccagaaaggtggagaaggggtagagacatggagagaaggggttggggtacttgccccttccccagaaaagcaggacttgccactaagggtgaaggaccaaggcaggcatccctgcgtgctctgacacctctgaaacctgggtgaagaatcagagaggcgtccccgtaatgattaaacaccaagggaaggctgccttccctagtccgtgaccggcaccagagttttgggtccacagataaaatgtgtctcctttgtctctaccagaaaatgagaggaattgaaattaaaagaagggagagattgaaatgtggtgccaagattgaaaggagaaagaggttgagggatagtgagggaggttggagaacagagtaaaaagaggccgcttaccggatttgaaattggtgagatgtttcttgggctggtcagtctggggacctgaggtcgtaggtggatctttctcaccgagcaaagagcag

SEQ ID NO: 10325 - DNA, 1068 bp, Artificial sequence
  DNA replication origin
caagtaattgcaactcttctctattattgtacaccttcaaggtgaggttaattaagtcctgttgtggggtttgagggctggaatctaatttttggagctttttgtaatgtcaggagcagattgggtaataaaatgtatattgagaataagatggccttctggcctctctgggtctagggcagtaaagcatctaagggttgttgccaaatgggccatgaactggactgggtttttatatttgatgaaaaagagcctaaacactaactgatttgggagaggtaggataaagaaaaaggagcattaaccttgattaagccttcagctccagccacctctttaagaggaaattgttgggcaggtgggggagggctagttgtggaatgaaactgtaagctggactgggtgtgaggaagggagtgatagagggattatagggtgggggagtggaggctgaggaagaattaggacctggctcggcctggcaagaaggagcctggggaggatgggagaggtcagatgggtctgtagaaaaggaggattcaaaggactcagagcttggggtggagactgaaggaacagacaggagagaaagaagaaagatctgggatgagttgcattgggagcagagactagggagggaccgatgtgtaaaagaatgcctggacatcaggcacctcagagcatttgcccattttacgaccagaatgatctagatcttgaaggatagagaaactgaaagtgccattttctggctatttgaaaccattttcgaatttgtattggggtcaagtggtattgcagaagaaaatatggcatttagattttgggtcaggagagttgaagaggttttaagttcttgagaacacaggctaagggagaagaaggaggaatggagggtggaaggctgcctatagtgaagaggcaagcccagagaaaagagagggtggagacacgggagggggtgggtacttgcccccaggggaggtggtgcttgccaccaaggtgaaggatcacagcaggcatccctgcagtgatcagacacctctgaaatgtgggtgaatcatcagg

SEQ ID NO: 10326 - DNA, 1135 bp, Artificial sequence
  DNA replication origin
acacagcaacaatctgatctctctttcttttccccacatttcccccttttctattcgacaaaaccgccatcgtcatcatggcctgttctcaatgagctgttgggtacacctcccagacggggtggcggccgggcagaggggctcctcacttcccagatggggcagccgggcagaggcgccccccacctcccagacggggcggccggccgggcgggggctgaccccccacctccctcccggatggggcggctgccgggcggagggtctcctcacttctcagacggggcggctgccgggcggaggggctcctcacttcgcagacggggcggctgccgggcggaggggctcctcacttcccagacggggcggctgccgggcggaggtgctcctcacttctcagacggggcggccgggcagaggcactcctcacctcccagatggggtggcagtcgggcagagacactcctcagttcccagatggggtcgcggccggacagaggcgctcctcacatcccagatggggcggtggggcagaggcgctccccacatctcagacgatgggtggccgggcagagacactcctcacttcctagacgggatggcggccgggaagaggcgcccctcacttcccagaccgggcggccggtcagaggggctcctcacatcccagatgatgggcggccaggcagagacgctcctcacttcccagacggggtggcggccgggcagaggctgcaatcttggcattttgggaggccaaggcaggcggctgggaagtggaggttgtagcgagccgagatcacaccactgcactccagcctgggcaacattgagcactgagtgagcgacactccgtctgcaatcccggcacctcgggaggcctaggcaggcagatcactggcagtcaggagctggagaccagcccggccaacacggtgaaaccccgtctccaccaaaaaatgcaaaaaccagtcaggtgtggcggcgtgcgcctgcaatcccaggcactctgcaggctgaggcaggagaatcaggcagggaggttgcagtgagccgagatggcggcagtacagtccagcctcggctttcacaactttggtggcatcagagggagaccagggagagggagagggag

SEQ ID NO: 10327 - DNA, 1081 bp, Artificial sequence
  DNA replication origin
gttgttgcgattgaagggtctcaggatcagtccaggtgaaagaaaagaggttttgggagtcagggtacaggggaatagtgaagaaggcatcctttaggtcaatggcggtgtagttggtggtattggagggaataagggagaggagtgtataaggattgggaactactgggcgaatgggaaggactgcctgattgatagcccagaggtcttggactagtcggtaagagccatctgactttttaacaggaaggatgggggtgttatatggagagtgagttggtctaagaagactgcatgagcagagcttgtttataatgggttgtaggcctttttggtgggtgagagagatggggtattggggtacgttgggaaacttggaggggtcttggattatgatggggtcatggtgagcagctagggatgggggtgtggtgtcccacaccactgggttaatgagtgaggtgggaagtgggtactggggagaggggtcgggtttggactgatggaaaggagcaggagggactctggttgagggaggcaggaaaaggtgatagaagccttaaatttggctaaaagatcttggcctagaatgggggtaaggcagcgaggcatgataagtgtgataaggaaagagtgtgagaaaatggtattaaacagggaaaaagacaggggtccagtggcacacggattggagacaagtccatcagctcccacaactgagacctgagagggatgagttggtcctgcaaattcaggtaaagctaaataggtggccccagtattgattaaaaaagagataggcttacctgctactagtagaattaccctgggctctgatgccatgatggaggaggggtttggtgtccctgggccatgtcagtcttcagtggccaggtcgaggagctgtgggagtgcgagggattcttcaatctttggtttgatgaagggacagtgggtcgggggcgggggcaggcttttctgttcacctgttaagagagcagtcagagttccagtggcctgtatgttggcagactgggcaggggctcttcagtactcatgggttaggacacacctgtgacca

SEQ ID NO: 10328 - DNA, 821 bp, Artificial sequence
  DNA replication origin
agaaaaggaatattagaaagactcacgacgcttggggttgggactgaggggacaggtgggagggaaagaaggaagatttgggacaagttgcattgggaacagagactatggagggactgatgtgtaaaagaatgcctggacatcaggcacctcagaccgtttgcctattttgtgacaagaattacttagatcttgtaggatggaaaaatggaaagtgccattttctggctatttggaactactgtcgagtttatattggggtcaagtggcattatagaagaaaataaggcatttaggttttaggtcaggtgtgagttgaagaggttttaggtttttaagaacacaggctaagggagaagaaggaggaatggagggtggaaggttgctcatagtgaaggaggcaagcccagagaaaagagagagtagagacacagaggaaaggggtttgggggttcttaccctccagaaaaggaggaaaggggtcagggtggggaaataaggggttggggtgcagagataagaggtcggggcatggaaataagggatcagggtgcagagataagaggtcggggcgtggaaataagggatggggcacagagataagaggtcagggcgtggaaaaggatcagggtgcagagataaggggtcagggcatggaaataagggactggggggttcttgcaccctagaaaagtggtacttgccactaagggtgaaggagaaggggttggggggttcttactgcccagaaaagcggagaaggggtattgacatggagagaaggggttgtggttcttgcccctcccccagaaaagcgggac

SEQ ID NO: 10329 - DNA, 831 bp, Artificial sequence
  DNA replication origin
gagggaggtgggggggggtcagcccccctgcccggccagccgccccgtccgggaggtgaggggcgcctctgcctggccgcccctactgggaagtgaggagcccctctgcccggccagccgccccgtccgggagggaggtgggggggtcagccccccgcccggccagccgccccgtccgggagggaggtgggggggggtcagcccccccgcccggccagccgccccgtccgggaggtgaggggcgcctctgcccggccgcccctactgggaagtgaggagcccctctgcccggccagccgccccgtccgggagggaggttggggggtcagccccccgcccggccagccgccccgtccgggagggaggtgggggggggtcagcccccctgcccggccagccgccccgtccgggaggtgaggggcgcctctgcccggccgcccctactgggaagtgaggagcccctctgcccggccaccaccccttctgggaggtgtgcccaacagctcattgagaacgggccaggatgacaatggcggctttgtggaatagaaaggcgggaaaggtggggaaaagattgagaaatcggatggttgccgtgtctgtgtagaaagaagtagacatgggagacttttcattttgttctgcactaagaaaaattcctctgccttgggatcctgttgatctgtgaccttacccccaaccctgtgctctctgaaacatgtgctgtgtccactcagggttaaatggattaagggcggtgcaagatgtgctttgttaaacagatgcttgaaggcagcatgctcgttaagagtcatcaccaatccctaatct

SEQ ID NO: 10330 - DNA, 1212 bp, Artificial sequence
  DNA replication origin
gggggccctagtaggggccggccggggtggcgccgctgtccatgcggccctgcagccccgacccggcgccgcccgctcctcccgccgccggcctctcacgctgccatgtgcgtccgcagcggcgcggtgcgagcccgggtgcgcgcccagccggccgggcagagcgagccgagcgccgccgccgccgccgtctgccctcctccgccgcgcggcgcgctgcgccctccacgccgccgctgccgctgccgcctccctcctccctgcagccgggtgccgtccctcctctccgctccaccgctctgagctcgccgggtttgtgacttctgcctccgccaggtgcggctcgggcggtgcaggtaaccgcgctgccccggaaacgggaggcggagcgccgggcgcctgggttcccgggtcccctccccgcgcgcagcgcctcgagggcgggtcctagggcccgagacgcgccccctcgtgggacagtcccagccgccggccacccttacgctgcccctgccaggggaaggagagaccgcccctcacctgcgtcccagacctagggggctgggccaaaaaccgctctgcctgtacttaaaacgctcctgtctctctccacccggagtagccaggctctcggcacaggtggccccaaatcttaaaaactccctgcttttctgtggtgtagaatcaggagtcaggcaagaagtggttaaatggaaacattcttgcgaattgggaaacataagttttccaggatctctggtcccttcccccaacacaggcaccatctgtctccttctattcaactctccctacgacgtttcgcccaccctccacccttccccaccatttggaaatgtagctggctcccctcagggtccctaaaattaggagcgctgtggatccgctttcctgggaggacttccagagggtgtcagggaaaacactttgtaaaagtaatagtaatgccattgttattgttagctaaattgaggacttacttgtgacaggctgtggctagcagcttcacaggctttctttcctgtgatactttgaggtaggtgtgttatggatttgggagaagtggggctatgaaaaagaagaaagtaagcaaagcaaaattccatcttgaaaaatgttcaagagaataaaacaatcagagacacaatgtttcttgagaaattaaaaatgtagaattagtgggtgcggtggctc

SEQ ID NO: 10331 - DNA, 1877 bp, Artificial sequence
  DNA replication origin
ttgggaagatgccccggccggagctgcccctgccggagggctgggaggaggcgcgcgacttcgacggcaaggtctactacatagaccacacgaaccgcaccaccagctggatcgacccgcgggacaggtaggaccctggaaccctcctccgtgcccccacacccccgcctgggcccccacctgcccctggagccgccggccgggactgggagggggcaggggagctctgcgtgcctcttgagctctcttcagttcgccaccccctgctccccccaaccttctggagcgctgctcccgcctcagtgggccaccgagaggaggcgcctgccggggagctggcccaggctgccccaccgccatccccagttggaggacttaggccccagccggcacctgcccggagttttgaccttaagctctagccccgcccgccccctttaggaagagaggtcgggcgggggcgggggttgggggagcgacctagccgggtgaagccgggtcttcccggggaggcttccacccagcgtggggggtgggcggatggggatggggaagtgtccggttagagggggtggtcaagaccccaggattccgtgggagaccactggagagagggcactcggcgcagaggaaggcaacctgaggtgtgctttttgacaggtgccttggaagctgctgagaacagcacaggggcagccagggggccctggaacccgagggtggggaggaagtgaagaagcgggggagggcagatgagggagactggttatccaggaatctggcagcaacttggaagctgttaggatggagatggaggtgagaggcctcccggaaagccttgcccctcgcctctttctcctctctttcttccctgatcggggaagggggcggcgaggctcctcagccctgcaccagcgggacctgaccttggtgggtaccaggccgctgtaggttgagataatgtgcagaggcagatggagcctgagatagctcggtgtggctcttacctctccagactttctcctggttgtttggcatttctttgctcacatgctgcacacacacacatacattcaccctctccatgtatgtcctagagtccccggaccacgatgttgttgacacggtctgtgggcagagtgtcttggggaatgcggactttaaaccttgtctgtgaccttgggggtcaggtccctgtaaagcaaccaaggtgaatttcttggactcttcatcttgtgtggtgggggtggaggtgtcccagaagtgtatgtagcaagatgtgggtcaaaaaaagaatataagcggaaagaaaatgagagttgagattctcggtagtttctgggagcacttactttcattcattcattcattcgttcattcagcgcttcctggatgcctcctctacactcagcaccatgctgaatgtctcatgaatgtaatctggaaggtaaatatttagtgctagagagcatctcttaggcaagctgcttcaacctctgagcctcagtttccctgtttgtcagatgggggagcccaccatttccctgaatttaaaaagtttgcttggaagggaatattgggatgcttaaaacttggaagggacgtacatcagcgcccaactcccatttgaaacataagagaaaatttgaagcccagaggtgtgatttgctcaagtattttgatttttctgccattctgcgtaccagttcttcaccagctctgaagttctaacctgcaaacttgtcaccctgacacactgcttccccacccttactcgggtcagttgccagctctgctactgtgttggtgaacttggcagcaccttttctcttgtccttttctcagaacagacacaagttcaaacatatgtgacctgc

SEQ ID NO: 10332 - DNA, 1187 bp, Artificial sequence
  DNA replication origin
agccgcccttgcccccctggccgccgccgtcgcccccgccgcccttgcccgcgccgccgccgccgcctcggcccccgccccagctgccccagccgccgcccccgcggccgcccccaccgcccccgcgcgagctcgcggccgacttcatggcacgcaccggggcgggtgccgtgggttaccggtgcctcggggcgggtgtcagggggctctggtggctctgggtggtcgtcccggcggttgtccgcgggtttagcagcggaggcgggcggcgggcggcgggcggcgggggcaggacgggctctaccgcagtgcccgcatcccggagccgccccttgacgcagcggctgtggcgcgattgcatcacacccgtccccgcgaccctgcggcccggaagccccgcttcccagcccgcgtgcagacgcagcctgctcctcttcgctcaccctgccccttccccatctcccgccttcccagggatccctggcacttccctgggccacagggacgggggcgtctctgctgcaggagagggggaggtaagcatcagcgtcggtcctggctgtgccaccagttctgggactattgatcagcaaggaagtgttgttgattcttcagtgtgaatggggatacacagagagccaaaatgtcatgttcatcctcgaagtctagtctatgcttcaaagtcactctctaaatctgcagcattttcttgaggaaagaaagaaaaagagaaaaagaaagaaagagagagaaagaaaagagagagagggagaggagaagaaaagaaaagaataattgggcagcaccaagggcagcaacgagaagaaaagaaaaaaagaaaagaacagaaagaaaataaaagaataactcggcaccaccaatggccccaaggccgcaacgcagaggctttagggtttagtcagcaccagggacagcgacagcagttggggcccccgttttggctactgctaggggctttgggaaccacacaagagctggggaaagtaggataggtggtgaaacaactggccagcctcccgttagttgaattaagtgtctactcgagagagagagagagagagacaacgcgcacctgaagatcggagcatttactgaacacctggtatgtgcagtatgacttccgttccatcctggaccacagctcttcccgtctcatactcatggac

SEQ ID NO: 10333 - DNA, 1652 bp, Artificial sequence
  DNA replication origin
ggctccgggatgcgggcactgcggtagagcccgtcctgcccccgccgcccgccgcccgccgcccgcctccgctgctaaacccgcggacaaccgccgggacgaccacccagagccaccagagccccctgacacccgccccgaggcaccggtaacccacggcacccgccccggtgcgtgccatgaagtcggccgcgagctcgcgcgggggcggtgggggcggccgcgggggcggcggctggggcagctggggcgggggccgaggcggcggcggcggcgcgggcaagggcggcgggggcgacggcggcggccaggggggcaagggcggcttcggggcgcgggcgcgcggcttcggcgggggcggccggggccgggggcgcggcggcggcgacggcaaggatcgcggcggcggtggacagcggcggggcggcgtggccaagagcaagagccgccgcaggaagggcgccatggtggtgtcggtggagccgcaccggcacgagggcgtcttcatctaccgcggggcggaggacgcgctggtcacgctgaacatggtgccgggccagtctgtgtacggcgagaggcgcgtcacggtgaccgagggcggcgtgaagcaggagtaccgcacgtggaacccgttccgctctaagctggccgcggccatcctgggcggggtggaccagatccacatcaagcccaagtccaaggtgctgtacctgggcgccgcgtcgggcaccaccgtctcccatgtctccgacatcattggcccagacggcctggtctacgccgtcgagttctcccaccgcgccggccgcgatctggtcaacgtggccaagaagcgcaccaacatcattccggtcctggaggacgcgcggcacccgctcaagtaccgcatgctcatcgggatggtggacgtgatcttcgccgacgtggcccagccggaccagtcccgcatcgtggccctgaacgcccacaccttcctgcgcaatgggggccactttctcatctccatcaaggccaactgcatcgactccaccgcatccgccgaggctgtgtttgcttctgaggtgaggaagttgcagcaggagaacttgaagcctcaagagcagctgaccctggagccctatgagcgggaccacgctgtggtggtcggggtctaccgacctcttcccaagagcagcagcaaatagcacccagctcaggctcgcctgccatctccccaaggctgcgttgtgtttgctattattttctgtgtgttttctttgtgagtgttttgttttgttgtttttctattaaactgcataaagaaacggcacctatctgtatggtgatgccaggctaggttttgctgcagtaacaatcaacccccaaatcccagtggcctaaaccggctggtataaggggcccatccagcagtagcctgggagctgtgctcattctaatcactcaggtctccaactccccagggccccattttcacacatgctccccccatccctagggcagaggaaagagagctgcggaattgctaataaaagcttttaaatgtccccttggaactgatggggcacttctgctcacatttggccaagtcacatgacccagcctgactcgggaaaaacactgaatgttggtggacaataatatagtcaaacaca

SEQ ID NO: 10334 - DNA, 1595 bp, Artificial sequence
  DNA replication origin
caaatggtccctccgcccccataccggacgaagcgccggcgaggagcgacgggcttggaagccgaccgcccagccaaggggctttcagacggggcccaagggtgccctcccaacctggcgggccccagcccccgtcttacagggtttcttggcatctttgatcttcatggcgtcggcccgaggggcgatggacggcctccgatccggggcactgagagcagaggcggcgactccggaggtggctgggccgcgcggcgaggcccggccggttcctcccctcaggccgggcggggccggcctagggcggggcggcggcgcctgaggagatgcccggcccagggggcggccccccacccccgcgaggggtggccgggaccgagcaagctggggaaggccgccggcctcgccgctccggggcccccccgcagccgctccaaacaaaaggccccggtccccggagccgccgccaccgccgccgccgccgcactgagaaatagcccgcccaggccgaacgcccacgtgacgcgagccccccctcgctccgcttccgcccggctgctggggattgtagttctccggttcgtgaggccccgctctctggctgtagttgtgcaggtggactacaaagcccgagatgcatcgcggcccctcctccgaggcccctcagcttccgcagatcgcctcagagtggtcccagcgagaagagggctgggtcttagtcacgccagcgaggaggcgaccaatggtgactgagatgggcgtgctggggaagtcgggctcagacctcagcaggtcgcggagagaagggggaatgaactcttcgagaggactgtcatggctgttcggccattctcagatttccccttgagacaggaaagctggtcgtcaggccatggaaagcgctacaatcagggctctagagctgtgcttaagatagacccttgagtacattggcggattaaaattattcacaaaggaatccttttgcttaatagagacaccttgaatgttagggtcggaatgatgacaatagcaggaatagaggtaacatctatggaacgcgttatgttcatgggactctgctaagcactttgtgtgatttacttaaattcaggggccttgtggaccacgtgcaattattcattttattgtcactcattttgaagatggggcacggtctgaggagttaaattgcttgctgagcattctttttgccaccgatccatattcccctggggccctccagcccagctctctccttctaaagggaaaactgactcccagagaagaaaatttagttgctccagttctcacagtaaagccaggacaccctttccccttgcctcctagagtcttagtcctccagctggaatgggagaagatggcattgggtatcttctcttggccttcacttttgttgcccagttagatggccaggaattctgtagtttttacaatagatggatagagggttggcagtagaggattgggcattccagtcaaagaaacccgcttaccaaagagccttactgccccttcttgcagatgataagccaagggatgtgaagaaggacaggagaggacacaagctacca

SEQ ID NO: 10335 - DNA, 880 bp, Artificial sequence
  DNA replication origin
tccgcccggcagctgccccgtctgagaagtgaggagcctctccgcctggcagccaccccatctgggaagtgaggagcgtctccgcccggcagccaccccgtccgggagggaggtggggggggtcagccccccgcccggccagccgccccgtccgggagggaagtgggggggtcagccccccgcccagccagccgccccgtccgggagggaggtgggggggtcagccccccgcccggccagccgccccgtccgggagggaggtgggggggtcagccccccgcccggccagccgccccttccgggagggaggtgggggggtcagccccccgcccggccagctgccctgtccgggagggaggtgggggggtcagccccccgcccggccagccgccccgtccgggaggtgaggggcgcctctgcccggccgcccctactgggaagtgaagagcccctctgcccggccagccgccccgtctgggaggtgtgcccaacagctcattgagaacgggccaggatgacaatggcggctttgtggaatagaaaggcgggaaaggtgggcaaaagattgagaaatcggatggttgccgtgtctgtgtagaaagaagtagacatgggagacttttcattttgttctgcactaagaaaaattcttctgccttgggatcctgttgatctgtgaccttaccctcaaccctgtgctctctgaaacatgtgctgtgtccactcagggttaaatggattaagggcggtgcaagatgtgctttgttaaacagatgcttgaaggcagcatgctcgttaagagtcatcaccaatccctaatctcaagtaatcagggacacaaacactgcggaaggccgcagggtcctctgcctaggaaaac

SEQ ID NO: 10336 - DNA, 1322 bp, Artificial sequence
  DNA replication origin
tcttttgcccacctttcccgcctttctattccacaaagccgccattgtcatcctggcccgttctcaatgagctgttgggcacacctcccagacggggcggctggccgggcagaggggctcttcacttcccagtaggggcggccgggcagaggcgcccctcacctcccggacggggcggctggccgggcggggggctgacccccccacctccctcccggacagggcagctggccgggcggggggctgacccccccacctccctcccggaaggggcggctggccgggcggggggctgacccccccacctccctcccggacggggcggctggccgggcggggggctgacccccccacctccctcccggacggggcggctggctgggcggggggctgacccccccacttccctcccggacggggcggctggccgggcggggggctgaccccccccacctccctcccggacggggtggctgccgggcggagacgctcctcacttcccagatggggtggctgccaggcggagaggctcctcacttctcagacggggcagctgccgggcggaggggctcctcacttctcagacggggcggccgggcagagacgctcctcacctcccagacggggtcgcggccgggcagaggcgctcctcacatcccagagggggcggcggggcagaggcgctccccacatctcagacgatgggcggccaggcagagacgctcctcacttcctagatgtgatggcggctgggaagaggcgctcctcacttcctagatgtgatggcggctgggaagaggcgctcctcacttcctagatggaatggcggccgggcggagacgctcctcactttccagactgggcagccaggcagaggggctccgcacatcccagacgatgggcggccaggcagagacactcctcacttcccagacggggtggcggccgggcagaggctgcaatctcggcactttgggaggccaaggcaggcggctgggaggtgtaggttgtagtgagccgagatcatgccactgcactccagcctgggcaccattgagcactgagtgaacgagactccgtctgcaatcccggcacctcgggaggccgaggctggcggatcactcgcggttaggggctggagaccggcccggccaacacagcgaaaccccgtctccaccaaaaccaggcgtggcggcgcgtgcctgcaatcgcaggcactcggcaggctgaggcaggagaatcaggcagggaggttgcagtgagccgagatggcagcagtacagtccagcttcggctccgcatgagagggagaccgtggaaag

SEQ ID NO: 10337 - DNA, 1842 bp, Artificial sequence
  DNA replication origin
tccaattttaaaagaacttctactatgggaaaatgatgttaaacagcattgtgtactgcagagaaatctttcatgaagaagactccattgatgtgacaaacctcactactgtcttattttaagaaattgccatagccacccaatgttggccaccaccaccctgatcagatagcagccatcaacatcaagacaagacccccgactaggaaaaagattataacgcgctggaggcttaggggatcattagcattttttagcaataaagcatttttgaattaaggtatgtacattggtacattggtttttttccaacacaatgagattgcacacttaatagactacggtatagtataaacataacttcgatatgcactgggaaaccaaaacatttgtgcgacttgcttcattgcagtttgtgctttatggtggtctggaactgaacccacaatatctccaaggtatgcctgtacgtgctaacctggcccagaaaaggggatgtgcatggggcctggcaaaagagatgtcaaagtcaagcatcagatgtgtgtgggtgtggtgatgtgtggtgtggtggtatgtgggtgtggtggtgtgggtgtggtggtatgtggtgtgtgagtgtggtggtgtgggtgtgtggtggtgtgtggtgtgtgagtgtggtggtgtgggtgtgtggtgtctggtggtgtgtagtgtgtgagtgtggtggtgtgtggtggtgtgggtgtggcagtgtgtggtggtgtgcggtggtgtgggtgtggtggtgtgtggtggtgtgtggtgtgtgagtgtggtggcgtgggtgtggcggtgtgtggtggtgtgcggtggtgtgggtgtggtggtgtgtggtggtgtgtggtgtgtgagtgtggtggtgtgggtgtggtgtgtagtatggtggtgtggtggtgtgtagtggtgtgggtgtgtggtgtgtgagtgtggtggtatggtggtgtgtggtggtgtgggtgtggtggtgtgtggtgtgggtgtggcggtgtgtggtggtgtgcggtggtgtgggtgtggcggtgtgtggtggtgtgtggtgtgtgagtgtggtggtgtgggtgtggcggtgtgtggtgtgtgagtgtggtggtgtgggtgtggtggtgtgtggtgtgtgagtgtggtggtgtgggtgtggcggtgtgtggtggtgtgtggtgtgtgagtgtggtggtgtgggtgtggtggtgtgtggtgtgtgagtgtggtggtgtgggtgtggtggtgtgtggtgtgtggtggtgtggatgtgtggtgtgtggtgtggtggtgtgtggtgtgggtttgtgggtgtgttgctgctcaggcacttaggctgttcctgttgcctctccctggctctgcccgctcccatacagggcctttgcttatgcagcaacttcagccagagcactgcctcctccctcctagtgacctgcccctcacccctcagattgcggctctagcatcatttcaccagggcagctttctcagagcttcatgtctctgtcacacttctcactttgcgtgtcctagcaaccttgtacctctctttttgtagcatttttcacagttgtcacttcgcatgtgcatctgcaatgatcgagtgaatgtctgccttccttaataaaccacgagccccgtgagtgtaggggtcacacccattttgctcgccattgtctctccaatgtgagcagagtacttcatacctgagaaacctggtcaatatgcgttgagtggatgagtgaaggagtggatggatgcgagtgtgcacatggtgtgtgttggttgtgtgagtgtgtggtgctcctctggtcctagctgcagtgctcttggtgc

SEQ ID NO: 10338 - DNA, 1377 bp, Artificial sequence
  DNA replication origin
ttcatcagctgaaacgaaaactcccactgtccaggctaagagaccagggtcagggatgggatcccaaactttgaggtggaagatggagaaagggtgggggaggagggggggagggaggaggaggaaggaggagagggaggaggaaggaggaggaggaagaaggaggaagaaggaggaggaggaaggaggaggagagaaggggaggaggaggagggaggaggaggaggaaggaggagagaagaggaggagggaagaggaggaggagggaagaggaggaggagggaagaggaggaggagggaagaggaggaggagggaagaggaggaggagggaagaggaggaggaggagggaagaggaggagagaagaggaggaagagggaagaagagggaaggggaagaggaggaggagggaggaagagggaaggggaagaggaggagggaggaggaggagggagggaggaggaggagggagggaggaggaaaggtggaggaggaggaagagcaaagggaagagtgaagaagaagaggaggaagaggaatggcaaagggaagagagagaagagggagaaggaagaagaggaggagattatgcacgacacttgttaaaattggtaagaaagactttatttaaggggggctactgcaacgggggtttgcataggggagagagatgggctcaactccaatataaggacaagtggacatgtatagctaaggagcaggtaggagtctggtggaaggaaaattactaggaggaaacatcaaggctagggggatactagccagacccactcaacaggcttcttgctaaaactggactaactaggccaaagtcagggcccaaagtcagggcctagtcaaaaagaggcctcagaggagcctgactcaagtttggctaaggagagcgtgtttgtcggtgataataaaaataatagcatttagcaggtattgagcctttatgtgccaagcactgtgctagggacttttgcatagatctcatttaacccacagtaaggtaatctggggaggtgggtactatgatctcctccacggccaaggcaaggagtctgcggctgggagacatgatttgacttgcccacatcctgtgagcaggggatttgatcccagggagtctggttccagagcctgccggcaccagctgtgttctagggcctccgaggtgagagctataaagcacgtggtagatgcctagtaaatatgggtctcctccttaacacctctgaggaagctgttttttttgcaaacctggcctcttccccaaaccatcagccactctaccatacagccaactctgtggccggggctgacctgactgactgtttaacttctatcctgcatgctgcagttacgtcctca

SEQ ID NO: 10339 - DNA, 1031 bp, Artificial sequence
  DNA replication origin
cgcccgcgctccccgcgcgcctcctcgggctccacgcgtcttgccccgcagaggcagcctcctccaggagcggggccctgcacaccatggcccccgggtgggcaggggtcggcgccgccgtgcgcgcccgcctggcgctggccttggcgctggcgagcgtcctgagtgggcctccagccgtcgcctgccccaccaagtgtacctgctccgctgccagcgtggactgccacgggctgggcctccgcgcggttcctcggggcatcccccgcaacgctgagcgcctgtgagtacccctgccccaccccacgcgggccacccacctgggtcccaccgagggggccccaggcgccagatccgtcctttcccctcggcctccctggatgcagtctctattctcatcccttcctggatacgatccctcactctccgagctgggggtctgtaggcttggtcagatctggaaagagaggtctcgaaacccccagcgatgggcaaagagcagtgcctctccaggggtgagggttccagacgcagggcccgctgacagcttccaaggagtagctgaggagaggcgaggggaggcaagagcactgcagcctcaaggtcttagggtgagggtcaggggtctgcgctcgttaaaaaggggggcgggcgaaggagaaagctataggatgatgggccgtcaaggcgcggaggcgggagagagggcccgagactgttgacctgcttggagatcagaatgggccagccgctctctggctgcccttgcaaggaaagttgagagtgtgggtgaaggtttaacttctgaggaactggacagattcagagtgggtgctcgcaaaacccgctctgcctggagcgcagtctgggagatgccaagttgcagccccgggtgaattttttatggctcggttataaatgcctccccgaacgaaggggccggagaatggaaatgctgacagcccttcaaatgagaccgagcgttataatcttacaaaccgcactcagcctcagatcctgggcttggcagc

SEQ ID NO: 10340 - DNA, 1272 bp, Artificial sequence
  DNA replication origin
aataaaatctacaactctactatatattcacaggatgtggtcaagtagttgaaagtttccttgaaggaaaatgaggtagaagaaatcagaatagtattcttatgaaagaaaagagaagcgctctcaggagtatagttgtcactatgtgagtgtgtgtgcgagcatgcatgtacacgtgtgtgtgattgccggtgtataaatgggtgtgtgtgagcctgagtatgtgagagtgtgtgcgtggctgtgaatacgtaggcaccagtgtgtgtgtatatatatgcagggctcattcaggccttctcagtgtgaggggacctcaaggaaatctgggcaatacttcctccagttcctgccctttcctttcaaacaaacaaacaaaatcattcctacaagtatttatggagcctctaacgcacacgcccctccccactggcatctggaaaagctcagacctagccaatttaaagcgggcgctggaagaaagaaggcgctggggacagaagggatgcctcgtctgcgaatgacttttgcaaaaacacgttctcttctgtgatgctccaaacaacccagggaggtgaggccaggtaggactgtggccccggatttgagaaaacgaaggctcagagatgacacgattggcccagagtcacccagtcaggaagcagaaacccgaggatggaacaaggcattgtcaatccaggggtccaagtcgctgccatcactacttttaccagtccaccaagcgctgggtctgggcaaagcagggcaagtttccgggtaaggtttgccagcagtgacctcaacaacatggaccacggtgtgtgtgtgtgtgtagctgtggagtacattggtgtcaaccaaggctcttcaggcaaaattgtggatctctgccatgagtactaggtgcggtagggaagcggcttcgtgggcgacactgccatggtttggcgtccctagcagctgtgcgacctccagcaagtcgcttcacttctctgagctgttttcagacgaccccttggaagatcgtggacttaagtaaagaatatgagtagagtgctcagctcagtgcaaaaattaaaaaaaaaaaagtgtcaggagccttatccgtccttggatcttaacagtgaatgagtttcagtgtttctttccaggggccctgctggccgagcccctttccttccctggttccttctctctccctcctctactgcctcctccctccaggctctcggtcgctccagcaaagttcccaacttagtcgacatgacgcgc

SEQ ID NO: 10341 - DNA, 1279 bp, Artificial sequence
  DNA replication origin
tggcctctgctccctcgcctggggaggagacaaagtgggagtggtccccaagttttgcgtgaagtggggtggggtggcgtgtcttagcctacggggcaccagccttctagtgtgcccctgcccaacgggagggaggagggagcggggagccccggcgagggaggagagggcgggccctgagaggagtttgaaaagaggaaggaagtggggccctgcggcgcccagccaccccctgacggcttccccacgggaggacgcgaggccccggcccagccatggccccctggcgcaaagctgacaaggagcggcacggcgtgggtaggtgcgggccccagggcgcggcagggagcgggacaggtggcgggagagccgcgagcaggaggatgctgcggggccggcggcgcggggtgggcagggcgcgctgcctgcaggtcagagggcgcagcctgcggcggggcctcggggcgggaaagccgaggctcggggagaggacggcgggaccccaccccgcaggctaagcacagccctcgccctctcgcctgctgagggaaccttagacatttccgagatagggtcaagacctgcgcttgacaactcagttcttcgcgccaaactcggcgtccccaggagtgccccagctcgccgcgtgggagacttggccttgtagagggagctccactctcccctggctcagccttggcctgcccaccatgcatacttccaccccctccaaagcgacacccatttgcctgcttcccctgtctgttcctcctgggtcagatgactcctgatttggcagggcatccagagggcagctcaagcttgggggaatggggctggacggtggggttctctactcagccccccagagcctctggggaaaaaggctcccgccaggtggtcttagggtaaccaagaagctagcttcgtcagcctcagccatctaaactcccagaagcctctgcctggagctcaggggcggaagtggtggctgggggaagggaggcctcaggtgctgctactctaagtgtcatccgtggtgcaatctccatggactcactgtggtttttaaacttaaatatcaaataaaaagtcactctggagcttcctacacaggcggataccagacaccatctcagagataaatatttcgcaggtgaggcattggaagacccaaacacccagagggatttgatgcagggggtccccaggccactgtttgggaaacactgccctggagagatcagcagttatccactcaattactgggtaccgggca

SEQ ID NO: 10342 - DNA, 1094 bp, Artificial sequence
  DNA replication origin
agtgagctgagatcacgccactgtactccagcctggcgacagagcaagactccatctcaaaaaaaaaagaaagaaaggggtgaatttcaatgtaaggtggtcatggtgcatatctgtagtctcagctactggggaagctgaggtgggaggatcttttcagcccaggaatttgaggctacagtgagctatgatcgcacctattaatagccagtgcactccagcctgagcaacacagtgagatccccatctctaaaaaacaacaacaacaacaataaaaaaaaaaaaaaaaaaggaaaaggaaaaagttaagagcagggtggtaaatacccaccaagaggaagtcggggtgccgcaggagtcccttggagcagcatgcatccctgatatgtttctgtggtggtgtgagtgtgaaggctggtggctaagggagcctcctcaagggcagggttgtctattgtgagcttggaagagagtaggagccagcgggggccggggggcagggggcgttcgggtgggcacaagtggggagatgggagaagggaagtcacttcaggacacagtaggtacaaaggcctccaagtatggagataagaggaagcagggctcttttgtggaactgatagaagttcagacttcctagagggtcgaacttactcggggcagggggagaaaagaagtaagtttggagaaaggtgggtgagagctcggtcactgtagcaggaagtttggacttaaccctaagagcagtggaagcctccagtgggttttaggggaggagaaactgggcggagtggctcatgcctgtaatcccagcactttgggaggccgaggcaggtgaatcacctgaggtcaggagttcgagaccagcctggccaacatggcgaagctctgcctctacaaaaaatacaaaaattagctgggcgtggtcctgtaatcccagttactcgggagggctgaggcatgagaattgcttgagcctgggaggcagaggttgcagtgagccgagatcgttccattgactccagcctgggcaacagagcaagacttcgtctcaaaaaaaaaaaaaaaaaaaaagtttaggggaggagaaggta

SEQ ID NO: 10343 - DNA, 2469 bp, Artificial sequence
  DNA replication origin
gtctctgctatattatctgtttttagcctttcaaatttaaccccaaaagcaagtcacctgtgtgcttgcctttctctaatcatttaaatcagaaactacggaaaaacaacaacaaaaattgcatccaattcttcatccagaaataataattggcagtttgatatttatgtttctagatttcatatacaattataaatacatatttgtactaaaaaaaaatctcatggcattttgcaacctgtttctccaaataatatcatgagaacataaacatcttttcatatcattagttatttttccagaatctatttttcatagttgcataatattacatcatttggatgatacactatttagccaatcccctactgttgggcatttagattagttacaatttttcaccgctataaacaatgctgtggtgggcatccctgtggctaattctttgctctgttgaattttgtaagataagctttgagaagtgaaattgctaggttaattgtaaggctttgagtctgtactaggggactccaatgtgactgctctttgaaaagtcagggctccaccttcagcaagccaggcctcctcatagagaaactgtaccaaacaaaaattctgcctctggcttggctctgcaaagtgtgccttactctaagcctcatctggacagccagagcctttcagagagtcacatttcatcactgttttatggtggggacaggttcctctgggcctaacatgaccactcctacccagttacctggaactcatcctctgggcaccaatatgctgaaaatgaagtttattcagtctcattcatgtttgccacatgtgtccccacataaccatgaaagaggagcagagaggggaagaattctttggggagcatcctctccagttgggacagtcagtgacctctttctcttgcctcaaagaaagtagggcatgcaggaagtgggaggaagctggatgggaagaagaaggaggcaagcgggagcgaggtggtgaccagaggggctgaccccaacttttctcccatctgcttcatcacagagagaagtctcagctgctaccagaacctggtcaggggccagcgcctaccctctgagtagggagaccaccacccatggcccaagctgagggcctgacctggggcaccaggggaggctgggacaagatggaggatggagcccagataggagaggagctggctgagccacagggagaagccagcaggggctgcagctcctgcttctggagcctgagggagagagagagaggacgcctggggcatggtgagtcgggcgctctcctcgtgccctggctgcctccatgccaggggcctctgcgagctgaaacatgaaaggtctttggatcagagaggagctgggagcctgcttgccctgcagctggaaagaaacttgaattgttcaagttctctcacttttccctgaagactgattccccattttccccttttgctattatttttaagagccttgctgctctccaggcaaattctcaggttctctgcccgtctgcagcatgtatgcatatgcgtgtgtgtgtgcgtgcgtgtgtgcgcgtgcgtgcgtgggcgtgtgcgcgtgtgtgggcgtgcgcgtgtgcgtgtgcgcgtgtgtgcgtgtgcgcgtacgcgtgtgtgcgtgtatgtgtgtgttgggggaggctgcggtgcctatgactggttgcccccttgaaccccaccagaagccagcccaggcccctctgcgccctcttctgagtctccagggccggttctctcctggcaactccagaaagtgcctcctcacctcaaaagaccaagaaacagggtttctgataaagtgtcccacccagtcccggctggggcagttggttagagaatgaggggacattggggggaagaggagggagaatgaggggatgggaagagaggcgcagagaaaatgagaggtggagagaaagggacagagtgaaagagaaggagaaaggggagaagccgggaagacaatgagaatggaagcgagagatggaagtggaaagaagaactggaagcctagagacagagggagagagggagagagggagggggagagagagagagagagagagagaacgggaatgagcagctgtgatgtggccagatcagttcatagaaaagaaacacagttcagagcagaagggaggaaagaaaataagaaggaaagaaacagagaatgagatgcagagaggagaggagggagagagagaaggaaaccgaggtgggtagaaaaatgtgacgaaagggaaggacagaaaaaaaaatgagagaagtaagacagaataaaggagaaaaagaagaagggaatcatgaggatggtgagaaaagacaggagagaaagccgggagagaggatagaggggcgttctcgctgcgctgcgtgtcagctctggtaagccgtctagcatgtcattagtggggacctga

SEQ ID NO: 10344 - DNA, 926 bp, Artificial sequence
  DNA replication origin
gaagtaagacagaataaaggagaaaaagaagaagggaatcatgaggatggtgagaaaagacaggagagaaagccgggagagaggatagaggggcgttctcgctgcgctgcgtgtcagctctggtaagccgtctagcatgtcattagtggggacctgaggcgccagcgggaaagtcccctccccgtgggctggaggctgagggagggcgggccctgggctgggatccacaggcaggtggccgcccctgggtggggccgcccggccaagccctaggggtataagtgggaggccgggcctgctgagcacctgtcaggggcagctccggggtgcaggtgccaggcaggtggctccggccagcccagccccagcatgagctccttcgacctgccggcgccctccccacctcgctgcagcccccagttccccagcatcggccaggagccccccgagatgaacctctactatgagaacttcttccacccacagggcgtgcccagccctcagcggccctccttcgaggggggcggcgagtatggggccacccccaacccctacctctggttcaacgggcccaccatgaccccgccaccctacctgcccggccccaacgccagccccttcctgccccaggcctatggagtgcagaggccgctgctgcccagcgtgtcggggcttggggggagcgacctgggctggctgcccatcccctcgcaggaggagctgatgaagctggtgcggccaccctattcctactcggctctcatcgccatggccatccacggggcacccgacaagcgcctcactctcagccagatctaccagtacgtggccgacaacttccccttctacaacaagagcaaggccggctggcagaactccatccgccacaacctgtcgctcaacgactgcttcaagaaggtgccccg

SEQ ID NO: 10345 - DNA, 1152 bp, Artificial sequence
  DNA replication origin
agccctcagcggccctccttcgaggggggcggcgagtatggggccacccccaacccctacctctggttcaacgggcccaccatgaccccgccaccctacctgcccggccccaacgccagccccttcctgccccaggcctatggagtgcagaggccgctgctgcccagcgtgtcggggcttggggggagcgacctgggctggctgcccatcccctcgcaggaggagctgatgaagctggtgcggccaccctattcctactcggctctcatcgccatggccatccacggggcacccgacaagcgcctcactctcagccagatctaccagtacgtggccgacaacttccccttctacaacaagagcaaggccggctggcagaactccatccgccacaacctgtcgctcaacgactgcttcaagaaggtgccccgcgacgaggacgacccgggtaaggaggctttgagtgtggggggtgtccccaaggaagactcacttccttcctccccaagaccccattctagaaagttctgactagggctgtgccccccaagactgggggatgctaccaggcaggacagaggggagctcagcagtgaaggagagcatgggcctgggggaagatttgggtttcagccctggctgtgctcctgcccagtcagtgacctctggcaggttagacctcagagcctcagttccctcatcggaaaaccagggatagtgacagcatctgctttgcaggctgcagtggaggtgatgagataatgtacacaaggttttaggtgttatcaagcgcttaatcgcctgcagtaattacgattcatctgcatctccagcacccagcacatagaaagtctttggtgaatgaatgactggaccaaccaaagcccaagggcatcccaagactgccaggaagaggatctgacctgggttaaacagccactaatggcccattttgctgcctgccttgtttctacttaggtaacctcctttaacccgaagacacccctgcagggtagctcttatgaaacccattctacagattaggaaaataacactcagaggtgacacagaatgaagtgatagtgatggagcttgaatttgaactcagttttctctaacatcagaaattgtgagcttttccttttcaacgat

SEQ ID NO: 10346 - DNA, 1486 bp, Artificial sequence
  DNA replication origin
gagctggcaagggagccccgttagtgtcctgtgtcctggccgtgtcaggtggtgctggctgcagcagccactcccattctgtcacctgtttattcaacaatgtgcactgagggccttctaagtgctgggaacttagaagtgctcaaggtgcatcaatgagcaaaacaaagatccctgctagtggagaggaaactttaaggaggtgaaatgtgctgcatatgcaccatgcacatgcagagtggggggctggggagggggatgggagtgcaggggggggctgggggggatgggagtgcaggggtgggggctggcgagggggatgggagtgcaggggttgggggcgggggggatgggagtgcaggggtggggggctggggggatgggagtgcaggggtggggggctggtgagggggatgggagtgcaggggtggggggctgggggggatgggagtgcaggggtgggatgcggttgccatttaaaatgatcaggcctcactgaagaggtgacatttcagtaatgacttgagcgaggtgggactgaggctcacctcaacgccctcctcctacagagtttgacagggctctgaccagctcacaaggctgctttggatcttgaaagaacctcctgctctctgcggtgttgcctctcaccagtatctctagcagccaggctggaggctgccggggctcgaattgggtgaggaaggaaatgtcaaaccgcaggcctcagcagaggagcagcaaagagctgagtgggggcagaacaggtcctggcagttggcttgcagcaaagtgtgggctcccagggtcctcctgctttaaggggctacagaaagcaccttccaagcctgtgggaccactgccagggtctggtggacggtgcaacagtgatggtgggcatagcagggaggtggttgctatggctattgctaggtgcaaaccttcaaattacaccctacccccagaggaccaagtgacagtgagtggagggaggtgactcattctcccttcaccccataaacccctggcctcgctcaggaccagagcaagaagtgatgggggctgggcagccatagacagcagtcctctctgcttgcctttgtttaagggactagctggccctggaaatgggctgaacctccccacaggaagccaggcccgtgtaggaaggcagcattctacaatgacctaggttccagcccagctgcatccctaacttacagcatggtgggggccagtcttcatcttctcagtctaaggtctctcctggtaatgtacaaggtacagggcctgcaggcacagacagtctaactacaatgtctggccccaagggtggcgcccactgtgtgatctcagacaaggcagctgccctcacttggccccagattccttatcagcacaatacaggggttaaacctgattagggaatccctgatgggcctgatcatcatgattacttagctgtacctgttgcaaacactgatca

SEQ ID NO: 10347 - DNA, 998 bp, Artificial sequence
  DNA replication origin
cagggctagccgctccccgcgagccttcggaaccgcttccccgcgcgaggacccggcccggcggttccctcgcccagggccgaggacggtgccctgaagcctgcctggcactggacacggggccagagcggccgcccggccgaggctgccgagccagcgccgcgtgcggtgcgggagccgccgtccgcccgcccctcctgccgcacactcggctcccctccctgcgctcgggctgggtctcggagggccgagtaccaatcatgaatgaacagagcccggaccgcgcggcgcggagccacagcgcgcccgcctgctgcctgctgcctgctgccagcgctcggggcgagagtcggagcggcggagggggcggcggagggggcggcgggcgggcaactacggaggggcggggcgggggcgagggctgcacggtgggggcgggggacgcccagccctgcgccctcacccctgcgcaccctcatctgccggggtatgtgcgggagccccgggagcatgtaaccctaagagacagacccggggccaggcacctggctgatgggtgaggttcagggggcagtagattggccccagggagactgtgtgtgtgtatgtgtgtgtgtgtgtgtgtgtgtgtgtgtgtgtgtgtgtgatgtgcgtgcgtgcgtgtgtgtgtgtgtgtgtccctgtgtgtggtgcattgtgatttcattcgacttcaagggaaatcttatttaacccactgcctgaactcatggggagggggaaagtctgccccacccagaaaggggtgaaaaacacatccaaatgggtggtcatgggaagaaggtgccgtcctgctccgcgggtccttgagggttctgcagaatcctcctatggcagggcccaccttctagtgacagggagttggggaggagaaaggagccctcagcccctctgggcccttacactctcatttttctttttcttttttttttttttttgagacggagtctcgctctgtt

SEQ ID NO: 10348 - DNA, 1727 bp, Artificial sequence
  DNA replication origin
agggttacatgctcccggggctcccgcacataccccggcagatgagggtgcgcaggggtgagggcgcagggctgggcgtcccccgcccccaccgtgcagccctcgcccccgccccgcccctccgtagttgcccgcccgccgccccctccgccgccccctccgccgctccgactctcgccccgagcgctggcagcaggcagcaggcagcaggcgggcgcgctgtggctccgcgccgcgcggtccgggctctgttcattcatgattggtactcggccctccgagacccagcccgagcgcagggaggggagccgagtgtgcggcaggaggggcgggcggacggcggctcccgcaccgcacgcggcgctggctcggcagcctcggccgggcggccgctctggccccgtgtccagtgccaggcaggcttcagggcaccgtcctcggccctgggcgagggaaccgccgggccgggtcctcgcgcggggaagcggttccgaaggctcgcggggagcggctagccctgagtccctgcatgtgcggggctgaagaaggaagccagaagcctcctagcctcgcctccacgcttgctgaataccaagctgcaggcgagctgccgggcgcttttctctcctccaattcagagtagacaaaccacggggatttctttccagggtaggggaggggccgggcccggggtcccaactcgcactcaagtcttcgctgccatgggggccgtcatgggcaccttctcatctctgcaaaccaaacaaaggcgaccctcgaaaggtaagccaccttcttccttttgttcccctgtctgggcttgggggtgctaggcgccgaggtgggctgtgccacctgcctcccttagtccggactctcctctccacgaggagcccggacaggtgcttgtatccaaaggagagagaaatcggcgggagggctggtgtgaacacccagaggagggagccggagtggacgtctgccccagcggcaactggacccctctggggcaccaggtgtcgggactctcctcctggggaaatctctgagagccgaaggaagcggcatgttcacaggtgggggtgaccggattctctggtggaagtgtggtgaagctcttcccattcccatgacagctggcgtttgagcactcagtgagggtgctgccacactcccacactcctcctaggcggctatgccaggtgcagacctgcgagtcccttcatcaggaagagtgctctgtctgcacccccaaaacctctgcaagccaaaaggaatcagctgctgccaggggtaaaactcccaggcctcatgtcctggtggctccgggagtcaggaggagcaaccgtgaagggctggctgcgagctgagcttacatcaaggattaaaaagcataatatcgtggagtctcttctgcctggacgctgttccttcaccacctgtccccagccgaggcatggctgatctcaccatccgtgggagagtcctcaaatgggtccaggtgaagttggaaccagtgtgttgggccctggaggacaatgcaggtctccttaccagcagttcaaaagttagtggttggaataaagagactggaagcagttaggaaacgggaaatgatgggttttgttttgtttaatgttcaaatgtcactacgagtggtaagattttaagcagcttgacacttaaacattcaaattctaccatcagagcccccatcctggatacag

SEQ ID NO: 10349 - DNA, 685 bp, Artificial sequence
  DNA replication origin
ctctctgaacctgagtttcttcatctgtaagtgggaacgctaatgctgtgctgagggttccatgggacaaccatgtaaaagcacccagcacgcacccagcaggcagcaggtcctgcacagcgttccctcgcgtgggggtgggttggggcttgagcacgggttgaacctggaagaggccatttccctcccttctccccgaggaataattgtgaattcctgggtctcagaggaaacatccgctttggtggtcagaaaggacatcctcctttgagcagggggagagcagagggaagggggttgcgagggtcacgccttccccaggcattctcggggtctctccagcaaggatggaggcggccaggggcttgggcggtgtggggcgccacctggcgtccagaagaggtaagacaggcggagcgggaccctccgaagtgggaggaggacgctggtcaggggaggaggggaccgcgagagcgagagcggacattctaccaaacacatggacaacacagaagatgaggaaaatgagcagggcagctagtcataggagcaaattttaaaaattaagtgactgaggtagtcagggggcctcactgagaagtggcttggagtaagacctgaagttggggactggatatgcagatgtctgggaggagagcttttcaggaagaagaatcagccagtg

SEQ ID NO: 10350 - DNA, 1516 bp, Artificial sequence
  DNA replication origin
gatgaggaaaatgagcagggcagctagtcataggagcaaattttaaaaattaagtgactgaggtagtcagggggcctcactgagaagtggcttggagtaagacctgaagttggggactggatatgcagatgtctgggaggagagcttttcaggaagaagaatcagccagtgcagaggcctatggcagacccaagcaggaggcaaaagaaacgcagaggctttccaggatggaaaatgaagaatcagccagtgcagaggaatgtgcctggatgtgttccaggaatgtttcagaatgagctaaaaggccagggacagagaactaagaggagaggagaggtcagagagatggcggtgggcggaaggagggggcggggcggaggagggggcgagggggcgggggggcggagggggggacggaggggggggcggggggcggggcggaggggggatggggcggggcggggtgtggctgtgcgtctggataagggttgtggcttttatgctgcacgagaaggagagccattggagagcttggggcagaaacaagagctgatgacattttaatccctctggctgctgtgctggggtagactgtcagggccaagggcagagtgtgaaaagcgcccaagaggcttctacaagaatctagtgggagatgctgcggctctggccaggttagtggcagtgccagtggtgagagggatgtggttctgcgggtgttgtgaaaatggagccagcgggatttgttgacagaccaaagttgaggtgagacagagactccggaatgactgcagggttattggtctgagcagggttattggtctgagcagataaccagatggagtcaccactaacttagatggagaaggctggtagagtgaggaaatatcgggaacttatgttcggacttgttaagtttgagatggctgggagatatctaagtggagagggcaaggaataaaatgcttcctaaactccagcatccattcagtcccctggagagcttgttaaaccggatggatgggtgccacgcccacccctgcacccctgagttgcaataggcccaaaatgattcaataggcccaacatggggcccaaggttctacatttccaacagcttcccaagtgatgccaatgctgccagactgagaaccacacttcgagtagcaccaaagtaggcaactggatgtttgaggctggcattcaaaagagagatcctggcaagagatagaattttggagtcattggcacggaaatccacaaaacgacatgagctctcccagggagtgtgtgtgtgtaaagagggaagaaaagagcattgagtcccgagccccaggctcttcaatggtaagaggttggcagattaggaaggaccagcaaagactgggatgggaaaccactgaagcaagaggaaggccaggcagatgtgtcctgaaagccaaaaagagaaaggtcatcattaatatgatacattttgcaatttgtttatatgtaagaggagattaatagctcatag

SEQ ID NO: 10351 - DNA, 1055 bp, Artificial sequence
  DNA replication origin
atggatggatggatgcatgagtggatggatggatggatggatggatggatggatggatggatggatggatacatggaggaatgggtgggtggatggatgggtgggtggatgggtggatggatggatgggtggatggataggtggatgggtgagtggatgggtgggtggatgggtggatgggtggatggataagtggatgggtgagtgggtgggtgggtggatggatggatggatggacgggtgggtgaatggatggatggatggatggatggatggatggatggatgcatgagtggatggatggatggatggatggatgggcggatggaaggatggatggatggatggatggatggatagatgaatggatggattggtggatggatggatggatggattgttggatggatgaatggatggatgggtggatgcatggatgagtggatggatagatgaatgggtggatggatggaaagatgagtgggtgggtgggtgggtgggtggatggatggatggatggacagacaggtggataggtggatggatgagtgggtagatggaatgatggatggatcgatggatggatggatgggtggatggatgggtgggtgaatggatgaatggatggatggatggatagatggatggatggatggatggatggagagatgtttctcttgtgtcatcctggcagttttatctgacacttcccctctcattcttacagcttttctagctcctgacaccatacccagtattttaaccacttaccttgccagctattttcctggctcaaaccatgtgatgtagataataagagtcaagtactctgcatggggccttggatttggatgttggggagcatcctggatccttgcctaggtctggacatctctcctgtcctgccctcccagctttgtcctagcatcggctccactcccaacttcaggacctcatggtgatgtgcagttctaatatacctaacaagatatcagtccaggctaccaaaccacatgttggtcacccctgaaccagctaaacaagatgtttgcttc

SEQ ID NO: 10352 - DNA, 1423 bp, Artificial sequence
  DNA replication origin
ggttaattaaatcctgttgtggggtttgagggccggattctaatttttggagttttatttaatgtagggagcggattgggtaataaaatgtattttgagaataagacggccttttgaccttttagggtctagggctgtaaagtgtctcagggttgctgccaaacgagccatgagctgggctggatttttatatttgatgaaaaagagcctaaacactatctgatttgggataaggaaaaaggagcattaaccttgactatgcctttagctccagccacctttttaagagtaaattgctggtcaggtgggggagggctagtcacagaacgaaactgtaagccggaccgggtgtgaggagggaggtgataaaaggattatagggtggaggagcagaggctaaggaagaattgggacctagctcagcctggcgaggtggggagaggtcagatgggtctgtagaaaaggaaggttagaaagactcacgacgcttggggttgggactgaggggacaggtgggagggaaagaaggaagagttgggacgagttgcactgggcacagagactagggagggaccgatatgtgaaagaatgcctggacatcaggcacctcagaccgtttgcccattttacgacaagaattatttagatcttgcaggatggaaaaattgaaagtgccattttcttgctattggaactactgttgagtttgtattggggtcaagcggcattgcagaagaaaataaggcatttaggttttaggtcaggtgtgagttgaagaggttttaagtttttgagaacacaggccaagggagaagggggaatggagggtggaaggttgcccatagtgaaggaagcaagcctagagaaaagagagagtagaggcacggagggaaggggttcgggggttcttacgttccagaaaagtgggaaagaggttggggcatggatataaggggttggggcgcagagataagaggttggggcatggaaataagggatggggtgcagagataagaggttagggcgtggaaataaggggtcggggcatggaaataagtgattggggtgcagagataagaggtcggggcatggaaataagggatggggtacagagataagaggttggggcatggaaataagggatcagggcacagagataagaggttggggtgcagaaataagggattggggtgcagagatatgaggttggggtacttgcccctctagaaaagcgggacttgccactaagagtgaaggagaaggggttgggggtttcttgcccccccagaaaggtggagaaggggtagagacagagaaggggttggggtacttgccccttccccagaaaagtgggacttgccgctaagggtgaaggaccaaggcaggcgtccctgagtggtctgacacctctgaaacatgggtg

SEQ ID NO: 10353 - DNA, 1374 bp, Artificial sequence
  DNA replication origin
tggtggtcctgaccagcagttctcaaccaaggatgtacatgagagtcacctggggagctgttttattgttttgtttctttgtttatttttgatattcaaaacaaagatacacttgtcctgtcccagtcctcctcatgcccagggttgcactctcctggttgttacgcctggcccgaatcatttccagggctcatttcagccccacccttcactcctgagctcccttggattcattcactcacctcccaattttccctccgtgtgccagatgccagtgttaaggaccggggctcagacagggctctcagtcaaggagtgagggacagggaatgaacatgccatggcacagggcaggacctgctgaaagacagacaggcccagcagcgtagagaagcggtgagcagctgctgtcaaggggagggagtatggggctgaggcaggtgtgtgatgggtgtggggaaggaggggtggtggggcacatctgtgtatgtgagtggtggtatttgggagggaatacgggggtgtgtgcatgtggaggggaaggggtttatgggtgtacgtgcatatgttatatgcgtgtgactgaatagtgtatatggtacgtgtgtcttgtctgtgtgtacaactacatgtctatgtgaagaatctgggtggtgtgtgtgtctgtgcccttgtatgtgcatgtgtttgtgtgtgtgtatacaaggtatgtgtgtttacagagtatcttagtgcacatgtgtgtgtagagggccaggcagcaagaaggcctcccagagaggacaatctttggcctggctcttggaggaggaggaacagttcagtaagtggaaaaagaagggagaggccttccaggaagagggacaggcaggcagggtgtgtacaggcagaggtgtgactgagactggcatgtgtggggcatggtggcaggggggtgagggggtggcgaggagatgggggcacggatgggagaaggtgaggactcagtttgcgggggcacactaagtgtgcctcactggagccctcagcgcccctttagaatttgaggtgggcttgccagagttttgggaagatggcagcagcagcagggcagcacctctgggaagtcccgggaagaggcctggctaggccaagtcagggccacacctgagctggctgcaggactgtttacaaagcaaatgcatactggagggattagcaacctgagttcttggccagctgaggtgggtcacacctgtaatctctgcactttgggagtccgaagtggaagggtctgtgcaaatcaagcctctccgccaaatcacctgccggcttcccacccacccccaatccccacctgaagccaggtgtctctaatctctactcctgagcatg

SEQ ID NO: 10354 - DNA, 869 bp, Artificial sequence
  DNA replication origin
gcaccttccccgggacgagccctgggcctgtcccccgccccctccacccgccgcctccaacccaggctcggccgcccctttctcgggctccggcccgggcctggggtgtgcagcccagaccagtgtcccggtccccggctaggggcagaggcaggggctgggactccggggacaccggcccacggccctgcggcctccgccgctgtcctcggccctcggtctccagacgcgtcccgccgggttcccagcgtggcggagcgcgggcccgcggcgcagagcacactgacctggaagtgcagcgccatcttcccaggaggcggcgccggccagccggccggtcggcacccagcgcccgaggggagggagcagaggcgggcgccgcggaagccccagacgcccgcggggtccctgcgccgctcgtccttcgcagcctcagccaggcttcgcgtccgcattcgaagcgctggaggggcggggctgggagggacggggcggggctgggagggacggggcggggcgacggaggcggtgcacggggcggggccgataggggcgtgtcctccgggaatctcaaccgtcccttgcgctcaagtttcaaccggcgtgtgttggtgggtcatgacctccaacctctgccctttgacacaactaccacgacccacccgtcagccgtggaccctgactcataagtcttccaaaggctctcttgacccctgaccctcaaaatacaactatcgcccatggctcccgacacctgcatctccacagattttcttgtctcctaacagccaggaaccacagacacacacagccataacctttgactcccacatgccagctgttgcccttgacccctgactcccagggcc

SEQ ID NO: 10355 - DNA, 1245 bp, Artificial sequence
  DNA replication origin
ctgcccctagccggggaccgggacactggtctgggctgcacaccccaggcccgggccggagcccgagaaaggggcggccgagcctgggttggaggcggcgggtggagggggcgggggacaggcccagggctcgtcccggggaaggtgcggacgccggcagcacgctcgctgaccgcggctttagtgttgccagggcaggtgggagtcccagctgggccggctttggcgcgcctcgcgcggctgccgagcggtggagcagccttcccgccttcccgccgcgtcgccggcgcggctctatcgtcagcctccctccacacagttgagccccagccggagcgggggcttgggatccaccgaaggagcggcggcagcggttggactttaattggccagaggagacaggggctgcgtctggggggagttgcgagggagggctacgcggccgcctcttcggaggaggaaacccgggccgggcgcgggcgcgggcgcggacgcgaggatcgcagaggctacgaagatgggacgcgtgcttgtatatcctcgggctgctctgacatccccgttcagttattcagcaaacatttattatctccccactgtgtctcaagcattgtggaaagttctggggataaaggatgacatcttactatcctcgccctcatacagttaacagagaattacagtacaagtgaaaaatgtatggtagaaatagtcacagtatcatagcacagaaaagggggtagccagccaaatgtgtatgttgagaaggagtgaagcagagctgctatgctcttagctgagagatgctttaagattctttgagcctccattcttccatttattaattattgagcgcctactatgctaggcgctgaagatacaacagctctgaacaaaactatggtttctactctcagggaacttgcagtctactggtccttgaaagagtcgtagttgtttgccaggtgaagaggaagggaaggatatggaggtagaaggacgtgtgagccaaggcaaagaattgtggaagaacatggtgtactgcagaaagttgagtctggttgggacaaagggatgggatcaggggaggcagtgggtggcaggagatgaccccagggagggaagggaatttcataatatggtgacagtgtatctaagaatctcattccccttgtagactcttttgaaccccctgtgatcacactgatttataacttggctgatttattgattcttctaaagggt

SEQ ID NO: 10356 - DNA, 868 bp, Artificial sequence
  DNA replication origin
tgccgcctgcaccgggggagggagagggacagtaccgtcatgcacccggcaccgcggggccgccggcggggccccggccctcccgggagccgaggccatccgggagcctcgaggcgcagaacccgtctgcctcccagcccgcgctttacgcccgaggctcttatatccagggagccggttaggatcatttgtttttgttgtgtgccagagggtctccaggaggggactctgcccgccgcccacctgcacgcccgggtattgtggcttcaccaacaataaagattgttcctttcgccagatagcaagggcagggcctatgtgtaactgacttggccctgcgggaaccggggtcgctggggtccgcgggtgagcaggctggctctgcaccacccgcacgacgcccgggggctgggtcagtctcatccagttcgcccagggcctgtcttgaacccctttccagacgcgatcgcttcgccgtttacgggttgaatcaaaacagagatcggataaaaacgcggctggaatggagacgcggagatggggggagaggaaaccggcgtccacgaggattgttgaaaatccgagagggcgggctggaagaaggaggagaaggagagtgcgagaggcccgtgtgtgtgcgcgtgtgtgtgtgtgtgtgtgtgcctgtgtgtttggggcgggggtgggtgagaggaaatcaagtgaacgcaggagaccgtacaaaacacggggagagagttggaggggctcacgaaagatggggatggggatggaggagaaaccaaggcgtgggagaccacgatggagagagaagcacaggccagcgagaagggtgaaaggaagaggtacaatctgcgaaggcggggtg

SEQ ID NO: 10357 - DNA, 1164 bp, Artificial sequence
  DNA replication origin
acaattaagaaaaaaaaccccgctaggccttattatggagcaacagaataaaacggaacggaagggagctggaccgcgacacccgtctctgaggaaagcgcttctccgccagcaaagtcaagggtccctctagtcctcagccgaagggccaacctttcccaacccgatgacggcgttcatcaggctttttattggagaaaataaaagcatttcaggaaaacactcacggaagagacccgaagttctgagtcaccctagtccctccctgggtgtctttatgtcctgaaaggcgcagatcccaggctagctgggcttggaggtggaggtgacggcgggagcgctgggggttcaaggtgtttctcaggcgccctccccttcctccagccctgcaggtgaatacagtcccgcagcccgcatagaacgaaggctcggagcacgggaacctgcagggtggcgcacggctccggctccgagggaggcagtgggatgaggcgggtgggggtgctcgtggagtgggaggggtgctctgggacgcggccccgaaagtgttttgccttaggagctactgggagctgggcctggaagagggagagagggagtcagggagaaaggaaagaagagagagagagagagagagagagagagagagagagagaaagacagatacataaaggcaaagagattcaagaaacaagaaagggaagacaaaaggacaagaggaccgtggagaggagggagacaaagaaacccagagacacacagaggccaagagtcagaactggggagagaagaaggaggagacgacggaacaagaaaaggctgagggcaatgaaaagcaatagaggacgaactatactgggaaacatcataaatctgtaaagaaaaggagaaagatatagtaaaacagagacccagagtaacatacagaggagaaaacagggaacattgtagagaaagaaacggagaggccagaaagtaagttttcagaagactgaaagcgagaatgataaaagagggggaaaaatcaaagaactagaggaagtgttcacgggctttgtgtgttagatgtgactggaaggggtcagccgctccaaacctcgcaattctgaaacttccagctcttgagccacggtggagctgggtggaccccggccacgacgctac

SEQ ID NO: 10358 - DNA, 774 bp, Artificial sequence
  DNA replication origin
ccttcctaacaaagaataagccgcaattcactctctctggcacctgaactttggggtaacgattaactgcgatccgaagccttcaggcaagtaaaaaattcctgaagtgattacgcctgtttggaggcttgcagggcactaggggatggggaaaggtgaatcgaggtgctctctggctcattcgcagccggctaacccgccatatcttacacagctaagggctgccgacgccattttgcagggtgggctgcgcagactcttggcgggaggccggcgcgcttgagcgggagaggacgtggaagggttggaggtggggagtgcgcgttacgactggaaagcacgcgtgcgcacaggcgacagcagcggaggggtggggccagtgtacgagtgcgcgtgctcggtgggagcccgcggagtacctggaaggaggtgggggcgaggtagaaaggagtggggttgaaaagcgcttgcgcaggacggctacggtacgggggtgggagggcttcggagcacgcgcgcggaggcgggacttgggaagcgctcgcgagatcttcagggtctatatataagcgcggggagcctgcgtcctttccctggtgtgattccgtcctgcgcggttgttctctggagcagcgttcttttatctccgtccgccttctctcctacctaagtgcgtgccgccacccgatggaagattcgatggacatggacatgagccccctgaggccccagaactatcttttcggtaactgctggggggagctggagcgaggc

SEQ ID NO: 10359 - DNA, 1538 bp, Artificial sequence
  DNA replication origin
gtggggccagtgtacgagtgcgcgtgctcggtgggagcccgcggagtacctggaaggaggtgggggcgaggtagaaaggagtggggttgaaaagcgcttgcgcaggacggctacggtacgggggtgggagggcttcggagcacgcgcgcggaggcgggacttgggaagcgctcgcgagatcttcagggtctatatataagcgcggggagcctgcgtcctttccctggtgtgattccgtcctgcgcggttgttctctggagcagcgttcttttatctccgtccgccttctctcctacctaagtgcgtgccgccacccgatggaagattcgatggacatggacatgagccccctgaggccccagaactatcttttcggtaactgctggggggagctggagcgaggccgagcggggcctggtggcggtgagggtgggggtgaggggcgggaatccggctgcaaccgggtctggtggagaccgccagaccgacgggaggcctgagcgggtgggaagagctgcctgagccctggacctggagggattggagccgcggggggagccggtggcgtgaagggggaggagacgagcggcctgaagcgtctggggcgtgagcggtccgaggcccggggcctgaggtaaagtggaaccggccgcctggaagttcggcctttgccggggatacgtggcggagctccaggcgtggtttattttctaacggcggtggttcataggcttctgatgccaggccccgggttggtggtcctggaggctgggttcaccgggaagcatgggcctgcttgttggagcgggtagatgcacagcctggcgttattctggcctcagagcctggagctgccggacgtagacttacctcgcgtgcttcggccagttactgggggtggggaggcgcggcgcggcgtgaggaggccgcaaccgctgggagcacgtggttgccacgtggttgggggagggaggggggtgtgggcgctacatccgggactcaccggcgtgttgccactcgtgagccagggatgctgtggctctgttgaagtgggaaatgttaagaggctggtagcactagggttctggaggtctttgttcagtgcttacagcatgtactgtgatggcagctctcatttttttgagccccttttctgtctcactgcggtaggtggagctagccccactttgcagatgaggatactggtgcccagagataaactcacttaacgaaggttgtacttagtaaaggcaataagagactaaatctaaaccaagacgcttgactccgtagctgctgcttcgtgaatattaatgaggcttcgttttagggggacgtcctcgcatgccgccatttgtgcggcattgaccaaactgcttttctaaatacaagaaacacgtagagtgttcggtttgagtcagatcaagacctaagactattcgcagaattttgggagcaccacccccctcgacttgcggtagtcctgccccaaaaaggagagtcccacttgggtttttgatctcagtaggattaattgc

SEQ ID NO: 10360 - DNA, 905 bp, Artificial sequence
  DNA replication origin
cctactgggaagtgaggagcccctcagcccggccagccaccccgtccgggagatgggggggtcagcccccccacccggccagccgccccgtccgggagggaggtgggggggtaagccccccgcctggccggccgccccgtccgggagggaggtgggggggtcagccctccgcccggccagccgccccgtctgggaggtgaggggcgcctctgcccggccgcccctactgggaagtgaggagcccctctgcccggccagccgccccgtccgggagggaggtgggggggtcagccccccgcccggccggccgccctgtccgggagggaggtgggggggtcagccccccgcctggccagccgccccgtccgggagggaggtggggggggtcagcccccctgcccggccagccgccccgtccgggaggtgaggggcgcctctgcccagccgcccctactgggaagtgaggagcccctctgcccggccaccaccccgtctgggaggtgtgcccaacagctcattgagaacgggccaggatgacgatggcagctttgtggaatagaaaggcaggaaaggtggggaaaagattgagaaatcggatggttgccgtgtctgtgtagaaagaagtagacatgggagacttttcattttgttctgcactaagaaaaattcctctgccttgggatcctgttgatctgtgaccttacccccaaccctgtgctctctgaaacatgtgctgtgtccactcagggttaaatggattaagggcggtgcaagatgtgctttgttaaacagatgcttgaaggcagcatgctcgttaagagtcatcaccaatccctaatctcaagtaatcaggtacacaaacactgcggaaggccgcagggtcctctgcctaggaaaaccagaga

SEQ ID NO: 10361 - DNA, 1233 bp, Artificial sequence
  DNA replication origin
cccagtaggggcggccgggcagaggcgcccctcacctcccagacggggcggctggccgggcggagggctgacccccccacctccctcccggacggggcggccggccaggcggggggcttacccccccacctccctcccggacggggcggctggccgggtgggggggctgacccccccatctcccggacggggtggctggccgggctgaggggctcctcacttcccagtaggggcggccgggcagaggcaaccctcacctcccggacggggcggctggccgggcggggggctgacccccccacctccctcccggacggcacggctggccaggtggggggctgacccccccacctccctcccggatggcacggctggccggtcgggggggctgaccccccacctccctcccagatagggcggctggccgggcggggggttgacccccccccacctccctcccggacggggtggctgctgggcggagatgctcctcacttcccagatggggtggctgccgggcggagaggctcctcacttctcagacggggcagctgccgggcggaggggctcctcacttctcagacggggtggttgccaggcagagggtctcctcacttctcagacggggcggccaggcagagacgctcctcacctcccagacggggtctcggccgggcagaggcgctcctcacatcccagatggggcggcggggcagaggcgctccccacatctcagacgatgggcggccgggcagagacgctcctcacttcctagatgtgatggcggctgggaagaggcgctcctcacttcctagatgggatggcggccgggcggagacgctcctcactttccagactgggcagccaggcagaggggctcctcacattccagacgatgggcggccaggcagagacactcctcacttcccagacggggtggcggccgggcagaggctgcaatctcggcactttgggaggccaaggcaggcggctgggaggtgtaggttgtagtgagccgagatcacgccactgcactccagcctgggcaccattgagcactgagtgaacgagactctgtctgccctgatttccttttttgaactgacttagtactgtgcataaaagcaaactcccaagttactctttttttttttatttaaagagatgggtggcctactcttgcccaggttgaagtacagtggtatgatcatagctcactacagcctccagctg

SEQ ID NO: 10362 - DNA, 1602 bp, Artificial sequence
  DNA replication origin
tgagattggcaaatatactttgagcattgaaaaatactgcaagcattttagatagggtataaataattatatacccattccattcacaagtaataaaaaatagtaacaatatagaaaattggaagcatgattcttagccaggagatacttcaaactagcagatggtaagccaaaaactcctcgactgggtttgtcaatcttcctataaagcaagatcaaagacggcggcaatgactcgggtcatcggtgggagcatttctgtccatttctatttatggttggtcattgcatcctatcttgggatcgattcattttctccagaacttgggaagttacgagtaactctgcaagtccagctctggcaatcagaatgtctaagtaaattcagcttaaaagcttcatgcaggaattttccccctcagcacctggttttgaaaaggttttctgcacttgtgtccgatgttgaaacagaggctatctgtttaaaatagcctcagctttgaaagggaacttaaaatagcttgcaaggaggcctgatatttggaacaattactaatgttttatagtcatggcttcagcaaatagcactgttcgacagtcctacctcagtttatgctccagtggaccatcaaccattgccaacgcaaggaggctttaaccaaatagtccagattcctgagttttgcttgagcctgtcctccagcgtctttctcactgtgacctattttccttagcatcaggctcaagcagagcttggctgacaccagctctagacagtgaggcaggtacgtgacaagaacacctacgttttggggttggtgggaaggacaggagttatgcctctggaaggggcagaggcggtaagaaccagtgtcctgaatggggccctggttaaaggaacgaagctgcctagtatgcaaacggaggcaagtcttagtccggttttgggaggaggccggaagagggcctcagcgtggtcgctgaccagagtcctgctggctgctccccggcgtgcagccgtccgtgctggggttgcagtgacgtctcggggccgcttggtggtagccgtgtgtttccaaagctggctcgcctacgggagagtccagctgggatcccgtgaaccgaccccagagccccggagggggcgaggggtgggaaggagagatgcccgggagcccccttcgcagcggcagggacgtaagaagaggacgggggctcacttaagtgggtagccagtcaagagggtggctgggaaactccacgatcgcagggcgggtaaaagcgacccccattcagtggagccgccccggggctgggtttgacccgcccctctcggctctccactagagcgctggtgagtgagtgcgagtagcgaatgtgggcaggtgaggacgttccgtacctaactgcgttcttggggagcatcgcctgcccaatttgggcaacgtttgcgcggaggagcggtcactgcgctcgggcgcagagctccgacggcttccagcgctcaccagcttcagtctcgcgggtcctgcccctttggagctgccggtcccgtctccgagagtctgagcgcctcccctccaaccccgagccgccaggaga

SEQ ID NO: 10363 - DNA, 798 bp, Artificial sequence
  DNA replication origin
gcggccactcggcctaggcgccctcgagcttcccctcgtcccgggcatgtgtgtgtgtctgtgtgtgtgtctcagtgctgcaagcgccttcaaaaccacagagtaatttacaactgaagctttctccctggactcgaaatccactcggctgaaagtctttttgtttggaagcggcgatgttaagggaaggttggcagagaaaatccctaggtcctacccctcgctggctgcgggcaggggtcttagagctgggtatattgttgcggctgagcccgccggctctgcgggatctcctcccagccgaggccgacagtggccgcgacagccagcgcctcctcgggccccgcggcagagccccttgcccttggccggttccccgccggcgcagggcgcacgcggagccgcccttccgcgccctgggaacaggtgcactgggctcagcgcccaggaggggtggggcacagggagggggcgcggccggggaaggggggtcggcgtgtaccgcgaggcaggggcgggaggaggtcaaagtcaggagcccacgtacctgtacctggaagcacagcagcaggaagtgtaaacacctgcgggaaacagatggagaagcggtcagtgggacctgaggaagggggcgcacggacagacagacacgcagtcgaagagtcaggtgaaccgacgggcgggcagacagaggtacagggcacaggcatacggacagacagccaggcaaggtgggcagccccgcgcgcgggcgcttacaggcaagtgcaggcggagggcgctgaatacatcgctggg

SEQ ID NO: 10364 - DNA, 786 bp, Artificial sequence
  DNA replication origin
cccagcgatgtattcagcgccctccgcctgcacttgcctgtaagcgcccgcgcgcggggctgcccaccttgcctggctgtctgtccgtatgcctgtgccctgtacctctgtctgcccgcccgtcggttcacctgactcttcgactgcgtgtctgtctgtccgtgcgcccccttcctcaggtcccactgaccgcttctccatctgtttcccgcaggtgtttacacttcctgctgctgtgcttccaggtacaggtacgtgggctcctgactttgacctcctcccgcccctgcctcgcggtacacgccgaccccccttccccggccgcgccccctccctgtgccccacccctcctgggcgctgagcccagtgcacctgttcccagggcgcggaagggcggctccgcgtgcgccctgcgccggcggggaaccggccaagggcaaggggctctgccgcggggcccgaggaggcgctggctgtcgcggccactgtcggcctcggctgggaggagatcccgcagagccggcgggctcagccgcaacaatatacccagctctaagacccctgcccgcagccagcgaggggtaggacctagggattttctctgccaaccttcccttaacatcgccgcttccaaacaaaaagactttcagccgagtggatttcgagtccagggagaaagcttcagttgtaaattactctgtggttttgaaggcgcttgcagcactgagacacacacacagacacacacacatgcccgggacgaggggaagctcgagggcgcctagg

SEQ ID NO: 10365 - DNA, 1278 bp, Artificial sequence
  DNA replication origin
gcgccggcggggaaccggccaagggcaaggggctctgccgcggggcccgaggaggcgctggctgtcgcggccactgtcggcctcggctgggaggagatcccgcagagccggcgggctcagccgcaacaatatacccagctctaagacccctgcccgcagccagcgaggggtaggacctagggattttctctgccaaccttcccttaacatcgccgcttccaaacaaaaagactttcagccgagtggatttcgagtccagggagaaagcttcagttgtaaattactctgtggttttgaaggcgcttgcagcactgagacacacacacagacacacacacatgcccgggacgaggggaagctcgagggcgcctaggccgagtggccgctgcccgcgaggccgctcccggatgggccgcgctccgcactccctcgcctaaggtggtgcagccctcgttggttccccgcctgctcccggttcgctcgctctccgtgaatcagaagagggcttggcgctcggcctggaaagcacttgctaaaatctgatctgttacttcagcagctttcagactcgggaaggtcttggcacgcagacagttggaacgctctggcttccaaagccgtagaaatgaaggaaaaagggttggggggagggagagagaagagcgaaaaagggagccgacttcagccccgattagaaccagaccagggctgcctctgcatggtgggggtcggggggcggcgggcaaagggaataggaagcgtcagctccccaagcccccacccacctagtgctgcaaggggccaggccaggaggaactggacacaggtcaaaagagggttgtctgacccttccccctcggtggaaggcaggtggctttccgggattagagaagattcttagaccttagccttctggattgtggagatccccagagctagccttgagcacaggaaattggtggttctcccggttttctggctcaaggagtgttgtgtgccttgagcactgcgcgactcaacagccactcgcagtgtttggcggtggtgggcctgctatcttccttccacgcccaggagagggttgttaccctcctgataggcactgagctgggggcatccattggggcttggggatggaagggtggacggactgatgggttctttcctcctgttggccaggctggggtccccagtgactccttgaatcaatataactggagtcagtaacttaagactggctgtttgccaaagcagatgtgacctgtgtggtgatggggg

SEQ ID NO: 10366 - DNA, 952 bp, Artificial sequence
  DNA replication origin
ccccctcggtggaaggcaggtggctttccgggattagagaagattcttagaccttagccttctggattgtggagatccccagagctagccttgagcacaggaaattggtggttctcccggttttctggctcaaggagtgttgtgtgccttgagcactgcgcgactcaacagccactcgcagtgtttggcggtggtgggcctgctatcttccttccacgcccaggagagggttgttaccctcctgataggcactgagctgggggcatccattggggcttggggatggaagggtggacggactgatgggttctttcctcctgttggccaggctggggtccccagtgactccttgaatcaatataactggagtcagtaacttaagactggctgtttgccaaagcagatgtgacctgtgtggtgatgggggtgggggtggggaacggctggtgtcaaagagggaggccagtgccaggcatggcctgcctggtctgcagctgagtccccaagcagagggcaggccctggggtcactccagggggtctgcttgtctgacctgggcaagagctcttttccagagtgctgtgcctgggggcaggagggatgaaatgggcaaggagtagcagggaggcctgcggatgtgtggctcaagcctctggatgcctgctgctgttggttcttcttgaagtagggcccaggaggggctgctgtgtggtctttgtgttctccgtgggagctggagggagggagtgtggactctgcatcccacctccacctcctggccagagctagagccagcatcttgggaaagagctgggtggtctgccctggttaggtcaagaggcagccttcaagcaggtgagggatcctcctctccccaccacctccaccttcccccttgtccccaccggcctttctgcatccaaagtgccataagactgatgtttttaaccca

SEQ ID NO: 10367 - DNA, 860 bp, Artificial sequence
  DNA replication origin
gggagcaaggaaccggcaggccaagggctgtggctgcatcgatcgttttaacaattgccaggggcttaccgtcctgcagcagtgacctctggaacctggccgcctcgtcagcgctgggcctcttggttctagcatttcagaaagattttattactttgaaactggcaagagagctgcatttaacaaattagggtgggggcaggagtgggggtgcaggttggggggaccctcgggttggggagacccacgtgtgtggggatctgagtctccaatgatgctgcttctcagcacccctgttcgtttcctgggtgcgcttgtttgcaaaagtcatgaactggcttcctctgggtgttccaatggaaggtgttatccacaggagctctatggtagggtcaggttctctgtccccttctctctgcagggactgactcccatatgcagtttgtacaaccagggttgagggggttttgcctggacaggtggagtggggtggagggtaggcctggattctaagggggatgggcttgtgcttgggggcaatgccctggctgattatttgcggttcattacatcttgttgggggtgggggagatgacttcagtcttgctgaagccatgtttttgattttttgaatcccccaagtcttatccctctccctttcccccataccaagaggctggggaggatgtaacaggccagagatcccagccagggcattgtcgcattattttgttaataattactgtcataatagcttccgctaattgagcactgactttctgcccggcactgaactgaaacgctcccagtgaatcccaggaggctgccaccgctaccatccccattccacagatgaggaa

SEQ ID NO: 10368 - DNA, 824 bp, Artificial sequence
  DNA replication origin
tagcttaagagtcaatccacagacagcaggaaccatgtttctatttctttggtgcccccggagccctttggccaggtacacagaactcagatgaatggatgcagaatccgccctcagggagttcccagtgtgacagaggatgcaggcacaaagacaaacagtgacaacccaggttagcagacaggcaacagagggctgtgcgagggactgtggggctccggggtgggtgggctgacagaggggtcagggaatgaccagccaggactcagggcaagtggacagagggaagggcagtcccggcagagggcacagcatggacagtgcccgaaggccccgtccatggaacagcggtgctcagtgccacgcatctggagcataaggaatccatgtgcccggggaggctccccagggccttcggtgtcccatagcaaggtgggaggacccatggatgggtttggagctgggtgggggtggagggcaggtcatgtgccgccctccaatgccgtatgtgctgtagaaagccgaaggtgggcagcggggaaaggcctggagatgcagaagccacacgccaggcggctggggcaacgatttccgggatggtaggaggccagaacagaggcggtggcaggggttagggcaggaggggacacccagggcctaaggtacgactgggcagggaggctgtggagaggaccgcagcccaggagccagattcccgcctcgggggccagagagcgagggggcgctgggcggggcagaggtcaagcctggacaggtggatttggtggcgtcctcgagtcccccgggtgggcccagaagacagg

SEQ ID NO: 10369 - DNA, 2010 bp, Artificial sequence
  DNA replication origin
aaggggaggagaagctttgaagaaggagggagcggtaacctccaatgctgctgggaggccacggatgccggagcagacatgcggccccagttttggtggcgaggctgtcattggcagcctcctggagtatgcggctgcaagtgtgactgaagtcagttgaagaatggaagggagatgaggagagatgaggagagagtgacaattctgagaaatttgcttgagaagcggaatgaagtccagaacatttttcttgtcttaagatgggagagactggtacattaaaaaatgctgatgatggctagtcgaggtgactcatgcctgtaattctagcactttgggaggccagggtaggtggatcacttgagaacaggagttcaagaccagcctggccaacatagtgaaaccccatctctactaaaaatacaaaaattagctgggtgtggtggcgggtgcctgtagtcccagctactcaggaggctaaggtggaggatgacttgagcccaggaggtggaggttgcaatgagctcagatcacaccattgcacttgagcctgggtggcagagagagaccctgcctcaggaaaaaaaaaatgctgaaaaaaaaggcaccctgcagagaacgaggaaatggagattcaggagaaaatgcattggtgagagcaagatggacgaagagatggagtcaggaacccagggccggggatggcggctgggccaccatctccatggtgaggggagacaaggggagagtcacggggcagggagatgagctggggagatccgaggacgcccatctgaaggcctccattttctttatgaagatcaagacaagacaagaccacttcctgagggtcgggaggagtttgctgaggctgaggttgagggtgggtcgaggagaggaaaggaacgatgcggcggccgtggtggagagagggaaaggaagccggctggggcccagggagaggctgccagcgatgcggatcacccagtgcgggccagggactgggagcacagaggccagctgcccctcagggtgagtgtctctggcccagctcagctgttcaggcacaggagcaggggtgtgggttggagggtcacccaggcttgcagctcaggcaggtgggggtggcggaggcagagagggcagacagggatgaccgtgctggccgtggaatctgggctgcagccatggggtggaaactctcagaggcagagagagatgtgtttgagaacagtctggggacggagcgggcagtacaggagctcccgagccccagagacagagagagggctgccggtgaagaaggtactgattgggtccttgatggtggaagtggtgcagtttctgtgatgactagtcctgatggctgattcggggtggaggaggggcactggtgacgaggaagtccaagacagaggggccaggacattgagagggatgtctgtgagggtgtcaaagcgacccagggcaatggcaagagatgcagttggggggctcctcagggagtgaagagtgcccaagaggctgtggacaagtgaggggggtgagatgttgcaaacagcctgtgtcctgagagagcaggtgtttttgggaaggtgtgggcagcataggccagaaagtggccatggaagcaaggggacaccgcctctgtctcctgtcctgaggtgagagaggaaagccagccttctcttgggagggaggggaggaaatgatgtccccaaggcagagggggctccccaaggccatggaagggaggagctgggaagaggaggaagctgtgtgcgaggcagtgtgctgtttgtggggctggggttcttcagggtcctgggagaaggttctggaaggagggaaggctggaagctgggccaggggagagactgtgcagaaagcatgaggataggagcttgtagaactgtgtatgaggggatggacccccttacagggatgtgaggccttgtcctgtgtccttcctgtggacacttgagtccaacaggattcagctgaagctga

SEQ ID NO: 10370 - DNA, 1242 bp, Artificial sequence
  DNA replication origin
gaggcggggccgccggggccgccatggagcccgactcggtgattgaggacaagaccatcgagctcatggtgagtgcggcccgctggaccgtctgtgcttccgtccgtccggccccgggcgggcctgcccacctcaacgtccggtgcgaggccggctctggcccttcccagacgcctcgacccagacccgggcccccagccttccctggcctcggacctggcgcgggctcctctgatccctcgacatctccggccggtcctggcccggccccctccatgcccctcgcttctccccctccccctggtcccgtctccggtcccagctctcggacgaccctcgctcgtttatgctgtagacttaggtcgcactcgctctagcaccccattctccttcttttagaaagggatttttttttctttcctctgtttcggcccaggcccgcaccgcgcttgcaagccccactcaggccgagtgagatggtgggaaggagtacggagatgggttggggccgcctgggcctccgcgtcctaggagaggtctcagcacccactccccagcctaggtctgtgtggatgccaggataggccctacagagctgggggggcagggagctttcgggtttgaggctgtggcggataaggaggcctctttcccgggcccttgtggtgtccggcttctcggacaaagggtttcctacccggcggagagggatgtttgcatagcaagggcccaggtactctggattccatcctccaggaaagagaaggcgcaacttcacgttttccagagctgctttgggaaattggagatgactggggagggagccatcctcatcactgccgcgaggtctttcttctcagaaagaaaaaaaaaagaggggaatccttggcccccgggggaagcgaccactcttctgttagaaaccactggcagccaggccagactcccggtccgtggacaccctccaccctcctccgaagctttaggatttgaaaccagaaggggtttttaggaacaggacagtgagagagtggctagaagtgaagaatttgctaattgatggatgatttggtggaagaaataaaatatggcagatattacctgccaacgtgaacatgagggaaatcaaattgggctctggagagctgggaagaggaagtctgcatcagcaaatggacatgtccaggatttcttcctatggaagccttgacagtttctttgtatctttcctaacacggtaac

SEQ ID NO: 10371 - DNA, 1948 bp, Artificial sequence
  DNA replication origin
ggtcgtccgagagctgggaccggagacgggaccagggggagggggagaagcgaggggcatggagggggccgggccaggaccggccggagatgtcgagggatcagaggagcccgcgccaggtccgaggccagggaaggctgggggcccgggtctgggtcgaggcgtctgggaagggccagagccggcctcgcaccggacgttgaggtgggcaggcccgcccggggccggacggacggaagcacagacggtccagcgggccgcactcaccatgagctcgatggtcttgtcctcaatcaccgagtcgggctccatggcggccccggcggccccgcctcgctctccccgcgcagcagcgaacggcccgggcggaggaggcgacggcggaggcggcagaggcggaggcggctatcgcacccactctagctgccagcccgcccgggccgccggcagctccgccctccccctcggcgaacgcagtacgcagatcggggactacacctcccagcaggcgccgcggcccgcagagcgttgtgggaccgagcctctgacaccaggttgctggctcttggcagcccgaagctgaactccgagctgagagtagcactggacggtgggcgtaggacgtgcagacctgaagagttaagagcttgctcatggcagggcctcgagagcgccacgactacgtgtcccagaaagccgtgcgcccgggttgtccttccggctagcttctcttgacttcctggcagcccaaggctgcccagaccgggacggaaactccgaggcaactcctcacttgtcggaggtcctgcgtatgcgacccatttccgcacatgcgcggtccatgccgcagtgctccctagacgcctaggtagctgcgcggcccgtccggcagtgtctgatggtaggggcagatggtggagacaggtgggttctaggtgcgttaggaaggtgtatagacctggggctcaggtgtgggaaggggccagcgagtgagagaagctcggcctggggaagaggctctgagaggatgggcatcccaggagtgagagtttcgagatttcttcgggaaagacggggttttgggaaatgtgctgtggtgctgtctgtatgtcacacgatctgcgaggagctgcgagattaaaggggacgtgcgtatatcgagcccctcattcattcgttcagaaaatggttattttttaagcatccagcttccgctgcgtaccgttctaggcgctgagaatcagctctgaacatgacagacaaggctcctgttctcatggagcttaattctggtggagggacgacagacactaaccaaaagagtggctaagaaggaacacacaagcggagactccttctagtgaactcagcctccaactctgtgtaacttaggtctgtccgtgccctctaaccaaatcccaccaggaagacacggatcgttgaacaagctgggtttattactagttgcagtgactgagaacacacattgaggaacgatagggcctctcggtaagagttgttagtgatttgggagagggtttaaggaagtgagagcttcactggattagatactgtcaggaagagagggtcgttccatgattgagcatctcagttcatcttatctagaggaagggaattctagattgaggctaaagctgtgcagataaagaaacagcagcctggccgggcgcagtggctcacgcctgtaatcccagcactttggtaaaccgaggcaggcgaattgcttgagcgcaggagttccagaccagcctgggcaacatggcgaaactcttctctacaaaaaatacaaaaatgaaccgggcctggtggtgcgcgcctgtcatctcagttacttgggaggcagaggtgggacgatcgcttgagcccaggaagtggaggtttcagtgaatggagatcgcaccactccactgtaccctgagtgatagag

SEQ ID NO: 10372 - DNA, 1297 bp, Artificial sequence
  DNA replication origin
tatcagcgaacaaaacaaagacgctgtcctcagggcactgacatgccgggcagggagcttgacaacaaacctaataagcaggcaagttatatcctgagtgccatgtgccatggaagaaggaagaagtagggcagggaaaggggactgggaatgtggggagtgtagtgggtttgcaatttcatgtgggtggttgggggaggcctcaccacaaggctgacattagagcaatgacttgaagagggagagtcagtcacagagggatccggaggaaggccattccaggcggcatggacagccagtgccaaggccctgaggcaggaacatgccgtgttcagagcacagcaaggcggctgggcaggctggagaagagtgaggctggagtgtgggagcgagaggggcgatgggggtcagcagggtggggggggcggatcacacagcactctaaggggccctgagactctgggttttccctagagtgaaacgggagccactggggagctttggcccggggaggacatgagctggcccctgttgagaaggttcactctggctgctgtgctcagcccagacccaacagagagggcaggggaccagcgaggaggcagcagcccgagtgagaggtggtggtggcccaggtagtggctgcaatggaggggtgggaaaggctgaagtctaggcacgtaccgaatgcagggacaacgggatttcctgataggtgggctagggagtgtggaagaaagaggagcaagggtgcctgcatggtttggggcctgagccactggaagggtggagctgccatcggccgagatgggaaagccagtggtggagcacgtcggcgaaaagatccaagtgctcagcgttcagtgtgagatgcccactggacctccggggagtcaacagctggacgcgggccgaggcatggagctgggagtgctgcacgctgggtgcgtggagatggagggagggccctgtgcactctcacactaatgagctggggcaaaggggggcgagcaaaggcaacggagaaggagaggcttatgaccaagggtgtgtggaggcctggaggtcgagtgccgacaggaggaggagatcgactgggctggtgctgttgatgtgttcagtgagaccaacaccaaggctgacccatggcacagaaaccgctgacaaccttgacaagagcagctgtgatagagtggacgggtttaagagcaaattcagccagtatctactcagcacctcacatgtgacagctgtatgttaaaaatgttacatacaaaatctcattcactcacacaat

SEQ ID NO: 10373 - DNA, 1574 bp, Artificial sequence
  DNA replication origin
ccgccgaagccacagcccgagcccgagcccgagcccgagccggcgccaccgcgcccccggccatggcttttgccaatttccgccgcatcctgcgcctgtctaccttcgagaagagaaagtcccgcgaatatgagcacgtccgccgcgacctggaccccaacgaggtgtgggagatcgtgggcgagctgggcgacggcgccttcggcaaggtttacaaggtgagggcgctgaggtgggtggccggacgcgcgtcgaggggctccggaaggaagggatgcctgagccggacccggccagcctggctccggctccgagggctgcccggcgctgaattcggggtccctggccctcatcccgatgactcttgttttttggggggaacatcactcggcccggccgagtccctgcgctctgggcgccccctccgggcacggttgccgcccccaccctagccctgtttcggagcacttcctgtgtgtcctgcactgcgctcggcgccgcacggggagacaaaggggcgttgacaggacctcagcatccgagagggccactcgagggaccttccagggacgttccgtaaaacggcgatacgggcacacttttttttttaagagagaccacagatgctgtgggaatatcgaggcgatgtggaccgagaaactcggctgcgcttggacgggttgggagctagggacacatctgaagatgagccagagacagggaagtggggtgggcgaggggtggcccatggactgagaggtggggcttggaaaggtgggttggggctggtcagagggggaggtcaggatctggtgaatgctgagcctgggggaacagatttgattccgtcggtctgagtcacagctggggagtctcccagcctgcagtcacctctcccctagaggaagacgcggcagagagcttttgtggagtgggtggggcagagctgattgagtctagagaagtgtggcagcaggacgttggtttctgctcctgggagctaattctgaggtggtgagttgttttagggagccaacacctacagcttgactcccccctttcccctaagaaaatttttactgggagacgcccacttgttaaattggtgtatacctccaggagagcacctctcttctaagccactatcctcctccttggggctcctgtagcttgtagggcactctgaccctaggattgccgttctatgaggctggaccacagagaaggcttctccaggccttctcctctgacttggaagtggtctatcgcctagttaccgaagtagttcctagatgaccggtgttataatagcatcatttgggagcttgtcagaagtgaacaatctcatgcccagccccgacctgctgaattagagtctacgttttaataagatcccaggtgattcctaagcaaataggtttgagaagtactgccctagaggcttggagtggtggcgttttttcttttttcttttcttttttttgagacagggtttccctctgttgctcagtctggagtgcagtggcccgatctcggctcactgcaacctctgcctcctgggctcaagcaattct

SEQ ID NO: 10374 - DNA, 1045 bp, Artificial sequence
  DNA replication origin
gggacgccggcaggcgagggcactcgccccaggcacacacgctggctgcccgtctgctgcgggttcctcggcgcggtgctgcctcctagtgtgcgacgggcaacgccggtgcagccgcggccagtccctgcagggcccggcttcccggcgcggtcctttccaggggctccccgtccacgatccacaaacctgccaggattagagggctgggagaaagagctcctttggcactgatttctcttatgtttcctgatgggtttgcggatgtatttgcatattaaataaaaactttattctaatttttaatttcctagtttcaaaaaagatgagcgcactacatacagatcaaactaaagtcttctttgagcaccttcattctcgatcctggctacttgagtcacttcactgctactgttgcctgtttgtcctatagacggttataacatgcttttacctgaatctaaggagagtgctgggggtggggggggggggcgggcagtctgcaagggttattatttggaccgtgtcataaacaagttgagtcttcgcaaatgtcacagttcaatagctccaaccccagagaacggctgtgttgaggtgttttcgccccttcctcggtgctttgttcgaaaacatcctttgaacagtgtgcaaacaccaagcatggttttccactgggaaagccagctcaagaagcctgcgatgctggtagtggtcggcgcagagggtgtcctggttgctaagccgttcggaatgtttccacagctgcaggagtgcctggaattgtagagggtctttaaaagaaggaaacgccgctcgtcgctgaccgttctcattgagtcaggcgctgtctgaacctcccaaaacatgctgaaaggcaggtctttcatttgtttcagaccatttggccaactgtacgaagcgggtggggagaccaagagggttgcttccatactaggagatgaaggctctgactccacgaaagctgtaggcctggagggctctgaccagctctgagagctccagaaaagcaagcaagcgagag

SEQ ID NO: 10375 - DNA, 1470 bp, Artificial sequence
  DNA replication origin
agccgaaggcgagggcggcgcgcgggccaggcctgccgggcgggcggcccgggggttgaggtagaagtgggcgcggaggaaggggccgagccaaggcggtgggtggagcggcgaggggggcggaggctgggccgcggcgggcgagcggagcggcgcgcctgtccggagctcggcggtggcgccggaggaggctgcagcggcggcggcggcgggcccggacgagcgtccggaggtggcggacgaggcgccgggggcccccatgggcgggtgtgtgggcgcccagcacgactcctcgggcagcctcaacgagaactcggagggcaccggaggtaggtgagcgccagggggcagcctcggccccccattgttcccggccaggcccggccacctgtcccgacccccgcgggccgcgccgggcccccgcgcccctttgtcatcccctcttccacgtcattccccgcgctccgcttccggctgtcctgccagccgcgggggtcgccccttcccgccccagccctgaagaaaagtcctctgagcgccggggacgtagcccttggcctcgccgaccgccccgctcggctcggggaagtcggacccgaagctgcccttctggccacctcactccctctccaggccgtttaattattgaggatcaggatggcggcgccggggttgcagaaaagcgaattgatggcggggggagggagcttgatgcgttccctccgacgggccccgccacatctttccgcacccttccttgttctgtggagttggctggtctcagctttcctgagtttcagatgacagctgccccggttggttccagattggccatttaaacctgcgagtttctggagctcggctggaggagtctccagtggccgcaggcattgtattaaggaggggtggggaaacggtcttcccgggtaaaacgtggctcctagctagagcttgggggtgttaggccggtgtgctgtcggggtgggctaatcacattcccatctgtcttacgtagaaggaaaatatgtaggataaaagtacaagtgcagttggaccctgacttaccccacccagtaagatcagtactttaaaagttttctaacacgggaacgcactcctactttatagtaaaagcgtgctgaggataggtattttaattcaatcagtagtagttgtagtatggcagtataataataaaattagttctatctttatttaagtgacctttggttacgtccattctgtagaatattttagtgataaacagcctttaggcaaagatgacagcgttggtttgatttgtgacctaatgttagctgccttaaaatgtgcatgtctgtaaatttttaaattgtttgggtatgggagggtttacaactttttcgtagcatactaacatttagaccagttgcttgccctgtcacttaagctctcttcacaaaccatgtacacctaagttttttggctaat

SEQ ID NO: 10376 - DNA, 1316 bp, Artificial sequence
  DNA replication origin
caccgccgagctccggacaggcgcgccgctccgctcgcccgccgcggcccagcctccgcccccctcgccgctccacccaccgccttggctcggccccttcctccgcgcccacttctacctcaacccccgggccgcccgcccggcaggcctggcccgcgcgccgccctcgccttcggctcagccccgccaggccagggctggcccatcccgggcgggccgcagcgcccgcctcgccccctcacagccccgcacacccgagtccaggcgagccccgcgccggcgcctcgcgtccgccaggacccatcggcccccggcccgcggcgccgccctccgcacccacggcctgggctcggcccggcccgcccggaatcgccggagaagggcggggccaccggaggccgcgctctgattggctgcgggcggggctgcgagcggagcggggcgagggtgaggcgggggaggggacgcagggggctaggtggggggaggactgcaggcggggggaggactggaggcgaggggaggaggagagagggaggacgggaagaagaaaggagagggaagaagggagggaaagcaggaaaaagccgaacaaaagtgagaaaagaggagtgggaaggggcgaaatcgagttcctggctcctcggccgtcggctccttcttgctggtggaagcgggtcgcacgggggaaccgagaagtagtcgtggaagactcgcaggcggggacggggcggtttcccaaataacgggggctcgggggagagtgtcctggccgaacgttgaggtcccagcgccctttgaatttgtatggcgctccgtgggttggtaccccgaatctgggcttcctcttgcctgcccacccccgtcttccctaaaatcatggggccccattattaggggtggaggcagtggttgtggcaaaccaaactgagattagaggcgaggcgtcctgatggaacgcctggaaagaagagataaacgctgaccttagttcagggggcgtgggtttctttcattttcacgggattaatgattcaaacaatactacttatcaagatcctgcctttgggtatcttaaatcgtccttaggccaaagtgaagtgtaaatgagtgaaacaccctgccttttcgaatctagaatttgggacattgaccacgcccaacattcttggcggttacttttccaatctcagccaaattgttaatggtccctttagaattgtgcttcgtgctatgatgccttaaaattgttatcatcctgcttgggactttctaaagcttatttctgcctaagaagctgttttaactatctgctc

SEQ ID NO: 10377 - DNA, 1656 bp, Artificial sequence
  DNA replication origin
tcttttacagaggggagggcacaggcactgaagtcaggcaggcctggactcaaatcctcttccctcttcctcctggctggtgtgtccttgggcacatggagcgtgaatttcctcatctataaagggaggttgtgagggtcaaagcatgaatgcaaagcgccaagtacagtgtttggcacccacgaggcactcagcaaaggggtgctcacaagggcacgacttgtgaatgggcctcttattcaaacaaactttgagattcttgctttaggtaggcaaaaatgaaatgctccaagttggggtgggaactctcattgaaaagccctggagggaccggagcctgcagcagcaaagcgcagcatacgcggggctggaaccacccttcagggctgaccacggtcccaagatagaaggtgggaggcagggcggctgagcggatctccaggcccactcctgggggagccgcatccagtggaacctcagaggcccacgggcctgaggctttggggaaggggacactttccctggaactggtaatggaatgcatttcttcaggatgaagttccttctggtagcaggcaatttaggaggagtgaataaagccactgggcttttagaaacatgaagaagttggagcaaaagtcatcatggactgggttggctgccccttactgtgccatgtccaagccatgagagacccttgctggagtttctccaggcaatgggatccagtcctggaggtcttggagagtcttggtcccactgctgggtggcaatgccattggccaggaggagttctcttaaggcagggatgctgacatggacagaaagcaaaggctgtgggttctgagcctccagtgatgctgtgataggagggatcaggcccaggggcgcccgaggtgtccgaaactcactctccacccatgggaggcaagaagtcacagtaccccagagtctgtctgccttggaagctgcgtggagaatgataaattaagaggcgtattaaatacgtgggtaaagccagcaaggaccagcgggccctctaggcagaaagggagtcggctacggcttctttctgagatagttggaaggaatccacccttcccaggaaggggctccgctcaggacctggcagaaccaccagccactgctgttcttctcccggacttcaaacactgtcccttcctggaagctgctggtgtctttgtctccttcaaagtcggccacggccacatacaaagagtccttcaggccgtcggcattggggacagaggctgcagctgctttctccctgttttctccaatcttgccggtcccccatggccccaggctgcctttgcctcgcgtgtcatcctggccccccaaagagttggagagaaaaggtttggcttttggagggacgaggagagcacggcctggggtgggagctgccctgctttcgtggccttcacactgtggacctctgacctctgggagcggcctggatgacgaagaggttttctttgggggaggtggtctgcggggtgggaccacaggtctctgctggggagcctcttggagaggaacaggcacgctcttagacacaggatctgtggtcttggctggcctcggaggggctctgcaggaaatctcttttgggctgagaccatcctgtttgcc

SEQ ID NO: 10378 - DNA, 1409 bp, Artificial sequence
  DNA replication origin
tgcggggggcggtgcggggggcgggccgggggcgggcggcggcggctgggcccggctggagtgcgcgccgagcgaagggcggcggcggtggcggcggcggctcgtgctcggccccggctgcgattgcgctcagctccaggttccctgcccgcggcggcgcgcccccagcgctccctgcaccccgcgccacccgcacccgcgctcggcccgctgcgggcggaggagcggccatgccgccgcggcgcagcatcgtggaggtgaaggtgctagacgtgcagaagcggcgggtgcccaacaagcattatgtgagtgcggcgcggcccccacgcccccttgagcccgcgccccgtcgggggcgaccgagggcccccggcttggaaaacttctgcctccagcgcttcccgtcccctcctcccctgctctcccctcggctctgcggcggcgctgcccgggtccctcccgactcctcctccctccctcccctcccctccccgcttttgcctcgttctccccctccatcccttcctcccgcctcgcccccctactcgcctccctgcggctcctctacccctttctgtcttctccgtgtccccccaactcccgtcctgctcatctgtggaaaagtctggctccagccggtgaggggtctgagacagaaagcgggagagacagaagtgcctgttctcaggccgcccgccttgcccctccttgtccagaggcgcgcagacccgcagtccccagccacaggtagcccctctagggttcgccgaatttgactccgttctttggcaagagccggcctgggcgatggaggagatctctgggaatggatcatttgagtggctacgcctttaaagggttaaaaacatcccctgccccctctctccagtaacttctgttttaaaatgtacgaaagttttctcctggcatctccctctggaacatgggaatcttgtttggagctggcaaggacttgagaaaatgggacagtagcgtcgttttgcagataggaaggctgaggctcagaggttgcaggtcctggaacatagagctgcattcgggcttccctccctccagcaggggtgcctggggctgacggtgacctgcaggtggaaagtggcttccgcagcaacctaggggacacgtctgcagattcaggaggccctgggaccacctcgcaggttctaggtggagataaaggggatgtggggtgatgggcccacatgaggccttggggagggcctcattacagcagggaagggggctatagtgtctctggcggtgagaagtgggcagtggcggagcctggctgcagagaagttaaccaggaagggaaaaagagtaagagggagggaaaaaatcctaacaaagaagtatagaacaatgaatagaaaagggcgttggctggc

SEQ ID NO: 10379 - DNA, 1195 bp, Artificial sequence
  DNA replication origin
ctcggtcgcccccgacggggcgcgggctcaagggggcgtgggggccgcgccgcactcacataatgcttgttgggcacccgccgcttctgcacgtctagcaccttcacctccacgatgctgcgccgcggcggcatggccgctcctccgcccgcagcgggccgagcgcgggtgcgggtggcgcggggtgcagggagcgctgggggcgcgccgccgcgggcagggaacctggagctgagcgcaatcgcagccggggccgagcacgagccgccgccgccaccgccgccgcccttcgctcggcgcgcactccagccgggcccagccgccgccgcccgcccccggcccgccccccgcaccgccccccgcaccgccccccgcaccgccccccgcgccgccggcccgccccccttaaagggcccggccccgacccccgcccaccgcgcgcgaaccccgccggccacgtccggcccccgcccggcctttgtcccggtgctgagccgccgcgccgggggaggggactggactgaccccgtcgcccgttcactgattgacgtatcgattcattccagcactctcgctccggcagccgccatccaccgccagtttggagagccggacacccgggttcgaatcccggctttgccgcttttccactctgtgccctcggcaagttgcttaacctctctgggttgggtctcttcgtctataatatgagcctagtagtacaagcaccatgtttgtctttttgtgtctggcttatttcactcggcataatgtcctcaaggctcatccatgttgtagcacgtgtcagtagtaccgcctgcctgccggtgctgcgcccgggattaagtgcatgtgaagccattccgcagtgcagtccatggtatgagtgctggcgttcctaaagccaccccaagccctggtgattcaggaggagcaagagacccgtgaccaggttcccccagcctcagtctgggacatggggagtgagggagagaaaaactgcaacaaatgcgcatacgtgcaatgtaattgccatggaagcaacaaaaggggataaaagggtggtgactatgtgtgaggggcagctgggtgcttgttagcaaggccatcgatttccagttgcggagcacttaactgctcgctgggccccgtggcccctgcttttcacaaatgctgtctttgcatcctcaggcag

SEQ ID NO: 10380 - DNA, 765 bp, Artificial sequence
  DNA replication origin
gagtttgttccgttgactataagggttatggttcagcctttcctactcagagaaagtgcttcggaacatgatccaaaagtgcagtaattatgttcgccaggtcagcaagtctttacagagtgcctgacgcgtgccaggcactgtgctgtgtgaggtgcttgggatacatcagtgaactaaacaggtgaagattcattttcttgtggcactcacattctaacagggaagtcaggcaataagcgataaatataacccataaggaaattgaacagcctgttaaaaggtgatgaacacgataccgctgtgaacgcaacaaacacgacgcagggataagggggacggggaggctggggtggggagaataggaggcagcttaaaatagggtagaaggtgacatttgagtaaagactagaaggaggtgagggagtgagccgagcaggcgcctgggggaagagccttccagaaggcaggaacagtcagtgcagaggcccaaaggtgggaatgtggctggcaggtctgaggaagaaaaaggaggtcagtgtggctggagtggagtgacaagaggaaagagaagcaggacatacggggacagagaggcaccagggcacgtggaactttgcagggatcgtgggaacgctggctttgactctgagggaattggagcgtgaggagcaggacgacctaacttctgttttggagagctcgctccgtctaggatagatgccagctctcctgggcatgggcctggatcgcagtcttccaccc

SEQ ID NO: 10381 - DNA, 1031 bp, Artificial sequence
  DNA replication origin
gcaggagagctttgtagttaagaatacaggccgacctggtcacagtcctcactgtgtagctctgagcccctcccatctgtcagatggagatgaaaattttctaggaatattttgaaaatattaagccaatacattttcttctctcttccctgttaaagggaggaaggaaggagggaaagatggaaggaagaagggagggatggaaggaaggagggaaaggagggaaggaaggacgaagggagggagggaagaatggaaggaagaagggagggacggaaggaaggagggaaaggaggggaaaaggaaggaggaagggagggagggaaggagggaaggatgaaaggaagaagggagggatggaaaaaaggaaggagggagggtggaaggaagacagagaaggaagaaaagatccaggaaggagggagagaaagaaggagggaaacagggaaggaaggagggaaggagggaaggaaggagggaaggaaggaaggaaggagggaaggagggaaggaaggaaggaaggagggaaggagggaaggaaggagggaaggagggaaggaaggagggaaggaaggaaggaaggagggaaggagggaaggaaggaaggaaggaaggagggagggaaagggaagggaagggaggaagaaaaagatccccaaacatggagtttgtccctggctcctagggaggaaggaggatttaagagaatgacccagtttaacaggaagcagagggagaagccccctccgttccaagctggttgaacatttgtgagtgagggacatttcctaaacatgtgaggtgagggatcaggaggggtttactcacagaaatacagatgtggtgcagtgttggagtcccctcctgaaagggactttcagccagcactgcagcccttcctccctggccctcgtactctctggctttctccctgcatttctttctgtctgttccctgcccgtctctttccttctccccttgcagagcccagcacctgtgagctgtgtctccaggcacagtgcatgtttctg

SEQ ID NO: 10382 - DNA, 1131 bp, Artificial sequence
  DNA replication origin
gcgcgctctgggcgcgcggaggctaattacgcggcgggccagggaccaggaccggggtcgacgctccggggcatcgcagctgcacgggcgagccggcgggcggcagctggggcgggagccgggagggaggcggcggcggcgcctgcgggaggaggaggcggagccaccggcccgggcccgccggctccgcccccgcctcccaccgcctccaacagtgcaggggcggggccgcggccgccgcatcttttgaaagtttgcaccaggcggcgggagaagcacagccaagcctcccgccctcgccgctcccgcgcccgggccgggaaggcgcgcagggcagctgggtgccctcgggtgccaggatcggcagtctgctggcctgtcacccatttgttctaacactttgagaaggcccactgtgtgccaggccctcttccaggcgcggggccccagccggccgagtcctagccccggcagacctctttggagagtgcttcggccccgggggaacttacacagaggcagacgggcccctgggaccatgtaaagggcttggagacagtacacccagggttcccgggtttgggtggagtcttttctatcccctaggccaggtaccgaggaatagaagaaacccagtgtccaaagattgggaagagggaacccacattcattaatttattcgctcattcactaaaatatttattgagcacagtctatgcaccaggcactgtgctgggccgggtagatacagacaaggtccccactgccctggagatggcatgctgaagatagaaataacaagcaattacgatcacattatataataatcaaagccaggaagaaaataaaacagatcccagtagagtgaggagatgacattgtttgggggcatagggagaatctggggtgggggcacataagctccatctgatggactagaaggcgtcggccatgagaagagataggtagagtgttcctggcagaggcagtaacaggcattcctcattcaggcacctggaccacactcagtgggaagtgcagctgtgcccttctcgagctccatttcacaggctggaacgctgaggcccaggaagtgcaatgacttccccaagaagacccgattccaaatga

SEQ ID NO: 10383 - DNA, 1273 bp, Artificial sequence
  DNA replication origin
gccacgccgcagtggaagagcaccggctcgccgtcgttcacgctgtagaacacgcggccgtggcggtcggcccagtaggccagcaccgtgtcgcgcagcgccaggttctcgggcagtgccttggcccagtagcccggccgcgtgaccaggtccgggcaggcgtacttggggatgtcctgggcgctcatgagcgacggatcgtgcgcggtgaagccgaagcgcagcgcgccgctccagccagggcgcacggccaccaggcgcagccgcacctgctcgtacagccggatgggccgctgcgtgaacgtgacgccattgcagaagctgttgcgccgtgtggcccggcgcgagtggccgtccagccgcacgttcttgcctttggcctgcgcgtggaagcgcggcgcctcgcccaggaccgggcgtcgctcggggccggggccgcagcacggccgggtggccaggaggcgcgccggtgggctcgggtctgcggaaagacacaggcagcacggttaggcctcctccgaactcctgcgggccccgattggtctttacttaacaatcattttcatttgaaattccattttaacaggactggttactgataaacttaagaaggttccaggcttgaccaaagggagaccgaccctaactggccctaatctctttgccacagcagtcagcatacccgtgccacagataagcgaaccaaggtttagtgtgtgtggtgaagcactagagctgtttccctgtcagaggcgccaacaccaagagcccacgacagccagccaggggccaaataacttctccatccccatcaaatccctccacagctacaaggacctcgcggggccacctctgggccacagagtccctccaaaagcaacagagccctggattcttagggtgagtagtggagatatttggctgcttttctctgtgcaaatcatccaaataatacctcccctacttttattcaaaagctaagacaggtcaggcaatagaaacggccaaggcagcctgaatcccagctctggcacttcctaggtgggaggtatggggcagacttgtcacttctctagcttgtctttttgcctgacatgactccactcacacagctgctgaaagagaatgtggatgaaatccctggagtactacctggcacagcgtgtgtatgtaacaagtcattaataatatgatattattactgatgatatatattactgaggttccaaagcacatccaagccaggattcagggattcccctcccctcagcca

SEQ ID NO: 10384 - DNA, 864 bp, Artificial sequence
  DNA replication origin
caatggccaaccaagggggtggtgctacttattgccaatggggctggctgaggagcaggaggtgggggattcaagagttgtgtccgagcatgttcagtgtgggatgcccctcagatgtaggaggagaggctggataggtggtgggaggcctggggttcaagggaggtgtcagggctgggaagatgggtttgggagtcaacagtctagatgtgaagcccaatgatgggctcagataacttggagaaagagggcagacagacacaggcttgttttatgacaatctgttgaatgctacagttgttcttagatgccttcctatatgcatattgtattacacaatttaagaaagtaaaaaggaaagagtgggcccaggatagaaccatggggctttcaacatagggaggacaggtagggcgaggggtggccaggaaagcaggaggaacggcgggagctcgggaaggcccaggagccacaagcagcaacattcacacagccgggagaggtcacctgggctgaaagcgaggggcccggtagtgggcccaggatgtaggctcagggtctgacaggctgaaggtcagtgatgggcagggactcacgcctcagggcacagcttaagagggaaaaggagagggtggcataaccagcacttaagaaagacctgccctgagggagggagggcagagagacaggactgtggctggtgagggggctgatggagggtgttttgaaaagacggacgccaccggggctcttctgtgtgctcatgggggtgattccgtggaggcggaggaagtagacaaatgacaggaaccatgtctatgagcaggcaggaggggacaggagcagagctccttatccacggcc

SEQ ID NO: 10385 - DNA, 1277 bp, Artificial sequence
  DNA replication origin
cagcgcgtctgggtcggcgggcagctcgttgggccgtagcacgcccgggtcgcacgacgtgatgccgaaggccagcgcgccgggcgccgccagccccggacggcccacctccacgaagaggctctcgccgggccgcagcgggcgctcggagaagaccagcgtgcggccgccgtcgggccgcggtgcgcaggccactttgcggtcggccgacaggctcacgtcgggcccgcgtgttgcgtggaagcgcaggtcggcctccagtagcgccggcgacgacgcgggccgcgggcgctcacggggcccgcacggaatggcggcggccgcggcgtcggctggcggtgggcccggggcgcggcccagcgccaggtggcccagcttggccaccacctggttgttctcgagctcgttgttgtcgaagttggccgcgtcgtggctgctgggcggcaggcaggcgctgaagcgggcctggctgaggcgcgcgggcgtcagcgtgtcagcgaaggcgctctctgtgcggacaaagggagggacatggagggggagaggccgcgcgtcaggctggtcgcgagcccctcctcgcccgctgcctcctgcaggcctccacgaccgacccgggcctcgagcagcccccaccccaccccggcttcgaactctccttttgtccatctgtgttatttagtgagtcacaggagcacagaattgcattaagcaccatcctcggtttccttgacatgctcttacctttgggagcggcagataaggccctttttcccctgcctcctcctttctcttcttccatccctccttttctctccaccctttccccttctctccctctttccgaggtttccatactttgatcattaaaagggcatctaaaaatcgtttattgtccgtctccccaactagaacataagctccaataaaaagagcaaacctgtactcgtggccttacgcaacgggcacttctaagctttcgcgcgctacctcatttaatttacacaaccactctgtgaggcatgtacggttactgcctgctattgagctcacagggaaactgaggcacagaggggttggggaacatgaccaagggcacatggctactaagtggcaaagccccgacttgaacccatgagttgaacccaggctgtctggctctagagtctgggctcttcaacacatgctgcctctgaaagaagggaggacctgggtctgtcctcactgctgtgttcacagcacagagcacagtgcctggccctggataggtgtttaagcat

SEQ ID NO: 10386 - DNA, 1739 bp, Artificial sequence
  DNA replication origin
cgagcgcccgctgcggcccggcgagagcctcttcgtggaggtgggccgtccggggctggcggcgcccggcgcgctggccttcggcatcacgtcgtgcgacccgggcgtgctacggcccaacgagctgcccgccgacccagacgcgctgctcgaccgcaaagagtactgggtggtggcgcgcgccgggcccgtgccgagcggcggcgacgcgctcagcttcacgctgcggcccggcggcgacgtgctcctgggcatcaacgggcgtccgcgcggccgcctgctgtgcgtcgacaccacgcaggcgctctgggccttcttcgccgtgcgcggcggcgtcgcgggccagctgcgtctcctcggtgagtccccggccccgcgtgcgcgaggccccgcccctcccccgtcccgtgccgtctcaccccgctgcgctcttccccggccccgcccctctcgctaggcgctgcaccgcccgaggccagcccgcggttcccaactttaagcgcccgggcacgatccaccccgtccaaaattgccggactccaccccagagttccggattcagtgggtgcacggtgcgccccgagaacgtgcatttccgacaagtgcccggagatgctgacgttgcggctctctggaccacattttgtaaaccaccgacctagataggtaaccggcttatctccgagcttggcaggctatatcccctcggtaaatggtcggtgcgatttttagttccgttgttacgatttgttacattagggtgtttttaacatgtaatgcacagtaagtgtagggaaaaaataaattcgactgcacatgaaagaggaaataagaatagtatcgtccacagaaagtggaatggaggcctgaaccatcctattttgagataatttttgccttcattcatgccacaaataggcaggagcagccaccagctgtgggccgggccctgggcaccaggatagggccagcagaggacaggacacactccatgccggttaggagctcacagacaccctaaaggagagttgcacggtgtgacatttgctacagccgggggctcctctcccagcttggtggagtgaaggagatgttcagagaaggcttcccagagagcctggctccaacttcatggctcaaaaagtagagtccaagcaataagaagcagtcaacagctcatatgttccctcattgaattttatcctccctttgactctattgaaatcagtatcattatccccacctacagataagataatgagcacagagagattaaatgactatcccagggtcacatcgctggtcagctttgaagatgctggacaaatcacagattctcctgagcctgtttccttctgtagaaagagagtgatacctgcttcatggggttgtcatgaggatgaaatcatgtgcatataatgccttgagcggggcctgacactggtttaatcagtggtaacagtaacaacagcagctgttgctgtcttcatgagggcagaggaggagccgggtggcagtgtggttatttggtcagagtgttttttggggagggggaagttgtgttgttttgtgtttttgaggaaccatcagacatagtcatcatttcagcccgagacgaagtgcccattatctgtccattcatcctcaggtagggcaagggaaggggcatcttttcatcctaagaaacaagctgttattgtctgaaccaacagcaagcttggggaagaaaactcatccat

SEQ ID NO: 10387 - DNA, 1538 bp, Artificial sequence
  DNA replication origin
gaagcccaaactcccaatgtgatggtactgggacttggggcctttgggaggcaattaggtcatggtggagcccttgtgatggaattaatgcctttacaagaaaagatatgagagctcgctctctctctctccacccccacaccccccgccccaccgtttccctctccctcctcctcctctccccaacatggtgtgaagacacagcaagaaagtggccatctgcaagccagggagagaaccctcaccaggaaccaagtcaccagcgccttgaccttggacttccagcctccagagctgtaggaaataacagtctgctgtttaagccctgagttggtgggattttgtgagagcagccaagctgactgtgataggtgggattttacccagcaacactcagctgctccagagtgccctggagaggggaaagggtggatttatccagggtcagggctttgccaggcaagcaagaggaaggaaagggggcacagcagggggcgggaggaagcaaaaaggcatgggtggcagaccccaggacctgagctggggaaagcaggaaataacggctgccaggcaggatggatggtgagaagagggtgaggccagttggctggagggcgaggaccagggatgggacatcaaggaatcctgagcaagtggcctggaggggtgggaagtggtggccgagagctgggacctagacttgacacatcaaaaatgaagccccttctgagaatggtggagaatgatgtgatggggcaggtggctgagcggcaggagcaggtggctgcaggtggggaaggggtgaagctgtgaggcctggggacttgggtgggtcactcccatgtgggttaaaatccccccacccacccagtgagctcaagtcttctgtaaatacagggacggggcagaggcacgaggtctcctgggggccggcagatggcaccagtgacttgggaaagagcagcacagccagatgtctacaactcccaaaggagaggaaggagcccagaatccgcacatccgctccagctcccagggccccagtgtggggaaacttcttccacctgagacacccagggcaccgcgtcctggggacagcccattttaggcggaggaggggatggagatgctgctcagaggagtggggcatgaaggcctgctgaactcagaggggacaggttgcacagggaggggagtgtgggctgggagtggggtgagtgcctgagggcaaatgtgcgtgagcatggggatgaggatgtggcggtatgtgtgagtgtgcgtgagctgagggtgtgggaatgttcgtgcgtatgcaagtgactgcaagtgtgtatgtgagtgtggggggtgtgagtaacagtgttagtgtatgaatgtaggtgtgtgagagtgtgagggtgaatgtgtgtgtgaatgtgtgggtgggtgagtgtcagtgtggatgagtgtggatgtgagtgggtgtgtctgcaagagagagaaagaggagagagagagagagagagagatggataggatggggatggctagcgggtggt

SEQ ID NO: 10388 - DNA, 1363 bp, Artificial sequence
  DNA replication origin
tcacgctgggggcgctgaggccggccatggtcatggaagtgggcaccctggacgctggaggcctgcgggcgctgctgggggagcgagcggcgcaatgcctgctgctggactgccgctccttcttcgctttcaacgccggccacatcgccggctctgtcaacgtgcgcttcagcaccatcgtgcggcgccgggccaagggcgccatgggcctggagcacatcgtgcccaacgccgagctccgcggccgcctgctggccggcgcctaccacgccgtggtgttgctggacgagcgcagcgccgccctggacggcgccaagcgcgacggcaccctggccctggcggccggcgcgctctgccgcgaggcgcgcgccgcgcaagtcttcttcctcaaaggtacgccctcggggaagctcggggcgggccgcacacccctgaggttttgcccggtacccctggctctcggctcccgggggatcgccccacctgcagcgcgtgggcgctggagtacatttatctctggaacttgtcattggctttgtttggctctggaaacaaagacttgcctgggcctttccgatgtaaacttccagcccttggtgggtgggggagttgtatgaaggtgccgtgtcccggtgtcactaatggggaaaaaaaatgtctttgtattcccaggaggatacgaagcgttttcggcttcctgcccggagctgtgcagcaaacagtcgacccccatggggctcagccttcccctgagtactagcgtccctgacagcgcggaatctgggtgcagttcctgcagtaccccactctacgatcaggttagtaggtgtccctgccacagggaagaagtaagaactggcaaaggcatggaagagtagtgccagggagaatatagaaagtgacctgcagcattatttataacggaggggacacagggatatgatttattccacagttaagtggtctgacggagccgagtctccaattgtaggctctacggaaatgaacttgctggtcctgcccaggcaaatgggcttagttccctatttatttatcctccagcaacagaactgagttcactcggtatctgaaattgacttttccagcagaaagtttttgtgggtatgggcactggccttggctttgagcaagcttgatgaatgttggatatttctggatttcagggtggcccggtggaaatcctgccctttctgtacctgggcagtgcgtatcacgcttcccgcaaggacatgctggatgccttgggcatcactgccttgatcaacgtctcagccaattgtcccaaccattttgagggtcactaccagtacaagagcatccctgtggaggacaaccacaaggc

SEQ ID NO: 10389 - DNA, 1335 bp, Artificial sequence
  DNA replication origin
tgagaaaaaaaatgggacaaatcaagtcggtatgcagtgaaaagtcagcagctgtaacattctatgattcaacgcaaaaactatgttgagttcctcagctgaataagtagtataaacaatttctttttcttctatctctccatacagggagggcgttgcccttatctgaggacctctttgctgtcctcgaccaatgttcaaatgaaggtagaagacgcccttttaaaaaaaaaagcactccatgccctgaacttttctagaagaatccaggcagaacatttgcgcaggcgaaaacacacaagctaagcgaggcaaatgcagaagttgccactggtgatacagctcgcacagcgacgacacagggtggccagcgaaatcccctcccccaggaggggaggaaaccgcagaatgttcctgactcggcacccgggcgggtggcgcaatgtttatgtttgtgtacccagcgcgtcgcgtcgctgcagcaggctccgctgtccagggggccgtcactgggactcagggcacggagatcgctgggcggggcgggggtcttcccaagtgttgcgatccaggtcctggcaatccgcccacaatggcccgggattggattttgctttcggcctataacggccgcgacgacagggagcgagggttgtggccggcttctgttccgggttggaggcccccagcccagcgcttagtgggcgctcactgtgtatactgcctatttgtataataaagaaagggatggagaagctcagtctggagccaaggtgacagaaacgtgtcgggcggcccctggggggcgccgtcgagtcgcgctgcgggtcgcccctcacccctccaaacgccaaaccctggaatccactgcggggccttgcgacccctcaccgggatttcagccccctgacctgcctcccttggctccaagtcttccgggggccacaagactaggaatagcattatttcccggtgggagtttgcttgctcacactttcatggcaaatgtagatattttaaagccaccttaaagaaaagtctgggaaacaggaaagcattgccctgaacctctccgccccaactcgctcgagtcggtcttggtagggacgacttttctatcggcagagttgttcatttttctctaaacttcatcttaggcgcctatttgctgcccccaccccagtagtgtggttctgggcaagtcagtcgcttcgcctggggaacctcagtttccccgcctgttagtgatgaggaaatgaggaaaaggggcacaagagtatgcaaaagcacaggaagcccctttcggttcaggtcggcggccgaggggcacgggga

SEQ ID NO: 10390 - DNA, 1768 bp, Artificial sequence
  DNA replication origin
ggcggagggaaggtgggtggatttgtctcccgctgcacgagggggcctccgcggctctggctggcttcgtgtgcggcagggggggggctcgcctggggtccctaggggcctgcggaggcatgcacagggcggggagccgcttttgcatgcagggcgggaggggtccgcggcgtgccggggcgctccctctgcccgctgagggaactcccgactggccggggtcgccacactcacctcctgaagtcaaagggcatcgtgccgccgccgggggtgggagcgctgcaggccaggcgggccgcggcgccgcgtgggtccgagcccgctgccaacgcctcctccggccgccccgcccccgccggccgcccccctgacactcgccactcgccactcgccactcgcctcccgctgccgggaagtgacgctccgcgcagcccattgggcgccgcccgcccggccgccccttccgccacccggttaaaggggcccgcgggcaggcagggaaggggcggagagtcgaggctgtcggaagggaagggagtcccccaaagactccagtactcattccttcaagcctcccacttagatttccttctccatctctttggatgccctcggacaaattctctgcttctccgagcccagttttttgcatttgtaaacagtttcactgaactgtgattgagttgggggcggggggcggggtgatacagactttggccgtgcacagcgtctagctctgagtgagggcctaatactgtgggggaagggaagaggtcggccatcctaggctgttaaggtggactcacctctgcccctgccgtgtctctctgggaaagccactgggcttctcagagcgccccccccccgccccgccccttttgcatatctgcacaaagaggacgatgacacctacttgagggggttttcctggggatcagctgagaaacaggagactggcttagcacagtgccaggcacctgaaactattgaggctggcagtggctgtccctgcttccatctgcccctgtcgttcactccagtgggcattcacagagcatctgctctgaaccaggtccatcgagaacatgcagggttgtggcagaggcagatgggacctgcactgtgacttggccaacgtggactgtgccgattgtctccttcttagagcctcagtttcctcctcaggaatacagagcagctgcctccgtgactgctggattagaggagatggtagttgaggtcacacaagacctgagtaggggaaactcactctgaacttccccgaggttctgtcactggccctttctccaaggttgtggtgggacagggcttcaaaaaacccaggggagaatggtgagggctcgggttccaaaagcagagtcaatggacagtttccccctgtgtaaatagaggggaacagcagtgctggttcctccgggaggattcagaagggacaacactagcacggggtctggggtagggtgacgtggtgaaccaaagccttcccctagagcatatgccgggacctgacctctgcgttcccttttcattcattcactcattcattcattcattcattcagtgtcagtggtctgacactgttgggggagaaaaggaaatctcagcctgaactggaaacctagggacagcagggagagttaagggatcttgagcagccactgcttccaaacagccattcgttggccctgtgtgggaggaaacatgcaatgatggatctttgacctcgaatcctccctcctcaaactgt

SEQ ID NO: 10391 - DNA, 1086 bp, Artificial sequence
  DNA replication origin
ggataccttgcattcccctcccccacactaggaaacatttcctccctcctcccagatgggaacagcccataacaccccagcatccctctcctccctctactgagcctccttggtggaccccacctcagctgacaggtggggcagggcacctggaatgagtccggaggggcctggggccccatgcagcctgccggcagctggagggttttaagtttctatagcctgaggctcccccaggccgggcagatcgggaggcctgcccccgcccctccctccctcagccccagccctgtccgctgggtatgggggcaccatgggaaggggaggaggcgccttgggcaggactctgcagaagggccaccggggtctggccttggctttctgcagtcaccacaatgggtcctttgtggggtccagctgcctcatggtctaggttgcatggggcattctggaagcctgcgggggaagagatctccaccagaggttcccttgaggtgtggagccccaggggatgtcctggcctgaggcagccacacttggtgtctggctgggaaaagagcagggctttaatgcagggaggagctggattagaatcctggctctgccctttctactgaacagctcggtatattctagaagttaggggcaaaggctctgggttcagaactccctgtcgccgctcggctggctgacctcagcaagtctccgagcgccctcagtttcaccacctgcaaattggggctaaaaataaggtctccgcttgtgacgactgagtgcgtgaaacacccttagcagagtctggcatgatttagagctcagaaatagggcattagtggatggggggtgttctccaggaggggttttccacatccacaaaatagtgattcagatgcctgtgccacaggaggtatttcttcccctcttcttgcatgtgaaggcagtgtaaagtgacagtctacccagagagaaaggcccttagcctgccatgacccccatagcatgggatatattggggtttaggcccaaagaggacactggtcttggacctcttgattggttgacatggttttccagcctgtccgggtc

SEQ ID NO: 10392 - DNA, 1170 bp, Artificial sequence
  DNA replication origin
ctcaactatgaccactactgtaccaccctgggaccgtcacttaacctctctgtgcctcagtttctttgtctataaagtgggggcaacaacagtaactatctcacagcatggtggtgaggctcaaatgactgagcacatataaagtacttaggcagagcctggcaccccagaaatgccacgtggatatttgtggttactattattattaacgcttgtttgacaaacatttacgcagtgcctactaacacaccccctcttttaggcccttaggcaaggagataaaaatcaacccttggcccagtgagtttgtagtttagcggtagaggcaaagaaagggaaggagaaggtagtggcatcctcatcacgaggtgctggattaactcaggagggggtacctgacttggcctggggtcctcggtgaagcttcctacagggggtgatgtgtgcacagagcaggagggggagaagatggatgggtggagggaaagagcagcccaggcaaggagaggagcagaagcaaagacagagtaggaccgaatctgggaagctgggcgctgtcctctctccggcacagggtacagcccgatgtgcagggagaggaggacggaaaactggggcggggctggaggagagggtcctgagggccaggctgtggctagggagtctcacaccaagtgtcgatgggggccggcgggcggtctactgtgggagactgtgagaggtcagcaaatttgggaggtaggggtggggagagggaatggagagaaaacaaaccagcaggcggccatcaccgagccccagctgacacctgccaggtagagatgcgggctcaggaggccagaccttctgagtgtccaagagaagccaaaaatgtggaattttacatggaagttcaccattctcaaatgctgggccaacactctacaggacaaatgagacgcgtctgcagatgacatgaggcctggggcctaggcggtgaccatttgagcggagaggccttgcggagctggaagaggatgtggtccgcctcgtgtcataggaaggccagcctgggccagtggggagggcatgtgggttctcctaagactggagaaatgagcagcaggaaagggctgcagcgggaggggtctcgtcctcactccaccccaacttcgtgttagaccttcagaa

SEQ ID NO: 10393 - DNA, 1074 bp, Artificial sequence
  DNA replication origin
gtcttagtaaacagtaagtgctcaataaatgtccatggtttttatcattattattaatatcgatgctcaaggagttgatccagtgtttaataagggtactattctcccttcacgtcgatgaaaccaggctcagaggagcacagctggctggccaagatcataggaccaagaggaggcagaggcaggatctgagcccagggacagggggcccagagcccatgctctttccaaggcattgcactgcctggatgggatgggaatcggtgaaaagctgaggggccggtggccctcagtggacatgtgatgcaggcatcctagtcctttttcataatcttcaggtgtgtcccctcccaccagggcccaggtgcctgcagggtacaggggtgcttaggggtccagttgcgtctgtcccacaagcctctcccactcccgtcaacacccccaggacgagggctccctgagcctcagcacagagcgtgtgctcacaaacttcagtggaatgagcctgagtggaggagggagtcctcagcagaactcccaggatgcagggaaggcacgcgctggtggagcagtcgggagcacattccaggtgggggacgccagatggcgtcagggagtcaggcgagtgcgtgggagggtgggggtgtgggtggacagtggccttgtagggagaggtacgcaagggcctggggaggtgtgggtggggggagtgtaaatggaatgtggtggagggccttgaaattctagtctgaggcatgagttcgatgacatctatacaaaacaattttatttgctttttgaagagcacttaaatagttcagattcctgcctgaagtctctgacctctatgcttcaaaatttgatcgaatggaaacttaggcggcggtgaggcctgccgcaagggcttggggtggggtggagggagggatggagattctgcaagcacgtgctccggagccttgagtttcaaatcctgagtcgtccaggtaaaagtatgtgcatctattaccaaccaggtggatgtctaaaatacatccctcgacagccagtcaccgggttctgcccacccctgct

SEQ ID NO: 10394 - DNA, 971 bp, Artificial sequence
  DNA replication origin
cccccgtgacctgcaggcggtggcccaaggcccgcgcgccctagcactcggccgtggtcccggcccccgccccgcgccggcccggcccagagccccagcgctgctgcctcctaggcaagcggccctccgccccccgttccgctcttcccccagcccaggcccctgggggttccgagcagcgggtggcggcgctcacctgtgggtgtaggggcggctcagggactgggtccggttccgctgcaggggccacggcccctctccatgctgcctcgggtttgttttgtttatgtccttcctgacgggttcccggaaatcgcgtgactcgcccccctcacgtgggccgcggcgaggaggaggagggaggcgggggcccgccggcctcgggccaatcgcgaggcgttccacagcccggccaatcaggggctgagtccggccgggcacccctgtcacgtgtcgccggaggggcgggttgccgggaaaaaccaggaagagagggcggagcgggggctcggtgccggcctctgcagtgtgggcgtgggccgtctgcgatacccggcagcacgcccaggatgggagaggatgttcctttttacaaaggcttcaaatctagcgttttatcagatctcagaactgcgctgtgaggcatgaggtgtccttttgcccattttgtagtttaagttcactgaaacttgaagtggctaacttgattagtagggggattgtatcgatgtcatgggtgatggaccttctccccatctgaacgtcttaattaagtgagagacaaaccttgccttttgtcgttcgttcattcattcaccgactcaatatttatttagcacggattccgaggcacagggatcaatcagactgcgtgcacctttgaagagagagacccgtatacgactgtacaaccagaatgccactactacagaagcgcctagacaaacaaacctccgtgacacatggtcgtt

SEQ ID NO: 10395 - DNA, 1544 bp, Artificial sequence
  DNA replication origin
cagcatggagaggggccgtggcccctgcagcggaaccggacccagtccctgagccgcccctacacccacaggtgagcgccgccacccgctgctcggaacccccaggggcctgggctgggggaagagcggaacggggggcggagggccgcttgcctaggaggcagcagcgctggggctctgggccgggccggcgcggggcgggggccgggaccacggccgagtgctagggcgcgcgggccttgggccaccgcctgcaggtcacgggggctccgctcccctcccccacccccggcccgggacggttacataaaagcgcggggcggcggtagatgggactcgcgggcgggcagtaggctaggccggggatgggcagcgccgggcgtccgtcctgccgggccgcccggcccttccccgctgcctccgagcccggggccgctgctgccggcagtcggcctgtcagagaagagagcgggtgggaggggcccgggaggggaggggaggcgagactggcgggggaggaggggagagaggggcgtgtgaggaagggccggggccgcggaggttggagccaggctggcaggagacgaagaggcgcgggctggggctaggggggtccgagcagggcgtctcgggggtagccgctcccccttctgtccccgcctcagaggcgacgggcgaggggcctccctcccgggatttgtttatatgtcttctcaaagcagcttgaagcggctgaggggcggagccctcagagctgagtggcaggctctggcgtccaatggagcgggcggatggagacttctgcaccaatgggcgtgggggaggcggtgccgcgggggggccactaattggttaggctgtgccggaggtgggccgggcggggcagccatgttagatgggaggggaccagtggtggtgggtcactgagaggggaggagacagggcaaagggcgagggagccgggccgggggtgtttcgggtgtccgaaggcgagtccgatcggaccaggaagtagctcaggggagcctgacctcgacccgcctttctcctcacacgagctgaggaggcagggaagtaccgagggcagtcaagcctcccctgggggtggttcctgggactagatggagctcagtctctggattctccctctttctcggccctatgcttcctgacagacctggccgccaaaccctgtaatcgccctcctttaacccaagaaagcaagtctttctgccgtttctgagctggcttgagccttaagactaccttaaggaggtacttggataaatagcggtctgaatttctgtaccaggcctcagataagagacaggcagtgaaggggaagttttgtaaaagaaaacgggactagaaaagccgagcaagttgagggctgggcggggtttctttttttttttttttctcatcaggatgccttttaaagattaggccccgtgcttgtcctagtcttagtagtaatttgcccctcttgctaacataagttggtagtccacattaatcagcttcttgagaaaactgagcccaca

SEQ ID NO: 10396 - DNA, 1059 bp, Artificial sequence
  DNA replication origin
ggaggctgagtcgggcagatcacttgaggtcaggagttcgagactagcctagccaacatggtgaaaccccatctctactaaaaatacaaaaattagccagatgtggtgatgggcacctgtaatcccagctactcaggaggctgaggcaggggaatggcttgaatccaggaggtggaggttgcagtgagctgagatagcaccactgcactccagcctgggtggcagagcaagactctgtctcaaaataataataataataataataagtaagcaaaaacaaaaacaaaacagatggaaggcaagtgcttacctcacagactgtgatgagggctgagagaagggtgtcatgtcccggcccccagggccctcagccagactggtcatttgcagcaagtccatgtggaaaggccactggtggctgagggtgcagagctcagaatcaagtgggcaggggtcgggaaggacagagctggggggcgtctacctctgctcagtgcccaaggggtggatgaggttcttgcagagtgcatgtgggaagagaaaagggctctgaggttgactccggggtacatgatgatgaagggcagtgggcgaaaggaactagcagaaaaggccctggaaggtgcagaggaaccctggagggggcggggagccaggtggccctgcaggcaagcggagaggaggaggggagtgtctggatgtcaggggcgagggaaggcccaggaggctgaggtctgaggagaggctgtgctatcaatctctgggggtgccctctggggtgcccagagcagtttcggtgcatggggagggcagaggacagctcgaaaagggacatgtgtctgtgaagcctgtcagtgtggaccgttctgtcaaaaagtctcatgagttgagcagaagggagcctgagtgaggaggaggctgagaaaggaagcacatttaataaagcgagaaaaggggatttgctagggaagacggaatgggggttcctcaaaaaacatagaattaccacacagtccagcaattccactcctgggtacataccccaaagcattgcaagca

SEQ ID NO: 10397 - DNA, 1113 bp, Artificial sequence
  DNA replication origin
ggcgggaaccggggctgcgtgcggcccttgcgggccagctagagttctgggtgggcgtgggattggcgggccccacactctgagcggccggccggccccgccagcctgggcagtgaggggcttagcacccatgccagcagctgcagaggatgtgccggtcccctagtagtgccggtggctcgatttctcgccgggccttagctgcctccccgaggggcagggctcgggacctgcagcccgccatgcctgagcctgcccctgacgccgtgggctcctgcgcggccccagcctccccgacgagcgccgccccctgctccacggcgcccggtcccatcgactgcccaagggctgaggagtgccggcgcaagcaccacgggactggcaggcagctccgcctgcggcccgggtccaggaccactgagtgaagccagctgggctcctgggtctagtggggatttgtagaagctttatgtctagctaagggattgtgaatacaccaatcggcactctgtatctagctcaaggtttgtaaatgcaccaatcagcgctctgtgtctagctgatctgttggggacttggagaacctttatgtctagctaggggattgtggatgcaccggtcagtgctctgtgtctagctcaaggtttgtgaatgcaccaatcagtgctctgtatctagctaatctagtggggacttggagaatttttgtgtctagctcagggattgtaaacgcaccaatcagcaccctgtcaaaacagaccaattggctctctgtaaaatggaccaatcaggaggaagtgggtggggccagataagagaataaaagcaggctgccggagccagcagcggcaacccgttcgggtcactttccactgtgtgcgaggtttgttatttcactctttgcaataagtcttgctgctgctcactctttgggtccacattgcctttgtgagctgtaacactcaccgcgaaggtctgcacagctttactcctgaagccagcgagaccacgaacccaccagaaggaagaaactcagaagacatccgaacatcagaaggaacaaactcccgtcaggctgcttttaagaaccgtaacactcaccgtgagggtccg

SEQ ID NO: 10398 - DNA, 1125 bp, Artificial sequence
  DNA replication origin
aaagacgtatcttaaaaagatcctgggtcagttcctcaggctctggggctggtgatagaggagctggaggtccggtcccagcacctgctgactggcgatcctggatgcgagcaaggtgtgtttgttatcctcattttacagacaaacaagagcaaccaccgccgccgccgccaccaccaccaccgccaccaccaccaccgaggcatgcagtgggcaagtcccataacaagcagggtttaaacttgatttcgctgagcctcagttttctcatctataaaatcaggacactagtaacatttgttggtcagaactatggtgaaattaaatgccctaaggaaaggacatcagtaaggttagggcttaggggctcccttgaccatgtgaatttatggggcctcaccacagctggaggtgagcaccatccgcaggacacctctctggggtccagcctcggcactcagtcccacgggcagctgatgaggccccgacgtggcatctgggggcatctgaggagcctgagaacgcttgccaagggcttgggttcttggcttttccatctggaaacaggctaaggagttcttttaagtgggatgatcacggtgctctccagctacagagggcccaggttcttttgctgtccatttaatgcccagtgcctggaaccgtgcctggcacacattaggattcaaggaggggagcttgggagcacagggaaggcggtctctgaagtgaggcatcctgaatttaaccagagttcgactagtactggctatttgctcgcaggtaagtcattaaacctctccgggcctcagcttctaaactttaggatttttttttttttggattattgaggattatatgagacaatctcagaaagtgcccgacacggaaccagtatggttccagcaagggttaggttttattagtatcaatgttatcaatttgctcagggaatgcctgtgcctgagatctgagaccagtcccgggcggccacctctctcctgcttctgaagcgccgcaagctgaaagaagcacacgtgcggggtcaacgcactctctttaatgggaaggggatcgtcatttcttacagcaataggtaaaaacataaatacgggtgggtgcgtg

SEQ ID NO: 10399 - DNA, 883 bp, Artificial sequence
  DNA replication origin
cgggcgcgacggcggaggaagccgcgcgtgctcttctcgcaggcgcaggtctatgagctggagcggcgcttcaagcagcagcggtacctgtcggcccccgaacgcgaccagctggccagcgtgctgaaactcacgtccacgcaggtcaagatctggttccagaaccggcgctacaagtgcaagcggcagcggcaggaccagactctggagctggtggggctgcccccgccgccgccgccgcctgcccgcaggatcgcggtgccagtgctggtgcgcgatggcaagccatgcctaggggactcggcgccctacgcgcctgcctacggcgtgggcctcaatccctacggttataacgcctaccccgcctatccgggttacggcggcgcggcctgcagccctggctacagctgcactgccgcttaccccgccgggccttccccagcgcagccggccactgccgccgccaacaacaacttcgtgaacttcggcgtcggggacttgaatgcggttcagagccccgggattccgcagagcaactcgggagtgtccacgctgcatggtatccgagcctggtagggaagggacccgcgtggcgcgaccctgaccgatcccacctcaacagctccctgactctcggggggagaaggggctcccaacatgaccctgagtcccctggattttgcattcactcctgcggagacctaggaactttttctgtcccacgcgcgtttgttcttgcgcacgggagagtttgtggcggcgattatgcagcgtgcaatgagtgatcctgcagcctggtgtcttagctgtccccccaggagtgccctccgagagtccatgggcacccccggttggaactgggactgagctcgggcacgcaggg

SEQ ID NO: 10400 - DNA, 1194 bp, Artificial sequence
  DNA replication origin
taaatctcctttggatttacgaatctttttaaagatctgatgagaaccgctaaacagaaattgaaatgttgctcaccagacagcttttgcgtacaatcggaggagggtcctggaccttctttctgcagcccacccacgacccgggtttctggtgcctttctttctttgcgccaggaaagtggagtctgggatcgagggccttgattttaaaatgggatactgcggaccctcaggaatctgacttcactttattttttcagcacaacttgccggcgcggccagggcggagaggttccctcgtggaaaagttaggaaatgctgcgctaccgcgggcacaagggagtggacgagatgagtgcgggatcatcccgcaggccatcccaggatcggggagggaggccggccccgctgcagaaaggggccttctgggagaccccccagcccaaggcaggagcccgggcgattcccgggaggccgcaggcgctgggcgaagcgctgggcgaagggccgctgccagccgggagagaattcataggtttgttgaggagcagaggcctgggaacaaattcgggcgggcacggcggctagaactgatcgctaccaattcgaggaagccagcaaggcaggttccgaggccgcctgcccacccgcagcttcttggacactgcgcaaaccctgctgcggccaggctggagcctccgatcaccaaaccaacactccctggccttctgtttcttgattccttaattttgagataagaccgtccctagcagtgaggcctcggcctctgttcatttaacttctcaaaccaaactagccctaattcagttcaccccagagcatcacctggttttatttttatttttttatttttttatttattttttttttttttgcagcctgaaattttaagtcaccgtctgtctccctcaccagggtgtgaactgccccgagggcagagacctcccgttttgttctccagcgccttgagccagcctgactttctacaaatgctgagtgagacgtgtcggtggctcccagtgcacttggcagagtgagccgcagccagctgggcgctccaggcaggacacagtggcctccacgaggatcccttaccattactgtgcggccgcgctccgtaggtcaagccgctcttaccaagcgtctctctgcctctctgttccccctcagagc

SEQ ID NO: 10401 - DNA, 1327 bp, Artificial sequence
  DNA replication origin
gtatgactatattaggtgacacgaaactgctcatcgctcctgtcatcgaggcccctggcccaatggcaggctgagtccccctcctctggcctggtcccgcctctcctgccccttgtgctcagcgctacctgctgcccggacacatccagagctggccgacgggtgcgcgggcgggcggcggcaccatgcagggaagctgccaggggccgtgggcagcgccgctttctgccgcccacctggcgctgtgagactggcgctgccaccatgttccccagccctgctctcacgcccacgcccttctcagtcaaagacatcctaaacctggaacagcagcagcgcagcctggctgccgccggagagctctctgcccgcctggaggcgaccctggcgccctcctcctgcatgctggccgccttcaagccagaggcctacgctgggcccgaggcggctgcgccgggcctcccagagctgcgcgcagagctgggccgcgcgccttcaccggccaagtgtgcgtctgcctttcccgccgcccccgccttctatccacgtgcctacagcgaccccgacccagccaaggaccctagagccgaaaagaaaggtgaggaggaaacacaggcccccttctcccctcctgggtcgctttcgtccccaagaaactcagggccaggaggaggagacacgcgcccttgggccgagggctgggctgcggcggggggttcagaatgtaagatgcctggtgttgtcgccaggctcccgcgccccgcgtccaatcggaggttcagaggaaatgccggattgaaaggatcagaagcaagagaccaaaaaacgtttccccccggcctaacaaagccccgggcggcttcggctctgctcctgggtctggtaggaagttgagaaatcggtttatggtagacagaacagagagacaagcagataatctctgtttttaaatctcctttggatttacgaatctttttaaagatctgatgagaaccgctaaacagaaattgaaatgttgctcaccagacagcttttgcgtacaatcggaggagggtcctggaccttctttctgcagcccacccacgacccgggtttctggtgcctttctttctttgcgccaggaaagtggagtctgggatcgagggccttgattttaaaatgggatactgcggaccctcaggaatctgacttcactttattttttcagcacaacttgccggcgcggccagggcggagaggttccctcgtggaaaagttaggaaatgctgcgctaccgcgggcacaagggagtggacgagatgagtgcgggatcatcccgcaggccatc

SEQ ID NO: 10402 - DNA, 1071 bp, Artificial sequence
  DNA replication origin
gctgctgctgttccaggtttaggatgtctttgactgagaagggcgtgggcgtgagagcagggctggggaacatggtggcagcgccagtctcacagcgccaggtgggcggcagaaagcggcgctgcccacggcccctggcagcttccctgcatggtgccgccgcccgcccgcgcacccgtcggccagctctggatgtgtccgggcagcaggtagcgctgagcacaaggggcaggagaggcgggaccaggccagaggagggggactcagcctgccattgggccaggggcctcgatgacaggagcgatgagcagtttcgtgtcacctaatatagtcatacggcaaaaaaaaaaaaaaaaaaaaaaaaaaaaaaaaaaaaaaaaagccctgcccagcttttttaaaggggccacgacgcatttggaagggtctccttttgctcctgcagcctgcgtttgctccctaatgtgagcctgaaaagcctaccagaggcatgcagagtcaggcctctgggcagggctggatgggtgtgggtttgaagaaatattcctcagcacccaaaccagcatgggagagagaaggatggggtgggaagcggtggggaggagagtgatttgaggaaggctttattactgaaggtggtgggatgagggagagtctgaataggaagagaagcctggaggacagggctggctttggggatagcagcagggcgagattctggacaattcgggggtttggtttggcttggcctacagggtcagtcatgccgcaggctctgggtgcttctgggcgagtcaacgaaagtaagggcaaggtgagtgatggccaggtggggtaggagttgctgcctcctacagtagtgttatgcacagcacaactccagggggcatcagtcactgccagtaccctcccagggaaatgcctctccccttaataatgaaataaatcaggaatcccagctggtaagctcagcttcccaggagacacctgtcttgtggagtgccccagctaccagccaccttgtttcccctgtttggaggccatcgatcccacctccctccttcccgtgcc

SEQ ID NO: 10403 - DNA, 1560 bp, Artificial sequence
  DNA replication origin
gcactcaaggtgcacaagttgacacttgtattagtctgttttcacactttaataaagacatacccaagaccaaataatttataaagaaaaagaggtgtaatggacttacagttccacttggctggggaggcctcacgatcatggcagaaggcaaaagtcacatcttatatggcagcagacaagagagaatgagagccaagtgaaaggggaaaccgcttataaaatcatcagatctcgtgagacttattcactaccatgagaacagtatgggggaaccacccccatgattcagttatctcccaccaggtccctcctgcaacacgtgggaattacagaagctacacaattcaagatgagatttgggtggggacacagccaaaccatatcaacactcaacaaataattttgaatgactgaaaggatggatggatggacagatgaatgaatggatggttggatggatagttgaatgatgggtgggtgagtggatggatggatagatgaaagggtggatgactggatggatgaggggatggatggatggatggatggatggactgatgaatggatggatggttgggtggactgatgaatggatggatggttgggtggatagttgaatgatgggtgggtgagtggatggatgcgtagatgaatgggtggatggttggatggatgaagggatgggtggatggatggatggatggactgatgaatgaatggatggttgggtggatagttgaatgatgggtgggtgagtggatggatggatagatgaaagggtggatgattggatggatgaggggatggatggatggatggatggatggactgatgaatggatggatggttgggtggatagttgaatgatgggtgggtgagtggatggatggatagatgaaagggtggatgattggatggatgaggggatggatggatggatggatggactgatgaatggatggatggttgggtggatagttgaatgatgggtgggtgagtggatggatgcgtagatgaatgggtggatggttggatggatgaagggatgggtggatggatggatggatgcatggatgggtggactgatgaatgaatggatggatagatggattgataggagggtggatgaaaatatgcaagggtggtggatgaatagatggacaggtggttggatgacagggtggacggacggatgaatggatggatgggagggtgaacgaatagatggatggtggatggatggatgaacagactcagcatataagtggtggagccaagtttatctgactccaacaggcctttccatgtgagcataagagagctcctgctttttagcaccagaatagggacacagcaggcactgtcacatagtcccccaaacacagggtagcagctgaccatcctggtttcaaccagtttccacagctgcctggatgcggcacgtgcgagcgggattcagccactgggtgagccatgacggtgagaaccaaagattctcctcctcagtaaccccacgagtgagttgatgggctgaggttctggtttaccgggacgcgc

SEQ ID NO: 10404 - DNA, 847 bp, Artificial sequence
  DNA replication origin
cggcaccagggctaggtgagcacactgcaggggtgagggtctgtctttctgagatactaactggatgctgtcttcaagctcctttccccagagtaaggggagggctgtcttgggaatatgcagactgtctttcgccttcccggccagggcgttctgtctgccagatgagcccccagaagcccagggcggatctggatcccagaaggctggatgagcccatgctgtcctctgcccttggccctctctctctccaggaggaagctgtgaactgcggggaggggtgtgtgtgccgaaccaagttaatccaagccgtgttccgagctggcctggtgccttctgaggctgcaagctcagcccgtgtctaatgacaaagtccagctcgttcaactgggtgtcagcaagcctaaaggattttaaaaaatacttggagggggatgtgcctggagcctgccagcacccagtgacatggcgagtgggggtaaaaccaggcaggcggcagctagggggagacagatgctgtgcagaaagtggggcgggcaggaaggggtgaggggagcggagaggaagagcttgaaaagagcagcattaactgggggtgagtgttctggtgtggatgggggttgggttgaagaatgggggtggtgcagattctggggtgactgtgatttcctcatctctaaagtgaaaagcaaattcagttctctctttttttttttttttgaccaatgccacacatttggaaatgggcttcttgatatttggggactgataggatactttaatcagttaagatggttgggaaaaaaaaacctaaaaaacaggcagttcagctagaagtacaagtcga

SEQ ID NO: 10405 - DNA, 1302 bp, Artificial sequence
  DNA replication origin
caaaagatgacctgcccgcgtgtctcctcgccccctcccccagccgtgtcacatggcggccccaaccaggcgggcagtgcgccccgccgcggagacccagggccgcgtcgcctgggcagtgggtgatgaaacttcccaggcgcattaccgcagagggcgcgggcggggcgcggggcgggggtgggggatcgagagctggtaccggggctcacctgttctccaggaggagggtggggacggggggaggggcgagtgcgcgccaacgccgggtgcgtgccctggggcgcttgggcgcggcgctcgtgtccccgccctcccccagccctgcgagccccccgagctgcgccgtggggtgacgggaccgagagcagttcctgtccccggccccggcgcgggggagacgtgagcgtgcacacgtacacacacagcaggggaagaggcgctccaagcggcgcccaactttctccttccctccacgggccgggtgagaaagtagccgggggctatcccgacccggcggttcttggggagggggccgaacaagaaaagggaggagatggagataacttccccggatttagcttttttgtctttgtttttgttctcaccacttccatcggatgactggagagtaaaagggaacccggagcggggtggcgagcagcgctttgagaaaatgcaggagtgtgtttggagacgcgtaaagttgcctttcaagctctggcctccgggcacgcgatgctccgcggcgggctgactcagggctgccttgggcctccctgccaccctcctggaaatgatgcaagtcctgactgtcacctggatccctgcagcccagcctggaatgcgtctggattaggggaaagacgagaaacgacactccaggtgttgcacggcccaccaaagcgggaagatagggcagttgctcagaccaaatactgtatctagtgcttctgctcctatcttcaatcgtggggttctttttaatgcaaagtgtcacaaggccaggaattcccatgtgtgctcagttggcccacagcatcattgtgcctaggaaactgcttcaatttatcaagtcctctgggctgggaatctcactgaattccaaacggcggaaagaggaaactttcccaacccgatgtgggtgtgacgcgagccaggggccccagggacactgtcccagagcacaccgtccccctttaacagcaactggagcttggattcgctcttatattgtacagtcctttcgaccattgccctggagcacccgcacacgcgcacgcatctccggccgcgctcaca

SEQ ID NO: 10406 - DNA, 1125 bp, Artificial sequence
  DNA replication origin
tcttcccctgctgtgtgtgtacgtgtgcacgctcacgtctcccccgcgccggggccggggacaggaactgctctcggtcccgtcaccccacggcgcagctcggggggctcgcagggctgggggagggcggggacacgagcgccgcgcccaagcgccccagggcacgcacccggcgttggcgcgcactcgcccctccccccgtccccaccctcctcctggagaacaggtgagccccggtaccagctctcgatcccccacccccgccccgcgccccgcccgcgccctctgcggtaatgcgcctgggaagtttcatcacccactgcccaggcgacgcggccctgggtctccgcggcggggcgcactgcccgcctggttggggccgccatgtgacacggctgggggagggggcgaggagacacgcgggcaggtcatcttttggccggcgcttgacttccaaagctttcctttcccgtgtcccggctgcacgcgggagtggggaaggcggaggcggggggccaggatggccacggctggccgcagctatccggcgtgtcgagctctcctgagtcggaaggaaggagaggagggggtggggagggcgtcttcagagtgggcttcccctgcgctggagcgccagggagcatccataaattgtcactttgaaggtccgaacctgcggcggtagggaccatgcccactattctaatagcaattactccgcgcagccttggatcttttgtgcaaggacgtgcgggtacaaatacattaaaacggccagttcacattgcccaccctgcttgtgtttgcatagttaacttagcttcctagtttatggaaaactacctcctgtagatccttaaaaacaaagcaaacaaacgacacagcggcattctggcctctcctaactaactctttaaggctctgaatttcctgagaacaagtagccatttggtcccactcctgcttatgggtacagctgggtagactttctttctatgtggcctcttttgtaggagagaacatgagcaatattgacattaagaaggcatctggtcacctgtttttttttgagaagcagaaataggagagagctccatggggcaggagcaagccctcttttgccag

SEQ ID NO: 10407 - DNA, 1536 bp, Artificial sequence
  DNA replication origin
tgcatggttcccagcggctgctttgaagaaggtttttagttgtcctctgtggggactgactgtggacttgtggcccatctgtgaggaggaacacagccacatccttgagggatcaggtcgccccccttaatctctgccttttttgtcctgcagctttgcttgttccctgggctctgaggcatggtggtgctctcatggccaggctccttgggaataggagagggatggcatgggatgggatgggatggatggatggatggagggagggagggagggagggatggatggagggatgggtgggtgagtggatggagggagggatggagggagggagggagggatggatggatggagggagggagggatggatggagggatgggtgggtgagtggatggagggagggatggagggagggagggagggatggagggatggatgggatggatggagggagggagggatggagggatggatgggatggagggagggatggatggagggatgggatgggagggatggatggatggagggagggagggatggatggagggatggagggagggagggatggagggatgagtgggtgagtggatggagggagggatggatggagggatggatgggatggatggagggagggagggatggatggagggatgggatgggatgggatgggatgatggagggaaagaaggagggagggagaggaggggaagggaggggaggggatataaggtagggtattggaatggaatggggaggaaacagcagataacagggacctctacaaaaccagcatcactttctcatctctttccaccatttatgaattgagatgctgctaccaagcactggcatgtacagggcacagaataagcccaggagtaccaggagttgttgctgactcctttgaccatcgtaacaccccagaatgcagagcagccatcatcacccatttcacaggtggataaactgaagcccagaactgtgatgttacctggccaaagttgcctagccagccgagtggtggcacagccagagccagagcttgttccctgcgggaggtcacaggaacccagctcaggacatggactttatcttacagggaactagagcaggatccaaaagatgtgggaaaaggggaaagagaggtggaaaatagtgggtgtggacacaccaggggcatggaagggagaagaaacaggagagctgggggaaaaggaggctggaggcaggcttacctgttggagagggtgcacctggacattggtggaaagccaaggccccccagccatttggaagatgtgcaggagggagggaggcagcggctgcctgaatcggagctctggagtgaaaccaccctgcgcttttatcctcagcagccaggtgaccttgggcaagttctttggactctctgagccttcacttcctcgtctgtaaaatgagggagatggtagtagctgcttcacggggatgctgtgggaattagcgagatgatgtcactcacatgcacagctcagagtcaccacccaacc

SEQ ID NO: 10408 - DNA, 844 bp, Artificial sequence
  DNA replication origin
agctatcttttgttttgctctcggctttcgaaaatcaaagctgccacccggcggcctcacgtgcagccccgctccccaacgcccaggcggccgcagctaccttggtgtccacgtcggccaggcagtcccggcggaagctgtcaaaaaggccccggctcttgagctgctccacgatgagagcgatgagctgcgggtcgccgggaggcagcgaggccgggttgatggggccaccgcccccgctggccccagtagcgccagtcgctgccccggcagaggcctggctagttccgccgccgcccaccgcgccagttcccccgccgccgccgccgtccgccatggctgcgccccgggcccacaagggagaacgactatagcttcttctccaggacagaaggcctagaacgtgtagaggtggtgaagggggcggtgaaggaggagggccccaaggcggcagcggcggaggtggcgatggcggcaggggcggtggtgggggcggcggcggcgaaggccccctctgatacagcagaggttgtggtggacgcggcagaaacggcctgctcgattccaggcgcaccccagatggcgtcaacgttgacctttgcattgtggggcgggaagttttctgtggccatctccggcgttctttataggcagcggcctagccgagagaaactacaactcccggcagggttcgtgcttgctcgtcgcgatttcgcggggtaatatgggaactgtaggcgcaggcctcgtgatcgctgcaacccgccaggccttccccgccaggccttccccgcccactctctgctcacttcccattcaatcaacacgtcccagcagtgcccga

SEQ ID NO: 10409 - DNA, 960 bp, Artificial sequence
  DNA replication origin
ggagagaatacagctacagaagcaaagaggtcagagactgagcactgccagactctgcgacctgcagagtcagggaatgaggaggaaccaggaagaggcaacaaggagacagacccaatcactgctgcaggggtgggaaggacccttgactaaccgaaggcactgcttgagctaaggtggaaaaatcagcttccccagggcccagggcagcatggaggaagagagaatggatacctggatcagcttctcctggggaaagggaaggaacaggagggatgttgggtggccaaaaaatatatactaagccaataaacatgatgatggtaatgaaaataaaaataatgctgagagagagggagggagagggagacagggagacagggggacagggggacagggggacagggggacagggggatagggggacagggggagagggggagagggggaggaggaggaggaaggggaggaggaggaggagggggagggagaaggggagagggagagggagagggagatcttcctcttcttataaagccacaacttgtactgcattaaagccccacccttatgaccttatttaacctcagtgacctcctaaaagccctaacttttgaccacacctaactgcaagggagcctagaagatgcaattcagctgcgtgctcaggcagacaaggagagcatggccattgctgaaagcagtgcaagaagcaggtgggagggtaccccagatagatggatcattgtgtgccaaagtctggaggaatactaacaaggtgaaccggggcaccgccacatgctcagctgtctggccctgggtgtaggagtggggaatggtgggagggaagtgactatgttgggcaacaagattccctggcccttaattagccaggtgtggtgccccgtgcctgtggtcccaactactcaggaagctgaggtgggaggatggcttgagccc

SEQ ID NO: 10410 - DNA, 1793 bp, Artificial sequence
  DNA replication origin
tttgttccagaggctttgtttgattgcccagtgactgtggctgatgttcgtatctaagagccaaaaagctgtttagaagctcatgaataatcttgttgactgatgagctttactattggatgaaaagttagtgattttgctcttaggttggtcaacttccctagaaagcgcttctccagtctgctgcttgggaactattactctgggagccagtgtgggtctcactattcaatatgaaactttcatttaatacccctctaaaatagacttttgcccctgtcctgagtgaagccccgtgtcttttctggtttatcgtccaccaaataaaagcatccagtattttattatgatagaggaggaacattttcttggattcactatttggggaagaagtgagggtgatgatggtgatggtgtggtgatgctggtagtagcagtgtagaagtgatgatggtggtggtaatgatggtggtgatagttgtggtggtaatggtggtggaggcactatcaacagatggtgatggtggtggtggcagtggtgatagtgatggaggtgatgatggtcatggcggtggttgtggtggtggtagtaaaggtggtggaggtggtgatggtgacggtggcagtggcagtggtgatagtgatggaggtggcaatggtcatggtggtggtggtggtaatggtggtggaggtggcgatggtcatggtggtggtggtggtaacggtggtggaggtggtgatggtgatggtggtagtggcaatggtgatagtgatggaggtggcgatggtcatggtggtggttgtggtggtgatggtaatggtggtgaagatggtgatggtggtggcagtggtgatagtgatggaggtggcgatggtcatggtggtgatcattgtggtggtaatggtggtggaggtggtgatggtgatggtggtggtggtggttatggtggtggagatggtggtggtgatggtggaggaggtggtggtggtgatggtggcagtggcagtggtgatagtgatggaggtgacaatggtcattgtggtggtggttgttgtggtaatggtggtggaggtggtgatggtgatggtagtggtggcagtggtgatggtgatggtagtggtggcagtggtgatagtgatggaggtggtgatggtgatggtggcagtggcagtggtgatagtgatggaggtggcaatagtcattgtgatgatggtggtggtggtaatggtggtggaggtggtgatggtgatggtagtggtggcagtggtgatagtgatggaggtgatgatggtcatggtggtggtggtggtgatggtggtggtggtggtgatggtgaaggtggtgatagtggttggtgatggtgttggaagtggtagtggtgacagtggtggtggaggtggtgttggttgtggtggtgctgttgatgacactagtagtgatagtgaatgatatggtctggaactgtgtacccatccaaatctcatgtccaactgtaatccccaatatgggaggtggggcctggtgggaggtgattggatcatgggggcggagtcctcatgaatggtttagcatcatcctttcagtgccattctcgtgatagtgaatgagtgagttatcataaaatctagttgtttcaaaagtgtgtagcacctccctggcttctctttcttcctcctgctccggccacatgaagtgctggctccccatttgccttctgccatgattttaagtttcctgaggcctccccagaagccaagcagttgctaccatgcttcctatacagcctgcagaa

SEQ ID NO: 10411 - DNA, 2576 bp, Artificial sequence
  DNA replication origin
cagtttccccatgctgttctcctgatagtgagttctcatgagctctgatggttttataagtgtttgacagttcttctttcactctggtctctcctgccgccttgtgaagaaagtgcttgcttccccttcgccttccggcatgattgtaagtttcctgaggcttccccagtcacgtggaactgtgagtcaattaaacctctttcctttataaattacccagtcttgggcatttctttatagcagtgtgaaaatggactaataaaactttttaggagtccagcacttcacatgtatcccatgtaatttacaaacttagcaagagaggaaatatcattcacattttatctagaaggaaccaagggcttatagaggtgatgcccagttttgcacagctaggaagcagcagagctgggattcaaattcagggctgtttggttccaaaggtgctcttttttccaagtcatggctgccattttagccactgataattagtagctctgagggaccctaaaccatcttctgggcatggaacattcatttgttcattcaataaatgtgttctgagttttgagtctgctctgtgccagaccctcttctggccactggggacataaagataaatcagacacaacctctgcccttaagaaactaacccactgacaaccagcagtaattaaaagagagcaatctacaagacattagagagagggccagtcaaggaaaccattctggcggaaaagacacctgacggaaccagctaagtttccaggcatgtccagttgtagggaataaacagcaggtaagacccaatctctatgctcaaagaatccatagtagagttacagagacaagactcatgctcatggcacaatgaaagagaataaaatcaccgattgaaggccctcaggtgttctacacggaagtgatggaggattgacagactgaggcagaagttgagaccattagaggaaggctatggaaatgaaatggaagccacctttgttcatactatttttcattaatcttggtatcttttttttccctctagttgtgccagttacttctggctctaccctgatttctttgttcatttttcttcctgctaaaggaaaatactcacttatttaacatatttaaagctgtgctgagagcaaagcattatcctaagccctgatggtggtcatagcgttgggaatgtacaaagataaacaggacattaaagcccttgagtaccaaacataatgaaaagtctgatatgtgagctccaaaccaaatggcaaaaggaaggaaataattaattcagacttggaaacaggagtgaggggtggggggtgggtgacgggtggaaggggtggcagtgggttggggggctgtcactcagggaagacttcattgttgctggtttgttcattcacgttttcaggattcattcactgatgtctcctatctacaatgtctgctcctgaaagagcccacggtccagcacaggtctggaagacataaaccatcacaatatagtgtgagaaacaagcacgagaggtacacagggccgtggacgcttataagagagaattcagaagatgctgttggtggcttttgaactgattcctagaaataaataggaatttaccaaaggagaagagtggaaaggacatgtaaaaaggcattgagagtgtgtttggagggggaagaggcactaagatataccacccattaggtagaaaggcttgaataccagactaacaagtttggcctttatcttcgaaataatgggcaaccatagaagaaatcggagcatgtgagggtcaagataaaattttagttttggaattttccctctggtattgcgtgtaaggtgtactagatcgggatgatacgggggcatagccacagacgcctcagctgcatctctgcacctgggagactgcaccagatgcgagcctagcagaatgggagagtgggaggtgcgggtgagcgaatggaaggttaagggagagtccctcgtgaggtctacattctgggcaagggcaaacgcagttctaggcaccgcacagctgctggcaagacccgcctccccttccagatccctctggggcggagctcgggccagagcacgtgatgcttggagcaccacctttactgtgggcacccttctcattcatccgcggtttcacgggccgccacttcgatctccaacaccttgaccgtatgccttcgtgagcgaggaatccgttctccttgacacgtccctattgctcctcctgcaaagcccagttagggaagagaaatatcaaaggagtcccttgcccacacaaaagatggcgacctgctgcgctcactctgggtgggggaagcgggttccaggcgccgggcctcactaggcgaggcgcagacggaagaggcgtctctggaggtaacttttcgaccttcctgggagtagctctgaagcgagggggcgtggcctcgcctgagttctaacagatgattggtcttccggcaggtaggtggggaatgagtgctacccccacccctccctcttcgaaccggaagtgtctctgggtctttccagctggttg

SEQ ID NO: 10412 - DNA, 1079 bp, Artificial sequence
  DNA replication origin
gagggtgagggtggggtgagggtgagggttggggtggggtggggtgagggtggggtggggtgagggtggggtggggtgagggtgagggttggggtggggtggggtggggtgagggtggggtgagggtggggtggggtgagggtgggaatgtggaatagtcacatccatcagatgactctcagcactgctgacttcaatgacggaatgatttggttcagaagaaactagtaaatgctgatcccctgttatatatcaggcccttacatacattagcaaggataacacttccatgaggtattgaacagatcatagaactgtctcatggagaaggtgggtgatttggccaaggctgggatgtgcctaggtcccaattctcatctactaatctcaaatcttctcctttaaaccttcttgccgctggattagcaatgaacaggatcagggctttttattcaagttttattttgtttttaaaagaaaagtttcattcctaaacctaatctgggtgtaactgtcatatttgaaactatagagataggatgataaaacaaaagttgtaagatgggtgggcacggtggctcacgcctgttatcccagcactccgggagacctaggctgaggatcaattgaacccaggagttcaagaccagcctgggcaacatggcaaaaccccgtctcaacaacaacaacaacaacaacaaaaacttagctgggcatggtggtgtgtgcctgtcgttccagctgctgcgggggaagggggctgctgagatggaggatcgcttgagcccagcaggtggaggctgcagtgagccacgatctcactatggcactccagcctgagcaacaaagtgagaccatcttgggggataaaacaaaaacaccacaaaataaaaccaaaaaaactcaaaagttgtacaatggctgggaacaatggctcatgcctgtaatcccagcactttggaaggtgggaggatcacttgaggccaggagttcaagacgagtttgggcagcatggcaagaccctgcctctaattttaaaaataaaaaataaaaataaactttgtaagagcaaatgtgag

SEQ ID NO: 10413 - DNA, 1502 bp, Artificial sequence
  DNA replication origin
aggcccctgaccccaaaggccttgagctccacggccgcccagttgcaggacgccactgcactgatgcgagccgaagcgcgtcacatagacgaagcgcgccgagtcctgctcccgaccccggcctgccgccgccatcgcagcctcagtcaacggcagccgggccctcagcaaacacgacgccacaggcgccagactgcccactgtgcaggcgagggatgcgggagcggttagggccagaccaccctgcggggattggggggagggagttagggccagaccaccgcgtgaggattggggggggttaggaccagaccaccctgtggggatgggggggacaaagggttagggccggaccatggcaccgcgatgagggggacgggtttagggccggaccacccccctagggatgcggtgacagggttagggccagaccaccgcgtggggatggggggagggggttacggccggaccacctcgcagggatgggggtggtggggttagggcaggaccacccagtagggatggggtgacggggttaaggccggatcaccacgtgggggtggcggggaccaccatgcagggtggggcagggaagttagggccagaccactgctggggggctggagggagaaagctgggcttgaggagcgaggcagccggtcactgcgtgggctgcaggagtaggggaagggcacgctgctgggaggtgagaggcccaggggagatggagggaagtgggaagagggcgggtgttgggttggggacgatgacgaggtgcagacccctcagaagaaatgagctactccaagaagagggtgggagaaagggaccaggtcactactagggagacgcccccatgcttgggtgcgggaggatttcagagtgaggaacccacacgggacttgagcagcctggagcatcagccacgtgacgctgggagcctgggggagaacacagagcccttggctgccggaaggttccagtatgcccttggcctggcaggtggtagtgatggagctgtgatccccaagagacacaggggtagggggacaggggtctgaggcccaagctggttaggcactggccagctgggttatttgggcaagcccttttccctctctctctctttttctttcttttttttgagacggagtctcgctctgtcactcaggctggagtgcaatggtgcgatctcggctcactgtaacctccacgacccagattcaagcgattctcctgcctcagcctcctgagtagctgggattacgaggatgtgccaccacaccccgcttatttttgtatttttagtagaggccaggtttcaccatgttggccaggctggtcttgaattcctaacctcaggtgatccgccagcctcccaaagtgctgggattacaggcgtgagccaccacacccagcccctttccttctctgagcctccattgtcttcaaatgttaactcaggagaactgagttgtgaggataaatcaaaataaggcata

SEQ ID NO: 10414 - DNA, 1338 bp, Artificial sequence
  DNA replication origin
cccttggaactaataggtttggagctcaggatggagatttccactggagaactagggctggagtcagggaatttacagttagagagcttggtgctgttacacagtcactgggtcaccctgcagatatattgcccggggctgagggaaccttggaaactgcaaaggtgcaccccttctcattccaatcccttcatggatctgggacagcttgtgatttgaatttcaaaattaacctggagaaagcagttcatggcaattattctgtaagagagaaaagaagggagcagggtggggagagatgaatagagaaagatgagctgaaataattgcctggaatttttgtcatttctgaaactaaggaggccctgcagtcattgtaaagggccacagacttgaaatattttcatcagggttatgtgagaaaatgggaaaatgcagagaaaaaaaccctcctttcttaatctgagagcaaggggttctctaaaactgattttgctatggatggtgctggtgctgtggtgggtgtttgcgtcatgggatcctggtgctgtggaaggtgctggtgatgttgggggtgctggtttcctggtgatcctggtgctgtggaaggtgctggtgctatatagggttctggtgtcacggtgatcctggtgctatggaaggtgctggtgctatggagggtgctggtgtcatagtgattctggtgctatggaaggtgctggtgctgtggaaggtgctggtgtcatgggaatcctggtgctatggaaggtgctggtgctgtggaaggtgctggtgtcatgggaatcctggtgctatggaaggtgctggtgctgtggaaggtgctggtgtcatgggaatcctggtgctatggaaggtgctggtgctgtggaaggtgctggtgtcgtgggaatcctggtgctatggaaggtgctggtgctgtggaaggtgctggtgtcatggggatcctggtgctgtggaaggtgctagtactatggagggtgctggtgtcttggtgatcctggtgctatggagagtgctggtgtcatggtgatcctggtgctatggagggtgctggtgctgtggaaggtgttggtgctatggaggtgatcctggtgctgtggagggtgctgatgtcacggtgaccctggtgctgtggagggtgctggtgtgatggtgatcttgctgctgtggagggtgcttgtatcatggtgatcctggtgctatggaggcagctggtgccaaggagagtgctggtgctctaaaggttactggtgctctgaaggttgttggtgctatggaagatgctggtgctgaggagggtactgaggctctggaagg

SEQ ID NO: 10415 - DNA, 822 bp, Artificial sequence
  DNA replication origin
ctcccaggctcagatgatcctcctgcctcagcctcctgagcagctgggaccacaggcatgcataaccacatccagttaattttttgcattttttgtagagatggggttttgccatgttgcccaggctggtctcaaactcctgggttcaagcaatcctcccaccttggccttccaaagtgctaggattacaggtgtgagccaccacacccagccttattcatttattaagggcattttttactgcttcatccggccaggtgctggctagcttcttagggtacagagaagggtacaagagctcctggtccagtcagcaggagacctagtaggtaactcactgatgccaactctgtttaattggtactagaatggagggtcctataggacatgcaggaacccaaaggagaaaggacaggctttgcatgtcagtgcaagcaacactgcacaggcccaggccatgtgcatttggtgttgagggatgaatagggagatggccccatggcaggcaggaaagacaatccagctaggaaggatgacacagacaaaggcagggagacatccaatggacaggatcatgagggaagggccactgcttctgggaggtggatgcacctatgggagaggcaggtaagcaatggaggcacagaaatgccactgtggggcatgtgctctagaaggggaggagaaaggactggggctgctgaggaaaggggccagggatcagggagagggctgggacaggtggtgatgtgggttgaaccagagtgttggagtgagaacagagaagaaaggacagtcactagagacttccagagggagagg

SEQ ID NO: 10416 - DNA, 624 bp, Artificial sequence
  DNA replication origin
aatcaacctgggggcgggggcatcagggacgtcctcctgggggatgtgacatcataagtgacttcatggaagaacattaggatgaggggaagaaggctctgagcagaggaaatggcatcagccctggaaagaacgtggagagcacacaggctgttctagaggcatcacaggccttggcatggctggcccaaggggtgtgagtgatggggaagcctgggggcctgggcagggggcaaagaacagattacacttggacttgatctcaaggacaacagggagccagtgacagttctaagcagggaagcgacaaggtgagaattatgttttggagtgatgtctctgggggcaacaggaggcatgtttgcagggggatggctgaaggcaagggggccagtgggaaggctgatgtagtagggcgtgtcccaggtgctgaggccagacggggcagtggggtggagtcaatggcctaagatggcataagaggtgagcacagcactgcgagacaagaggaggaagggccggctcaggccggcgagttccactggtgagctttctggattctggatgatgcagttgtcaatggttgctggggtggggcgggagctggagagtcctggtttggtt

SEQ ID NO: 10417 - DNA, 1210 bp, Artificial sequence
  DNA replication origin
tctgggtgtgctatcaccagctgtgcaacattcttgaagagagaaacgaatgtggcctggtagataaaagtgttcaaacattaataaattttggtttgtacaaaaaggtggcaaagcattggagggatccttttcattcactcttttacacgttcacttgggaatttcttcatccaaatatgagttgggcgtcttccctgtgttcagacagcattgtaggtattgggaatgtggcagtggggaaaatggcatggtactgccctcacgaagctgatcacccagccaggagacgggcaagtaaataacagaagagaatcagttcagatgatgagcagcaccacgtgaggaaaggaaaaatgagccgtagcccgggacagatgggccaggtgtatgtgggggtggtgggtgggggccactttggctggacggtcaaagaaagcctctgcagaggagacactcgagctgaggatcaagacagaaccagccaaggagggtttgggagcagagcctcacatggtgggtacagcagggtctgagccgtggcagctcaggtttggggtgttcaaggaacagagagaaggccagggtgtggggtgtgtggggggttggagtgcacaatgagtgagagagaggagatggggggaatcaggtgcatccagggggtgggcaggagctggggcttatcagagcagacacaccatacatgaaggaagcttggccaactaggaggatcttgcaaaccccaccctcttgccactgtcctgggcttggggcccagctaagaagggcccgaacagtgagaatgggtcaagggatgcacacagccactgtccacaccctggcctcctaggggtgatcctttcttgtttaggtgacaaggatgtgtgagggctgctgtgatttttgagagacctacaagccctggagaggaggaagggatcagagagccagacctgctcccttcagcggacacatgcctggaaggttagaaggttagtttgctggtaagcgggtgagatcaagctggggttgtgtgtatttgcagagagaaccactaggagtttggagttttaaaaccatgatatgagggctggcagggagcctgcaggagggtctgctgagacgacactgtggctggggcacaatccaggatcattattgaagaaagaggctgccccgaggaccccccggctcctcctgctccctctgg

SEQ ID NO: 10418 - DNA, 1076 bp, Artificial sequence
  DNA replication origin
ggcgggttgaatgtcggccgtccctctgggcctagctggaagatctgcccacgcagccttccttcggcttcggcagagacaggcatccgccgccgccgggccgcagcccacccgcccctccagcagcccccgctctgcggtgaaagtcttcccagcgtccagtgcagcgcaaatgcagattccagcatcccagtgccgtctagatggagccaagacgcctgcagaaatacgggggctgccgggcctcctgggtcaggagagctgtagggcccatgtctgtcccatgctggctacaccgggctgggggctgggaaggtccgtttagtttacggatctttctccaccagcccacggcagcctccttgggccaggaccacgtctgagtcgcccctgtccccccaggcccagcttggtgcttgctggtcgagacctctgtgggttcccaggggtgccctgggggcccctctcaggcatggcccccttttgaggggggcccgccctcccgtgtttctcctggtctggggcgcctgtgcttcgagtcctctgtacacccaaggaaccctccgctgaggcaacatggcaatcagcagagttgggatctcaaccccggctggctgttcccatgggtgctgcgaaccccagcctcctgtccccgcccccgggcctcctcacacacagagggaagagtgtgccgctgctctgcaccgaagcttacacccagctggaagatgtccttcgtgcgcatttcctcatttcaccctcaaaaagccccacaaagtcgaaacgctgccacgcccattccacagatgaggacgctaaggcccagagctggggagaaacctgcacaagctcagcctcctggcggggcctcccagagctctgcacccttcctggaacctgcccacccccatttgctgtcccctgccctctgattctgaagcattctcctgccctctctctcagccccccgtctgtttcctgagagggtgacacaatatgttcttgcatagtttctcatgactgctactgcctgtctttcctcaattctgagcgccatccaggcaggaaccatgcta

SEQ ID NO: 10419 - DNA, 1355 bp, Artificial sequence
  DNA replication origin
cggcggatgcctgtctctgccgaagccgaaggaaggctgcgtgggcagatcttccagctaggcccagagggacggccgacattcaacccgccagtcaaaggagggaagggctggcggcaggagcagctcaggaggcagacccgggcgcgcgggggcgcgggggctcgggggcctgtgagggatccccggacgggcagctgcggggtgcgggccgggctgcaccgcgacaaaggcggcccagcggcggcatcggaggacgcacgctgccccctggtggccaggccgctccccgcaaacgcgagctcctttgttttgcggtcccggcttctgcggcccaggcttgctggagagagtctgaagccccggcttccagagcgggtggccacgatgccagggccgcgcagggaacctggtgagccgagggtcgagtcccagccctgcagctcgctggcggcaagggccggctccccagcctgctcagagcctgagtctcccgctgctgcagtgggaggaagcgcgcaccggcaccggttcactcggtgtgggggcgctgattgtggtgggggcgctgattgtggtgttatttgtgcacacacgtggctcgggcgccggtcgaggcctcctagcgacttgccccacccggtttccccgcacacccactcctcacctcctgcaccagctggcggggtctttgtctccccctgaccctgatggtagccgctttgtcagcaccattaggaaatccatggtagatttccttttgtgagattgagtagaattttagagatttgggggtaggaggcaggcacctcctggccctccctctccacccttctttctcttttccattctctccgcagccctgctcacaagagccctccggagccccaccaccttgccctgcagccatcagtgtagagaacatgccctccggcctcgcccttcacccctactgttcccaagcacagtccaccctggtccctgaaggaagctgagtggaatgtctcatggaagcgtgtgggggtggatctgtgcttaggagcacctttctccagacgggtctgacccagtccaccctgcagccatcgcttccttctttaattttatcgcattatgtcccaccaggtataggaggaagagagagagagagaggaggcatggaaggaagaaggaagaaaggagggaaaggaggggaaggaaggaaggaaggaaaagaagaaagagaaagaaggaaggaaggagacatttgctagggctgtcaggacaaagtattacagacagaatgcttaaacaacaggactttatttcctcacagttctggagtctaaaagtctgccacgaaggtgtcagcaggg

SEQ ID NO: 10420 - DNA, 1220 bp, Artificial sequence
  DNA replication origin
aagaaggaagaaaggaaggaaagaagggagggagggagggagggaggaagaaggaaggggggaggaaggaaggaagcaaggaaggaaggaaaggagggagggaaggagggagggagggaagaaggaaggaatgatggaaggaaggaagggggagggagggaggaaggaaggaagggagggagagaaggagggagggagggagggagagaaggagggagggagggagggagagaaggagggagggagggaagaaggaaggaatgaaggaaggaaggaagggggagggagggaggaaggaaggaagggagggagagaaggagggagggagggagggagagaaggagggagggagggaggaaggaaggaagggagggagagaaggagggagggagggagagaaggagggagggagggaggaaggaaggaagggagggagagaaggagggagggagggagggagagaaggagggagggagggaggaaggaaggaatcacagtagtagcagccaacatggttgagacccccgagtcgttccagcctcttccaacaggcagggagacaatgcactctcctgaagccactgtaagctttatctgggccccacaagggcaaggagagaagccaaagtcatttcagggaatgtggattgacaagatcggcagccggatgcaggtggtgtcctctcacagctgtccatcaggggcctgcaaacaagaggcattcgtcaggagagacctgttgttgctaggaagtcaggacgtccactgtcctggaaaccagttctgcactcactcagtttcagagggcaaccctgcggctgatgagtaggagacagtgattctgagaactccaattccattccgatgccagcagcaggtacagagggaaggcatcctccccttcaacacaggggcctctgaatataccccaaggacttgtcaatttacagggatggcgaactgcagaagggtagatatgggtgctagtgaatgatcagatatagtttgattaagggaggtgaaagagaaagggaactttattgggctcctatgctgtgtgaagctcatggagtcaaggtttatgatccctggtttatagatggaagaacaggtggagtgagtcagggtacttggccgtaggaacccagcgcacagcgagcggtcagttggatgcctcacccactcagccaagctgacccttgatcatgctgtctcctgag

SEQ ID NO: 10421 - DNA, 1232 bp, Artificial sequence
  DNA replication origin
tatgatcaaatcactgcactccaaattgaatgacagaatgaggccctgtctctaaaacaaaaataaaataatatggttttctgaatttcacaaatatttatgtgtgtggggaggtagggaggtggggaaggagatggggaaggaggtggggaaggagatggggaaggaggtggggaaggagatggggaaggaggtggggaaggaggtggggaaggaggtggggaaggaggtggggaaggaggtggggaaggagatggggaaggagatggggaaggatgtggggaaggaggtggggaaggatgtggggaaggagatggggaaagaggtggggaaggatgtggggaaggagatggggaaagaggtggggaaggatgtggggaagggagggattgtttgggaagctcagtgcactgaggtttttcaggattatgaaaatggattgatgtgagaaggtaaaagaaccagtcaccatgtagaatttagaaggttagaacatcattctcatttctccatttttttaaaatgaccatgacatgccctagggaaggcaatgtcacatcacttttttttaagggatcactcaccatacttgatcgtataacttattgtgaaactgggacacatttgagagtgaaagtgggtaatattaataattatgttgggacaataggtgtaaacctgggtgatgacaggcaaacaaggagagaagatcaccctccctatctggcaccctcacccagctggcagaaggaatagagtcttgtaggagctggactagctgtccccaagctcatgtactaatgtccatgcatcatcctcagaggtgagccgtcagttcctcctcactcagaacctgtttgatctttgttttctcaagcagcaaatcagaaaggtgataataggtgttgggtacaggtagccagattaatgaatggcggtctaagaatgcattgccccccaaaacaaagtctaaagagaatttttagtgcttagaagagttccattcagtcctatagctccttccatttaaaacaatgattgaattatcgagaaaatataaagttctttgacagccatttgtggattcacttcatggagctagagattggggactaaagatgtatgaggcgtagtagctgacttcaaggagcttatagcctggagcaggaaacagatgagaaaacaaacaataatgcatgaaatgtgtgtactaatagaggggtagacatatc

SEQ ID NO: 10422 - DNA, 1456 bp, Artificial sequence
  DNA replication origin
gagagccacacttgtttctttttcctctttattctccacctctgacataatacttagcataaaaaaaaatccaataaacaccactgaatcaattatctaagcctcagtttccctcttgtaatatgtacttacctggttgtggtaggaaagacaccaggcatgagaaacacttaaaagcccaggaccctgagctgggcacatggtaggtactcaggaagtcattgccgagtgttcagtgcatgcttgttgaatgagtaaatgaggtcaggcttcagcatgcaaacactcgctataaagcaggaaccctgtgccctgagtgcacaaaatagatatcggtgagtgcatatgggggcagtgagtgtatggattggatataggtgggtgtatatggtgaggagtatggattggatacaggtgggtgtatacagaggggagtgagtgtatggattggatacaggtgggtgcatatgcggggggggggtggcgtgagtttaagaattggatacaggtgggtgcatttgggggcgtgagtgtatgcattggatacaggtgggtgtatatgggagggtaagcgtgtggattggatataggtgggtgcatatgggagggtgagtatatcgattggatatagatgggtgcatatgggagggtgagcgtatggattggatacaggtaggtgcatatggaagggtgagtgtatggattggatacaggtgggtgcatatggggggagtgagtttatgaactggatacaggtgggtgaatttgggggagtgagtgtatggattggatacaggtgggtgcatatgggagggtgagcatatggattggatataggtgggtgcatatgggagggtgagcatatggattggatatagatgggtgcatatgggagggtgagcgtatggattggatacaggtgggtgcatatgggaaggtgagcgtatgaactggatataggtgggtgcacatgggagggtgagtgtatggattggatataggtgggtgcatatgggagggtgagcatatggattggatataggtgggtgcatatgggagggtgagtgtatggattggatataggtgggtatatatgggagagtgagcatatggattggatataggtgggtgcatatgggggacagtgaatgtctggattggatacaggtgggtgcatattgggggagtgagtgtctggattagatacaggtggatgcacatgggaggaatgagtgtacagaacgaatacaggtggatgcatatattgggagtgagtatacagagaggatacaggtggattgagttgttacaaccaacgacaggaagcacatgcaaggctctaggcattgcacaaagcactccataggcaaaatcacactggcgccaatagcaatcctgggagatgtactcattattaataatattgttgtcattttatagagaaggaacacaggct

SEQ ID NO: 10423 - DNA, 955 bp, Artificial sequence
  DNA replication origin
aaagattgttactattaaatttttattttattttgacacagagtctcgctctgttgcccatgatggagtggaaggaaggaaggagggagggaaggaaggaaggaaggaaggaaggagggagggagggagggagggaaggaaggaaggagggagggaaggaggcaaggaaggaaggggggaaggagggaaggaaggagggaaggagggaaggaaggaatgagggaaggaaggagggaaggaaggagggaaggaaagaaggaaggaaggaatgaaggagggaaggaaggaaggagggaaggaaggagggaaggaaagaaggaaggaaggaatgaaggagggaaggaaagaaggaaggaaggaagggaaggagggaaggaaagaaggaaggaaggaagggaaggagggaaggaaagaaggaaggaagggaaggagggaaggaaggaaggagggaaggaaggaaggagggaaggaaggagggaaggagggagggaaggagggaaggaaggaagggaaggaaggaaggagggaaggaaggagggaaagaaagaaggaaggaatgaagaaaggaatgtaggaaagaatgaaggagggaaggaaggagggaaggaaggagggaaggaaggagggagggaaggagggaaagaaggaaggagggaagaaagggaaggaaggaaggagggaaggaaagaagagaggaaggaaagaaggaaggaatgaaggaaggagagaaggaaagaagagaggaaggaaagaaggaaggaagggagggagagatgttctaagttagaatggaaattaccacattaaaaaatgcaaactaatctatggtagtataaagccgatcagtgattgtgtgtggttggggggaagggaagagatggattacagacaagcttgaggaaacttttgcagggggatatgtttgttatcttgatattgagggtttcacaggtat

SEQ ID NO: 10424 - DNA, 1483 bp, Artificial sequence
  DNA replication origin
aaagaatgggcaaaaaaaagcaatggacactgtgagtgaaatcagttcttttgaagagtttgctttaaagggaagcagaaaagtagaaaaaaaactggtgtgcatccagagagtttatttttagtatgaaataggaggctgtttgcatgttaatggattcacctgcttaaatgggaaccttgatgatgagtaaggagtgaaggcaattgctgaagagctgtccttgagtaggagagaggagaggagagccattgtggatgcagagggaatgccatggataagagagaagaggacttatctatcgtactggaagaaagattatggatggatagatggatggatggatggatggatggatggatggatggatggatggataaatgggtacctaggtgggtaggtgggtggatggatgaatgaatggatggacaggtgggtgagtgagtaagtgagtgagtgggtgggtgggtggatagatgaacagatggataatagatgaatgaatgagtggagacatgaatggatggataggtgagtgggtgggtgggtgcctagttaggtgaatgggtgaataaatgaatgaatgaatggaccaatgagatgagatagtcacaagcttaggtagatgtggtaatggatgctagtagaaattctcattatattgcctcaattgtcttagcaaagtaagaatcaaggccttctttggtggggaagaggtgttacaggcttgaggaagagaggagaatttgtgaggttggtatctggaaaaataggagagtgaatgagtgaatagacttgggaaagatgcaaagattatctgacatcccacgtggatgcttgggatgtgtggccttcactgtgatgaaagagcatcagcatggttatggggtttctcttcagccacatttgctggttgagtgcatacttgaagttctggaaagctggacataacaagctttcggatcttgtcaatgacattgaaagtacaaggtaatgaagggatgcacacagcagtgattagaatgttgaaatatgtaatataaactgggcagggagagaagtagggggcatgaggagagtgactggtagggaatagtatgtggtagggcctttggactggaggtcttagtagggtgcaaattttggattggaggcactaaatctggaaagataggaagtagcaatcagagagtgggatggcagagggtgaactgatggaggaagtatagttattggtaatgacagcagggcacgggagtgggcacctgaagtagaaatatcagagtcagctaggcacagtggttgtgcctgtaatgccagcactttgaaaggccaaggcaggtgggcatatcacttgaggtcaggagttcaagaccagcctggccaacatgacaaaaccctgtctctactaaaaatacaaaaattagctggacgtggtggtgcttgcctgtaatcccagctactcagaaagctgaagcaggag

SEQ ID NO: 10425 - DNA, 2508 bp, Artificial sequence
  DNA replication origin
tctgcagtgggttagttaatagaggggttaatctagtggtaaagtcagattctttggtaccttggaagcccatccttccagcccttactggtgagaaagaagaaataggacaggagtgcaaatgggctgggaaggagaaagggagaggaggaaggcaaagtgaagctcacctgcaggcacaatgtgctgtgtctcacttctgtgcccatagccgagctgccccccccccccccagcacacccagtgcccatcctttaccctccagatgatcacttggggtccaagtgttaccttggctctcaggaggagtcaggactggaagtaagagggaaaggaatttctctatcctaacgcagattctcctctcaaaccagcttcctgctcagatctcaggagcccaaattcctgaaaccaggtggcctgtagctactgggaaatagagggtttccatcactccttaaggaaagctagaggtccgtgtgtgccatggaatacgcttcggcaacaagaacaaacttttgatccatggaataacacggaccactctcaaacgcctgtgtgaagtgaaggaagctgggctcaaaaggtctcgaactctgtgattccatttacatggctctgcaaaatgcaaaccctcaggggaaagagtcagtcagggttgcaagggaatgcaggtgagaggtcaatgtccatgcagcacaaaggaagtttctggtggtgatgtgaacagtcttgactgctgatggctccacggctatattcgtttgtcaacactcacagaattgtgcacataaaaagggcacattttattgtacgactttaaaaaatagagcaaagaaaaaaacagggaaaaaagagaaaaaagaagagctaagcgtggcattctaagttccatcccctaaggtgaaatcaccaatatccacataaacagggctttgtagctcagctgaggttgactaagctttgggatccttcagggtctcctctttctatctgtgtgactctgggtacattacacacctattttaacttactcatctgtaaaattaggatgataatagcacctgccattggtagttgtcgagagaattaaatgagataatacatgaagagaggttagcccagtgccgggaatattttaagtttttaataaatgttctgtggtatttttattatcggcaagcaggctcagatccacagactgattttattcttacatgaaccttaagaggttgaaattaggactttcccccagttatgattcttagaagaatcttaattgagattcaggcagatgaagtgacttgcctgagggcaaacttcttagaagtggcaggtttgggtcttgaactttgattttgatgccacgtctcacaggttttctgttccactgtgacctcatgccctggagaggaacacaaatgtggggggcagacagcatgcaaatggaggcagcctgtagtccttacctggaaacttcacgggaaacctcacccagcctggacaaggacgggattgacagattgacagctctttctcgattctgtgggtggtggtgcatggccattcttagttggtggagtgatttgtctggttaattctgataaggaaccagaccctgacatggtgactggttacacgatccctgagcagtcggcatcccccaacttcttagaaggacaagtggtgttcagtgacccaagattgggcaataacaggtctgtgacgctcatagatatctggggctgcacgtgcactacaccaactggctcagtgtgtgcctcccctacaccagcaggcgctggtaaactcttgaaccctattcgtgatggggattggggattgcaattattccccatgaccgaggaattcctagtaagtgcaggtcataagcttgcattgattaaatccctgtttgccttgataagtccggctcaaactggacttgaggtctgactttggtgagactcactctgacatcccaggtaggagactataccttctagtctctttccagaaacagggcatcaaaagtcttactttactcctgaaggtttgcagtaaaaattaaatattcagctatgataagtggctatagagatgcagagtgtgaatgggaccctactaggtatcctaggtatagggaaataagacacataagaaatttgcttctgtttatgacaggagtcattctgctaggcattcacaaatctgctgccatctagcccagtctgaggctgagggtacacccaaactcattgaagaggaaggggctttcattctgctcagtctcttgctggctgactccccaagacctaagccctgcaagtgtccccagacccatctctcactatgcctatcacctctctcctatgctcttccagaacagaaatttgtcatcttcatgtttgaacctctggggcttggtgcaggcaatgactgagctgaacagagaaggcatttgctctgtttgaaaagcaacacctgcccctccctccctccttccct

SEQ ID NO: 10426 - DNA, 944 bp, Artificial sequence
  DNA replication origin
tgctgtgatggaggtggggtggggggtgatgggtgctgtgatggaggtggggtggggggtgatgggtgctgtgatggaggtggggtggggggtgatgggtgctgtgatggaggtggggtggggggtgatgggtgctgtgatggaggtggggtggggggtgatgggtgctgtgatggaggtggggtggggggtgatgggtgctgtgatggaggtggggtggggggtgatgggtgctgtgatggaggtggggtggggggtgatgggtgctgtgatggaggtggggtggggggtgatgggtgctgtgatggaggtggggtggggggtgatgggtgctgtgatggaggtggggtggggggtgatgggtgctgtgatggaggtggggtggggggtgatgggtgctgtgatggaggtggggtggggggtgatgggtgctgtgatggaggtggggtggggggtgatgggtgctgtgatggaggtggggttggggggggtgtctgaactagactgggatgatagtggagaaaggggatggaaggctatctatctgaacaagagggatggaaggctatctgaaggatgaggaagagaagaagagaaatccattcaagtggtaacagcttgcatactgcaccatgtggctgaaaccaggcaagcccatcagtgcggctggagcctacagtggctatagcagttaccaggtagcccctgacagcgatgttcccggcctactgcctgagctacagagagactgaaggatacgctttaacagctctccattgtcaagatgatgctgtcttgcaacgttggattttgagaacatccacccccaacagtgtaaattcaccaaaagcccagcctgagaatgtatgtctgacacatagatgcttcacaaatatttgttgagtgatgaaagctaagaatatgttccaaaaattgttctaaaa

SEQ ID NO: 10427 - DNA, 963 bp, Artificial sequence
  DNA replication origin
gacgcgcgggcggggtgggctgtgccccgcgggaaccccgccggcctgtgcgcttgctggtgccagctcggctcgctgcctcgcattgccacaggctcctgagaggtcgcgggcagtgcctgcggggaggcgcggggccctgctctgtagggctgaaggccgcccgaggttcgccaaggctctgggctctcgaaaggaagccaagaaaagaagctgcccaggtgaccagtcctgggagtgctctctcccaaggaagctccgagcgcccaggagcccttagccggggtctagtgccctttgaacaatctccagctcttcaaggaagtgggctgccgccgcctctcttgggacctggcctgggatcctttccccaaacgcaccccggcgatttttgcgcaccgggagccgaacccctgctgcgcgcagctggctgggctcaggcgcgcttcctcaacgtttcggagccgctgcccccagcgaagtccacattccaagctccaggggctttgagagagacgaccccaaggcaaggtaggtggctcggacgggctcgccctgggaattattaggttgggcttgacgtgagtaatgatgccatctgcttaagtcttggagaaagaccgtgtgttttccttttgctttttaaggcgtttggagagctgctgaggagccaggggcttggaggagcgagaagacatgtattttcagctgagtctcagaaggggagaatctcctgtcaccaccagaaaagcaacagccccgaaatgtgattgcaactgactagcagagcagaggcccaggagtcactggattgatgatttagaatatgctaaaaagccagtgctttatttggggaattcaggggctttctggtgcccaagacagtgacctgcagcaagggagtcagaagacagatgtagaaatcaagagtgaccatccacgggattgacttggattgccact

SEQ ID NO: 10428 - DNA, 1425 bp, Artificial sequence
  DNA replication origin
gcaaatccaatgtcagaacctcaagtaagcttgagtcccctgaaagcaaagctcagccccgacatccagcgcctcttggggtcaacccctagccggacccaaagccctaagcgagcgggagcaccccccattccccgcacaccaactcctagaacggccggcggacgtccgacctgcgttgtctccaagtgtcccctaactagggttggagatgcccgtgggcgcctgtactcaccgctcgcagggagggcgcggcgcagctgggatccgggccagcgcgcgccgctgcgccccgaggggactcactccttccccgcccaggtggcgggcgcgtcccggctgcggtcaacgccggactccagccggtgccccgcacctcccgagcgccccaaccccagcgccgcgcgctccgtgtgcccggggcgccctctgccggcggctgcgacttcccgagcgcccgctgtgccctcgcgggcaccaacctcactcacaagggttccagcgaccgccagggacccgcgccccgactcgctcttcccggtccatgactgccagaacctgaaaacagggaagcggaatcttctccactcaggactcctccgcttgaaacaccctgaaaaacggacaagggtgaaaaattttactttgctggcattgcattcgtgaatctatgtttcctcctgcgcgcccactgcgttcaaacctggggcgctagagcaggcgagacgcaagccttactctcaaagagaacggcagagcgggcattgactcagcagcatccgtgttccccggtgcacgccttacgttgttcccccgttaaaagaatctttccccgccaggccggctcaacccgcttcgcccaggtggaaatgcggctcggaaaggtagtggggcctgctcaaagtcacacagctcacgcgggagccgcgccgctgcccacctgttcttttaactcaccgcatgtggtacaggagcccacaaactggaaaattacctacagggctaaaatacagggaagagtcatatggaggcagcggggcctggtggagaaggagcccccagcctcccctggttgccccaggcaagctcacaggtgagactttgcactaattgtgcataaattgcgacactgtggtgccttcctgtgccttccgaaaggtgggaggagaataagcatggatcccccaagtcacactgcctgacttcctggtcctgccctgccactgtcggctgcatgtgcactctctcctctctgagctcgggttcttcctctgtgaaacggtgaggacataacaggattgtcataactattaactgagacggtgtttccagagggcttggcaccaaacctaggaccccgtcagccctccataggcaggaacccctgggacccattaacaaaccaacagtccaggccaagcgcgg

SEQ ID NO: 10429 - DNA, 904 bp, Artificial sequence
  DNA replication origin
tggcggcggaggctgcactgagcgggacctgcgagcagcgcgggcggcagcccgggggaagcggtgagtcgcgggcggcaggcccagccaggtgggtggggaaacgcgcagggggcccggcggaggcgcgcaggcttgggcaggctcgggccgtgcacccgcgggccggctgcggggagaccccgggctcggaggtcggaagcccctttgcgggccggggatgcctcgggccggggggggggtccctgcacctggggatccctggcatcctgcggccggacaacaccacgcttccagcatcccgaggcccagcatcccgtgggcctcgtccccggtgggaagggccctccgccgcgtccccgcgcgcctggccgcgctgtcttcggcgcctgcgtggcgaactcgctccggggacaccaagatggctgcctcgggggcagcggcagccaggtggcccagtgcctggcccagcgctccgcgctctcggctttgcctcctggtgctgggggtcggaggggagaccacctggttcctgccctagaactcgcaatccagtagggaggtgatgtgcaaggaagtagattcttggagtagtagttggtcctacagggaccttgcattttcacgcttttctcctgaactttcacgtctgtcacaggtctctaacctgcccagaatgacaataaacagtctactaagtgcgtgccaggtgacttaggtccatatacttttacactcttccggccctgcgaggtactgggtgttggctctataatccacatgagaaaactggggctctgagaggttgagtgcccaaggtcacacagctggccatccatagtccaaggccatctgagtctcagtcgtaaatactgcgttctcaaagacgcttttccttggctat

SEQ ID NO: 10430 - DNA, 1355 bp, Artificial sequence
  DNA replication origin
gtgcttctgattgactctttggagaagcagcagcagtggcacagccttctgaggtgaaggcagatcaggagaacaggccgcctcccacccctctagcccagacagcccatgccaattccataaggcaggggtttcatctccaaaggcaatgacagcaatctcaaaggctctttctgcttggaaattctacagcagaggatatatgggaggagagggagggaagaaggaaggaggaagtgggggagaaaggaagggagggagggagagggaaggagagtagggaagaagagagaaaggaagggaggaagaaaggaagggaggaatgaaggagagagggagggaagaaggaagggacagatagggagggaagtgggaggggaggagaaaaggaggagggaagaaggaaggaagaagggagggaggagggaaggaagtagggagggaggaagaaagaaagggggggggaagaagaaagagagggagggagggggaaggaaaatagggaggaagggagggaggaaagaaagagggagggaagaaggaaaggagaaaggaagaaagaagaaaggcaggaaggaaggagggagggaagaaggaatggagaaaaggaagacagaaaggaggtagggagggtaggaggcagcaaggaaggagggaaggagggagaaagaaaggaaagaggaaggaaaggacggaaggaggaagggagagcaggaggaaagaagggtgagagggagggaggaataactcctcaggatctttcctttccctccatttctaagccgcctcctgtctctgtaaagtgatcatttacaaattcattcggcagaccttgactgagcccttgttctctctgtgccaggtcacttgccaagttctggggcatgagccaaatcagacctggacctgccttcaagtagctcacagcctggtggggggtgacagactcagccacggcatagcctcaacccaagtggaggctctgacagcccctgcttgaggtggaagaagaagggacatttgaggagggccctgaggactgatgcggggttgctaaaggtgacatctcacagggagacaaacatcctcaaagacacagagacaaagtatgtttggggaatgacaagtaaattgatgtcatcggagtgttaagtccagtgggaggactgcacagggcagtgtttctggcagacaagtttgcggggggtgggggggtgtctcaggttcaattcccttttattacagactcaatcaatgcagcccctagaaaagtgatttgcccacaggcacccagcacctgaaagaggctgaatgtgacctctggccatcagccccagtccttcatgaattcccct

SEQ ID NO: 10431 - DNA, 851 bp, Artificial sequence
  DNA replication origin
acggggactgtttcggcgcaagtgcactttccaaatccacccttcgcgggcaaaggggatataaagccgacccgcgtcccgagcactgctgtgcaccggggctgcatcccgagctctcaacgcccccttggggaaggcacgacccccgcggtcacagacaaggaaactgaggctcgcaggccaggcggaggcacctgcccaaggtcaggcacagccagggagcggtggggccgaggctcgaacccgggttcggggccacgacggccgccggggatcccgagcagcccctcgggcggctccgccagcccacgccgggtccccaagcccgcctgggaccccaccccgagccgaggccccgcggggaggcggcggccgcgttacctggtgctgctgccgcgggtattggctccgcacccggttcgcctcggtcccgcgcccgcgccggctgcgctccgggcagggatgcagcgggcggcgcgcgcacggcctgcgccccgcgcctcgcacccacttcctcgtctccgcccccaactcgctcctccttgctctcaacgctccttcccttccttccctctccaagtctctctctctctctctctctctcagcgcgcacacgcccacattttctcccccagtctccctctcccacggtctcacccactttctattttcctttctcctacaccctccctcctcatctcgccgactctgacacttgccccttcctcttcctttctgccacactgccccctctttctctcccttttctccctggctccttccctctccccgccccgcagattgtgagcccgcccttgaccgggcaaccgccacctgtgcagatattggct

SEQ ID NO: 10432 - DNA, 1315 bp, Artificial sequence
  DNA replication origin
cgtgtgcgcgctgagagagagagagagagagagagacttggagagggaaggaagggaaggagcgttgagagcaaggaggagcgagttgggggcggagacgaggaagtgggtgcgaggcgcggggcgcaggccgtgcgcgcgccgcccgctgcatccctgcccggagcgcagccggcgcgggcgcgggaccgaggcgaaccgggtgcggagccaatacccgcggcagcagcaccaggtaacgcggccgccgcctccccgcggggcctcggctcggggtggggtcccaggcgggcttggggacccggcgtgggctggcggagccgcccgaggggctgctcgggatccccggcggccgtcgtggccccgaacccgggttcgagcctcggccccaccgctccctggctgtgcctgaccttgggcaggtgcctccgcctggcctgcgagcctcagtttccttgtctgtgaccgcgggggtcgtgccttccccaagggggcgttgagagctcgggatgcagccccggtgcacagcagtgctcgggacgcgggtcggctttatatcccctttgcccgcgaagggtggatttggaaagtgcacttgcgccgaaacagtccccgttttgtctccgggtctgggtggtggcattttctcgcggcgatgtgtctgtcggagcatggagcaactttctgctaaagggaagccagcggagagcgggggctgctggggaggaggcttctatgtctcaggaaaccagaacgacctgccttcatcccgctgggctgccgcccgctgccggatgaccgatgaccggagccacaacaggcagcgctcagcgggtgggagtccttgctggggacatctggacgtggatttgcctgtgggatgagcagagcaagtggcctctgataggaatcccaatctgggcagtgaccttgagcttgagagcctcagtttcctcctccatgaacagggccatgctaatcccccaccccgtccatgaggtgttgtgaggcgaaagaggtggggcaggaaagtgctgtggtgtcccccagtggcagctgtcatgccctagatcagataggcccagtcctggaggcggttgcctcttgggaagtcatttgtatgcctcaggtcccctctgtgccctttgccagagagggtcaatcggtgaagctgggtggtggccgggctgggcatgaagcagggcagggcctagggaatgtggggggcccagaagcttcagcctccactgcacacctgtcctgaggctgatgctcctgtaagacatgacgtctctcagatggcagtttttgtcct

SEQ ID NO: 10433 - DNA, 1218 bp, Artificial sequence
  DNA replication origin
ggcggagggtgcggaggagcccgcccggccgccgctgtccgccgctgcagtgctgacccgatagggacccggtgcggcgcgggagctgtccccgagatggtgctggagcgagaagcccgaggcgccctctgcctcgccccggaagagccgccggcggctgagagctccagggagggggagaggccggaggaagccgcctctaggaagctctcgagcgcggggcctgtggccggggtctctccgccaaccgctcccgcggaggagggcggctcagccacagggagcgagcgcgcgttctacgaacctgttggaggctgcagctcctccgcggccgacgagggcgcccgggccgaggttctggcgcgtttctccctccccctcttccttgactcctccgccgaggcgctccctcctgcctgggctagcacacgtgcacgcggggggcgccaagccccgtttctgtccgcctcgaatgcctgccgagctgcagggcacagagcccagaggcctccccctaagggcagacccgctcccagggagacccaagcttcccgagaaaggaggcgggggctggcggcggagatgagagaggacgccagcagaggtggcagtgaaatcaaggagacatgggagagttcccacccaggcagttctgccctgaagttcgaggacttgggggtctgccactagggcatcctgacttagaaatatctctcactctccatttctgtgaccagcaaccaaatgcaggtctacctacctgctctgttgccaaccccactcactggcctgactgccgctagtacttcattccaggttgtcttttaccatgtcccagagaaagctctctaaactaactttttgacgagatccttcactagcaagacaagctatgtgcccatcatgacagaggaccacttactctgaacaggctcaccccagggccttagcacctgcccttccctttggctgagactttctcccttccttactacttatgctttatctgcaagtgaaagcatcctcattttccatgcaaattttcctggcccctaaggcacagtcagtcaccgcctcctctaggatccctcagcctttacaaccctccactacacttctcatcatattgtgttactcatgcacctctatcctcagttgccaggctaataaaaactagttccatattttatgtttctctgtatcttcatctcctagcat

SEQ ID NO: 10434 - DNA, 1978 bp, Artificial sequence
  DNA replication origin
ctctccccctccctggagctctcagccgccggcggctcttccggggcgaggcagagggcgcctcgggcttctcgctccagcaccatctcggggacagctcccgcgccgcaccgggtccctatcgggtcagcactgcagcggcggacagcggcggccgggcgggctcctccgcaccctccgccctggttccgcgcggctgctaaggaccgtccctcgcccccgcgggccgctcccaacgctagcaccgcggcggcggacagctctctccggcggcaccgcgaaccgcgaacaaagccgcgggtctggggcccccagcgcgcctaggggtggcgtgaggccgcatcgatcgggggatttcagcttctcccagagaggtgtcaccggcgagctaggcgggggcctagcacagccgcgcgtctccggcttgggtccgccgcccgccgaggcctggccgtgcaatggcggggcccagctaagagtgggcaagaggtagaggggaaacaggcacagaacggtcccggctccgctaggcgggctgggcctaggctgaggtcccggcggggaggaaggagtgcgccgccccgtcttccctccagacccccaccccatcccagctcagaatcgcggacttccaagagccctgcacagaagcccgcggctggcagctgcaatcactgactccggctgtccccggaacatccctagaaagtgtgaggctgagtttccgtagggggagggggctgagaagccgcggggaagcctcacgaacgggacagctccaggctccctctctccctcactccccgggttccgcccccacctccagagaaatcccagacggcagagaaggcaggggggagggggcgacccagacagcaggttgcgaactcggcttagacctgggaggttgcaattagcaagaaaaaaggttgagggcgtctgtgaagccgggaggttcccaaacagggaagccagttccgcggcaggaaagcatacgtggaagagaaaccttttctctgagagctgaggctgggagggccctcggatcacgtgacactctagatcactgattgtctccgcggaagacaaggcctagggggcaggggtgattcgcccaaggtcactcagcaatttagtagcaaagctgggcctaaaacccgggctctctaactcctgggcctgttgcataacattcatagagaagtcttttaaaatcccacatgcaaggagaatagcagagtggtttacttactagcatatgaccttgggcaagtgactgtctgagactatcttcagctattaaagaggaatgagaagatcaataatacccacttcgatgagaatttaatgagagagccatgtaatgagcttagtggcacatagtaaatgctcaaaaaatggtagatcccatgactgctatcatactttctgtaaacttgtactggggacctgttatataccaggcactggctgtgcactggggaggcagagaagtagcttgaggaggtcacaggccagaaaaggaaacaaacagttgcaatatgttatgataagtatcaaggcaactgggctgtgggatctcagaagcaggagtcacgaactgtaaggaaagaccaggaaaatgaccccaggcagacagagctgtgtgtcaaggccaagagatgtgaagtcccagccaccaaggcaatgtcactgtgccagagggtcctcaggatgtggactgaaagatgagagtggagagaaaggctggagccggtctccaaagagccttttatggatggaatccttcaaacatatttagaaaaatagaaagaatagtataataaccccccacatacccatcattcagcttcaacagttggccaattttgtttcatttatacccacacccactctcatcacacacacccacatccactctcatcacatgcgcacacactcacactgacttatttggaagcaaacccaagacatcaca

SEQ ID NO: 10435 - DNA, 2235 bp, Artificial sequence
  DNA replication origin
agcgcctcctggcggcctggcccaaatcctcaactgccggcaacctgctggacctcagcactcccgcaggcatatggcaaaacatacacacacacacaccctgcacacacgcacgcactcacacgatgtctaagtccagagttgcacacacggggtcatactttcaacgcacacaccctcatgcactcgttgacacgttaaattcaacccggcacacacgtcctcaggatctaccatgtaccaggacatgtagccaattctggggacaggagaaatgaaacaagatactggtcctgtcctgagaggagctcagagtaaccaggaagggcaagacaaagaaagacaaacagacaaagagagcatgtactggaggcaggcaatactgcccccagaaagtgccacaggtctccaaaggggaagatgccctcacatcttgccaaggagatccgtgaaattgcatggagggagtgctgtttgagagagatcttcagaaatcaatgctgctgatgatgataatgatgactgcgatgatgttagataatatgtacctactttgtgccaacactgggctgagcactttatttgcatcacctcattcaatgctcactacaagccttgggaataggtgttgttgtctccatttcatagatgagaaaacattgagtcatttgctcaaggttacttagtaagtgatggagccaggatttgaactggcagagatgagggtaagaggttccaaggctgtgggaatagcatgcacaaatgcccaggcattctcagaaagattatctgttgggaaataatacgtgctaagcagagccctgtgcaagaggtggcacacgagcagcaaggaagacgggtgctagactgtgcaggccttgaaggtcagcacaaggactcgtatcagtttaacaaggccatggggagccattgcagggtgtgtatgcatgagaaaatctgccctttaggaagattaattggatggccacgtggaggctggatgagagctgagggagagacagttagaggttatggataaatccagaatctctaggtcctgaaccaaggcattagcagcagtcacagagtggagggtggggatgtaggcagcattgcaaagctacagcgtctggacttctccctggaattctccctcggcacccccatcccaatcttaactcaccaattccttgcatgatctgttatccagcttctacctccccagcccaactgaatgctgtgagaccactgctgggactcccttgttccctgccacagccccagcacccagaacagtgtctggcagaaagtaggtactcaaggaatatttgtagtatgagcaactgagtgaatgaatgaatgaataatgaggaatttgctgtctctagagttttcagttgaggtgattgggacaaggcatactagagaaaaagatgggtgtgtggggaaagccaggatgagactgatctttggacagacagaatttgagattatccatgtgacaacatccagcagagagttaaatgtgcaggtgtaggggaggggaggcagagagagggaggtatctgtggctaaagaagtgcactaaaccaataggggtggacgagattcccaagggagacagaggggcaggagaggcaggaggggagagtttgtttggagaccatcttcactttaaaggaaaggaaaggagtcagcaaagaagagagagaagacctatctgagaagtaggatgaagaccacaagagtgctgtgtcatggaattcaggaggagattccagaaagctggaaaaggtggggggagggagtcagcagcagcatgtgattcagcagagggatggaggaggatgacggccgtgaagaccctcttgaatctggcaatgggaaagcctctggcgactgattaccgcagtttcagggctcctgcagaggcagcagagctctggtctcacagagaggtagggcttgactgggaggtgaagatgtggagataccatgtggagatcacttcatcacaaagtgagaggggtgggattaagggaaacgcagaatttagggaaggagttagagaagggagggaataaaagcaacatatggagagggatggaagatgtgaggaagagggagtggtgaggtacaaagagagggaatccagggcacaggtagatgaattggcttcagccaggagagggcttcttcctcaggagctagaaggaggggaggttacaggagctc

SEQ ID NO: 10436 - DNA, 1020 bp, Artificial sequence
  DNA replication origin
acagagtgtgttgcggactcagagatacccagatgtaggtgaggcgttgcgttcttttctctctctgacgctgtggtgcggtggagataacactggcttcataacttgggcagaatcagatttgaagctggctccagcagtggtttatctgaacccactttgctcatccattaagtggagacaatgaatccccttcttgggtcgttaggaagattaaacaagatacagcctgtacggtgtctagcacagcacctggcacaagggaggtgcttaataagccttccccttgcttgaggtggaggagctcctagcgagagcatggagacctgtcactggtctgtcatccttctcagctccagtgccgccaccaagcgagcaacgttcatcattccagagtgagtgctgtgaagggaggatatggatccatcacaccccgggcgcagtgggaggttcagaggagaaatatgagatctgctttccgtttgcagtcagtttgggctcatgatggataagtgtgtgtgtgtgtgaacaagtggagcataactcagactgcacagcagcgggtgaaggaggaggggggcaaagctcctgttaactgaggctgctgggaaagggtcgtatggggagggggtggcctcagtgcaggccttgggtagagcagaggtgagtgcaggacaggggacaggtgggggggcgttgctgcagcttggagccaagccaaggtgtggccgtcagtgtcctggacgtgaagatggtcaggggcagtaggagatgtcgctggagggaagagggagggaggggtgtctggttctgagtggtttcagtttggactggctggtagtgtggctgggtgagtaggtaagagacggatatacctgggttcagatcctttcctgccattgctaacagggagactttagccaaattacttcacctccatgattttgcttgtctttaagatgtgcctgatggtaatgtgacttaggagggttcaatgagttgctgtgtgtaaatgcctgg

SEQ ID NO: 10437 - DNA, 1771 bp, Artificial sequence
  DNA replication origin
aaatattactaagtaagcagacgcgggcacgcgctgcataccgggatttgtagtcccttccggggcggggtacagcgcgcctgcgcagaggggccgtcgctcttccgggcgcatgcgtgcggcagcggcgccaggactgactgcgccgtggaggctgctgcagtgttgtgagttggaagctggggagctcggcatggcggtccccgctgcagccatggggccctcggcgttgggccagagcggccccggctcgatggccccgtggtgctcagtgagcagcggcccgtcgcgctacgtgcttgggatgcaggagctgttccggggccacagcaagacgcgcgagttcctggcgcacagcgccaaggtgcactcggtggcctggagttgcgacgggcgtcgcctagcctcggggtccttcgacaagacggccagcgtcttcttgctggagaaggaccggttggtgagctgccggggctcggctcaggctagggagaggggccgtggtgaagtgaggtgcggtagtgggagagcgaatgggggcgaacggagccgcgggggtgaaaggagagtgggtttgagggaaggggaaagggggagtgtggagatgaggagggagtagggagaaggtggagtgtgggggtgacggggtcgtgaggggtgaggagaggaagactgggggcgtgtgaagagtgtggaagtaaggaggttggcgatggcgggtgaaggtgaggagagggtggatgggacagggctgcgatgggagccttactggtttggagtcgaatcctgtgctgataagaagtggctaggggctgtggtggtggtggtggtggtggtggtggtacgttggtggtggtacgttggtggtacgttggtggtagagtaagggtggaaaaccaggaaggaggagaaggccagggagggcacaaaagtaagggcataggtgtggaagctgagaaaaacagttcagaaggcctgcggagaagagaagggagaaagggcttggaggaactggattctgaattacccagatctttactggtcccagcatactttggtttgaataagcttataaagttacatgcggaggcagttacatctatgtgaagtcacatctggattctgttctttcaggtcaaagaaaacaattatcggggacatggggatagtgtggaccagctttgttggcatccaagtaatcctgacctatttgttacggcgtccggagataaaaccattcgcatctgggatgtgaggactacaaaatgcattgccactgtgaacactaaaggtgactattcagagagagggcaataggaagataagctgtttggattcattcaacaaccattttccgaatatcttttctgtgcttggcactcagctgtgtatgagacatcctgagctgaataagagtttccagctccaaggacctcccctgcggggagaagacatatatatacaaataacatagcaagatatggttcattttataatggagaggtctgcaaggtggatacccagaatagaaatgaaaacaaaagtctgcctaggggagccagggaaggcctcaccaaatttgagcaaacttttagggtagccataggagttgagtggtcagggtgctgtgggtggggaatgggacatttccaggagggaacggcatgtgcaaaggcatggagaatttggaaaattctgatgagttagaatggttgaaacttggatggtcttggtgatctgggagaaagttgtgcagtacatttataggctc

SEQ ID NO: 10438 - DNA, 1158 bp, Artificial sequence
  DNA replication origin
tgtgggtgagggtgtgggtgggggtgtgggcgagggtgtgggtgggggtgtgggggggagggtttggatgggggtgtgtgagtgagggtgtgggtgagggtgtgggtgggggtgtgggcgagggtgtgggtggggatgtgagggtgggggtgtgtgggtgagggtgtgggtgggggtgtgggcgagggtgtgggtgggggtgtgagggtgggggtgtgtgggtgagggtgtgggtgggggtgtgtgggtgagggtgtgggtgggggtgtgtgggtgagggtgtgtgagtgagggtgtgggtgggggtgtgggcgagggtgtgggtggggatgtgagggtgggggtgtgtgggggagggtgtgggtgggggtgtgtgggggagggtgtgggtgggggtgtgtgggggagggtgtgggtgggggggtgagtgcctgtctggctctcctgggtggggctggatgaatgtttgggcacaggcagcagctgtcacatggcctggctgtgggtttgggacggaaaccaggtaggtgtgccgtatcaggcacagctacaaactgtgccaaggaaacagtcagagcaggggcccggggaaacttctgccttggcagaaggtactggggagatgggatgatttggggaggtcttccaaggcccatggtgcttcatggagccagggcccagggcagggagggctataaccctggcttgcctgattggctgaacacaaacaggatggaagggggtgtgagcagcccgctaggtggatgcctaagtgaggaaggaatgggtggccacgtggctgagacccccaagaccaggaccccactgtcaggccagtggcttccataggccagtaagaagcgttctcctttgggcactgaggccatcggcttcagcttcacacccttttccaaacagacagaagtccttcaggtaacctcaaaagtcacttctcctggccttccccagaggggaaaggagagagcggtgcttgtggcagggggccctcagagctggtggagggcacagcagagagactgcttgcatgtgggaggcccccagcagaccttgcccagatgtcagccctcgtttgaggcaaactataaaattattacaatttaggccaggcgcaatggcccatgcctgtaatcccagcac

SEQ ID NO: 10439 - DNA, 999 bp, Artificial sequence
  DNA replication origin
agggcccccacacccactgtggttccccagcccttgccctctcgctccatgttgtggagaccatctgggacctccaggcatggagcaggagtagtgggcaccacgggggctcagggcctgtgggtggaggagtcaggaatgggaaccagtacttgggtggggagtactggctgagtgtgagtttctgctgttcctgctccccagggagtgttgggcactgtggtgtctccagtccccaccccaggtcaggaggccagcttgggccaggaggagaggctggactttggcaggtgagtgtgaatgcctttgctgaaactggccgctgccacccagtggccagcatgacaaggcgaggctttaacactaccactttctgcatcccgttgtaggtttttctggcttttcctctccagctgttccaagccaggctggtgaagtaggagtcacctgtggtgagctggaggttggagcctgtagatggcgtggctctgtggctcacttcctgtggttgtggcagtgacagcgatggagactgcagctcgacaggaatggtaggagggtgcccgtggaggccaggtggaaggagccctggagggtgggtgggtgcatggaaggtgacagaagcactggttgtgttggcatcggcggtaatagtggtaacagcagcaagtctgggggccgggaagggggagtaggagagctttggggcctggcctggcctggggtgtgtaggaagctgctggttctgtactgcaggcctcagtgacagtggtggaggtgcagccagggcaaggaggagtcctcccctttcttctgcagtttctggagggtgtcctcctcctgctggtgcctgagccaggagtgagtggcagcattgtctcattcttaacagaatttagggggtgactagttgtgtgtctttttgcttgtgtttgttttgataacttatcccttaaggaacaaaaggcttctttggctgggttttggtgtggtgggatc

SEQ ID NO: 10440 - DNA, 1758 bp, Artificial sequence
  DNA replication origin
gatgagagcaagtcttaggacaaccagtcagcgtatgaaataaagtccaatcagagaaggcctagaggttttctctcatccaatcagaacatgtagttcagaatccttgtgcataaccccatgtgcatgctgaggaggcctcacgccatcctaggctttcctaaatcggccggcggagctactctgttcctagcttagcagatcaagagaagggggagctggatgctggagcctgcaacactgtggctcgcctcgctacagttggcagtggtgacagagacagcaggcagcacggccagagcggtagaagggaggatggcagcgggagctgctcttgactggctagcggtctagaagaaggggggccccctgctccacgctggaggctggagccttggccaccgaggctcctctggctgcggttggtggtggcgaccgagactgcaggtctgttagagtggtagaaagtttgccgggtaggtgcactctttgcggctgcactgccctcctgcagggggttggggaggcatatttggtaagctgttgaggctgcagtgcctgccgcaggggtagggaggggctggtgggggcgctatctggcattgcattgctgtgggggtggggggcaggttggctgagttatcagggcctacagtgcccaaggtcgaggggttggaggcaggttgtgtgcgctattgtgcacagccagcggctcatgggggcaggttaggggtgttatttgctgcactgccagaggcagggggcaggttgggtgtgctatcctgggctacaatgccagcaacaatgtgggccggcagtcgggggaggtttaggggagctgtcaaatgctgcagtgcttgtgggggaagggggaaaggggaaggtggggtggggggtttggttgggtgcactatcctgggcattcactgcccacgatgggagcaggttgggggcgctatccagggctgtgctgcctgtggccctggtggggggctggtttggggcgctgtcaggtgctgcaatgccggtagcgggattggctgtggacaccatcaaatgctacactgctgggggcagagtggtggtttgggggcactattggggttacattgcctactacggtagtctctgggtgtgttgtgggtgcaatccgggggctgcattgccggcagcgggggccaggttaggggcgctatcggggtctgcactgctgccaccagaggcaggttgtggaggtggccgggacaacggttgcctccgaggaaggggaccttctccttttctcagactcagggctctagagagagaactcctcctgctcgtgtgggagtgtggcgggcgcacagagttttcatgccaatcctctaagcatggcagggcccccacacccactgtggttccccagcccttgccctctcgctccatgttgtggagaccatctgggacctccaggcatggagcaggagtagtgggcaccacgggggctcagggcctgtgggtggaggagtcaggaatgggaaccagtacttgggtggggagtactggctgagtgtgagtttctgctgttcctgctccccagggagtgttgggcactgtggtgtctccagtccccaccccaggtcaggaggccagcttgggccaggaggagaggctggactttggcaggtgagtgtgaatgcctttgctgaaactggccgctgccacccagtggccagcatgacaaggcgaggctttaacactaccactttctgcatcccg

SEQ ID NO: 10441 - DNA, 2421 bp, Artificial sequence
  DNA replication origin
cccttctcttgatctgctaagctaggaacagagtagctccgccggccgatttaggaaagcctaggatggcgtgaggcctcctcagcatgcacatggggttatgcacaaggattctgaactacatgttctgattggatgagagaaaacctctaggccttctctgattggactttatttcatacgctgactggttgtcctaagacttgctctcatccaatcagaacatgctaacaaagtccaatcagagtaggcctctgcgttttctcttacccaatcctggaacatgtagtccaggaacctcatatgcataacctcagtatataaatggtgctgaaggggtgtcaggccgttctaggctcatgcgtgtctgcgcgctgggctgctccgttcccggcttagaggaccaggacaagggctagccaccgctgcatgctggaggctgtggctgcggcaccacagctcgcctcgctgcggttggtggcagcgacggagactgcagtgtggctggagcggtaggaaggggaaaatagttttggggtagatggaggagtaaagagggtggttagtgccaaagggaaaagaggatggcgagcaggagaaggtgttgcaaaaaagacagtgaggaaaagacggtggggaaaaaatgttgggggtaggtggagggggaaaaacggtggtgaacaggagggagagaaggttttgcggaaagatggtggggaaaaagtttttgggtagatggaagggggaaagagagggtggtggggggaacgggggtgagcaggagggagagaaagtttgcaaaaatacagttgggaaaaaaagaaagggaaagaagagggtggataaaaagattttgagtagatggagcgggaaaaaggggtggcaagtgggaggagaaaagagggtgcagagagggagggggaggagagagtggcgagcaggagggagagaaggttttgtgaaaaggcagtgaggagagaagcttttaagtagatggaggggaaaagagggtggcaagcgggagaaagataaagagggtggcgagcagggagaaaaggttttgggaaaaaccagtgggcagaaaagaaagtgcagaaagaaaacacggtgggtagaaagtgggtagatggagggggaaaagagggtggcaagtgagaggagaatagaaggtgcccagggggagtggggagagttgggaaaatgatgatagggaaaatagtttggggtagatggagggcaaaaagagggtggcaaacaggatagaggaaagaagagggtgagcgggaagcagggaaggcctttgtgaaaagacggtgggggaaaattggggaggtagatgggtaaacgagggtggtaaggaggagtaggaaggcggctttgcaaaaagatggctgggatgtttttgggtagatggagaagggaaagaggatggcaaggaggaaagaagaaaaagacgatggggaaacagtttttgggtagatggagggggaaggagggtggcgagcagcaggagtggagagaaggctttgggaagagatgggagaaaatgtatttggggagatgaaggaacaaaagagggtgatgagagccggaggggcaaaaaagggtggccagggagagggagaaaagacggtggggaaaaggttttgggtagatgggtggggaaaactgtagtgagcgggtgagtagagaaggctttgcgaaaagatggtgggggaaaaagttttggggtagatggaggaagaaaaagggtggcgaaagagagggggccaaaggtcgtcgggaaaaaaagatggggaaataatggtgggggacaaaggttttgagtagatctttttctgatttttaaatcagattatttgtatttttgcttttgagtagcttcagttctttatatgttgtgtgtattaaccctttgcctgatgtatagtttgcaaatacttccattgtctggtttgtttcttcattctattgattgcttcctctgctttgcagaagttttaagtttaatgtaattgcatttctctattttggcttttgttgcttgtgcttttgatgtctgtttcaaaatcccttgtcctaaccaattccatgaagtatttatcctatgtcttcttctctagtagtttcatagtttcaggttctacatgtcaatctttgagtagatttttgtatatggtaagataaagatctaaatttattctcgtacgtgtgggtgttgtgttttcctagcgtttactgaagagattgtccttcccaaaggtgtgttcttggtgcctttgttaaaaatgagttgactgtaaatgcgtgaatttatttctgagttctctacactgtttcatttgtctttgtctctgtcattcatctatgtctgtctgtctgtctctgtctctccttgctccttttttcgccagttccatg

SEQ ID NO: 10442 - DNA, 1090 bp, Artificial sequence
  DNA replication origin
gctgtgcactcggtgaccctgacgccatccaagggaagctccgccatcccgcgccagtgcctgagctgcaactgcaaactgcgcgtcctggcacgagcagcggtgggggcgggtgggggaaggagcgagtgactctccaggcgtcttccgctacctgacaccagccaggcagcccccagggccagagcgtcagcgccgaagccaggctcatccgggaagccactccggtggccgcggggtgcccatgccagcaccagatctctcttcggaaggaggagcggggcgggctacacggccaggcgggccctccccttaaggcggggtgggccgcgcgcctgcgattttccgtccgtggtcctggggcagcccgggccagccaggagaacccgcgagcccagcggcgcctgcacctgcggcttccgggagccgggcggctttgcgaggctcactaggtctgagaggtcggaggccgccagtgtcgctgctgaagggtggaccaggcgggatcgcggattctgggctagatcgcagacttggtatcgcggattgggatttggatcggggattttgagttggatcacggattgggggttggatcgcggattgggggttggatcgcggattgggggttggatcgcggattgggggttggatcgcggattgggagttggatcgcggattgggggttggatcgcggattgggggttggatcgcggattggggtttggatcgcggattggaggttggatcgcggattgggggttggataggggatttggagttggattggggatttggggctgggtgtggggcgagggggagtgaaaaggtgacacggagctgccgcggctcaggagccagtggttgggggtctgagaagaactcaccaccttgaagaagttcttcggctttgggagccgcaggggccggcggtccggggctccctaggccacgtctacaggggttcggggtaccgaatcggaagatccacagggcgctgtcaagggcgaagccgcggaagtggagcgctgcctggagcgcaggagcagagacctggaagccggggacaggcagcacaggcagtggggtg

SEQ ID NO: 10443 - DNA, 2926 bp, Artificial sequence
  DNA replication origin
gttactctaataaatgtatttttgagaatttggtgacttatttcctagatctctttctttaattttaaattaaattccagcatattttgtttgtgtgaggcagaaatttaaaaataaatatgcaattattcactccaagaaaagtaacaggcaaggcaagggttaaaaagaaaagaacaagttttcctctgcttagcagctcacttcaaggacagttattagataaggctgtttgagaagccaaggccaaaggaatgggctccagacaccccctcttccagagcaaggatgaaggaaaaaaaagaaaaagacaatttattttactgttactctttccccagccttcttaagcatgattatgttttacaaatgtccgtatttagccagttcctgtttttctttcaatgcagctacaaggccactggctatgcaaggccacaagttgtgctatgctctagattatgtgacctgtcatatgattagctgcttttgttttatttattgtaagtccacttacaaaaaccccgctctgtctttgtttaatgctcagctttttggatgcgaatccactgagccaatgtgtacctaaaataaacaatcctcctgtactctcatatcagtctctccagtcctcagtttcctgcaacatgttgtgtgtgactttcatgtcataaatagtttatcaagaaacattttgaatggatctaatggattgtgtggttgtctaaacgttaatagtctgaagacatcaagcgggcaggagctgggcaggggtaggatcatggtgcaggcaggaccagggtgcagtgcggatgggctccagtaggagtggggtgctggtggggcaggggtgggggtaggtgtggggggcgagtcagagcagggtgctcctaggagtcgggtgctggtggggtggggcacagataggagcaggttgtaggtaggagctaggtgtgggtaatattggggtgctggtggggtggggcatgggtggtatggggtactggtagggcagggtgtgggtaggagcagggttcaggtaggggctggcgctggagtggtggggcatgtgtagcagtgggctgcgagtaggagccgggttcaagtaggagtagggtgattgctgggctaggcatgtgtaggatggggtgctggcagggcacggagctggaaggagcagaacgcaggtagaagcagggtgctggcggggcatggcatgggtgggagtggagtgcgggtaagactggggttctggcggggcgagcatgtgtaggatggtagcagttgggtaggaggtgctgtaggactggtagcagttgggtgctggcggattggggcgcctgtaggatgcggtgctgccaggcagggcagcaggtaggagaaaggtccatgtaggagctaggtgctccggggctggacaaaggtaggagcggggtgtgggtaggagcaggatgacagctgggccaggcccaggaaggaggagagtgtgggtaggaactgagtgctgatgacgcagggcccaggtagaagaggggtccgggtggagcaggatgctgacggggcacggcacggcggggtactggtggggagaagcgtgtaggcgcggggtgcgggtaggatcggggtcctggaggcgcgtgggaggatgcgacggagtgcggtaggggcagggtgattgtggggcggggggcgggtaagacgtggtgctggcagggccgggtgtgggtagagcagagcggtaggagcagggtgccggtggggcggggcgcggttaggacagggcagggcgttggtaggagccgggtgccagcaggagtagggtgcaggacgcgggtaggatcgaaacctcatgctggaaaggccaccagtagcctgggtccccgtacctctgcaggcgcagccgctcttttcacctggtgcgccagcttgcaagtcgtgcatttacctcttttggctgcacagagggcagggaagcctcgcgggtatgcaagatcgggaatggctgggggtgcgaccaaggggacttggagaaccgccccgcctccccaggttcccctggtagagcgcaccaccccccacccccgcgagttttcagaggcccaggccctgtggagctgggtctctgcggaaggggtggggaccgggcagaggcaggaggacggaaagagctgggcagggaagggggccaagagagccctttctcaacatccaggttagtggataggctgggggtcctgcagaaatgtaaccatgtgtggaaaaacaggaaatggggaggggcgaggaagaggagttggtcacccggcagcaggtggtggcttagacaatcataggggctgaggggctggcttctcactgtcaggtcctgggctggtaagtttcagggaactcagatgaaacaaatgtaactttctttaagagtaacaggatcgatttctctgtttattcaaggaagctgtatacatcgggtctatgggagaattgggcacctttcagcctcacgggggaagctgtaagggtgggcgcccttccccccctctacacaagcgcactcttaggatgtgggacgggcggcagaggagagcgggcggcagaggagagcgggcggcagaggagagcgggcggcagaggagagcgggcggcagaggagagcgggcggcagaggagagcgggcggcagaggagagcgggcggcagaggagagcgggcagcagaggagagcgcgcaacagagaggaactggagccccaaagactctagtttcccccaaataaatgatagccatgaacatattcacctcacaaggagaagccagggggcctgcgctggggggttgtgggctgaggttggaagtgggttttgggcctttgtggggaaagtcctctgttctctccccatcccctagctgcctcttgaggtccggcctgc

SEQ ID NO: 10444 - DNA, 733 bp, Artificial sequence
  DNA replication origin
caggtcctggggcaccagagccgcttcccagatttgggtgctggcagtggtgcttccggtcctggccctgggctcctctgtgccctgagctgctgatgtctgtgtcctgcagagcccagcgttccagggaagcacctggggggcagtgtggccctgggcaggaggcaggggaggcaggacaggggccatcccagtcgcttccaggtccctcctgtgtctccatgactctagaaaattctcacccttgggttcctaaaagagaaaaaatgtagttgcctagaatttaagtcatgaccctgggggatgctgggggagatgtgcactccgggtgccaggacctgagggtggggatctgggggtgcagcgtgagccggggtgggcgagggtggggagctgggggtgcagcttgatgcagggtgggcgagggtggggagctgggggtgcagcctgaggcggggtgggcgagggtggggagctgggggtgcagcatgagccggggtgggcgagggtggggagggcttcctgggtttcttcctcacactttagttgccactgaagctggcacagacctggcagacggaactggtcctgggtgggccagtggttttgttctggtcttctccccctcccactcctccaccgtggcctgtagggtgtctgctgcaccctgggaagccccagctcccttccagcctgacactgagcagaggtggggctctgggcccggccctcc

SEQ ID NO: 10445 - DNA, 1098 bp, Artificial sequence
  DNA replication origin
caggcgccggcctggcagcgggcttggtgcccagaacccagccacagccggaggtcccagtgtggctgcccctcccgccaaagccgcctcccgaagtaaacaggacagccctttctgagcaagcatgagcagagggccggggagcccagaagtcgccactgtcctgggcctgctgtttctgcagcagatggcccagtcctgagttcccttctgcgctctacctccctcattcctcctccagctctgctgctggagtggagctgtctcttaggcaaggctcctttgctctcctgcatttttgccactctggtctttaaacatctaaaagcctgtcgtttctggggtggagcccttggtgaggctgccgtgggcctcaacccaccgggcagcctgggagttacgtgctgctgcggacagagcacctgaagatgcggccttcagggccatgggaggctcagggccaacacttaccggtgcgggttttgggactgggtgtcagaggacaggggtgctgctgtgctgaggacgggtggggcagggcgggtggcccgggcgtcaaaaggcatggatggtgctgtgctgaggatggggttcagggtggcggggctgggattcagggcaggggtgctgctgtgctgacagcgggtgcagggccgggggctcgttttcaggggtcagggtgggggaatgggtgtcggggcaggggtgctgctttgctgagaacagggtgcagggtggggggcttggtttcgtgagataggggtgctgctgtgctgaggacggggtgaaggttgatgggctgagggtccacggacaggggtaccgctgcgctgaggacagggagtgccgcgtggggcctgggtgccagggtttggggtgcaaatatagtgagatcaggatgcattggggagagtgccgcagggacctcgggagctgtcacatggcagggagaggccgcagtcaacaccctgtgtcatgatttcttccccacctgtgtgtggccaggcgcaggggactagacagtggctgccaaacagggagtgcaccccggcggtggctgtaggggaccacgacagtggggccacctctccctgcgtg

SEQ ID NO: 10446 - DNA, 1223 bp, Artificial sequence
  DNA replication origin
cccatcacaagaagaaaagcgcttatcagggcgctgtgcgcacggggccaccttcgcgctggcccgtgcgggcaccctcagccggcgggactttcacctttgccgagcagcggcggcagcaccggatgtctccttcgcccctgcgcaccggggtcgcgcagaaaggacggtggttctgaccggcggctctgcggggcggggtgcggcgctcagcccggtcgccccatgcctgcccagggcttggtggacccgagggacactgtgggcatggcacctctgggcagggactcctgggcaatctgagctgctgtacgccctgctctggtctctgcccgccaggcgagcgccgtgcgcgagaggagcaggcaggggaagcacgcaggcggcatgtaggagaggagcgcggactgtgcaagggcaggagcggggcgggggccaggcaggggcaggggcaggggcaggggcaggagcggggagcgggccaggcagggataggagcgggtcgccacaggagcggggcgcgggtaagagcaaagccggccggcagaggtgggagcagggcgtggtgctgggaaggccaccactaacctgggtccgctcgcctttgcacgcacagcccctcctttcaccaggtgcacctgcctgcagtccctgtgctttgccctttttgctgcacaaagacagcagggaagccgtgcaggatgcaagatctgagactgctagggttgtgacccgaggactctgagaacaccaccctccccgccaaccgcccatccctaccccagctccaggctcccccaaccagagcgcatccccagccatttctcctgaggcagaggctcggtggagctcagcctctgtggggctagaggccagaggaagggaagatatgggcagggaagggggcaggagagcctttgtcagcatccagggcagtgcagagggtgggggtcctggaggccaggcctgggaaaaatgtaaccaggtttggaaaaacaagaattagggaggcgggaggcagacgcgttggtcaacaggcaccaggtggctgaggcagtccagaggggtgaggggcaggcctgtcaatgtcaggccccgagctggtaagtttcaactccctactgttctctgggaggtttccagagaaactaactccagtgagacaaatgtaactttctttaagactgggaggatcaatttctacatttattcaaagaagcagt

SEQ ID NO: 10447 - DNA, 1595 bp, Artificial sequence
  DNA replication origin
cgctgcccagcgcaagcagaaaggtgcttctcaaagcctcggctccgccgcttggcactctgggccacctttgcactggccgatgcgggcgcctgcagccagcaagacttacttttgtgagcagcctcggcgcaccggatgtcgtctttgccatccccagtgggcgctggggccgcgtctggagagacagtggctctggccggcggggtgcggcgctaagcccgaccgccccatgcctgcccgggtgaggccgacgtgggcgtggcacctcggggcagggactccagagcactcagcggctgcgcgccctgctctgtcactgttgggctaggcgggtgccggctgctggcgaggagccggaaggggcagcgcaaggcggcgggtgggagtgggcacgggccgggcttagctaggagcggggcacggataggagcggcgcacgcgtaggagcggggcgcgggcaggtacagaacgcgggcaggagcaggacgcggaggggagcggggcgcgggctggcagaggtcagaacaggacgcggtagcagcggggcgccactaggcagggataggagcgtggggcggtagctgccagacaggcgggtgctggaaaggccaccagtatcctgggtcagcgcacctctgcaagcacagccgctcctttcaaacaggtgcgccctttccactgcacagcgggcaaggaaaccaggtggggatgcaagatctggtactgctggggttgctggggttgcgacccagaagactctgagaacaacgccctctccccaaccccccatccctaccccagcttcaggctcccccgcagcgcacccccagccatttctcagaggcagaggcacagtgtagctgggcctctgcatggccaaaggtgggaggaggggaggagctggttagggagggggaaggacagccttcgtcagcatccagggcagtgcagagggtgggggtcctggaggcctggccaagaagaaatgtaaccagttgtggaaaaacaggagttagagagcagggaggcaaaggcgttggtcaacagacaccaggtagctgaggcactccggagggctgagggaggggtgaggggcaggcctctcactatcaggcccagagctctagctcgtaagtttcagctccctactgttctctgggaggtttcccaagaaaactccattgagacaaatgtaactttctttaaggctgggatgatcaatttctgtttattcaaagcagtagcaaactttttctatgggagaatttggccactttcagcctcatggggggagtgtggagggggtggccttcccccttctacacaggggaagtgggatgtgggactggcagcctaggagagccagcagcagagaggaactggagccccaaagaatccaattttcccccaaataaatgatgcccaggatcacattcacctctaataatgggaagccactggacctgtgctgggggatcctggggtgagcctacgacctggggcttatacccagtgcctaggacccggggctcacacccagagcctaggacttggggcttacacccacagcctaggacccggggcttacaccc

SEQ ID NO: 10448 - DNA, 1181 bp, Artificial sequence
  DNA replication origin
gcagcttgcactctgtgcctggaaaagcttcaggtactcaaaaccagcccttgagagtggtgtcgggggctgagccttgcaaagccacaggggcagagttgcccaaggccttgggagtccaccccttccatcagttgccctggatgtgggacatggagtcaaaggagattattttggagttttaggatttaatgactgccctgctgggtttcagacttgcatggggcctgtagcccctttgttttggtcaatttctcccttttggaatgggaatatttacctaattcctatacctcaattgtatcttggaagtaactaacttgtttttgattttacagacctataggtggaaggaactagccttgtctcagatgagactttggactttggacttttgagttaatgctggaatgagttaagactttaggggactgttgggaaggcatgaaatgtggaaaggacctgacattggggactgtcaaattgtaatcctcaatgtttgaggtcgggcatggtggggggtgattggaccctggaggcggtttctctgtttgaggtcgggcatggtgggaggtgattggatcatggaggcggtttctctgtttgaggtcgggcatggtgggaggtgattggaccatggaggcggtttctctgtttgaggtcgggcatggtggggggtgattggaccatggaggcggtttctctgtttgaggttgggcatggtggggggtgattggaccctggaggcggtttctctgtttgaggtcgggcatggtggggggtgattggaccctggaggcggtttctctgtttgaggtcgggcatggtgggggatgattggaccatggaggcggtttctctgtttgaggtcgggcatggtgggaggtgattggaccatggaggcggtttctctgtttgaggtcgggcatggtggggggtgattggaccctggaggcggtttctctgtttgaggtcgggcatggagggaggtgattggatcatggaggcggtttctctgtttgaggtcgggcatggtgggaggtgactggaccatggaggcggtttctctgtttgaggtcgggcatggtgggaggtgattggaccctggaggcggtttctctgtttgaggtcgggcatggtggggggtgattggaccatggaggcggtttctcacgaatggt

SEQ ID NO: 10449 - DNA, 1398 bp, Artificial sequence
  DNA replication origin
gggcccgagaggcccggaaggaggcaaggcgggaagtggctgcagctgtgaggcgccaggggcgggaagcgggcggcgggcccagccgagggtcgcgaagacgcgcgcccccaaacgaggcgacgctcactcaccacggtccggcggggcagcgcgccggaggttcgcgacagggcccggcgcggcctccgcgaccggcccgggcgggcgcccccggagctctcagagccgctgtcgtccgagatcacgatgaaatcctccatggctgcgggccccgaccgaagacccaggcagtggcggcggcggcgacgacttcggttcctgcttctgaggtggcggcggcggggcggcggcagcggcggcggctacaacccgggccaccgccacgccggccccgccccgagccccgccccgccgggccgccaagccccgcccaccggcggcgggcggctggggtcagggccggggtcgctgtgcttcgtggcggcgcgggtcctccgtttcccaggaggaaaaaaaaaaagaaaaatggagtcgcagccggcttcggcaggtgttggggccaggcgtgcgagacgccgaggccgcggggacttccccacctgcttccaaccgacgaaagcgtgaagtgaggcgcgcccagtcccaccctgcccaggtgtgaagcgcctcccggactgagagggccttgactgaggggcagggagagaggtcctggcccccgagtgaccgagggtaggtgacctggcttctggccgagctaagggagagagagagaccccactttttggtgcacacgcccatgtgtatctgtaggataaatgcctaaaagcggacttattggggcaaaggccatgtttttgtagttttgataaatgatgccaaattaccctcctaaattgtaccagtttgcgatttcaccaacaatatgtgtctctcaggagtttaaactgagatttagagcaggggtgtccaatcttttggcttccccaggaagaagaattgtgttgggccatacataaaatacactaatgatagctgatgacctaaaggaaaagagttgcgaaaaaaaaaatctcttaatgttaaacagggagttaaacaagtttgacgtagacagttgttcagttggtatcaggatcagaagctgaaaaggtgcacaaaagaagccatgaagtagcagaggccatgaataattagatgttgtgaataagcagaagttataaaggtgaaaaaggttgtccccagtagaggaatcggtgggtagttggctggttggttggttttagggcaggaccattaaaatcaagataggacctattggtacactaaatgtggggtattgacaaaatcctgctgctcaggctccagaagttttgcaaaatatgttaacagatc

SEQ ID NO: 10450 - DNA, 2030 bp, Artificial sequence
  DNA replication origin
ccgccgccgccactgcctgggtcttcggtcggggcccgcagccatggaggatttcatcgtgatctcggacgacagcggctctgagagctccgggggcgcccgcccgggccggtcgcggaggccgcgccgggccctgtcgcgaacctccggcgcgctgccccgccggaccgtggtgagtgagcgtcgcctcgtttgggggcgcgcgtcttcgcgaccctcggctgggcccgccgcccgcttcccgcccctggcgcctcacagctgcagccacttcccgccttgcctccttccgggcctctcgggccccggggagcgcggcgggccggggcaggggccagggcagggaccggggaggccgggcctcccaggctcagcgctgaagcccgagaggactgcggctggaaagcggccgagcacatggacgagctcctggcgcgcctgctgcaggggctggggtctcaggccggggccgcgggcgtcctcggagcctcggcgggacgtgggggctcgggtgtactggccgggccgatgcaggaaagcgggagcgcgtaattcttcggcctgtggtggacacagatgtgtgcagggaggtaacaggagcccaggctgggagggagggaagcgcgggcctgggccagatggtggccgcgctccagggcctgactgcagagcgaggggcccgattttggagttgtacaggagggcgatttatttcctcagcacttaccctgtaccaagccctgaaggaatagggaaggaaacctcgcgcgctatttctgtttccctcagaaccccttcgtctttgtcgttcatgaggtggtgaattatctgcctttcgagaatcctgcatcgatgtttattgaatccctactatgagccagatgttgtaggggccggggatacaacggcgaacacaatatccatggtcccctcagaaggtgatacatcatcaggtggttgttgaggacctactcaagcggtgggaggtggagctttctctcagaaggcttccaacgatctccccagcctcccagagccatcccccggaaacacaaggattatcaagctgatgttatgtgtatagatcatacagtttaccatgcttcctatgcaaatactcgttcaagacgtttcctagcttctgctgcccctgttccctttctagctggtttacagtccctaaacctccattgggaaccccttctgtgcccgaggtacagtgccaagtgctagatgatcactatagaatgaatagcatgcaaaactagttaatatatattatttttcaagcaagagggtttctcaggacgtcttagagacaaatttagttgagttaggcagctcatgaggtagtgagagaagagatttccaagatagaaatgacccgacttcatgagtgaatggatatatctagggctgtggctgaatgtatcggacataatagatgcacaataagtatttgttggatgaaggaacgattgaaagaatatggggagagagaatggtttagatggatgtttgataagtataagagaagtgcatataaaagtagcagcaggcttgagatgaaggagatgctgaattcaggttggacctgttggatttacagtgttaataggaaatgtagatggatgtggccagctcagtagttggagaaaaggcaagaatggagatatttggcaatcatgcaaacagaaaggagtattgaaggcctaatagtgactgagatcatcaaggaaaagagtagagagagaaaaaaggtggaagggaaaaaatacttctttcctcctagttcctcctcattcctatagcctcttctctcactacctgtttaactttgtccttcccacttgcttcctttcctcccaagtgttgtccattttccctcattctggtccagcttccttcttcagtggtcagatgccatgcttatctcagtcttttgtggtctttcacatacgtacatgggcgtagtctctcactgtttccctcacttgtgaccactcaagcaagcattttgatcttgagcc

SEQ ID NO: 10451 - DNA, 990 bp, Artificial sequence
  DNA replication origin
atcccatctaggaagtgaggagcgtctctgcccggccgcccatcgtctgagatgtgggaagcgcctctgccccgccaccccgtctgggatgtgaggagcgcctctgcccagccgcgaccccatctgggaggtgaggagcgtctctgcccggccgccctgtctgagaagtgaggagaccctctgcctggcaaccgccccgtctgagaagtgaggagcccctccgcccggcagccaccccgtctgggaagtgaggagcgtctctgcccggagcgtctccgcccggcagccaccacgtccgggacggaggtgagggggtcagcccccgcctagccagccgccccgtccgggagggaggtggggggggcggtcagccccccgcccggccagccgccccgtccgggaggtgaggggcgcctctgcccggccgtccctactgggaagtgaggagcccctctgcccggccaccaccccatctgggaggtgtacccaacagctcattgagaacgggccatgatgacaatggtggttttgtggaatagaaagcggggaaaggtggggaaaagattgagaaatcggatggttgccgtgtctgtgtagaaagaagtagacatgggaaacttttcattttgttctgtactaagaaaaattcttctgccttgggatcctgttgatctgtgaccttacccccaaccctgtgctctctgaaacatgtgctgtgtccactcagggttaaatggattaagggcggtgcaagatgtgctttgttaaacagatgcttgaaggcagcatgctcgttaagagtcatcaccactccctaatctcaagtacccagggacacaaacactgcggaaggccacagggtcctctgcctaggagaaccagagacctttgttcacttgtttatctgctgaccttccctccactattgtcctatgaccctgccaaatccccctctgcgagaaacaccccagaatgatcaataaaaaaaaa

SEQ ID NO: 10452 - DNA, 1391 bp, Artificial sequence
  DNA replication origin
tggacacagcacatgtttcagagagcacagggttgggggtaaggtcacagatcaacaggatcccaaggcagaagaatttttcttagtacagaacaaaatgaaaagtttcccatgtctacttctttctacacagacacggcaaccatccgatttctcaatcttttccccacctttccccgctttctattccacaaaaccaccattgtcatcatggcccgttctcaatgagctgttgggtacacctcccagatggggtggtggccgggcagaggggctcctcacttcccagtagggacggccgggcagaggcgcccctcacctcccggacggggcggctggccgggcggggggctgaccgccccccccacctccctcccggacggggcggctggctaggcgggggctgaccccctcacctccgtcccggacgtggtggctgccgggcggagacgctccgggcagagacgctcctcacttcccagacggggtggctgccgggcggaggggctcctcacttctcagacggggcggttgccaggcagagggtctcctcacttctcagacagggcggccgggcagagacgctcctcacctcccagatggggtcgcggctgggcagaggcgctcctcacatcccagacggggtggcggggcagaggcgcttcccacatctcagacgatgggcggccgggcagagacgctcctcacttcctagatgggatggcagccgggaagaggcgctcctcacttcctagatgggatggcggccgggcagagacgctcctcactttccagactgggcagccaggcagaggggctcctcacctcccagacgatgggcggccaggcagagacgctcctcacttcccagatggggtggcggccgggcagaggctgcaatctcggcactttggggggccaaggcaggcggctgggaggtgtaggttgtagcgagctgagatcatgccactgcactccagcctgggcaccattgagcactgagtgaacgagactccgtctgcaatcccagcacctcgggaggctgaggctggcagatcactcgcggttaggagctggagaccagcctggcccacgctgcgaaaccctgtctccaccaaaaaaatacgaaaaccagtcaggcgtggcgcgcgcgcctgcaatcgcaggcactcagcaggctgaggcaggagaatcaggcagggaggttgcagtgagccgagatggcagcagtacagtccagcttcggctcggcatcagagggagactgtggaaaggggagacagagagggagagggagaggtgaaaattattttcttaagaatgttgaatattggcccccactctcttctggtttgtagggtttcttcagagagatccactgttagtctgat

SEQ ID NO: 10453 - DNA, 1472 bp, Artificial sequence
  DNA replication origin
cccacctccctcccagacggggtggctggccgggctgaggggctcctcacttcccagtaggggcggccgggcagaggcgcccctcacctcccagacggggcggctggccgggcgggggctgacccccccacctccctcccggacggcacggctggccaggcgggggctgaccccccccccggatggcacggctggccgggcgtcggggctgaccccccacctccctcccggacggggtggctggccgggctgaggggctcctcacttcccagtaggggcggccgggcagaggcgcccctcacctcccagacggggcggctggccgggcggggggctgaccccccacctccctcccggacggcacggctggccaggcggggggctgaccccccccccctcctggatggcacggctggccgggcgtcggggctgaccccccacctccctcccggacggggtggctgccgggcggagacgctcctcacttcccagatggggtggctgccgggcggagaggctcctcacttctcagacggggcagctgccgggcggaggggctcctcacttctcagacggggtggttgccaggcagagggtctcctcacttctcagacggggcggccgggcagagacgctcgtcacctcccagacggggtctcggccaggcagaggcgctcctcacatcccagatggggcggcggggcagaggcgctccccacatctcagacaatgggcagccgggcagagacgctcctcacttcctagatggatggcggctgggaagaggcgctcctcacttcctagatgggatggcggccgggcggagacgctcctcactttccagactgggcagccaggcagaggggctcctcacatcccagacgatgggcggccaggcagagacactcctcacttcccagacggggtggcggccgggcagaggctgcaatctcggcactttgggaggccaaggcaggcggctgggaggtgtaggttgtagtgagccgagatcacgccactgcactccagcctgggcaccattgagcactgagtgaacgagactccatctgcaatcccggcacctcgggaggccgaggttggcagatcactcgcggttaggggctggagaccggcccggccaacacagcgaaaccccgtctccaccaaaaccagtcaggcgtggtggcgcgtgcctgcaatcgcaggcactcggcaggctgaggcaggagaatcaggcagggaggttgcagtgagccgagatggcagcagtacagtccagcttcggctccgcatgagagggagagggagagggagagggagctggagttctttatatattctggatattaaccctcatcagatatatgatttataactattttctcccatcccataagctgccttttcactctatttggtattttctatttttattgctcactctgttgatgcacagaagttctgaagtttga

SEQ ID NO: 10454 - DNA, 981 bp, Artificial sequence
  DNA replication origin
cccgtccgggaggtgaggggcgcttctgcccggccgcccctactgggaagtgaggagcccctctgcccggccagccgccccatccgggagggaggtgggggggtcagccccccgcccggccagccgccccgtccgggagggaggttggggggggtcagcccccccgcccggccagccgctccgtccgggaggtgaggggcgcctctgcccggccgcccctactgggaagtgaggagcccctctgcccggccagccgccccgtccgggagggaggtgggggcgtcagccccctgcccggccagccgccccgtccgggaggtgaggggcgcctctgcccggccgcccctactgggaagtgaggagcccctctgcccggccagccgccccgtccgggagggaggtgggggggtcagccccccgtccggccagccgccccatccgggaggtgaggggcacctctgcccagccgcccctactgggaagtgaggagcccctctgcccgaccaccaccccgtctgggaggtgtgcccaacagctcattgagaacgggccaggatgacaatggcggctttgtggaatagaaaggcgggaaaggtggggaaaagattgagaaatcggatggttgccgtgtctgtgtagaaagaagtagacatgggagagttttcattttgttctgcactaagaaaaattcctctgccttgggatcctgttgatctgtgaccttacccccaaccctgtgctctctgaaacatgtgctgtgtccactcagggttaaaaggattaagggcggtgcaagatgtgctttgttaaacagatgcttgaaggcagcatgctcgttaagagtcatcaccaatccctaatctcaagtaatcagggacacaaacactgcggaggccgcagggtcctctgcctaggaaaaccagagacctttgttcacttgtttatctgctgaccttccctccactgttgtcccatgaccct

SEQ ID NO: 10455 - DNA, 1789 bp, Artificial sequence
  DNA replication origin
caagccctcgaccccccaagctcccggcaccagcagggccgttccgtggtcacaccccttggccacatgcgcggagtcgcagcccagcctgcccgcccttccgcaggcctcggcccggcactcacgtcccactcgtcccactcggggaggcgggcagcctccgcgccccaccaggcctctccccggtcccagcgccgctctcggccgcggccgaagtaggtcttccagaggatgaagagcaccgagcccagcaccgccgcggcgccgcccagcgccagcaccaaggggcccagcggccgcggcgccatcgggccgggcgagggacgcaggtgcgggttgcacaggccgagcccactcgcccgccgaagatggccccgctgcgactgctgcggccgcgcccacccacccagacccagtcccgcactacaagccccacaatgcactgccgctgtcacggcaggccgcccgggacccggcggcgtgggtggtggggcgctggccggcgcgcggggacctccggtccccctgccaggtgcagggtggaggaaggagaggctgtgcctggggaggacgggagacggcggtgcttgctagcatccaccaggggttagctcacggcttttctccgttaccccttacaatgataccacgcagaagggaaaaccgaggcccaggagttaagtaacccgcccaacgccgcatcgtagtgctttggtgtagcctgcgttcaaacccaagcgatctgtctcccggtcatccctcaagacctcgggaggaaattgaagcaagacgcccgatatcacacggcagtggggtggcagaggcaggaatagaacccaggtccgtggctccccgccacctctagccttctttcgctgcctcccggaccacaggggttttgctggggtcctggtcaggctgaattaagcagtgtcaggacttcagaatgtttagggctgactgccttgtcctaggtacccccagtgactgccaaggcttccacgtgtgtagcacgaggaggaagaacaggagaaacgacctgagtacagcagtcgggttcttttggctctccagaggggtgacgccatgtacggctggctgtagggtacatgggtcgagagaccgcctgtggctctcagggcccagcagggctacctcttcccctttatattgtctcaactcttcacctccttttagtttgcgattcctctgtacccctggctctgggtcccagcccctattccttctgatttgtccccctttccctttgactacatatatatgctcctctcctcccagatagtgatgttttagctacatcttatttcttccggcattgattcttttgaaaaatttatttctggccgggtgtggtggctcatgcctgtaatcccagcactttgggaggccgaggcaggcggatcacctgaggtcaggagttcgagaatagcctgcctaacatggtgaaaccccatctctacaaaaattagccgggcgtggtggcacgtgcctgtaatcccacctactcaggaggctaaggcaggagaatcgcttgaacccaggaggaggaggttgcagtgtgctgagattgcgccactgccctccagcctgggtgacagagcaagaatccgtctcaaaaaaaaaaaaaaagaaaaaaaaattagctcctcctcaaaaatacacccacttagaggggaaaacccacaaaattgctaagattaaaagtttggctggtgcggtggctcacgcctgtgatcccagcactttgggaggccgaggcagccggccg

SEQ ID NO: 10456 - DNA, 1329 bp, Artificial sequence
  DNA replication origin
tcggccgcggccgagagcggcgctgggaccggggagaggcctggtggggcgcggaggctgcccgcctccccgagtgggacgagtgggacgtgagtgccgggccgaggcctgcggaagggcgggcaggctgggctgcgactccgcgcatgtggccaaggggtgtgaccacggaacggccctgctggtgccgggagcttggggggtcgagggcttggcagccgcagcgcacaggccccgcgcgggtgggcggtcagagcccgggaaccgaggaacgggtgggtgtgcttgggtgcgtgcggcgccttggcgccacgccgtcgctccacgccatgaggctcgggtgttccagcgggggccggagtttggagggcgcggctcgggagcatcccggggcccagccgggtcggctcgcgcccctccggcgcctgcgcagtgcaccccgcccgggggtggggatgtcgggagaaaccccatcccctcccgcctgcggtcgggactccgagaccggtggaggaagcggggcgcgcgagcgtttaaggaattcgccaagggtttggaattcaggactgcaaaggcggcgttcgtcccactcatccagaccatgcctgcctgtcccaggacgggtggaaggcgggcctgggccctctggtgccttcggtcttccctcgggaaaggtccttcgggaggccgccagccgcaaccttacctccgcttccccgcagcccgaggacgaggaggacgaggagccggcgctggaggagctggaacagcgcgaggtgctggtgctggggctggatggcgcaggcaagagcacgttcctgcgcgtgttgtcggggaagccaccgctggaaggccacatccccacctggggcttcaactccgtgcgtctgcccaccaaggactttgaggtggacctgctagaaagtgagcggacaccctaccccatctccccgtctcctctactggaccagtcctggattctctgcagggaagggggcttccaaaatgcatgtctaagcagcacattcccctctacgaatccttcccaccgctctccggggcacaggattcagcccacgctctgtgctctgacatttagggcccttcgtgatcgggcctctccagctgcaccgcctgccccatcacccctaccaaagtcgataggcctaacacagagatactaacagctaagggttcatatgccaagcacttgacgggcattgcttaagaaaactcccctaaacaattacataaaactagaatcggtcactaccctcgttatctccagaggaaaatgagttccagcagtagtatcatgaatccaaggtc

SEQ ID NO: 10457 - DNA, 984 bp, Artificial sequence
  DNA replication origin
cctgccctgcctatacacagccattctccattcagtttcccccatccccttcttttcccttggaaatgtcatatttcatcctatgaacacatggttgccaacacagtcccccagcctggatcacctttcttttcctctctgctcctctgcacagtcccattggtcaccccgcaccctagtgtttctggctatgtttctgacacttgaggattctaagctgtgagagtcagaggcacttacctctgaatccccacaaagccctcagcacaatgcctggcacatagcaggcactcaacaaatatttactgagtgcttgctaggtgccaagcactgatctgggtgctgcagatacagaggtgagcaaggcaagcaggggccctgcaccaaggagctccctccctaactgggaaggacatggcaatgacatcaacacatttcaaaaaggaaagaaataaaacagaaaaaagggaaagtggctgaggtggaacaggggttggccctggattgggtggtctgggtaggtctcatcaaggaagtggcatgtgagctgagtgggatgatgagaaggagccagccatgggaagaggcagaggaaagcattccagacagaggggagagcatgctggaagtgtctgggaaacagaaagaaggctggggtgctgaggcactgcaagaaggagaaagagatggctgtgaggctggctggggcgggccacatggggccaaagaccacagtgagggggtggggagccccccaagggctttaagcaagagtgacattacctgacatgggttttctctagctgacactagggacagaaggggaagcaggaagaccaaagaggaggctgtggtgctgagaggaaagatgacactagtttgggccagacaggcaatagtggaggagggtgtgccactgcccactgccattccagcctgggcgacagagaccctgtctccaaaaaaaaaaaactagaatggtgg

SEQ ID NO: 10458 - DNA, 1389 bp, Artificial sequence
  DNA replication origin
cctgagttttctagacaataggactcctggctcctgtcacagccatcactgacagttttgaacctgtaggagaaagctaggaattagcaagaggcaaagccagacaacccaggggagagaactgaagacttccatttactgagcacctgtgtgtcagtcccgtgaaaggtacatcgcacgtggtacctgtgggttttactgcaacaacccgttaggaaagttcagtgaggagactggtgcttaaagctagggacttgccccaagagacccgcctatcagagctagagctaaatccagtctgagtagctgcggaaactgcggtcttttccttgcccccggctggtggaagctcactaagctagaagcagggtggggtgggggctgtgggcagtgagcgggggcccggggtggggtgggggctgtgggcagtgagcgggggcccggggtggggtgggggctgtgggcagtgagcgggggcccgggaggctctgagctggcccctggcctctcctcagttgggggcagccagaacctgcgcttctactggaaggagtttgtgagcgaggtggatgtgctggtgtttgtggtggactcggctgaccgactgcggctgccctgggcccgacaggagctgcacaagctgctggacaaggaccctgacctgcctgtcgtcgtggtggccaacaagcaggtgagggctgtgagagggcagctcggtccaggtgacatccactcagagatgcttgggcaggggcaaggagcgctgcctgggcccatggcctggagagggtggctgagatgctgcccccacctcttctacctatgccctgtcctgatccctgcctctgtcttccttcctctttgcctccctatcatctcgtactctggagagatgagaaaaataattattaagtgcctcctatatgccaggcatggtgttttgtttttgttttttttttgagacagagtcttgttctgtcgcccaggctggaatgcagtggtgtgatctcggctcactgcaacctccacctcccgggttcaagcaattcttgtgcctcagccttccgagtagctgggattacaggtatgtgccaccacacccagccaatttttgtatttttagtagaggtggagttttgccatgttggccaggctggtcttgaactcctgacctcaagtgatccgcccgcctcagcttcccaaagtgctggaattataggcatgagtcactgtgtctggcccccaggtgtggttttgaataacatttcttcttatgcttctgttgaccctataaagtatgggatgctattcccattttatagatgggacaggctagtcttataatctttccaaggttgtacatcttgagagtaatagaattggtccagg

SEQ ID NO: 10459 - DNA, 1836 bp, Artificial sequence
  DNA replication origin
aacagcaagtgcaaagataggtgtagtcaccagagacagtgggtatgaggttgtttgaggctgagttatccagacatgagtgggtccccagcaggggcagcagagacagcggggcaggtgtgctggctggatagactgctgcgtgtttgtgttctaggaggccaacggtcctgctgatggctacgcagccattgcccaggctgacaggctgacccaggagcctgagagcatccgcaagtggcgagaggagcagaggaaacggctgcaagagctgggtgagggcggggctgaggcggggttggctgggtgggctgtgtgtggggtggagtgtggggagtcctcggagtgcatgggatgctgcatgccttaatgtgggactgggccggtgcggccctgtggctgcctggcaggggccaggggaggagcgcggccgggcctgtgcatcccagctggaaagcagccactcattctcttgtggggtcctagatgctgcatctaaggtcacggaacaggaatggcgggagaaggccaagaaggacctggaggagtggaaccagcgccagagtgaacaagtagagaagaacaagatcaacaaccggtgagagggctgtagggacatgagggggccatggggacatgaggggggctgtggggacatgagggggccgtggggacatgagggggccatggggacatgaaggggtggggacatgagggagctgtggggacatgagggggccgtggggacatgagacgggctgtggggacatgagggagctgtggggacatgagaggggctgtggggacatgagagggagctgtggggacatgagagggagctgtggggacatgagaggggctgtggggacatgagaggggctatggggacatgagaggggctgtggggacatgactgaacactgcccagtgctccctgcctttgaggctctgtccttcacggtacaaggtcttccaggaagggaaaggcctgttctgggaagctacccttctgtctagggaactgctgcatgccaggctctggggtaggcacggaggagatggagataaggaggacccagccttatgtcctcaaagggcgcagaggagaaaaacacacatgttcaactaagctcaaatacagtagggccctctgcacgaaggccatggaagcaaggaaacaggtcagggagagacctctgtgtcttgggacttgggctttggaagatgactaggaggaaaaaagggaaaaaagggcaggaggtaggggggcattctagacctgggtacgaagaaaaaaatgtgatgtattaggcaacagggggccagggagcggtgggagagaaggcaggaacctgtggactcacactgtaagggccttggctgatgagttgggcagtgacatgggcagtggggagccactgaaggtgtttgaacaggagtaacatgatcagggatgaattttagagaaggtgctggggccagggtgaaggtccccattctcctgtttggggctgtgggtcgttgctgagccttccagaactatgcttcctaacatttctcccactggaggtactaatgctgtctctctctctctctctaaccttctgcctgcctgtctgtcttgccatctgccttcccccacctaaccccttccctcaacctttccctcaaggatcgctgacaaagcattctaccagcagccagatgctgatatcatcggctacgtgtacgtgtctgttttgcttctctgttgggggagctagagagggaatggccaccacagtttcttgagtttcctgcttgtgggatataaatgagtgtggctgggctcggagc

SEQ ID NO: 10460 - DNA, 963 bp, Artificial sequence
  DNA replication origin
gattttaatgacggtaacacaagggactcactgtgccaagcagtatttttattttttatttttatttgtttattttttgagacggggttttgctcttgttgcccaggctggagtgcaatggtgtgatctcggctcactgcaacctctgcctcccgggttcaagtgattctcctgcctcagcctccggagtagctgggattacaggcatgcaccaccacgcctggctaattttttgtatttttagtagagtcgggatttctccatgttggtcaggctggtcttgaactcccaacctcaggtgatttgccgcctcggcctcccaaagtgttgggattacaggtgtgagccactgcgcccgacattctttataatttttaactcatttcatccttatgtcctcccatcagagtgcatactgttatttagcccattttatgacaaagaaagtggctggcacacgctttcttgagtcttctgctttgggggtatcaaaacctataactgggccagaggcaatgatcaggcacagagagggtgagtaacttgcccgcagtcacacaggtggcggagtgttgctggcagagggaacagcaagtgcaaagataggtgtagtcaccagagacagtgggtatgaggttgtttgaggctgagttatccagacatgagtgggtccccagcaggggcagcagagacagcggggcaggtgtgctggctggatagactgctgcgtgtttgtgttctaggaggccaacggtcctgctgatggctacgcagccattgcccaggctgacaggctgacccaggagcctgagagcatccgcaagtggcgagaggagcagaggaaacggctgcaagagctgggtgagggcggggctgaggcggggttggctgggtgggctgtgtgtggggtggagtgtggggagtcctcggagtgcatgggatgctgcatgccttaatgtggga

SEQ ID NO: 10461 - DNA, 1076 bp, Artificial sequence
  DNA replication origin
gcggccccgcccccgcggtgacgtcaccgcattccggctccgctcctcccgccgcggcgcccgcaccgcagtgacagccagccgggcccggtggcggagaggaagtgcggtccgcgccaagcccgtccccgccgacgccggctcccccgcggctcgggtgacagcgtcgcggccgccggacgcagcgcggggcaggcgcgggcagagccgagcgcagcggaggctccggcggaggcgcggggaaaatggctgatgactttggcttcttctcgtcgtcggagagcggtgccccggaggcggcggaggaggacccggcggccgccttcctggcccagcaggagagcgagattgcaggcatagagaacgacgagggcttcggggcacctgccggcagccatgcggcccccgcgcagccgggccccacgagtgggggtgagtcagcgcggggcctggagaggggctcagggcgcgcacccgggggaccccggccggggcccaggggcacagggaagagagcctgctctaggccacccggggcaggagctgggagacgtggggaagaatcttcttggagatctccatgtaggacttccgagctggggatgaggcctcgcctggggctgtggatctggtgactcccgggacaggaattcggtcatgacatttcatccccaggccagcttccccactgcccggctctggaatccaaccccacctcagttttgagagtccctcctgagcctcctaatagcctgggtgtcccaggctcccagctaagtgtgcaggtgtgggcagaacacagccctcctggcccctcaggcttagctctctcctgcagctgggaaaaaagaggatcctgggtgctccaggaactcactaaccttccccggtgaccgcctggcattcggcagtcgctgggctaagcgccttggttacatttaatcacttcatacacgtgattgaacccatttcagagatggtaaaactgaggctcaagggagtatgctattgaaataactagtaagtggcagatcaagaatttaaacctgtttctttttcttttacatatatatttt

SEQ ID NO: 10462 - DNA, 1229 bp, Artificial sequence
  DNA replication origin
cagccattttccccgcgcctccgccggagcctccgctgcgctcggctctgcccgcgcctgccccgcgctgcgtccggcggccgcgacgctgtcacccgagccgcgggggagccggcgtcggcggggacgggcttggcgcggaccgcacttcctctccgccaccgggcccggctggctgtcactgcggtgcgggcgccgcggcgggaggagcggagccggaatgcggtgacgtcaccgcgggggcggggccgcagggccgggaggtcgccgagcagcggccgcaggagggcgcctcaggactgggcgcagcgctgggcccgggaccggcgcggcgcttccctccctccgcagcggcgcccagctgctcgcgtcgaggacacctgggctaggcactgctcccgcccggcctggaggcgaaacgcagggcacagagtggccgtaccgtgcacagagctgcgacaggaggccacctctggcctcgggagcgcagacctggctcctgattcattctgcagaagtttcttctcctaggttgggatgtcatgcacctcattctatgagcctccgcctctgtaagaagaggaaaattgaggctgggaaaggctgccccgcaccttttcatgcaagtccaggtcctttcccactaggccgtgttgttttgtgtatttttttgtgtatctcccttgaggaggcttcagttcatacgaccagagtttggatggccagctaggccccttaaatgtcctttaggtatgaaccagcctgagaaaggcagacctggtttacccaggcagcctaccactctccacgctgcccgctgccctctgtgaacaggctctgaatgcctcctccctgcctgcgctttgccaagcaccaggacagcaacgttttataaaatccagccatggccatgcggagattacaatccggtgagaccaacagatggcaaatggcctgtcaaagcactgtgtgtgaggcgctgtgacatttaaacacggggtatagggagacgatgcaaagaaacaccatgggatttgggctgtctgctatttctaatgtgggacttgaaaggcaactatgaaatatggactggaagagcgaaaggaaagatgtgccgccaagttgggggtggaagtggagttggggtgaagggaccttccaggtgtttttttttttttctttttaatttttttatttagagacagggcctcgctatattaactgggctg

SEQ ID NO: 10463 - DNA, 1352 bp, Artificial sequence
  DNA replication origin
aggctttgttacccataatttggaatttgcacttggatttgacaaagtcacatagagttggtcaaatctaatgggagaaagactagaacatacaacaataacaacaaacccaacactatggtcactgagcacgctaatggtaaagagaaattaagatcagctggttgttaaactttagccaagacaaaaccacaattcagctacttacctagggatgggtctcaggctgaagactactctctaccatgctagaagcaggaaaaaactcaaactcatcttccctgctgggagcgagctcaaactccataaaggaattacctgcctttaaatcatcatggaagcaggaaatcttgccttcttgttggaagcaagcaaaactgcaaacaagggagttgcacagcaaaataaactttagatctccaccaaattttgggaaatcagggattctctggagggggtgcatccaggcctcagcaagctgtcctattggtttgagccataaaggtagctcatgctggtcccaagcactgataggagatttgccaaaggtcaggggcatctccactcagaatccttccacggttaccaaaacgtgaaccctgaatacctgagacaggtcttagttaatatagaaagtttattttgccaaggttgaggacacgcgcctgtgacacagcctcaggaggtcctgacgacatacgcccaaggtggtcagggcagagtttagttttatacattttagggagacatgagacatcaatcaacacatttacatatgaacattggttcagtccagaaaggtgggacaacttgaagcaaaggtgggacaactccatggggagggggcttccaggtcataggtagataagagacaaatggttgcattcttttgagtttctgagtagcctcttcaaagcaggcaatcggatatgcgtgtatgtcagtgagcagaggggtgactgaatagaatgggaagcaagtttctcccaagcaattcccagcttgaccttttccctttagcttagcgatctgggggccccaagatttattttcctttcgcagcccctgaactatgaaacacacgtctatgaagatggagatgttctgaggctcctgggacccttggtacgtcctagctggtgctggatggggtgcagctggagaatcgcttgaacccgggaggtggaggttgcagtgagccaagagtgcactccagcctgggcgacagagtgagactgcgtctcaaaaaaagaaagaactacaaaatgttgttgagagaagttaaataaggtctaagtaaatagaaagatataccttatttatggattagaagagtcaataataagatgtaa

SEQ ID NO: 10464 - DNA, 1386 bp, Artificial sequence
  DNA replication origin
agatcaacaggatcccaaggcagaagaattcttagtacagaacaaaatgaaaagtctcccatgtctacttctttctacacagacacggcaaccatccgatctcccaatcttttccccacctttcccccctttctattccacaaaactaccattgtcatcatggcccgttctcaatgagctgctgggtacacctcccagacggggtggtggccgggcagaggggctcctcacttcccagtaggggcggccgggcagaggcgcccctcacctcccagacggggcggctggccgggtcgggggctgaccccccacctccctcccggacggggcggctggccgggcagaggggctcctcacttcccagtaggggcggccgggcagaggcgcccctcacctcccggaaggggcggctggcctggcgggggctgacccccacctccctcccggacggggtggctgccgggcggagacgctcctcactttccagacggggtggctgccaggcggaggggctcctcacttctcagatggggtggctgccgggcggaggggctcctcacttctcagacagggtggctgccgggcggaggggctcctcacttctcagacggggtggttgccaggtagagggtctcctcacttctcagacggggcggccgggcagagacgctcctcacctcccagacggggtcgcggccgggcagaggcgctcctcacatcccagactgggcagcggggcagaggcgctccccactcagacgatgggcaggtcaggcagagatgctcctcacttcctagatgggatggcggccgggaagaggcactcctcacttcctagatgggatggcggccgggcagagatgctcctcactttccagactgggcagccaggcagaggggctcctcacgtcccagacgatggggggccaggcagagacgctcctcacttcccagacggggtggcggccgggcagaggctgcaatctcggcactttgggaggccaaggcaggcggctgggatgtggaggttgtagcgagccgagatcacgccactgctctccagcctgggcaccattgagcactgagtgaacgagactccgtctgcaatcccggcacctcgggaggccgaggctggcggatcacttgcggtcaggagctggagaccagcccggccaacacagcgaaaccccgtctccaccaaaaaaatacgaaaaccagtcaggcgtggcggtgcgcgcctgcaatcgcaggcactcggcaggctgaggcaggagaatcaggcagggaggttgcagtgagccgagttggcagcagtacagtccagcttcggctcggcatcagagggagaccgtggaaagagggagagtccagcttcggctcggcatc

SEQ ID NO: 10465 - DNA, 871 bp, Artificial sequence
  DNA replication origin
agaccctctacctggcaaccaccccgtctgagaagtgaggagcccctccgcccggcagccaccctgtctgagaagtgaggagcccctccgcccggcagccaccccatctgagaagtgaggagcccctccgcctggcagccaccccgtctggaaagtgaggagcgtctccgcccggcagccaccccgtccgggagggaggtgggggtcagcccccgccaggccagccgccccttccgggaggtgaggggcgcctctgcccggccgcccctactgggaagtgaggagcccctctgcccggccagccgccccgtccgggagggaggtggggggtcagcccccgacccggccagccgccccgtctgggaggtgaggggcgcctctgcccggccgcccctactgggaagtgaggagcccctctgcccggccaccaccccgtctgggaggtgtacccagcagctcattgagaacgggccatgatgacaatggtagttttgtggaatagaaaggggggaaaggtggggaaaagattgggagatcggatggttgccgtgtctgtgtagaaagaagtagacatgggagacttttcattttgttctgtactaagaattcttctgccttgggatcctgttgatctgtgaccttgcccccaaccctgtgctctctgaaacatgtgctgtgtccactcagggttaaatggattaagggcggtgcaagatgtgctttgttaaacagatgcttgaaggcagcatgctcgttaagagtcatcaccactccctaatctcaaggacccagggacacaaacactgcggaaggccacagggtcctctgcctaggaaaaccagagacctttgttcacttgtttatctgctga

SEQ ID NO: 10466 - DNA, 988 bp, Artificial sequence
  DNA replication origin
ccttcggaacctcccgagagatggtcaggagcttttggaaactttaggtcaggggccagcgaccaaaaggctggtatttcggaacggctgcgtctcccgagaaacctccaagagtatctgaggttgccggaaaatggttagagagcagccgaaatcagccgaatgccattcgggatgctccggagcttctcgaggcacattcgggccctctcggctctgcaagactgcactggaatcttaggtctcctttcgtcgcctaatcttagcagatcctttcgtcgcctaaatggtaagagcgacttgtaccgacagtccctcggcaatttccggaagtgttcgggataggcccgagcgtggcgccctctggcggcggccagaggtggcggggggcggggggaggttagtgggccagcgcgcgcagacgcagttgcgcgccggcggccgttcagaccggatgtggttgtggctgaggtcagttccggcgggtgacggtgcggacgggtcaggagcgtagaggcggcggcaaaatggcggcgcctgaggagcgggatctaacccaggagcagacagagaagctgctgcagtttcaggtagcagcgagtactcggtgcagcagatgcctccgtgggatggggagtaggcccctagaggagttcagaaccctcctcagattgggttcagatccttctcagaccagcaggccggccccctcccccccagactccaactgccctgattcccccggcccccaagcctctgttggaccctagccttccagccatcgctgcgggcagacccgcctcgtctgtgcctctgtgccctcagcgtgtcagcttccctggtttgccttagcggcgtcagtcctcagccatccttcccagcccggttatcggtcggaccctctccgcccaacgagtctatatctgccggagaagcttagtccccaccgcggagttggcgtcatttcgggtctctgacaggaaaacct

SEQ ID NO: 10467 - DNA, 966 bp, Artificial sequence
  DNA replication origin
aggagcagacagagaagctgctgcagtttcaggtagcagcgagtactcggtgcagcagatgcctccgtgggatggggagtaggcccctagaggagttcagaaccctcctcagattgggttcagatccttctcagaccagcaggccggccccctcccccccagactccaactgccctgattcccccggcccccaagcctctgttggaccctagccttccagccatcgctgcgggcagacccgcctcgtctgtgcctctgtgccctcagcgtgtcagcttccctggtttgccttagcggcgtcagtcctcagccatccttcccagcccggttatcggtcggaccctctccgcccaacgagtctatatctgccggagaagcttagtccccaccgcggagttggcgtcatttcgggtctctgacaggaaaacctcctgccagcatcccatgccatttccacatacactcccacaaactggggcctcttggataccaggtttcgtgttgggggttccggtcggggagggggcacctacacacagatctggtccccgccctagaggtgtgggaggacaccaagtgaggaaacaatgcaagatgataagtgtcatcagtggtctgtcgggatttattacttttggcttattcctggattcctgtgcttaactatgcttgaggagggtggtaacttgcagaaatgttatgttaatacaagatgttgtattaagaacatttgccactgatcacttacccctgagctggagaatggttggaggataccactagggtgggtaaccttggcactttgttaccagtttccttatctctgaaaggactgtcttaaaaatgtctacccccaggccaggagcggtggctcacgcctgtaatcccagcactttgggaggccaaggccagcgaatcacgaggtcaggagttcgagaccactctggccaatatggtgaaaccccg

SEQ ID NO: 10468 - DNA, 2610 bp, Artificial sequence
  DNA replication origin
ttggagcatccctgaggcagcaggcgccaggggctgcctgctaggatgtgccggccccacacgcagttcgttcagggcagcaaccccagctgggtataggacaagaaaggattgggaccagggaaagtgggtgggaagctcagccagaccctacagcggcctcctccagaacttggaggacagggatcaggctgggaaggccccctggagatgggggtccacagccttcctggtccccatcctcctgggacttccttggaggagattcgcccaggcaggtgggagttgggccctggctggagggagaaatgccctgaaaagcgtcgggtcccggtaggctctagggacgtgtgcagtacagtgcatggcagttatcagctgagcacagacccccaaccctgccccacgaccgccggccgcccagcccagcccggcacacgcatgcatgcaggccggccagcatgaccgtgctcggccccctgggcactcggtcccagttggtccctatacccgcccctattaaaccaaaagaaaaaagaaattgtcttaaatatccacatccccaaatcctacacgtgattttgggccaaatgaatgaacaaaaactgctgctcctcacgttcatgcaaaacaacagagggagaggagattgggcacgggtctggctgcatccctgggagggacaaccaccgggaacacagggctccctctccccgtatggcccaagcccctcaggatacgtgtgccccagctcgggattaggctgggacgccctccagcctgagggtggggctggaatgttgttcctgggatgagggtcccctagggaaccagactcagccctcacagcagccaacacagagccagctgcctgagttcactgttcggggtcaaggaggggggattcagccctggggctcaggaaatggctcgtgacaccgtctgtctacgcacctggcagtgccacctgggcagagggcacgccatttcagagcatgagaccttctgacccaggatggtgctctgtctgcccatcctggggccaaggatctccaccggccccactgagggagcggacccctggcactcagtgccagcaggaaaaggagggacctgagggtgcacaggagggagacccgatcagggacactcaggcagctccgtggcgggcgggcaggcaggcagactagggagggagtctttggagcttggcaaatgcaggggcttattgcagggactcctcgctgggctgaccctggcaccagctctggaaatgcaggcaggagcgaaggggcaggcctgggccactccctccccatcctccctgggccccacccacaagtttccagagcttcaggcagggttctcccgggcaggcggctgcgtggcctcactcagcctccctgggcacctcggaggcgtcggcccggcagatgggacacgtccggttggcctgtgggaacatgcacgtcaggcgttgctctcaccagccccaacccaccacatctgtgcagccacctggggggacttggtccgctggagccagaacttccgagatgatgacaaggacaaggagggaaacagcccaggccagcccatccccccgtcactgcatgaggaatacccaggagcagacctgggcagtgttaccttcaaccacttgtcaacacacttggtgtggaactcatggttgcaggggaggactcggagcagctgccgcgcctcgaagtcactgaagcagaccacacacctgtggaggggcgcggagcgtcacctccacgctgagggccatgggaaggctcagtggagtgtgactcccctgagaggggcgtcccacggcagccagctgtgttcagaggggtgggaggtggggcagggtactcacagcgtctgctccgactgatggctgtccgggttaaagcggtacgacgggagctgctctatgtctgctttggtgagaccccggggcttggcatctcccagccgctcggccaggttcaggagggcctgcatgcgggcaggagacggggtcagcggcgcccagggctgcaggtctcccaaaccccacctcccagcatggggctccatgggacctcatagttctccatctccacatcatccacgtccaggtccaggctgatggtgggccccattgctgttggtgacattggcagcatcgagctagagagagacaagtgtgggggcccagggtcaaggtcaggagtggggcacacagagccgctctcctgactccctccttgcaaacagagcccagaacgttgcagcggggaagggagcccagctggcgtgcctgtcaggttaaggggggaacgccaggtggcttcagaggccctggggcccctggagctgtgtttaggtctaaccactggaggttccaggagaacagggcatcagggacctggggcggatgtgcggatacttacaggaagtagggcaggaagctggggtagtagggtggtgggggtgggggtgggggcggcgggggcagtggctgctgcaggcggtatctctgggtgctcagtctccgtggcatcatgtgagaatatggctgcaagaggggccaggtgcaggtcagcccagcaggcctgc

SEQ ID NO: 10469 - DNA, 1166 bp, Artificial sequence
  DNA replication origin
gggacctggggcggatgtgcggatacttacaggaagtagggcaggaagctggggtagtagggtggtgggggtgggggtgggggcggcgggggcagtggctgctgcaggcggtatctctgggtgctcagtctccgtggcatcatgtgagaatatggctgcaagaggggccaggtgcaggtcagcccagcaggcctgcctcccagccgccccggagcccaggtgcaagtcagcccggtgggcctgcctcccagccgccccggagcccaggtgcaagtcagcccggtgggcctgcctcccagccgccccggagcccacgtgcaagtcagcccggtgggcctgcctcccagccgccccggagcccaggtgcaagtcagcccagcaggcctgcctcccagccgccccggagcccacgtgcaagtcagcccggtgggcctgcctcccagctgcctgggagcccagatgcaggtcggcccagcgggtctgcctcccagctgccctggagcccaggtgggggtcggggtggcactcaccacaccaaaggacagctcctggtgcagcggatcgtggggcaggtagtgcaggggcaccgacggggaaagggctgggccaggcgcagaggtggagtaggtgaagctgcccagggagggctggtccccacgcaggtccacgtcgttgtcgagccgctggaggggctggaagaaccagcgccgggtcagcaagtcagtgagacgaggctgtcctcaccctgcctccccccacgccatctccctccagcatcggacccatgccgactcaccatccgagggtgctgggtctgcagagacacaaactgccccaggggcgccatgtgggtgggctgggggggtggggccggtggtggggggtgcaggatgtagtggtcactggagatgaggtgggggtaggcctgatagggcacaggcagctgctgcatggtgcacgcctggataagctgccaagagagggggcagggggctgagaacgttctcctgggctctgggccaggtctacgccatgccacccagcaaaaggcccccaccgggcacacacccagcagctccagggtctgtataagaaaccctgtggaaggcccatccctgtcctaggccacccaggcaggacactccactgttaaggcccacagcctc

SEQ ID NO: 10470 - DNA, 1072 bp, Artificial sequence
  DNA replication origin
agatgaggtgggggtaggcctgatagggcacaggcagctgctgcatggtgcacgcctggataagctgccaagagagggggcagggggctgagaacgttctcctgggctctgggccaggtctacgccatgccacccagcaaaaggcccccaccgggcacacacccagcagctccagggtctgtataagaaaccctgtggaaggcccatccctgtcctaggccacccaggcaggacactccactgttaaggcccacagcctcaactcctgggcctctgccaagctgtgaggcaggtacaggggtactggaaggttcctgaaccttgaaacactctattaccaaatgtgaacacgcgtatgctttcctggggaggccaggcaggcgctctgacagcctggatggctggatagctcagcccagttcagggctgccctgggcccgctgagccgctggcctgtgcctggggcttgcagctggtggaggaggagctagaaacactcactcaccgggggcgggaggcagcagagggggtaatgctgcccactgaacatcacggagcatgctgggagctgctgggcactgcagccagggatgtgctggcctgtaggcaaggggaagccttgggtcgtcactgtggtgaccgtgtaggacagagggacaggtccctggtgcacctgtgggtggagagaacgccgggaaagtatgaaaaggaagctgaccgcgagggctactctcaggagaaatcatcctgccacatccagctgccggctcccttcccttctccacggcggcctacctcagtgcagaccagactgtgcctctactcccaggcccccggggcagagaaagccccgtgggaatctagctctgctagtcacccagtgtggccctttccccgggcctcagtttacctacctgtaaagcagggccaataatgcctccctggaacgtgaaatgaagcaagctaggtgaaatctaggccttgctgcctctgcctctcagactggctcacagggccaggggcacaggggatggggttctgcctacctgctcgtggagatcaaccatgaacg

SEQ ID NO: 10471 - DNA, 993 bp, Artificial sequence
  DNA replication origin
gctcacagggccaggggcacaggggatggggttctgcctacctgctcgtggagatcaaccatgaacgggctctgctgggtggctgggtgcagcattcgggggctcccgccggcaggagccgaggctcggcgctcctctacggggaggtgtggaggtcgggacggcggctgctgggagggtaagcgctcatcccgggcaggcgggctggccagggggccctcgaggccagggctgcaccacagagaggaggccccgataggactgaggggggccactcgtgcacagagcagggagagaagccagggtgactccccccatggggagggaaggcagctcagggccctgcgccccacccctgctggcccccatgccccagcaccaggactgggaggctccttcctaccttccccagagctggcccggggtgctgccaggtcccgcagagaatcgccgctggcccacgggggcggagggtggccacctagtcactgccagagcccatggtcgcatcgggggggcaggggggtggaggggctgggccgggactcacaaccctaggaggcaaggagacaagaagactgaggcacctggccaacatggtgaaacctcgtctctgctaaaaatacaaaaactagccaggcatggtggtggacacctgtaatcccagctacttgggaggctgaggcatgagaatcgcttgaacccgggaggcggaggttgcagtgagctgagctgagatcgcaccactgcactctagtctggtgacagagcgagactcccgtctcaaaaaaaaaaaaaaaaaaagaaagaaactgaggcacagagaagtccaggcgcttgtgccatgaggggtcaggagacagaaccaaacctctgcagtgtgaccccagggaccaatggtgttcagccgtgcccctcctccgagccctggggtccagtgctgacacgccaggacagctcagcctgccagcacccaggcctcaccctcctgct

SEQ ID NO: 10472 - DNA, 1485 bp, Artificial sequence
  DNA replication origin
ggcggccaaaggtgagtcggtgccagggcccccaacttcctattcccccacccatggaccttctgttcccctcccctgggaatgggggccgtgatctaggtggctccgtaggggttaatcacgggcggtccagactgcgggcagcgagaccccagggatcaggaaccccccccaaggccccccgtggccgggccgtatctcccctctcctgcagctgagcgctgcggttggagaggaaggagccgcccccctccccctgcggccgccacttcctttgttgttgcttttgtctcacgccgagcacatggtccgggatcctcggctcttaaagtcgcagcgttctggcccctgcgctgcagtctcgcctcccgcccccggtgtccctccgagagcggcgcaaaagagtaggaagcggacgagggaggcccctctcggggctgtgtccgcgcctcggccccccagcactatgcctggggaggggtggctgggtaagcttcccagagccccacagcgtgcacttggcccgcgttggggagcccccccttccccaggaccctggtttcctcccccactagtgtgaccacctggtttcttctggactcttctggttttatttgggcgctgtgggaaggaaagatttccacccccattttatagctgtgccaactgaggcgctcagaagcaaagggatttccttgaccaaggtcactagggagtcttctctcctagtctggtggtccggccctcagcggcctccaggcaccacacgttgggaagctctgcttgcgctgggcagagcctgcttgtttcgggtggggtgtggggaagtaggaaggggggcttctcttcctggctgagtctgctcatgcccccagggtctgactttgtttttatctgcaaaagggagtgtctcttcctgcaaacagatccctggggctcttagaccaaggtcagggtaggtgcttggggcactggacttaaggggttggccggctctcatgggtgggtgtggggggttatgttaactgcaaaatgcattgcgtgcctggggcggacggggctcagcgacgggactctcaagacccgttcacacagagctccgtgataggacagcatggagatgtggacgggcagagcagttgttaggggaggccacctggccacccttgctatttgaccttgagcaagttgctagctccaactctgggccttgcttgcttctctgtactacagagctaaagatgggtgcctgaaagagagtgctctcccagcctcctgtatggcttggagactcgggattaggtgatttcctccagctactgatgccacaggagttatggcttgggggagtttgggcctaggaggccaactaggaccaattccgttctctctggtcttgtggcctagagtaacttacttcctttctctcggctccagttttctcagccatgaagtgggtgtaacccttctacgccacccctgttc

SEQ ID NO: 10473 - DNA, 919 bp, Artificial sequence
  DNA replication origin
gacggccaaactgggcagggggcgggggagggggggggtgcctgtctggatcctttaagagctcccgccctgcggaacaatgtgctcccctccccacccccgggtccgggggcagcccggctccttccggggcctctctctttgttgtccgcccgacggcgtctgcctcgcgaggcccacgcgcgatcagtctctctcggcccaggccctcagggagcgggaggcggcgcaggacgcagctgggtctgcgcggcagccggcggctggccctttaagaactgtccgcggcggcagcggaatgtaacaaaccccacatttgattcacaacattcgaagcggcggggtcgcgcgccagacgggagggggctcgcgggggcgcgccgggaggctccggcaaacagtagcccgctgcaagcccgcaggggccccgccccgcgccgggagctccgccctgagagccaatcactcgccgcgaccacgcacgtgactagtgggccaccatcttgaatttttttaacctcctcctcgcccccaccttcgcacttaaagggaccgcagccatagtcaaaagcaaggggcggggccgcatatcctgacataaagatggggagaccccagggtgggcaaaaccgatcggctgcaactcgaacttgctatgcaaactcgctaactactcgcgcctctgaggctcagtttccctgccgaagaaatgggtcccgccaggagaaccggcagtacggacttactgtgtcatggtcccctcctcggggacagggtgccgcctgagatactgaagtgcaatgggtctgacctctgacggggcgagagcggcccaagtggttatgctggctctaacaaccctgggccggccaccttcccggagatgacgtcacccccaagagctgcagcaccgcgctga

SEQ ID NO: 10474 - DNA, 2196 bp, Artificial sequence
  DNA replication origin
aggtaacgccgggcccggaccctgcgccgagcgccccgggcgcagggccggcgagcacgcggcggtagggggcggccgcgggccggcggaggaacgcacgcggggtcttcccgccaggcctctgccggcgcccgcacggcgggagctcgcagtcccgggcccggcagcgggagctgcgccgctcttctccccgtccgctaggtccaaacgccccaactcggggagccccggggaactccgagcccccgcgtgccctgcgccccgcgcacgtcccgaccgccacccccggcgagtcccagctgcggctgggacccaggcgtccggcaccgcgagccggagacgcgctgcagttctttggcctcgccatgtccgtcctaaacatttccccgacgccccctgtgccggccgccggggagccagagcggcctaagccctgccctggagcggctgcaggtccggggaacagaccgctgcacttcagcgccgtccttactgcattctggatgtcggaacgctgcggggtccggagagagtccgtgtcttgcccaaggtcacacagcttccgttgcctgaaagccactaagctcgagtcgagctggtgccgggggctgggaagtgagggaaggaggacgagtaagatggagggacagtgggggattcgggtagacttgtcttcctcgatcttccagggtccgcactcctgcagccctcggttttcatcactgaacaatgtgacggttcctgccccctttgcagaacctgggggttccagcagtgagaactgcgggttggggaggaggagtcagaaaggggaacgcccccacgccacacccacacagcgcacacctccaaatgcggacccagacccgaaaagttggccggcacacacacacagaaccactgttgacccaccgagaaggatgctttcacccagcttcacacctggacaaacagcctcacagaccttactgacttccccaaggtcacaggctaaccagaggcagggcaggctggcctcaggggctctgtctcacccctcagtgtagtcctttcgccccagtggcctagttattatcgatcacccgattttacagacgagagattgagaaggagaggagccatagaactcacccaaggtctcaaaactggagcccgagtgctgagggccagagccccagacggggagcacctctccagacgccctgccctcaccgccatctgcacgcacagccacttaagggagccagaactcggggctcagggctgttgaggccagccctgagtggaaaggacttagcagggctttgtctactccctccctggtgtgtgaggctctgggccctgctctgatgctctggtgtctgggaggtgtgaaccctgagctggctctgccaggctgtgctgtgtccctggctggtaccccagcctctgtgtcccgccagctccatcctgggaaggtgactgggccctgcctctttggagggaggtttgaggggccttggaagaaagaaatggggtactttctgactccgagggagagaggcagccagttgtccaggctctggggtaggtgagaaccctagtcgggcagggccccagcaggaaacatggccacgccctcctcttcctgcctctgcttgcccaagcccttccccactgcagaggaggcctgggggaggaagccggaatgtggcatcaagtgctttgtgctggaaggatcaaactttggatccctctcaggctcctgtccactctgatctggagccatccactagtccctgagcctctgtgttctcccctttccctggggacatctgcatttggttgttcagcaaccacggggcccctgtgttggcattcatggttcacaaaccacacttaatgtgagatgagaatgggatcccaggtttgccccttgatggctgcatgacactgggtgagtcctgtcacctctcacctcatctgtaaaatggggccaatgctggtggccagctcttagaacatgatgaggagaggatcaggataggacttgcccagagcttgtagaagactctaggacccccatttcccccatagaacctcacagcagatgccagagcagaggtgggccactcccatctgaggtttcacacttctgggctctgtggcgagggtctgcccctccatggctctgaaccgctttcctctgtgcgatga

SEQ ID NO: 10475 - DNA, 893 bp, Artificial sequence
  DNA replication origin
tagcggacggggagaagagcggcgcagctcccgctgccgggcccgggactgcgagctcccgccgtgcgggcgccggcagaggcctggcgggaagaccccgcgtgcgttcctccgccggcccgcggccgccccctaccgccgcgtgctcgccggccctgcgcccggggcgctcggcgcagggtccgggcccggcgttacctggggccgcggcggggctccacccccacccggcggccggcgcgtcgctcccgctgcagcccaggctcgcggtgcggctgcggcccgcgcgccgcctgccgcggcccctctccggcccggtgcaggggaaccgtccgcggacctcaccacccgggcgcgcggggcccacaccggctgcgcagcttccaggacccccgccccggccccgcgcgaatggagctgcctggaccgcaccacgcgtgcggggcggagcctctttcggccgcgcccgcccagcgtcagtcggccaggggtgcgtaagggcgcggcgcctggggcctggcagcctccgtgaccttggaggagtgacttcgttttctcgcctgtgaaaagggaaacaatacgaccccatggtcgttcagagaatcttcgcttcccggagagtgtgtcccctcccccagccccggtgggcgcggaggtagctaatagctgtctggggtcagcagatcttggttccccgctttgggccattctctgaccctcacttttcaagtctgcggaatggaattgatgataccttcttcaggaggaggatgggagactccagtgacaacaaaacgaggcggccggccgagacatcgggagggattacgttccccgcaacccctgtgtccccatcgctagagccaacctggaccagggcatggccggcacca

SEQ ID NO: 10476 - DNA, 922 bp, Artificial sequence
  DNA replication origin
tctccttgccagactccacgcggcccggctggtttgacatcggggcagatggggtgatcagggtcaacggctccctggaccgtgagcagctgctggaggcggatgaggaggtgcagctgcaggtcacggtgagcaaaggccccaccacccctgtcagaaccctgctctctaacctctggcctttgatctctctctctgagcactggctctctgccctctgccctctgctctgtgcctcaggccaccgagacacacctcaacatctacgggcaggaggccaaggtgagcatctgggtgacagtgagagtgatggacgtcaatgaccacaaacctgagttttacaactgcagcctcccagcctgcaccttcacccccgaagaggcccaagtgaacttcactggctacgtggacgagcatgcctccccccgcatccccatcgatgacctcaccatggtggtctacgacccggacaaggcaggcgtggtggcgtgggtgtgggcgggggtggctgggggaggccagtgggagcctggatcgagtgacggtgtcatgtggtgctgggtggcggtgctggtggtgcagggtgtgatggcggagaatgggggtgctgggtgctctctggaagcctgtgttggtaagcagtatcatcctctgggcgatccgtgtggggctgaatagaaggccatgctgagtggaggctgacgtagaacgtcagatgatgctgagtagaacatcattgtccgtggtgatgggtggctggcgaggtctcctggcattgggcggccatgatttgggtagtcctgggaactgggggaggctgagcagtgttgggacaagtggtctgagggtgtgaggtgggagggtgctctttttttttttttttgagatggaatttcgctctgtcacccaggctggagtgcaa

SEQ ID NO: 10477 - DNA, 1613 bp, Artificial sequence
  DNA replication origin
tatctgggcttgacttcaagccttgtcactggctatttgacctttggcaaatcacttgccttctctggctcttacttctaccctctgtaaaatagagctaacactcacctcccgggatcttgtgaagccacaggctcagggcctccactggggacacaacaggtgtgcagcaacagtgtgacccctcttccggttccccacagctacaaccggaagcttcaagctatgaaggctgccaaggaggccaggaagacagcagcaggggtgatgccctcagcccctgccatcccagggactaacatgtacaacactgagcggtgagcaggggtcaaagggtaggtaagaggcctggtggggtggctgagggccaggcaacttgaccaggctttctctccagagccaaccccatgctgaacctccccaacaaagacctgggcttggagtacctctctccctccaatgacctggactctgtcaggtgagcagtgcccctcacagccaggctaggtggtggtggtggtacaggtagtgacggtggtggtggtgatggtgttggtggtgatgatggtgatgacaatggtgatggtgtggtcatggtagtagtggtagttatggtggtggtggtgatggtagtgaggtgatggtgatggtagcaatggtgacagtggtgatgatgacaacaatgatggtggtgatgatggtgttggtgttgaggtgatggtgatggttgtgatggtgatggtggtgatgatggtgatgatgacgatggtggtggtggtggtggtgttggtgttgaggtgatggtgatggttgtgatggtgatggtggtgatgatggtgttggtgttgaggtgatggtgatggttgtgatggtgatggtggtgatgatggtgttggtgttgaggtgatggtgatggttgtgatggtgatggtggtgatgatggtgatgatgacggtggtggtggtggtggtgttggtgttgaggtgatggtggtgatggtagtggtggtgggtgatggtggtggcaatggtgatggtggtggtcatggtggtcatggtagtggtggcagttatcgtggtggtggtggtgatggtggtggtgatggtgatggtagtgatggtgatggtggtgatgatggtgatgatgacaatgatgatggtggtggtggtgttggtgttgaggtgatgatggtgctgatggtgatggtggtgatgatggtgatgatgacaatgatgatggtggtggtggtgttggtgttgaggtgatgatggtggtgatggtgatggtggtgatggtgatggtggtggtggtggtgttggtgttgaggtgatggtggtgatggtgatggtagtgatggtgatggtggtggtgatggttatgatgatgatggtggtggtggtgttggtgttgaggtgatggtgatggtggtgatgatggatgatgacggtggtggtggtggtgttggtgttgaggtgatggtgatggtggtggtgatagtgattatgatgatagtggtggtggtggtgttggtgttgaggtgatggtgatggtgctgatggtagtgatgatggtagttgtgatgatggtggtggtggtgatggtgatgatggtgg

SEQ ID NO: 10478 - DNA, 808 bp, Artificial sequence
  DNA replication origin
tctctgggcaggtccacgaggcatggggcctttttgggagctgtctgccccctgctctcccatggctggggtggcgcaggtggatccttttcccaggaatctcttggtgccctgacttgtctaagctccacacgtctgtgtggtaggtgtgagtggctggagagattatcactctaacctccccaagtaaccagcaaggaaattcacatccagagaggggtgctgacttgctcaaagtgggacagcttgcagggcaggggcagaccagaacccaggtctttggtctctggcaccaggtcatgttatcgtgggtggcactgagcctgcagctctccacttggggtctgtcttgagggctctgaggaacacaggcagaatgcttagcccctctggggcccctcggatgttccactgtttactagggaccagaacagccccagtctggaaaaagcccttggagtgccctggggagggcggtggtggccggggctctggccctgtgggtgtctctgtagcagagcagctgagcttgggggcctggctgttccacaggagggtgtgtgtgtgtgtgcacgcacacagcatgtcgcatggcgaggtggaagaggaagggcgggagagatgagtgagtgtgtgccatgataaactgcaggtgggaccagcctgtgggcagcgtccctctgagggcagcaaaaagagacgtcaaattcaaccagggcagtgtcacatcatggacacgcttttgaaccagcaagaccagtggtctgcccctcttcaccagtagacctctctaagcctcagtttccac

SEQ ID NO: 10479 - DNA, 1017 bp, Artificial sequence
  DNA replication origin
ctggttccagccccatcccctctcccactgagtcacaggtttgagattcccagagaggccaaagacagctacaggaagtaccctgggggctcagctgagagagagtcacagaaaggccagagggtctcaggaaggtctggaggtcacagctgggctcacagaagctcttgggccctggcatcctgggtgaccggtgttcttgggtattggggacaggacagagagctcattctataaccacagttgtcttttaaaggccaccctctccagccccttgtcccccctgtgctgtgagcccaagtcccttgtgaccactcagtgtcccgtccccacccctccagccgcagtttttggctacaaactgtcacagtatacattggtaataaaatatttccccaacccctgtctgccgtgattggccaaaagcaggaggcagggcagcgtcatatattttcatctccagggagacaggtgcagttagggtgtggtagggcctcttcaaggggtccagaagagtgggggcccctgtcacaggtccgtggtgtccaggccagcgttggtgtaggatggcccctccagctgtccacttgcgcctgcctgccgtcctaacaggaccacgctcaggggctctggatctggctctggtggtgtgtgtggtggcctgtgctcctgcagggagagggagaggaggtgtgaagggcaaggcaaggtggggcgagtgccccaggccctaggggagtggatgggcttcaagctcacgaccagtggttccttggcaggggtcccaccctgcccctcctggggcctctggtccaggctgtgtcccagaggtggccctggctaatggtgatgcagattaggggagggggagggtgtggcctgggggattcactcttgcctttgccctgcccaccaacactgcggcactctgccgttcagcccagttccaaataatgccaggccctgtgtcctgtgccgaggagccagcccagcgcagttcctgccccctgtacccca

SEQ ID NO: 10480 - DNA, 1467 bp, Artificial sequence
  DNA replication origin
ctccgcaggacggcgctgggggctcggccttcagcttccaggcggcgccgcgcgcgcccagcccgccctcgcgccgagatgcgggcctgcaggtgtcgctgggcgccgccgagacgcgctccgtggccactgggcccatgacacctcaagccgccgcgccgcccgccttccccgaagtgcgggtgcggcccggctcagcgctggcggccgctgtagcgcccccggagccggctgagcccgtgcgagacgtgagctgggacgagaagggcatgacgtgggaggtatacggcgccgccatggaggtggaggtgctgggcatggccatccagaagcatctggagcgacagatcgaggagcacggccgccaaggggcgcccgcgccgccgcccgccgcccgtgccggccccggccgttcgggctcggtgcgcaccgcgcccccagatggcgccgccaagcgtccgcccggcctgttccgcgcgctgctgcagagtgtgcgccggccgcggtgctgctcgcgggcgggacccacggccgagtgatctgcccccattttgtacgcccgagtttccgaccttctcaggctcccttcttgatcacaggcccctagaaggggtcccctctgcgtgccacaggcctccgaggggttgtgcagcctctagggctgttgcgtccccgtctttccagcccctcccatcacaaatacagaagaaccccttctaccaagctccctcgtggccacgaggccacgaacccggccagccctgacgccccactgtcccctcacagccctcagctctactcccggtcacactgggcgaccacgggggcctgctcagcaccctcacctcccaccccctgagagctggggcaggctcctgagatgtctagactggtgcgttgtggtctccggtggggccagatccccagaacagggagagactgcatacaagtctgagtggcagaagcttcaagtgggtgaggatcggtgtgtgagacccgcgagtgggcacgtctctgaatgtgaggtctcgggcagcacgtgaggtagaacgagtgtgagcgtctccacgcagtggctggccccgtggccggggcgtctcttgcatgctgttggtggtccttccccagttcctatctcccacccgcctggttccagccccatcccctctcccactgagtcacaggtttgagattcccagagaggccaaagacagctacaggaagtaccctgggggctcagctgagagagagtcacagaaaggccagagggtctcaggaaggtctggaggtcacagctgggctcacagaagctcttgggccctggcatcctgggtgaccggtgttcttgggtattggggacaggacagagagctcattctataaccacagttgtcttttaaaggccaccctctccagccccttgtcccccctgtgctgtgagcccaagtcccttgtgaccactcagtg

SEQ ID NO: 10481 - DNA, 1054 bp, Artificial sequence
  DNA replication origin
agatggaccctgcctcctcaggagaggggcgtcctgtgtctggccacacggatactacggcttcagcaaagacagatctcacatctttgaaaaatgtggatcccatgtcttcaggcaaggtggatccagtttctctgggaaagatggaccccatgtgctcaggaaagccagagctcttgtctcctggacaggcagagcgtgtgtctgtgggaaaggcaggaactgtatccccaggaaaagaggacccggtgtcctccagaagggaggaccccatatctgctggaagtagaaagacatcatctgaaaaagtgaatcctgagtcttcaggaaagacaaaccctgtgtcttcaggtccaggcgatcccaggtccttggggacagcaggtcccccatctgcagtaaaggctgagccagcgacggggggaaaaggagatcccctgtcctcggagaaggcaggtctggtggcctctggaaaggcggctcccacagcctcagggaaggccgagcccctcgcggtgggcaaggaggaccctgtgagcaagggaaaggcagacgctggcccctctggacaaggggactctgtgtctataggtaaagtggtctcaactccaggaaaaacagtcccggtgccctcggggaaggtggatcccgtgtccctgggaaaagcagaagctatcccagagggaaaagtgggttctctgcctctagagaaggggagtcctgttaccaccacaaaggcggatcccagggcctcggggaaagcacagccgcagtctggtggcaaagcagaaacaaagctccctgggcaagagggcgctgcagcaccaggggaagcaggggctgtgtgtttgaaaaaggagacaccacaggcctcagagaaggtggatcctggatcctgcagaaaagcagagccccttgcctcagggaagggagagcctgtgtccctggggaaagccgactctgcaccttccagaaaaacggagtccccatccttggggaaggtggtccccctgagtctggagaagaccaagccgtcctcctcctccaggcagtt

SEQ ID NO: 10482 - DNA, 1696 bp, Artificial sequence
  DNA replication origin
agacagggtctcactctgttacccaggctagagtgcagtgacacaatcatacctccctgtagcctccaactcctcagctcaagcaatcttccctcatcagactcctaagtagctataggcatgcgccatcacacccagctaatctttaaatttttgtagagatgggggtcttggtatgttgcccaagcttgtctcaaattcctggcctcaagcaatcctcctgcctgggcttctcaaagtattgggattacaggtatgagccactgcacctggcctgacacttggttctcaaaaccccctttctggtttttgaggtcaggccaaggttcctcccaagcaacagtgccaaggagcatgcagtagaagaagcaagagctcccctccccctgcatacattcccccacctgtgggaacgcacacaccctatgagcagatgagcctgtacacttgggcacaaacaggttgagtgtggcctgactgaggcagaaggcagaaatgtctgctaggtatgtaggcgggctcacctggcatgcaaaggagtgaacagactgcttgtggatgtatgtaccagcttgggccactctggggccaggacctggctcctgtgttctgctcaagaagagcttgttgtgcgtatgtacaccctgcatgtgcagaatggcctgtgtgtttgtgcctcgtgggggctacttggaccctgtgggtatctcactcctaggagagcttatctgggtgttgcacaggtgcctgtgtcctgctcccagggagagcagcagcccctgtggctgcccattcaggccacagagacctggccagccattcctttccctctaggatttctttccagcatggagctatccttacacccataaacagggccagaactgccaagcacctgcaaatacctcttctgtgctgacaagaccaacaaaggcttgagggacttcgtcaggcatctgagtgtgtctgagaatctcagtctgctgcccctcgtccccttctctcgtagtgccctcagagcagcgaagtctcctgctcgggggtgtggggggagaaggaatctaaaggtgttagccagacctgcttccagaaacggccctcagaccatgcatacatacatacataggagggcaagaatggacgttcatggacgtgcaaacgtgggccagtgtgggtgggagtgggcagcacgctaagagacagagtgtgtgtgtaagagggagtgtgtgcacaagggtggcagtctactccagggtatctgggtacgcaagggaccccatgagcaggggtgagcaggccagggcagggtggccccgagtgtgttgtgatcagggagtattgttgagttgatgtccatgctgtgatccgcgatggctggtttgagtgcgtagctgtgcctgggtgtgtacgcaaggctcccacccagtaccctgggtgacaggtggccgtgtgtatgagtctaatggaatgaccaacagccattgtgtgtgtgcggtagacctgtggcctcactcgaggaaatgaggcgcccgtgcgtgaacgcggtgttgtgtgatcgcgccccggagtgtgtgccacactggttgtgtgacggcgagtgtgctcagtagtgcgagtggagccagtggagcgttgagctcgctccggggaagatgaatcaacgcgggaggacgccctccccccagtggcgggaagc

SEQ ID NO: 10483 - DNA, 801 bp, Artificial sequence
  DNA replication origin
ggagcgagggaggggcgcccctcgctggccaaccctaactgcggccgctgggctcccgggttccgcgccgtcctcgagcgggttcccacttcacagacagggagactgagggccggagaggctgcccctttgctgcgagcttgctgagggcggggcgcgccgtctagcagatcttagaccagcccctcgaaagccctcgcctggcttgaccaaggagggaactggggctcagagggggcagtcgccggcctgaggactcgaggcgcctggatggggacccaggtcggcgcgatctcccggctccgccagcgaggaaatttcccgcctccgccccccccacccccggccgcacttccggcctcctcttccccgcccccggccctttgtctcgccgctgcccacgctccagcgagtggcggggacgccggaggtagtggtgcgggagagatgccttccagtccctggctgcggcctccccgggggcccgcccgccctcccccctccccctggataccctcgagcaaatcatttcacctctctgcacttcagtttctcgatctgtaaaacgggactaacattatgcacctcacggtggtcttggaagggcaaagtaggtgttcaggggtttccagtggtatctgaatcaccaaggacacagagactcgctgcccaccccctccacatttccctgcagagaaggagttcccttccccttgacttcccagaggagaaaaaataattccgtaattgctctagatgtgacaaaaccctctcgcaccggtactatgaagccaccaccat

SEQ ID NO: 10484 - DNA, 1889 bp, Artificial sequence
  DNA replication origin
gttcgcgcatatggacccacggacaggcacgcgggtccgcacgtgagtgggcatcggcgcgcctgcgctacctgtgcggccagttgtgagcccttccgccccaacgctgcggcggcatggggcttccctagatcctgcactcccagctggcactttagggactagcaggaggcgcccgaggccaccttcccgcctcccagccaactgcgtgtcccagccccgggggcaccctccccgacctgccttccgggggacagagtgggagatggagacgcgaagccagaggtggccagtcttgtacctgggctgtgtgtgccagaccccaaagagcacagaggggtaggctgggacctggaagactcgccgccacgtgtcgcccccacccggcgcccagcccagccctgccggtgcggctctggctacagacagattagctttattcatggactctcgggggcggccgggcccacccgcccgggacacgctcacatgggggggatggggactctccatgccacaatcacaacacacgacgcccgcgttcggaccgggccggctgggatggggggcgggggacatggcacagcctggctcctggttttggttaaaaaaaaaaaggttctcgaggttaatgggagtcgggcggggtgctctggggctgcccgggggccgcttggagagccactgtcggggatcggggaggagccgtcgctcggatcttcgtttaaaaacacatagaacatgctacatccgcgcagacgctggatgggaggaggcaacactggaggggcgaggctcccagccgcgaccgcaaccctggccctgtccatgccccggggttggacgcgggcgggtaggacagacagatggacagacactaacacaggctccgagggggttgcctcagagcggaaggaagatctcgtgattggggagaaggagtctaaggacagccctggctctggggggcggggcagggacagggacagaattgtgctgctggtgggggctctcctgggcccctacgcctctggctcatactcctgatattcctcctgcatcaccgggatgggggtggagtagagaagagcaaaaaggaggaggagtttgagaccaagtggccaagccccggcccaagaaccctctccctgaaggaggaatagcacattccccttttcctgggcaggggaggagcctggaagttggggacaacagagaattcttgggcaggtgtgcctggggcccagcgctagaccctatctgccctctcctccctgctcccacctcctggggcctgggttctagaagagggatgtcaagctccctggcccaaccatctcatgccagggatgtcccaccccagctagggacggcagcaatcatcctggattcccaaagtcccgcccagccctgctgccccctcacctggggtgggtcctcataactctccccttctggctccatcaggggctcaatcagtggttcttcagcagcttcctgggccacttcctctggctgtgggcagaaaaggtcaggactcgtgaggacagccaggatgccccccaaattcccacagtggtaagctttgggtgggttggagtggggaaggctagggtgggttggcagagcaaggataatttctaattcagttatttatttggagtgccttggaagtgggatggaggtgaagggggaaattcccccgaatcacagttgaagtggcagcatggagtgggagctggctctccacgccgctcccccaatgcctggcagcctccacacttccaccatttggatactcagtcaccagcttatgcctcatcctttgtgtcaggctctgtgctgggcatcgggaccccagagataaccctcaggctcccctgggctga

SEQ ID NO: 10485 - DNA, 1121 bp, Artificial sequence
  DNA replication origin
ctgaagccccacccctccccttgtggcgcctccctccagcacctccaaggccgagttgagttgcgttccaggtccacctgcatcacaactcttgtggttttacctttgccagctctcttccccgtccactttccttgcaaccactggctggtatcagaagaaaggccagggttggataacttgcccagggtcgtggcatatttggattgtggccatttgaaaaatattttgtgtccacttactatgtgccaggcatcctgcagatgctggggtttcacagtgaacaggaaagaatggttcctgatctcctgatggtgatacagagcatttcagcagtgcgagttgacatccagtggctccctgaagagaatgcctcatccctgagtaataagaggggggcagggctgcagaaaagccaggtgcaaaggccctggggtgagctgggggcagggcaggaagtagtggtaggaggtgaggtcagagcgatgggcaggagacagttcacgagggccctttgcaggccagggcaaaacgttgttatcatggccacgagagactgtaagcaagggactgccatgatgtgattagtttagaacggtcacttgggcctctggggacagaaaaactgcagggaggcctgatgaggccacaggatgagggtggcaggggcgagggtggtggcaatggagaccgggagaaggctaaagtgcatggctgcttgatcccagctctggcctccctcctgcctcctccccagggtctttcattcctgctggcctctggctctctgacactctctctctgataatagacttggcccctccaagccatgctgctcttccccttagattggcacttcctgctcctgcctctgcctgggagcccctgatggaccccagttcctacaagttaaagcctcggctccctgtaccctggcattcagtgcccttcatggtcctgcctcagtctacatttcccaccacacccatggctcctggcacatggactgtcctgaaagcacattgctctgccttgtctgtgtgggtccctgggcctgggataccctctgcagtctcctttctgatgtccatctgttccccatttctcaaggcctaggcagt

SEQ ID NO: 10486 - DNA, 1230 bp, Artificial sequence
  DNA replication origin
actggggcgacaggagggagctggggaaggggatggaaaatggagggagacccgggggatgcgcgtcagtgtgcaccccggagtatgtgagtatgctccggtgtttgcagctgcccgggcggctgtggggacgtgtgtccgcgcccatgtgggtcggggtattcgtgcgcgttggagcgtctgcgtgtcctgtgtgtgcacgtgagcttgtccgtggtgtatgtttgtgtgcatgaccgtgtgactgtgccgtgcgtgtacaggcgggtcctggatattcgcgccgaacccagcactccggttcgacggggctgcagtttgcagggcccggataaccgaggcagtggcccctcccgcgtccccaggtttcaaggacgctaggactctccgcggccctgaggcttcgcactggggagtggggtgggatggggggaaagcgggagggggctcagggtccagaagggcgccgcggtctcgggagtaggggggcatctgcgtcccgcgggaggggctggggtgagagtgcggggccagtgcaccggtgcccgtgtatcgccctccccaggccgccaggatggacgtgttcatgaagggcctgtccatggccaaggagggcgttgtggcagccgcggagaaaaccaagcagggggtcaccgaggcggcggagaagaccaaggagggcgtcctctacgtcggtgggtaaggggcggggtttctggggctgcagggctgggggtcccccgacagtgtggagctggggccgggtcccggggaggggggttctgggcaggagaatatgagtcagcagatggggcgaggtcagcaggggtcataggggacatagccagcccatagaagcctgggtctgtatccggaaatggggacacggggcgggctgatgaggtggggggctccagctgaaaggccagggaccagtgcagtgatgaaagcagacagcctcctttttcttatcttttttaccattattaatagttatctggtgttgaacactttctgtatgccaagtactgggtaaaatgtcataacatccatttcctcatgtaatgcttcggcccattctacaggtaagggaaactgggcttcccagagatctaagtaccttgcccaaggtcagcagctggtaaatgctgaagctggggtttgaacggagctttatagattctgaagccccacccctccccttgtggcgcctccctccagcacctccaa

SEQ ID NO: 10487 - DNA, 841 bp, Artificial sequence
  DNA replication origin
gcgttgtccccctccctcaactcccaacagactacgcgagtcttacggccggggcccccaggggcgcgtcccgggcccgccccgggaggctcatcggctacgcgctgtcaccctccccgccccctgtcagtcaggccgaaggggcggcgcggccgccagcgggggcgctgagctcagagctgccgcagcgccggagccggagccggagccggagcgcgcgagctcgcagggcgcgaggaacgagcggtggctggctacgcacccgagacccgggcactgctgcgctcctgctcaggacccgcgacccgagcgcctgatcccggccctatcccccctccggcccctggtccaccccggcctggcctagcggagcccccgcgtccgcccgccgcagccgccgctccatccccagccccggccccgcatccaggtgaggcggccgcgcgccggggatggggaacgggatgaggatggagaggggactggggcgacaggagggagctggggaaggggatggaaaatggagggagacccgggggatgcgcgtcagtgtgcaccccggagtatgtgagtatgctccggtgtttgcagctgcccgggcggctgtggggacgtgtgtccgcgcccatgtgggtcggggtattcgtgcgcgttggagcgtctgcgtgtcctgtgtgtgcacgtgagcttgtccgtggtgtatgtttgtgtgcatgaccgtgtgactgtgccgtgcgtgtacaggcgggtcctggatattcgcgccgaacccagcactccggttcgacggggctgcagtttgcagggcccggataaccgaggcagtggcccctcccgcgtc

SEQ ID NO: 10488 - DNA, 1545 bp, Artificial sequence
  DNA replication origin
cattttccatccccttccccagctccctcctgtcgccccagtcccctctccatcctcatcccgttccccatccccggcgcgcggccgcctcacctggatgcggggccggggctggggatggagcggcggctgcggcgggcggacgcgggggctccgctaggccaggccggggtggaccaggggccggaggggggatagggccgggatcaggcgctcgggtcgcgggtcctgagcaggagcgcagcagtgcccgggtctcgggtgcgtagccagccaccgctcgttcctcgcgccctgcgagctcgcgcgctccggctccggctccggctccggcgctgcggcagctctgagctcagcgcccccgctggcggccgcgccgccccttcggcctgactgacagggggcggggagggtgacagcgcgtagccgatgagcctcccggggcgggcccgggacgcgcccctgggggccccggccgtaagactcgcgtagtctgttgggagttgagggagggggacaacgcggcgtgtgaagagtggggaagaaatcacgcgactggatttggagttctgctgggctcgaatctcagctgtgctttttattaaccgtgggaccttgagctactcggctctcctttctgaatgacagtttcctcctctgtaaaacaggaatggttaattcaacgaatgtttactgagcgcttagtccagtggtgcaggtttaaggctggaggcagcggaaaaggaaaacaaggttcctggtctcgggaagcttaccatgggggtgtctgtacgcgtgtgtgttcgtgcgctcagtggtggaagacaggacagaaaataaacggatcaacatccaaagcaacaaggtcattacagcttgtaagttgtgaaggtaacggtgatgtaacacggggactagaggaggggtgcttgagacagggtgctcagggaaggcctctaccagcaggtgaattgtagcagagactccagagaggcaccatgacaccacgatgggtgaggacaagatccatagagagtgcaagtgcaaaggctccaaggcaggactgtgctgacaaaagacagcgcagctggagagccaggatggagggaggtggagaacaaaaccacttttttgtgtgcttacggtggggactgtcaaaatgatcacagaatgccaggcacacagtaggccctcagttggttctatgatagaattatgcccaagaagctgtagtatcccagaggaaagggactctgacaacttaggggagtcaggaaaggacataaaaaagaggtgacaactgaactgtggcctgacaggaaggggactatttcatcgagcaggctagggagaaagagaattttaggctgtgggtacagcatgggcaaaggcactgtggccagaaatgcagggtgtgtaagtgacaggtaattaggcgagggggccaccagcagccagactgcaaaaaaaaaaaaaaaggaaaaaacccaaccaaccaaacaaaaaacattcacaggccgctggtagaactgcaaattggcgcag

SEQ ID NO: 10489 - DNA, 1155 bp, Artificial sequence
  DNA replication origin
cttaactagggaagggcatcagaattgcttgaggacactcattgatgccacacccatccctggagggctgacattgtgtttagagatctccccagtgacttctgccctgcctgggaaccatgcagccaagcctgggatgtcccccttgcctgcattggggtctgcccctgaggcttccttaatccaccccgatttgaatgcttgtcttaaggaactcagtaaaagagacatgcacatatacaaggctatacaaggtgaccagtgctgtctgtcggggggagctgagtggctgggggtggaacctgcttgcactgagggaagggaggataagagaatctggcctacttagggcctcagcagagagcggataaggccgggatggtgggtgggtccccatttccctttgaacacagggaggcagttgacttgccatctgccttgcaggatggcatccagcccatgtgggaggacagcaggaataaacggggtggccgctggctggtcagcctggccaagcagcagcgccacattgagctggaccggctgtggctggagacggtgagttggaggaggagggtcctcaggggaagagacgggctgtgtgggtctcatggtggcagtggtctcaaggatggcaggccagtccctatgtcccagccggtgatctcacaaccccctacttcgggtccagctgctgtgtctgatcggggagagctttgaggaacacagcagagaggtatgtggggccgtcgtcaacatccgcaccaagggggacaagatcgctgtgtggacgagggaggcggaaaaccaggcgggcgtgctgcacgttgggtgaggagggtctctggcacagggtggggacttgggtctctgctagagggaaggtgggtggagggggcttggcctgcatgggagacctctgaaagtctccatagcctccctcccttctgccttgcccacctgtatggaaggtctggcgttcagatttctaactttctcttacggcagtgcagctctccttttgcattaagggggtcatattttgggtttccacatgggtaagacacaacaggtgtggctgtggccagaatgagggtaggagtctggtggcctaagttatctctaggaccctctgatgactacctgtgtctcttt

SEQ ID NO: 10490 - DNA, 937 bp, Artificial sequence
  DNA replication origin
tctgctagagggaaggtgggtggagggggcttggcctgcatgggagacctctgaaagtctccatagcctccctcccttctgccttgcccacctgtatggaaggtctggcgttcagatttctaactttctcttacggcagtgcagctctccttttgcattaagggggtcatattttgggtttccacatgggtaagacacaacaggtgtggctgtggccagaatgagggtaggagtctggtggcctaagttatctctaggaccctctgatgactacctgtgtctcttttcctctgtgtcccccgcacctgcaggcgtgtatacaaagagcgcctgggcctctccccaaagaccatcattgggtaccaggcccatgcagacacagccaccaagagcaactccctagccaagaacaagtttgtggtgtgaggggggccttggcacccctcctatgtaatgggacagccgccactgagcctcattactttgggggatggggcgggactggggatcagacagcctagttcttacctgtcctcaagtgaacaggaatgcaaacactctttaacatgagttggggcctgagccttaggggctagatgggggtagtggtggcagtctgaggacctagcttgtcctggggccacaggacagcagcagggtggaaaaaactcctgagggtggggtgagtcatggcggggaaggagggctctatggtaggcggagaaacccatagtccagcgtttactgtttccacccaggaaggaggtgaggtggcctgagagacagactcttccatgggtggtgggctcaagggcacagacattctggagggtgaacgccatcatttgtacagagggatacgtgggttgctgaggactgagagagccttgcaaggccgctccccttctccccagctgtgaccagggctgtctgggcc

SEQ ID NO: 10491 - DNA, 736 bp, Artificial sequence
  DNA replication origin
gggcacagacattctggagggtgaacgccatcatttgtacagagggatacgtgggttgctgaggactgagagagccttgcaaggccgctccccttctccccagctgtgaccagggctgtctgggccttgcctgcctcagggccagactgaagtggaggtggagggatgctgggctaggcctcaccaaggttctggtagaagtggtggaagtggataaacttgataataaaagcttaagcatctttctgttcctgttttaaataaatacttctgaacaaagttggaattatttttaagagggcttcaaactggagtaagattcaggttcccccaaactttgatctgcctctgtcctgtcttacaggggctcatgtgagatcactgggtaccaaggagcctgaccgggaccctggccagtatggaggacagggggtgtggctggggaaactcagccaccaagggggcttgagccaggttccggggggcatatgcccctggcagggcgcagccggcgtggcaccaaggcccaggccctcgtttggcctgagtttgagtcaggataagtagagctggatttccgctgggtgaaggtgagcctgatgcgactccacaatgacaaaacgtcctgcacgtgttaaaaactcaatccggaccagcttccccattcgcctgccagagcagcagttaaccttcccctgggatgggctccaacagcaggctggggattgggatggcg

SEQ ID NO: 10492 - DNA, 943 bp, Artificial sequence
  DNA replication origin
ttctacaccccggcggcctccggcgccatcagccggcgtcccgggcgggtctgcaggacgctgggaaacgcggcggcggcctgcgcgggggcggggcctggccgaaggcggggctgcgaggaggtccgaatcaggctgtgggggcggagctcgggaagcggagccaggtccagaggcggggctcaggcgggactgagttgatctatgggggcggagccaggtcaggaggcgggactccaaagggactgagggctgtgggggcggggcccggtccagaggcggggacagcagggctccgggcaaggaggtctggatgctgagggcggtccctgaggggcgggcggggcccgaccggcgctctgtgtggccgaggccatgaagccgcagccgcccggctaggccccgggcggctctagcccagggcggcccgcggggcgctgggcctggctcccggctccggtttccgggccggcgggtggccgctcaccatgcccggcaagcaccagcatttccaggaacctgaggtcggctgctgcgggaaatacttcctgtttggcttcaacattgtcttctgggtgagcgcggggtctgcgccttgccctgtgctggggggtggtgggagagggagattcagtcttttgctgggggagaccactccctgccccaagagtttggagctcgggaccatccccccacttctgccacacccacgcccacttccaggaccacccgaggtagctacagaggcccggattgctgggggcgggtcctagcgacagcgtggggtcggggttggggtagggagtctccctaaataatcccgaggcctggtggagaaagggaaggtgtttccttgaagaccccaggggcgtgctaggtgcaggttgccccctctcgcccagccctccttcctaccctgggatgtgggatgcgtgccaagccc

SEQ ID NO: 10493 - DNA, 948 bp, Artificial sequence
  DNA replication origin
ggcatctgtccccctgggccctgccaggtcatttttcccatctctccaaagccgtggccctctgcagtctctgctcctgaggccttgggtcaagatgccaggccttttcccttgtgttcagcaagactcagtggcactgccccccacccacgtgtcaccgagctcactggtgtggtgggtgtccttgcactgcagcgctaggctcttgagggtgtgggcagtgtgtgggagcactggcaaagaagtcagaaggcctggctgtagcaggcctggctgggacaccttgggcaagtcatctctcctctccgggcctcagcttgcctgcctgggagacgacgataaagaatctgcctgtgagggctgttaggcagatacaatgagttcaatttgttgtattctcacaactgccttattatctgcattttacagatggggaaactgaaggaatagacacagagaaattaagtcacttacctagggtcacacagccagaaagtacagagccaaggtgacggcttagtgggcagagggtggaggtgaggcagagctgtgagcagaagtaacctcaaataccgagggggagcaggcgtgagagacccgggtttgttgctggggcggagcgtggggtgttatgttaaggtggcatggagaagcgagggcttccagtgatgggtctgatctggcttctgttctggagaccgcttgcctggctgctgtgtggagggtggatgaggggcagggcctggaggtttggaatgggggcagggctggggcaaagctgggatggtgaggtgggaaaggtgagggaggttgctgggaaagtcaagaggctgaattgactgggctgggtcacttgggggctggagggaggatttcagatttgggttaaggtggcctaagggaggctgcttgtggaacaggcacagaggttttcatgtttaatgtcag

SEQ ID NO: 10494 - DNA, 849 bp, Artificial sequence
  DNA replication origin
agccgtggaagctgactctggcaggcggaggttaaaggggtaggatggggctgggctggggaggagtgttgagggcggggccgcagtcacacggctttagggtagcaggagagctggacttggcagggtgcagaaaggaggctaggagcctggaaccccagcaccagcttcggtcaggtgtagaggctcagtatactggcgccgtcgctacccccgctgacacagctgctattgctccttggcaggagtgtcttggccaccgtctgctccaatttggagttccaggaaggggcccctgatgtccatcccaaggctagcagagggttcagtcctccaggctgtgtcctgtggggaagaagcactgggatgtgttcttgggaagatggaaaggaccccggatcccgttcacagcccttgtgcctcttcctctctccgctggaaaggccctggctaccggggaaggatgaggggggagggtcctggggctgctcccagccctgagctctttgttgctgcccttgcaggtgctgggagccctgttcctggctatcggcctctgggcctggggtgagaaggtaaggcagcgggcgggcgtggagctggtatgggacgaggtggtgggaaggtcagctccccacacctgcctctgctgcccggcacagggcgttctctcgaacatctcagcgctgacagatctgggaggccttgaccccgtgtggctgtttgtggtagttggaggcgtcatgtcggtgctgggctttgctggctgcattggggccctccgggagaacaccttcctgctcaagtttgtgagtgctgccctcaagatcccctgggaacccccatctc

SEQ ID NO: 10495 - DNA, 1049 bp, Artificial sequence
  DNA replication origin
tgaagaagctgcatcatctgtgggtaagagccccttggtgcaaagaactgctctaagttctactgggggacaggaaatttgtctgtagccagcccaagaccccacttagcagtgatcatcacgtccttgtcaccacgtatacattgcacattagcaactcttccttgtctgcctccaacaagatactgggctctgggaaggcaggggcaggtctgagctgcctcagtaaccccagcctctagctagggcctacctaagtgaatggcagtggatagctgagtgagtcgatggaggatgaagatggatggatggatggagggatgggtgggtggatgagtgaatggatggaggaagggtggatgggtgaatggatggaggaagggtggatgggtgaatggatggaggaagggtggatgggtgaatggatggaggaagggtgggtgggtgactggatgaatggatgggtgggtgggtggatgaatggatggatgaagagtgggtggatggatagataagtgaatgtgtggatgcatgggtaggtgggagggtgggtgagtggatggatgagtgaatagatggatagatgagtgaacatgtgaatgaatgggcgagtaggtggataagtggatggatggatggatggatggatggacatgtaaatgaatgggcaggtgggtggtgggtggtgggtgggtgagtggatgattgatggatggatgagtgaacgtgtggatggatgggtgtgtgggtgagcggatggacgggtagatggtgaatgtgggtggatggatggaagaatggatatccagtagcagaactgagctttggagaactccgtgttcccagccagggcctcaaccactcctactcatcactcccatcccatctcttcaatcttgtttccaaacatatcttggttacaccacttccttgtgcttatgccgtttgcccctccccactcccacctctccagccaccccaggctccctcacatggagcccacgctggcttccaggcctctacagaagctggtaccaaaacctagaaca

SEQ ID NO: 10496 - DNA, 1003 bp, Artificial sequence
  DNA replication origin
tccagcatccccagagggagcctgacccccagcattcagtgaggaatcccccatggcctgctccgtgtcctgggctcctcctgcccctcccacccaccccagctgcaggggcgcttacatcctcattaacacggctcagtggctggcgctgggaattgatctccctcaggcccagtgtggacagcggctaatggggatgaatggggcgggaggtgctgccgagggacggtcgtccggtggcccacacagggcggagaggtgggcagatggagatgtgcagagccaggccccgcatgcagctgggacgcctgcagctgcctcgaccgctggccaacctgggtcctggggcaggatgatcagacagggggatgcggcgcggaggcggggagctctggaattcagctgctcatgggggtgggagcaggccgtggggatagggcccagtctaggaagtggaactggagttctggggtggcatccaggaaggctatgagcatcgggaccccaaggttaggcaggcagtgttggaggggagtcagtgtcggggagggagggagacactccggagctgaacctggcagcatggggcaggcaggatgccattgtttagtcagtcaaccaacaccaagtgcttactatgcaccaggcactatgccaaggactggtacccatatgaagtggccaagacagtcaagatcttcttccagggatggggggcatagatgatgatacacgctcagaagaaagtaaacacggttatgtgacagggtgatggaacagaggtgctagttgaagaagatttccagggacgtctgtctgaggaggcagcatgtgggctaaaacctgtgtggtgaggaaaaaaatcattccaggcaaagggaacaggcagtgcaaaggtcctgaggtaggaatgggctcgggcatttcaggaaaaagaaggggccattgcggctgcagtgtggcctgtgaggaagagatgagctgagaaatgggtggcattaaa

SEQ ID NO: 10497 - DNA, 1472 bp, Artificial sequence
  DNA replication origin
actgaagagggcagccgggccttctaaacggggctgccccccaggtttgccttgtggaaggccacccggtgtcgactgcccgtttttcaggagaagccagcagtccaagtatttccatgaaccctggctttttaatgtgactggttttctttaaatccaccctccctgggggccacacggagcttttctgcctggaccctctgctgccgggtccccagtctccaatcctcgcggatcccaaaggcggagctcaggccccgtggcgcaggagccatccgggtgggcgaggccctgaccggatgccttcccccgggacccggctcgctcccctcgccctgcagctcggctgagacgcctccctgagacaccgccccgcgcccgggagccggcccaggcgggtgggtgcctttctccgacagcggcggctcccgggaggcgcactccacgccgctggttctgcggcctccagtaataaattgcagcggaggcgagagttgagctgcagggcgggaggtgcgggttgaggctggaggctgcgactcgaaccccgacaggggacagcgaagtgaagcggggcggatggacggacaggctgcggggtacggggtgcggggcgggcagggagctggaccccagtcccatcctctgagctgcggggaggcgctaaggccggagcagagcggcactgcagcctgcaggggtctaaacagggatcccctaggtcctccacggattaaacaagatgaagcctgagcctggcctctctcttcctctgcacacccagtcacgtccccagacccttagcaggacgagccttgctcactcacgcttggcgtccgagatgcctcggatatgtcctcctcccggtgttgacagcctcctgcctggtagctggcagagccccagggtgacagggagaggagctagcctggccctgtaaggagtctggggatcccaggcagggggatgttcggaggggagcagtggggcccacggagacacccactcatcaggtcaccagccaccaagacagcccctcctaactcctgtgggaggggcctggacagaatggatgggggtaacttagagtccccatgtgcccccactgaggcagaatgtatgtcttgaagcagaggggtcaccagattggtcctgggacgtgacgggggaccctggtggtctaagaggggcatgcggcagggatggatcctgtaccaggcaggacggaggactatgtggagccagtgtggaaggcagagacccctgggttgtgggtgcagcgttgaggtcacacagatgtctggggagtttggccccactcgaggccttgacccttcctgggtccctcctccacctgagtgcaaccacaaatggaccaagaacaccccaaaatgggccaaatttatcctgaatttactctaatggggactcaagacagaaattaagttttgttttagaaaaccttagcaggg

SEQ ID NO: 10498 - DNA, 1266 bp, Artificial sequence
  DNA replication origin
aaggcacccacccgcctgggccggctcccgggcgcggggcggtgtctcagggaggcgtctcagccgagctgcagggcgaggggagcgagccgggtcccgggggaaggcatccggtcagggcctcgcccacccggatggctcctgcgccacggggcctgagctccgcctttgggatccgcgaggattggagactggggacccggcagcagagggtccaggcagaaaagctccgtgtggcccccagggagggtggatttaaagaaaaccagtcacattaaaaagccagggttcatggaaatacttggactgctggcttctcctgaaaaacgggcagtcgacaccgggtggccttccacaaggcaaacctggggggcagccccgtttagaaggcccggctgccctcttcagtcacccagcgcctcgccagaccccaggggacattggggcttgagacccctgctctgcgtggggcacagcagaggccaagggagactgtggcccagctgttccacgggcttctggaggccaaggactctctctttttgtttttatctttgtatattactctggtacataaaggctggcatataaaagtgttgaataaataaattttcaatgaacagctgaatgaatgatgatggtgatgaatgaatgaatggatggtgatgactacccagaattataatcaagtggatgagactcaaccacttgaaaaggtgagtccacattgcaggccaaggaagcagaggtgcagaagctgggggcccctgaaggagtccagggcacttggggtggagtggggaccagggcagcgtggctgcccaggggtggcaggaaggccaggctgaggggctggaatttgagcttcctggctgctttactatccagtcacctgagctttaaacaccccaagtctggggccaccctccaggcccaggaaatcagactcttcaccggtgggtggggcaatctgtgctttaaaaatgttgccggttgggcgcggtggctcacgcctgtaatcccagcactttgggaggcggaggcgggcggatcacgaggtcaggagatggagaccagcctggccaacatggtgaaacccagtctctactaaaaatacaaaaattagccggacagggtggcgcgcgcctgtaatcccagctgctagggaggctgaggcaggagaatcgcttgaacccgggaggcggagcttgcagtgagccgaggtcgtgccactgcactccagcctggcgacagagacaaactccg

SEQ ID NO: 10499 - DNA, 1278 bp, Artificial sequence
  DNA replication origin
ggaggtggttgggttggtaatgagtgttcctgctaatttggaggaatgatttaacaccaggaggagcccgggaaaacatcttctgaatagaaagagtggaacgacccccaccaggcggcggctccgagtaccgtgttacttcttgggcctttggatctgtctacacagggagggactgagaatcccaggaactgcatccctaggaaggaagtgggaaggcaggtgccagctcagtgtctggagctaaagaagggaggaaagcccctacacacaggttctcccacccctcagtgaggcattgggtgcagggcccagtagagaggcgggagagctgcttgtggaccgtggtcggccacctcgccagctggacacctctgggcctcactgtcttcccagctgcagggattaaaggggacagcgaggggtggggcaagccctgcacatgtttgtctgtccattcaacattgtttttgaagcacttactatgtgccagatgttcctctgtgccctggggctctggtgggcatgtccttggaggtccctgctcatgttccagtggagaaggaagaggacgatggacaggccagcagataaatgaatgagaaagacagcatgtggtctgcaccagtggcagcacagccgatggagcagggacctggggcaggagagggaggtggggagctgaggcctgggctgctgaggatatgggagggcaggccagccggggaacagcaggagcaaaggccaggaatgggggccagcctcagaggtttgggggaagtgacggaagcagatggagcgagggagtggggggaagcgtgtggccctggaaaagagtctggatttccttccactgcagccagaaagtcactggaagcttcagcacgggagttccgtgatctgatttacattagaaaacagaacccgagatgctctcgtgtggaatggagagactggggaggaggtgacagaaaatttaggaggctgtagtgagagaggagggggtttggaccaggggggccggtgagagaagtagctgggcctgggacaggtctggggtggagcctgccgcctctgctaatgggtgcctgtgggaggccctttagagaagagcaggaggaggtctgatccagagcctgagccagccctggagacgggaaggccatgggagggagagcagggagctctgctggactctggattccgggagggacctgggaacctgaatttttaatgagctgacccccaagggattcgggtgacgcctctgctctcaaa

SEQ ID NO: 10500 - DNA, 1244 bp, Artificial sequence
  DNA replication origin
tctcccccagcccccgctgggtgtgttgtctgtgaacatgagcccccccacatccattggcatctccttccagaggctttggagccttgacgctgagcctctgcagcctgaatgcccgactccgcagcaagtgagtcatgcatggtgtggaggctggaagaggaaagacaccctcggggcaggagaaaaaattcggttagtgcaggggtgggtgggtgggagataaacatgctgattgaaacgtcaacgtgagtgagctcgttcaccgagcaccttgccagggtcccaccaatgagtcgggaacgagcctatcactagaaactaggactgtcggcaaggtccagagaggggaaggtccttgaaagaggctctctgaccttggccgtgagggcgtcacagtgtctgagagcggacacctccacgggggtcccgtgagggccaggagtgcccgggcaaggggtggtgaaatgctctcacctctggggctgggtgtagcctcctcttagacaggcctggagaggacagggctggtgccctgggagtgagctggccctggctggacagaaacctgagttttgtgaatgtcaagaggattctgtgaggcaaatggaagaaaaggacactcttgggtgcttgttggggcctccctaaatcaggaggaagctgagaaaccaggcctggagatgggcagggagtgagaggaaaccagaacatccctgtctgggcgttgttgtggccacggtggggagaggtggggcaggccgtcctgctgtccctgtgggccctgagatgcccactccagagtccgcgtcccaggagcaggcatcagatgggagagctcaggctggacacctccaccctggctgcatctggggtgcagcagggggagcctggtgctttcacttctgccttgggaggtgggtggctgggttatgcagatctagagggagatttggggtgatatccatgaaaagggtggattctgagcagccggaaaatgacaaatggccaccgctgcccacaggaccactttcccacctcttgcattttcttctcacttttcctttttcccttcatcacatgtaagttgtaacaaacaagctgggttcccagtcagaggccccactgcctcaccagctgcctgggaaaggagaggagtgtgacaagagaggctgcacaccctgggtggtggccccatgggtgcctggcgtcctgagcgtgtcctccatggctgcagtggcatc

SEQ ID NO: 10501 - DNA, 1239 bp, Artificial sequence
  DNA replication origin
gggcaggagtctgaaacccggagtggatcggtgctccggatccgggctctcgcgggcccgccagtctgcgcacaggtggcccgggaggggcccggggctgcggcgaccccggcgcggcgccagcctgcggagagccgcccagggcaggggtgccccgggcaggttccgctgcagtcctctcccccgccctttcctcgcggccgcgctccggggtcgtccgggcgccgcggtacgctgccagcccgcggcttggttaggggactgcgggagagccccggggccctggcccgcgcgcagaggtgccctggccaccagagctggcaggccagactcggggacacccgcagtcccagcctcgcaggctggtggattccaggggcgcgcctcacaccatgacccaaggtttccctaacccctcggcgccgttcgccgaaggaaaacaaccttcaggcgcagcacacccgactgggcgcgcggtgtttgagccccgagagcgcacggcgcccgcgacgtgggtgtaaaggaacgagctgggctttggcagctagggagaccgggggtagggtccaggcgacttcaccttccagctctgtgaccttggtcaagtcacgtcgtctcctggagcctccagcagtgaccgctgctggagtctcctgtgccccacccccattccctaatcgggttaaaataaacagagggctgccttgaaggagaaaggaaatgacagccgcgtgcggtgtgcctggggggagtgatcggaaaaagagagggtcctagtctgggtcgggaggggaatgagcagggtgagggcagggtcgcaaactcaaacgcctacggggccggtcgataatataaattggcgctgcaggctaggcgatgtaagggatggtcttgcttccacaaagagatatgagctctcctatatttcttgagacacgaggccctctctcggtctgtcttttgtttcccacttttgatagagaagggttatgaaaaatgttttgctttcctcttaagtctactataaaaaacaccagctaaagctccagaggcaaccatacagacgctgggctccatcgccagggaggcaaagggcagtgctggggacaggcacaaggatcccatctcaaggggcagctgccttttctgctccaggtgctggttgtcgggggaggggaccggggcacagtatagccgcatcttccaaattttcaacagaagccgtcgtatgtgaaatat

SEQ ID NO: 10502 - DNA, 2118 bp, Artificial sequence
  DNA replication origin
gcgcggctggcgctgcgctccgccccggctgcattgctgcgctcccgtgcccaagggagccacgcgccgcgtgcgcccggcagccggccgcccggaggcagcgcagtccgctggcatgggccccgggggcgccccgagctggggctccgggctgaggcgctaaagccgccctcccgcccgcggggccccgcgcccggcccgcccgcctgcccgcccgcggccatggccgtccggcccggcctgtggccagcgctcctgggcatagtcctcgccgcttggctccgcggctcgggtgagtcacgccgcgcgcgctctggggaggcttgcgggggaccgtgcgcgcgaacgctcgctgctctgggggtccctgaccagcgctgccagacccggctgggagccccccgaggccaaactttgcgaggcgggacgcggggggctcttcttgctgctgcgcagcttccccgcgcgctctcccggaagcctgggttctgccaagtccaggagcagctgtcagcccgcggggctggcgagtgtagacaccccacgcctccgggtgggggaagtttgctggttgcctgggcccggagcagggctgggggtttggatcaaccccagggagcctgactttgaggattcgaagattagagggttttgagcctatcccagtgcccaggaaatggggggtgcggggaacgtttaagatacctcttcccggtagcatctgccctaaacagccactcacaatctcccagcttggcacctggcctctgcccacgtccagaacacagtgtcctcctctgtccccgccacacacgctctcacacgcacacactcaggcgtggaggcgcatacaccagcccccagtccttgcagccagcacagtcaaagcgccgcggtcccggtggccggggctgtggctcctggcctccctggtgcggggggccagagttgtgtgtggttggtccgccagtttccccttcttccttaaactccatagcctttcttggcccctgcatgccccattggtcaccctaacccactgctaactcagccctcagcccacctcattcccttgggaggggcttggggggaggaagttcccctgcatcctttgtctgctgtccctgagccttcacctaggctgagctgtgggggcctcctgatctctgccccccatgcacttagctgagttgagcgtatgtgtctgtggtggtggggggtgggtgccatttgtgtggtcaagggggcttgaggcttaccctggcaattctcgattcttgctgcccctagaacctgggcggttactccccagcctggccaggccgctgcttataacaggggtgttggaagggagcactggggtttctgagctgccaaaccagattgatcagagatcaatgagtgggagctcaggagccagcctgatgattgaggccgatggctgtttccttaaagggtgtctctgcgcagcgcatcctgcacccaccactgcctgaccgcccgccccatcctgcctcctcagtacccctctctactccatcccaccccttctatctcccttctccatcagcacccctcttcttccccagggcctctccttctaatcctgaccaagctgagaggctgaactgctgttgggtgtgtgtccgtgtccgccacatgtgtgtgttaggggcgtgtgtgcagctccgcagatgagcacccgggtgcaggttgcactgttgtccatgatgaggtggggatattagtgccccacacacaggtggggtgttgcctgacacccagtaggtaccctggaaatgttttctgagttgatgcttttgagggctgtgtggtcatagctgcatgtcgcccacgtgagcacgtgtgaaggctgtgggttgacatgtgtgcccgggtaaccaggggggttggcatggtgtgtgcagcattggcatgtgtgtgccctgatgaacgtgtgtgatgaccagcatgccgcacgtgtgtgacggctgtgtgcagttgcacaggtgagcgtgtacagataagggggcacaggtaccggtgaagcagggtgctgcggcctggagcggggggttgccacagggactcctcaggaggctgtgggggtggggaaac

SEQ ID NO: 10503 - DNA, 924 bp, Artificial sequence
  DNA replication origin
aaatggagaaatgaagaaaaacagcacctggctggcagtgactcagagcaagttgggccagagaacagggtcaccgcgccataaacaatggcaatacctgagggaggcactggaggagaaggaggaggctcaggtcagaggcttctggcagccccagggctgaggactcaatacctcagtctttctttagcccacccaaagcacatcagtatgccaggacccctttgcaggggaggaggtgggaggcctttgggaggggctggactgaagctgcgggtttcacagtgcagggattggcagcagcaaaggggtgtgtcccaggtctggacagagccaacgttggggtgttgggtggggagcatgctggcggggtcagtggcaccacgctttgcaaggcaaaggagctacagtctggaagccggagcttgcctgggggtgcccaccccaccagcagtcagagccagggagggcacccgacctccagatagaccagcccagagctgatgtggggcgatgacgagggaggaaggtattttcctaagggcccaagggggctcaaggtttgggttgacctgcaggcactgggagtcaccgaaagctttctagcagatttccagcctggatgccaggggatgccttagtctgagtggaggaggcccgagggggatgggtggtggtggctgctgcaggtgagggagaaaggagtggaggaagacaaagaagtcgagagacatgagcaatgccacaagtaggcccgagctggaggacttggtgacatattagatgtgaagcgtgagagagaagggagaagcaagggagacgctaaggcttccagccccaggctgggagaataggaggaggggacggcagggcccttgggaggagggggcattgggagaggggtggcctagaacaggaggcccc

SEQ ID NO: 10504 - DNA, 1854 bp, Artificial sequence
  DNA replication origin
cttctggttggaagaagcatcccccctcccccgccattgacacatacaccacccactgcagggacttgggcctgattcagactcattgcttccaatgcacaaggggcaattgtttggaggttctgaagatgaagatttgggctcagcttttcatgcaactgtgtgttgatgatcatctctgactctcaggacatggcacagagtggggcaggagccctgagcagaacgaaattctagtcctctctctgctatttgattgctgtgtgatcttttagacaaatcatttaacctctctgggctgtttgcctctctgtatactaaagggtgtagtatacccaatgatgcctatattggagcctggggtggactctgcactcagcagcaggctcccccaggaactgctcacacctgcccagcacctgccacagacatcagctgccctggcaggggctgcctgcatcgctggagagccaggtggctgctggggcagagccaaaagtggttgggaggcagaactggggactgagtcccaacccctaggccaggaattgagggcccacttctgctggcaaataactcctatgtcagaaacaggccttctcagggcgtccagaaggtcagggtcccagtgcccaaggcccacccccttcctgggcactgatgtcaggtgcgacaggcagcttcagaccccaggggcccagaaccccaggcacatggaggaggtagtgaaatgggtgagttggcaagctctgtggctgggtttggaccagtactagggtgaggccaggcaggtgcctaggcacaaaggtagggccagcccccaagagtgcacgcctcctggccctgcatccagctcctccctgcatggcttcagtttccttgtctgtacaactgactcaaaaagaacccacctcctaggattttgtgcagattagacgggctgaagtgtgtcagtgctggcacatagtgggcactcaatacacgttagcaatgatgatgccatggcagagggcactgttcagtcctctccttcgggaagtgggggagtccttggctgtctttgtggaagacggagcgactggggagccaggagggagggaaaaggcctgaggtgagcttcccattctgggctggggacaggcctggcttcctttctgtttcttgtcatgcaagggcaggtggtccttgactggccctcccagccctgtttgaagtgggagagggggagccacacagagctctgggaagtctgagtggcagctgctcagccccagagtaactggggaaggggaagttttaggtagcattttgatgggggaggggccatgaggcccctgcttctgtgctgtggtgggagcgccaagggccagccgtcaccctgactggtggggcccccagagccgggcctctcccacactgggatatcagagctgtgtccgtctggaaggctcagggtcaccttgagctccaggcaaatatgtagctgagatggggagggggtggggggaaggccgggggaatctgtctagattgacagcacctgaagcgccttggggagggaggtccggaccctgcatcccacctcggccctaggtgtccccagccagggcggcaggtggaactcccgcgccccaggccagcaggtccactggagaggctgtgggggtctacgggagtactccctgaattagactctacccctcctaatcggggcagggacccagtggagccgaggggccagtggtttttcccagctctgcatctttccagcaccgccccccaccccgcccctccccacccccgcccaaacaaatgtgcccgtcactggcgggtagcagcccctcctcagcgcgt

SEQ ID NO: 10505 - DNA, 1264 bp, Artificial sequence
  DNA replication origin
ctgagttcagttccatgtgccattatggtctccttcttcttcgttttccttttttttccttaagccagtgtgagttgggttctaatatttgcaacagatacacttagtgtcccatgtcacttcaagctggggcattgtggcacagtgtggtgagctcccagggctgaggaggctgtgacaattgggccaccacccacagacaggtaacaaagatgtggggggttgggattcaggcttggggcaatgctcatgaggagcagctgagagggctggggagggctggccaggaaaggggcaggtgtggccaggtgggagccctgtcttaaccaactgaaaggggctcccccaacctgtgcggccccagaaggaagggcccagaaccatttggggagcttactgggaaagagtccccttcattataagaaagtggttttgaacagtcccagtcgcctgaagaagtgtggcccgggcaagtccctttggcttaaagctcagggctacgggtgaggaaagccaacaccacaagaggaagttaataatcaacgtctggtggcctggacagccattctcaggctggaagcacactaggtggggtcaggaggcagcatggggatggggaatgggcttcaggctgtgagggagttcacttgaggccacacagagaatcagggtctctggacattctcccatcaagtccataggataccagagaggccctggcagtaaatagccacataggagagcccacaaggtgggtgtggtgtgtggtgggggagatcgggcagagtagtagctgcccaataaggtcccagctctgccacttcctgcggtgtgacctcccctgatatgtgtcctcatctgacgcatggggctaacctcacccacctgtaggttgtcctgaggttttgatcagatgatgtaggcggagcccagattactaccatcaccaagttaataaagaataaaaaacgtaacagtctatagcccccaggggctcctcctcttcccgccacacggtctctcctcttagcagaaggagaatgaatttgggtgtcaggggctggagtggagccccagcctgcagaggacagccgggacctggggcaagtcggtgctcggcctcatctgtaaaacgggaatggcgacacgggtgcatcggaagccccggcctgcaggaggtgctcgggttatggggacgttcccctccctttcgcagcgagatcagcccggggtcttcggaagccccaggcacaagatcgcctga

SEQ ID NO: 10506 - DNA, 1256 bp, Artificial sequence
  DNA replication origin
gagcagagaggtggcagaggccacagccacatttgagagcccagacaggcccaacaaggacagcccacctgctggcctcaggccaacctgtgacttcagagctggtccctgggcaccccctgcctctgccccagagttctgggaaccctgaggccagaacaggagagggactcaggctgggaccttggcatgtggtgggatttggccagacaatgaggggaggagaaggagtggacaggcaatcccagtggcagcctgtgtacagggcagccgggaggcgtgcagccccgctggagcagacggtgcctgtggggtgccagcaagcgacagggctgtgaccacatctctgagctggggagtgacaggcagtgagcagtgtttaaggaagattaatctggcagcccatggaggatggataggagcagggagaggctggaggcaaggagaccagccgggaggctgccgtggtcatccaggcaagaaatgacgaggcgtccctccctgatggcgggcagacagcagggatggagtaagagagatggatgtgggagacgctgcaaagggggagatgttgcatctggatgctgcatgtgggggggcgagggagggggaggaggcaaacatgattcagagctctggagcctggggaagtgatgtcagaaacagaaaatagatggggagctgggttgggggagaagctgaaagagcaagaggctccgcccagggagctccaccctgccaggctatgtgcagagtgtggacagggcgcctgggtcacaagcaacagaaactggctctggtcacgtgaagccaagggagcggaacagcgtttccgggtcaggcaggcactgggggcgaagggcagacttaaagccagccgtggcccaggagagacgtccaacaggtcctggtggtgctggggccatccggtttcctttagggcactgaaagccgtccgggaaaggtggatttacttggttctgtgaagccctacggggtaggtcggtatcagcagggagagacacagggaggctgagggagaccctcccagcaagcagaggctcggaggtctgggcacgatgagagcctccacaggggggctctatgggacagtcagggagaccctggacaggggcaggtggcctcggtgagtctcggtgggaaaagggaaaggacggctggatactgacttggactcctctcagctccaccctatttggtcttgagaagtttcttaccctttgagaactgggctt

SEQ ID NO: 10507 - DNA, 1276 bp, Artificial sequence
  DNA replication origin
tcattaccacggggctggttcattaccacaggcctccaaccctctcacttccacatcactgctcctttttttttttgagatggaatcttgttctgtctcccacactggagtacagtggcgtgatctcggctcactgcaacctccacctctctggttcaagcaattctcccaccttggcctcccgagtagctgggattaaaggggtgtgccaccatgcccagctaatttttgtatttttaatagagatggggttttgccatgttggacaggctagtcacaaaacttttactctttaaagcctgtccctgtcaccttcctctctgggtgccatgagaaccgctctaaggggctccctaggccttcagacagaccacctccgccaggtctcagctgttgccagtcgtcttggctggggaccctctactcccttcccaggagctcccaagcagggtggccctctccagagcagctcacagtgcgctaaagcctgggctggaggatgtgcctccatggggcatgggtgcggtgtgcgcctgcttgtatgctggcatgtgtgtgtgtgttgtgcgtgtgtgtgctggtgtgtgtgtgccagtgcgtgtgtgtgctgctgtgtgctggcatgtgtgtgtgtgtgttgtgcgtgtgtgtgtgctggtgtgtgtgtgccggcgtatgtgtgtgctgctgtgtgctggcatgtgtgtgtgtgggtgttggtgtgtgtgcatgtgcatgtgtcctggtgtgtgtgtgtgtgtgtgcgcgtgctggtgtgtgcatgctggtgtgtgtgtgcgctggcgtgtgtgtgtgtgcgctggcgtgtgcatttgtgtgtgtgtgctggtgtgtgtgggagtgtgtgctggcatgtgtgtgcactggcgcgtgtgtgtgctggcatgtatgtgtgggtgtgctggtgtgtgtgcgctggcgtgtgtgtaggtgtgtgtgtactggcgtgtgtgtgctggcatgtgtgtgtgcgtgtgtgtgcgctggcatgtatgtgctggcatgtgtgtgtgctggcgtgtgtgtgtgcgctggtgtgtgtgtgggtgtatgtgctggcgtgtgtgtatgtgccggcgtgtgtgtgggtgtgtgtgtgctggcctgtgtgtatgtgccggcgtgtgtgtgtgctggtgtgtgtgtgtgtgagatgggaggtgatcaggcctttgcccagttcctgcagcctcgctctgtggtggccacacagaagcccgttcctcatccttctgttgccccaccccccacctcc

SEQ ID NO: 10508 - DNA, 909 bp, Artificial sequence
  DNA replication origin
gtgtgtagggaggctgggggccaacgggggtggcagctacagaaaggaggggaagcagatgagtccccggggccggtggcaatgggaggcaagagacccctgggcaaggagccttggactgaactgagcctgggacggatgccaccttcttccaagacatgaaacgtatccattcaacaaataattattgagtgcctgctgtgtgccaggaactgttccgggcaccgggatccagcgcaagcaagacaacacagtccccgtctctgaagcttgctttcaagttggggaaacaaagcaaaacaaaacccaagtgcagcagagaaggtagaaggggcggactaagtgcagcagagaaggtagaaggggcagactttcagaaaggggcgggtgagagggctctcgagggagcggggctcaggcaggtgccatctgagcagcgccctgaatgccaaggccaggctacagagtgtgcttggaaaagggaacaggggaggccctaaggcaggaggcagctgggcttgtttgaggacagcagggaggccagtgtggcctgggcagagtgagtgagggcgagacgtgtttggtcagacaggaagcaggggctggaccccaggggcctttacagtcgagtcaggagttgggatttcattgccagggccacaggaagccttgggggtcatgtgcaggggtgtggtgtgctctccctgcgtgaggagtgggaggggaggggtggcactgggcagaggggaggtggggaggctgctgtgggcatccagtggtgtggactgtggtggacctgctccacctggtccaccagggaaatgtcagcaaagttgtcgcctcctcctggaggcctttctggatccacactttttgtcactcaaagcacctgctccatcccctgagcct

SEQ ID NO: 10509 - DNA, 1119 bp, Artificial sequence
  DNA replication origin
gggagtcctgggtgacacctgcttgtcccagctgcactgtggcttgagcctcacggcaatggcctgtgtgtcccgcacgggctgtgcctcgacagggtatgtgtgctgtgtctcaggatggctgaggccttggtgggagggggctcaggactacccctgaggtgtcattatgcgtggggtgctccacaaagcaccaagggagaggaaactgaaacaggctctaatgagtgaggaggaggaggaaaggtaggagaggagtgggggaggggaggaggagggggaggaggaggagggggaggaggggaaggagggaagaagggggtaaagaaggaggaggggagggggaggaggggagggaggaggagagggagggggaaaagggggaggagggggaggaggagaagctgttgtttgctcctgcctctctctctgccagtcctttctgggggagttgcggaacccagacaagggctgtctgcccacgtccccagtgccacttaaggccagggctgggggtggggaatgtggtgtctcatggaagaggtgcttcctgggtctgctcgctgcccctagaacctctctctctgtgcccccagctgagtctggctggccccctctgctcagtgtctccagacctgctgcttccatcagccccaactctggcccctgaatcacatatagctctggccatgtcgctctgcagcttgagatcccctaagacagtggcatcagtttggtcccctgcacaccctcaccctcactgctgaccccaccaccggcatgccggcgtctgcctccaggctttcctgggctgtgtcccctgcctgggatgcacttcccccttctgcactccctaaccggttcttatgcctctctcagttaacacatcacctcccctgaggggcctctctccctgctgagaggtcaccccgctgtctgcctctctgtgggaacttgggctccgagggtggcgggctgtccccagcacgggagtgggtgctcacaggtgtgagtgaatgcctgactgatcgaatgaaccgacgcacaaagaaaacaatcactgaatgtgaggtctgggagctccttggtcatcagggaccccctctctccccctccttc

SEQ ID NO: 10510 - DNA, 3233 bp, Artificial sequence
  DNA replication origin
cttgagatcccagctgagtctgctgcctggaggatgcaggaggggaagagctacttccccagagcggataacctggtgcctggctgctaggttgaacctgctgcctgctcttctgggacaagggcagcttgggctgggggtgaactcctgggatccccagagcacagggtctgcctcctgtgtggttccaggtcagtgcctagaccaggagcaggggtttgggggcccttctctctgtctgcctccccaaggcctggggcaggtctggggagggggtgattgactgcttggaggaagctatattgattttagaagggttttgcataaatggaagaaatgtccatcagaaaggaattgacacagataattaggtttttaattgaaagaatgggggagggtatgttctagaggaaaaaaaaaaatccaacagagatctttaattgttagttatggccttgtaattaacagccctcacaagcccggcattcccacaggacctgtatgtgcacttgggggaccaggcagatgggaagctgtggtgttgggcgagtgtgggcagatgggaagctgtggtgttggtgagtgtgggcagatgggaagctgtggtgttgggtgagtgtgggcagatgggaagctgtggtgtggggtgagtgtgggcagatgtgaagctgtggtgttggtgagtgtgggcagatgggaagctgtggtgttgggtgagtgtgggcagatgggaaactgtggtgttggggcaggtgtgggcagatgggaagctgtggtgttgggtgagtgtgggcagatgggaagctgtggtgttgggtgagtgtgggcagatgggaagctgtggtgttggggcaggtgtgggcagatgggaagctgtggtgttggtgagtgtgggcagatgggaagctgtggtgttggggcgagtgtgggcagatgggaagctgtggtgttggggcaggtgtgggcagatgggaagctgtggtgttggtgagtgtgggcagatgtgaagctgtggtgtggggtgagtgtgggcagatgggaagctgtggtgtggggtgagtgtgggcagatgtgaagctgtggtgttggtgagtgtgggcagatgggaagctgtggtgttggtgagcgtggacagatgggaagctgtggtgttggggcgagtgtgggcagatgggaagctgtggtgttgggcgagtgtgggcagatgggaagctgtggtgttggggcgagtgtgggcagatgggaagctgtggtgttgggcgagtgtgggcagatgggaagctgtggtgttgggcgagtgtgggcagatgggaagctgtggtgttggggcgagtgtgggcagatgggaagctgtggtgttggtgagtgtgggcagatgtgaagctgtggtgttggtgagcgtggacagatgggaagctgtggtgttggtgagtgtgggcagatgtgaagctgtggtgttgggcgagtgtgggcagatgggaagctgtggtgttggggcaggtgtgggcagatgtgaagctgtggtgttggtgagtgtgggcagatgggaagctgtggtgtggggcgagtgtgggcagatgggaagctgtggtgtggggcgagtgtgggcagatgtgaggctgtggtgtggggtgagtgtgggcagatgggaagctgtggtgtggggtgagtgtgggcagatgtgaagctgtggtgttggtgagtgtgggcagatgggaagctgtggtgttggtgagtgtggacagatgggaagctgtggtgctggggcgagtgtgggcagatgggaagctgtggtgttggggcgagtgtgggcagatgggaagctgtggtgttggggcgagtgtgggcagatgggaagctgtggtgttgggcgagtgtgggcagatgggaagctgtggtgttggggcgagtgtgggcagatgggaagctgtggtgttggtgagtgtgggcagatgtgaagctgtggtgttgggcgagtgtgggcagatgggaagctgtggtgttggggcaggtgtgggcagatgtgaagctgtggtgttggtgagtgtgggcagatgggaagctgtggtgtggggcgagtgtgggcagatgggaagctgtggtgtggggcgagtgtgggcagatgggaagctgtggtgttggggcaggtgtgggcagatgggaagctgtggtgttggtgagtgtgggcagatgtgaagctgtggtgttggtgagcgtgggcagatgggaagctgtggtgttggggcgagtgtgggcagatgggaagctgtggtgttggtgagcgtgggcagatgggaagctgtggtgtggggcgagtgtgggcagatgggaagctgtggtgtggggcgagtgtgggcagatgggaagctgtggtgtggggcgagtgtgggcagatgggaagctgtggtgtggggcgagtgtgggcagatgggaagctgtggtgttggggcaggtgtgggcagatgggaagctgtggtgttggtgagtgtgggcagatgtgaagctgtggtgttggtgagcgtgggcagatgggaagctgtggtgttggggcgagtgtgggcagatgggaagctgtggtgttggtgagcgtgggcagatgggaagctgtggtgtggggcgagtgtgggcagatgggaagctgtggtgtggggcgagtgtgggcagatgggaagctgtggtgtggggcgagtgtgggcagatgggaagctgtggtgtggggcgagtgtgggcagatgggaagctgtggtgtggggcgagcgtgggcagatgggaagctgtggtgttgggcgagtgtgggcagatgggaagctgtggtgtggggtgagcgtgggcagatgggaagctgtggtgtggggtgagcgtgggcagatgggaagctgtggtgtggggtgagcgtgggcagatgtgaagctgtggtgttggtgagtgtgggcagatgtgaagctgtggtgttgggtaagtgtgggcaatgggtgtgcatgaatcaaggttcaaatctgtgcccgtctcaggaggcatgggaggtggtggggcgcgcctgggcccatgtgcaggtatgctaaggatgagggggatctcagtgggtcctgagcctggagaggctacagcctttggcaggagaatagctccctcagcccccacctccccagggctgggcaaggccaatccaggcaaacagaagaggacctcagggcagagaggactcactgtgtacacagaggtcactggtacag

SEQ ID NO: 10511 - DNA, 1376 bp, Artificial sequence
  DNA replication origin
cgcggtcccagctgtagtgttggtgacaatgccagacatcctcgcaggaaggctctccatggggaaggtacacgcacttacatcctcattcatcaactcctaatgctgggtactcaggacggcgaaggaaaaccacagaccccactctcatgaagttcttagcccagcaggggagaaggacaagtcaaccacagcacaggatgcgggggaagtggcagccaccccccggcctggggagcgaagagcaagggctgccgggccccactgttcgcctgcgtctctgtaagagctgacagatgccgtctcacctcgtcatcccaacagccccatgaggggttcgttatcatccgtgtggacgtgaggcacagacggcaagagctgtcaggcggggacccaaaagagaagtcccagctgagctggtgggaggggcagggggtcggtgcatgcagagggcagcaccgtgtgtcggggatgttgagtccatggtggctgccgtgtgcgggacgatgtgtgtgagggaagaggctgaagcagctggcctgcaggggacaggtcttctctgtggtatcatgtgggctttgcagggggcagaggggagcccagaagggattcgagcacgagagggtcatgatcaactctggcttcatttggtgaagttttacagcaaggaaccaggtaaggggtttggtggcccgtgtcaggagaggcagcaagggaggacaagagcaggaggtggcaggagctattgaggagggactggcgtgggactgaagctggcggggggcaagagaggacgagcagcaggtcaaggtgaccccaagtttccggcttgagcaactagacgatccgtgaactgggggaagccaggaatggggaggctctgggggagggtgggagacggttctgttttaggcaccaggagtctgaggtgatgtgagacatccagatggagctggccaggaggcagctgggtgtacagttctgtcgcccgggagaactgcaggctaaggatgggggagtgggagttatctgcacagacacggcgattaaagccatggagtgggcgaggccgctcggggagaagggcactgggagggagctcggaggcacacctacatttatggaacaggcagctggagaggggcaagcaaaccaggagcgcatggggtcatctaagctgagggacttgggaatttcgggtgggagtggccagccatgccagaggctgcagccacttcttgcaaggcagccatggaaagagttcttcagagggtttcggtgctggggtgggtggaagccaggatgcagtggggactccaggatggcctctgcccaggcccgtgctcatctgtttgcccttggttgtctccctgctc

SEQ ID NO: 10512 - DNA, 2137 bp, Artificial sequence
  DNA replication origin
gctgacccccccacctccctcccggacggggcggctggccgggcggggggccgacacccccacctccctcccggacggggcggctggccgggcggggggccgatccccccacctccctcccggacggggcggctggccgggcagaggggctcctcacttcccagtaggggcggccgggcagaggcgcccctcacctcccagacggggcggctggccgggcggagggctgacccccccacctccctcccggacggggcggctggccgggcagaggggctcctcacttcccagtaggggcggccgggcagaggcgcccctcacctcccggaccgggcggctggccgggcggggggctgacccccccacctccctcccggatggcacggctggccgggcggggggctgaccccccacctccctcccggatggggcggctggccgggcggggggctgaccccccctcacctccctcccggacggggtggctgccgggcggagatgctcctcacttcccagatggggtggctgctgggcggagaggctcctcacttctcagacggggcagctgccgggcgggggggctcctcacttctcagacggggtggttgccaggcagagggtctcctcacttctcagacggggcggccgggcagagacgctcctcacctcccagacggggtctcggccgggcagaggcgctcctcacatcccagatggggcggtggggcagaggcgctccccacatctcagacgatgggcggccgggcagagacgctcctcacttcctagatgtgatggcggctgggaagaggcgctcctcacttcctagatgggatggcggccgggcggagacgctcctcacttcccagactgggcagccgagcagaggggctcctcacatcccagacgatgggcggccaggcagagacactcctcacttcccagacggggtggcggccgggcagaggctgcaatctcggcactttgggaggccaaggcaggcggctgggaggtggaggttgtagtgagccgagatcacgccactgcactccagcctgggcaccattgagcactgagtgaacgagactccgtctgcaatcccggcacctcgggaggccgaggttggcggatcactcgcggttaggggctggagaccggcccggccaacacagcgaaaccccgtctccaccaaaaccagtcaggcgtggcggcgcgtgcctgcaatcgcaggcactcggcaggctgaggcaggagaatcaggcagggaggttgcagtgagccgagatggcagcagtacagtccagcttcggctccgcatgagagggagaccgtggggagacggagacggagacggagacggagacggagacggagggggagggggagggggagagggagagagggctgaatttttttttttttttaagattcaatgcaaaccatcccttccttattaacatattatttctccaggaagaagatgtcttgattaggccatagcttccttaaatttttatttctgccatgctttcatgttcaccttgattacatttgggtagtctaaattttatttgcttattttgctatcctgtgttcatattctggaagaacctcactttatgttcagattactgccattgaggtataaatttctaaattaaaataatgtattgaaatgaagacgttcttgggattctacattgaaatgattaggaagaggatcatctgagtaagcaatataatagtttttagcgtgtggattttagagtcaggcaagtctcagcgctacgattttgaccaactatatgatttagggcaaattatttaacctctcgaagtttcacttatttttaaaataatttaatggtttttgcttcttaagttgcttgtgagaattaaaggagataaggaatgtaaagtgattagcacaggcctggcactgaatagaagcacaataattttgtttgtttgagacagagttttcactcttgtcatccaggctggagtgcaatagcacgatcttggctcactgcaacctctaccttttgggttcaagcgattctcctgtctcagcctcccgagtagctggcattagaggcgtgagccaccatgcccggctaattttgtatttttagta

SEQ ID NO: 10513 - DNA, 904 bp, Artificial sequence
  DNA replication origin
cgtccgggagggaggtggggggggtcagcccccctgcccggccagccgccccgtccgggaggtgaggggcgcctctgcccggccgcccctactgggaagtgaggagcccctctgcccggccagccgccccgtccgcgagggaggtgggggggtcagccccccgcccggccagccgccccgtccgggagggaggtggggggggtcagccccgctgcccggccagccgccccgtccgggaggtgaggggcgcctctgcccggccgcccctactgggaagtgaggagcccctctgcctggccagccgccccgtccgggagggaggtggggggtcagccccccgaccggccagccgccccgtccgggagggaggtggggggggtcagccccccgcccggccagccgccccgcccaggaggtgaggggcgcctctgcccggccgcccctactgggaagtgaggagcccctctgcccggccaccaccccgtctgggaggtgtgcccaacagctcattgagaacgggccaggatgacaatggcggctttgtggaatagaaaggcgggaaaggtggggaaaagattgagaaatcggatggttgccgtgtctgtgtagaaagaagtagacatgggagacttttcattttgttctgcactaagaaaaattcctctgccttgggatcctgttgatctgtgaccttacccccaaccctgtgctctctgaaacatgtgctgtgtccactcagggttaaatggattaagggcggtgcaagatgtgctttgttaaacagatgcttgaaggcagcatgctcgttaagagtcatcaccaatccctaatctcaagtaatcagggacacaaacactgcggaaggccgcagggtcctctgcctaggaaaaccagagacctttgt

SEQ ID NO: 10514 - DNA, 1582 bp, Artificial sequence
  DNA replication origin
gcctggcctcaattattttctgatttatctttgggaggagaccattctttcgcttaagaagaaaaagaaaaaaacaattttaagtctctttaatgggccttacagttatgcaaagatatgccactatccctttgggagtgagggtggaaagaactagacttgcctgcgtaacaatgagaaaggaagttgcttcttaagacagggtctacactagctagaggggacaaccaggacctgagcctcagacagggtctcgctccatagcctgttgcccaggctacagtgcagtggagcgatcacggctcactgctgcctcgacttcctgggctcaagcaatcctctggcctcagcctcccaagtagctgggaccacaggtgcacccagcccatttcccttcctctcaaggtgccttaagagaaggagaaggcttgagattcaggtgagggatgggcagagatcagaggctgcctggcctcctggtttggccacagtctagatgctcaggagagaagtgcttacaggtgaggcaaacatgagccaggtgggcacggagctatctgggagcacctactgtatgccagacacttgaactctaatggtgaggtctgaggacacagttcctctactgaaaaatagagacagggcaactatgttgccagggctggcctcacactcctgaattcaagctgtcctcctacctcagtctcctagtaactagaactacaggcacccgtcattgtgcccggccattccacagctatttacataattaactgttcagttacaattctggcaagcgtgctgaagaaataacaggtcctaaataattacagctagtattacaaagcaagcgctgcatgccaggcttacacatactgctaacatgtctactttttgcaacaacctcttgtgggtgagactatcatttgcctgttttactgaaaggacagtgaagactgaggccttgtgtgatggtgctgagagctgggcctatgacgtccagccctgtagtctgtgctctgaaccacttcaccctgtttctttctccatcctcacagtagagacgtcatctaagaggagcttgcaagtccagagggcttcctgaaggaagtgagctgagaataatatgaaattaaccagaccaagggccattccaggaagagagaatggtacgtgaaactgcccaggagtagcagggtgggagccaggaggcgtgggtcatggcaatctatgtataaagagctatgggaatctataggaaaatttaagggagtggctgacacagtcagatttgtgttgtaagtatcactccgcaggttgcgcagggaacaaatgagggagcagaaggaaggggttctcctatccgctgcacggcactgcgcagaagacaggggagccaggcattccctgaagggtgaaaagcaaggagtagagctgggtagtagactagaatttaggagcctggcctggggcctgggtggggcgaaagaggcggagcctgaatggggtgtgtataggggggttgcgtgtaggggtgtgtgtataggctggggcggggtcccgggagtgggctgactgggtc

SEQ ID NO: 10515 - DNA, 1588 bp, Artificial sequence
  DNA replication origin
gccaggcattccctgaagggtgaaaagcaaggagtagagctgggtagtagactagaatttaggagcctggcctggggcctgggtggggcgaaagaggcggagcctgaatggggtgtgtataggggggttgcgtgtaggggtgtgtgtataggctggggcggggtcccgggagtgggctgactgggtcgggggcggggctctccaggtgggcggggatcttggccacccctggccacacctctctccggctcgagctggtctaggcggggcgggcccgagggggtgtggcaggaggtgggcgggcccgggtggggggggggggggcgtggaaggaggggcgggcccgagcaggagggggcgggcccgaggggcggggtgggacaggaggtgggccgctcgcggccacgccgccgtcgcgggtacattcctcgctcccggccgaggagcgctcgggctgtctgcggaccctgccgcgtgcaggggtcgcggccggctggagctgggagtgaggcggcggaggagccaggtgaggaggagccaggtgagcaggaccctgtgctgggcgcggagtcacgcaggctcgaggtgagccggaacccttgtgggcccgggctgcgctcccagccgccagggggcgagaggcggcggggctacggggactgcccctcccggcgcaggggacctgggcgtccgccgggcggcagggggtggagggggcggtaaatcagtaacccgcagtgcacacagggccttttgtcccgctccgtccaaagagcaccccggccgcggagctggttactcattgcccaccgaggcgggggcaggctggccctgtgcagctaccctcgggacccattgattcgcacctccccccaggctggcccggcaagggtgggggaggacaagcgcgcttgtccctgcggctgtcttcgcgccggcggcagagatgagggacctgaggccccgaaaagttcagtcacttagtgcccgggggcctccagcgcgagtgcgggaggctgaaggagaacccaggactgtctgatgcctaaggcaggccctccattcccacgtggggggtggtcggtcagcggtcagcagccatgggtgactcgactaaggactctgatatcagggcagcctggggtaggaataaactccccgggcctccccacccactcccagcccaagctgtgtacccaaagagctgccctccctgccaagccgagcttggtagggagttttaccaaggaggatccgactggattcgagagttgaggtgggccagagacagcagtatctgagtcaggtagagaagagcaatgaggggcacagagggatgggcaagagagcacatgtgcccagttttgaaagccaatggcttcagcgctcctgaaggggcagacggtgtgaccaaagagataggcagcggcagagagggagccctaggatgttgagctggatcctgctgggcacaggtagccattaagggcttgcaagctggggggcatgacatggcagacttgcaggtttttttgtttgtttttttattttattttatttttttattttgttttttttgagacggagt

SEQ ID NO: 10516 - DNA, 1315 bp, Artificial sequence
  DNA replication origin
cagcgctcctgaaggggcagacggtgtgaccaaagagataggcagcggcagagagggagccctaggatgttgagctggatcctgctgggcacaggtagccattaagggcttgcaagctggggggcatgacatggcagacttgcaggtttttttgtttgtttttttattttattttatttttttattttgttttttttgagacggagtctcactctgtcgcccaggctggagtgcagtggcgcgatctcggctcactgcaagctccgcctcccgggttcgcgccattctcctgcctcagcctcccgagtagctgggactacaggcgcccgccaccgcgcccggctaattttttgtatttttagtagagacggggtttcaccgtgttagccaggatgttctcgatctcctgacctcgtgatccgcccacctcggcctcccaaagtgctgggattacaggtgtgaaccatcgcgcccagccgacttgtagttttttaaaactctgctggaagatgaaggttgaagagccgagggagaggatgtttccagaggcccatgcaagagatggccatgacctgccttgagaaggggcaggggaagccagatggactggaagtggagtggcagtgaccaaggaggaggaggtgtgataggcttcccacgcagggtagatccagagacaccagtgccacccataggcccctaggactgcagtggtcaccgattcctttgtcccagctgagactcagttctgagtgttctattttggggaacagaggcgtccttggtagcatttggaagaggatagccagctggggtgtgtgtacatcacagcctgacagtaacagcatccgaaccagaggtgactggctaagggcagacccagggcaacaggttaaccgttctagggccgggcacagggaggagaacattccaacactctgcgtgccgacgcacgttctctcttttatcctcaaaacagtcctatgaggatagtaagccagagagagacagagacaaggaattacaagttggtgagagtcaggatttgaacttggctctggcagatggaaaattagggtctgtattctttacaaaaccgtgtgtgcctcagatggagttggtgcataacaagcagaggtatccagggtcgcggtcctgcttgccacggaaggggccgccttgtcagttgtgaccacccagccctggaaatgtcagtaatgctgtaaggagtggggatcggatcagatgccatccagatgctgaagtttgaccttgtgtcatttttcactttcttttttggctcttctgcaatcaa

SEQ ID NO: 10517 - DNA, 1214 bp, Artificial sequence
  DNA replication origin
gcgagaggtggggcggagggtcacagggagcctcaggccttcaggaggaaggggaggaccgggggttctctgggtggggaggagtttggtggggagtttgatgagggataggagggtcatcagtagaagccaggccaggacactccactaggctgaggaggaggaagaggaggaggaggaagaggagcaggaggaggaggaggaagagaaggaggaggaagagaaggaggaggaagaggagcaggaggagaaggaggaagaggaggaggaggaagaggaggaggaggaagaggaggaggaggaagagaaggaggaggaagaggagcaggaggagaaggaggaagaggaggaggaggaagaggaggaggaggaagaggaggaggaagaggaggaggaggaagaggaggaggaggaagaggaagaggaggaggaggacgaggagttgttgttagtgttgtccttctggccgggacacaccctgaggccatggtcagggcagaggaggaggaggactggaaagtggggtcgagggcagggtgaggcctcacagctctggggggcagtgtgggggtcggtccatccgatgtccctcccgcagcagcgagaacagctcctccaccgggatgccaggatacggggagcccccgagggtgaagatctcccatagcaggatcccaaaagaccacctggaggtagggccagggctcagtgtggctcagcgccctcccgacgaccggggctaggacgggggaccccacagacatgacccaccacagctgttggggaatgggctcctcctggagtctgggcccactcgggtcccagaccaaatctgaaggagccctcgagcgcatgactcctggggccacgtgactttgggcagtgccttgccctttttgtggggtaggacagtgaccgccggcaggactcacacgtcactctggtgtgtgtacacccggtcaaacaaggcctcgggcgccatccacttcacaggcaggcggccctggaggggagagagggcctcagtgcagagtcccacaggtcctcgtgcctgccaccccgggcccagtgcccctccacccccatccagttctgccccatctccctcacgttgctggttttcttatagtagtcaatgtggtggacgccgcgggccagcccaaagtcagcaatcttcatcacattgtcctcagtcaccagcacattgcgggcag

SEQ ID NO: 10518 - DNA, 1792 bp, Artificial sequence
  DNA replication origin
aatcccgatggcctccatgaaggctgtcctggttgggcagtcctgtcccagcctgaggcctgtaaggaaaaggacaggagagtgccaagtgctgggtcagacaccatgcctgggccccccatggcccactcaaggctcaggggctggggagtagcagtacgtgccaggatggggccagggaaggaggttccaggctcagagccttgagaagctgctcactctgaggagctctgagtacagggctgtgacggctcctcagtggaagaccaggcaggcagggacagctgcagcccaggcgggcggcaaccagctgctgcccgggagactggccagggcggggcgggcatggcctccacaagcccccagcctgagccggcagagcgtgggagcgggccgcggcctaaggctggctctcagattttcatgctgtgttaacggtcagcttggttaatgctgagcagatgggggaggggggctgccagctcccttggggacagctgcagggcacacatgcacacacacacatgtgcagagggtacaggagtcccaccgtgtatagtgcaatgcggactcagcccattaatactcattcacactgtcgcagacacaagatggggctggtgggacaggcggacccagataggcacacactggctcctggggcagtggaggtggcggagcccatggcctggtccagtgccctcagtccgtgtcctgtaggcagaactctgctggagggatccctccacctcaccccactccatgttgctcagggaagacccaggcacacagagctttatttcaaaaaaataatttataaaacgccatttgctcctgttttcggcaggcttccagcttctctgggctcaggggccaatgctcccgtcaagacgctggggcagcagcagcagggggaggtgtggggaaagggggttcagaggcccagaacctcctgctggtattgggaggcaggaggtttagcatagcagctctccagccaggctcagccaaacccgggatggggactaagcgccaaggtccaagaagccgagcagaaccctgacatttgggccatcaggacacaggcacggcagctccaagggcaagggcacggcccttggacacggcacagcaactctgggccaggggccccatgctatcaaggtcgagcactgtgtcaggctgtggctgagccccaaggcccaaggccaccagcctatgtgcctgcacagccttgagccttgctcatgtctgcaccccagacccgaaggggaaggagctggatcccaatggcagggggtcgtggctgaagacagaatcgctggaggagcaggtgctgctggcgtccccaccagagggggaatagggtccgaaggtcaggcggaggtcgaggtactgtggggaacggagctggtcagcctctgcagcgcccgggatgggacggggcgcatgtccacgcggtcaggccagatgaggcctggaggggagcaggcagagggaggtggtgggtgggaggggctgtacctcctcagagacggccagcaggaccttgtccagcgcctccaccagctgcttgaaggtaggcctctgggagggcgctgcgtgccagcactcacgcatcagcccgtacctgcgagaggtggggcggagggtcacagggagcctcaggccttcaggaggaaggggaggaccgggggttctctgggtggggaggagtttggtggggagtttgatgagggataggagggtcatcagtagaagccaggccaggacactccactaggctgaggag

SEQ ID NO: 10519 - DNA, 1134 bp, Artificial sequence
  DNA replication origin
actttgggaggccgaggtaggcggatcacaaggtcaggagtccgagaccagcctggccaacatggtgaaacccccgtctctacttaaaaaatacaaaaattagccgggcatggtggcgtgcgcctgtaatcccagctactcgggatgctgaggcaggagaatcgcttgaaaccgggaggcgcaggttgcagtgagccgatttcgcgccactgcactccagcctgagcgacagagcgagacttcaactgaaaaaaatatgtctgtatataaagatatagatatttactataaataagcacacagcttaatacatatttattgaatgaatggcttatgttgagcctgagttgtctgtgagattcccaggtagtgaatttggggctgtgggacaaatctaggctagattgaggccccagcattgctggcatctagggaatgcacgtgctgagtggatgacgatccctcgtggaaactgggtgaataataagcaaatgggcctgggatggggcactgcgacacctttgtttgtcaggcagggaaaaggggagacatgcccatgacatggaggcatagagaagggtttgtgagaattaggagggatcaggtaggagtgggatggcctggaaacctggttggttcaagtagggtaaagagtcaaatgcttctcagagtaaagcagcaaagatggtgaaacgtcaccggatttggctacagcggcactactggtgatctgaagccagggtgcagtgggatcaggaggaagatgaggaagaggggacaggacagtggagggaaggagaagcagagcctggttgcagggtagttgacatttttctcggccgtttgtgggctgccgggaaggagcaagaagacaggaaagggttggcgctccagaggcgagagaggagaaagggacacaaaaacccatggaagcaatagggcgggactcaaagcccacgaggagggccggcccagttgttctctgtctcgttttctaagcgctgcggcagggctggtggtgaattcagataaacaggcacaaagggccagtggggtcgctagcaagatctgggacacgctgaaagttaataggaattggctgccctttgccggcgcaacccaacgtacaaagat

SEQ ID NO: 10520 - DNA, 1092 bp, Artificial sequence
  DNA replication origin
gaggctcaggactgttaagtgactagttcaaggcaggtctcaggccctcaggatggttagtggcaaagtaaaggactgggaggagcattgatgaattggggcaattggcagaggagtaactgtcagtcaaaatgattggctcaaattattaggtgtgaagaaggaaccagtcagagcttgcctgttgagtcgaattgcccagatgggattagcagggtgagtgaccctagcagaacaaagagctggcccttgtaggtatagactcgacttttctctggttggtcccaacacatagacaactaccaacctgactttgcacctgagaatcttcagggtacctcagactcttcaacagaaggagcctccctgaggtcacagccctctcatcagtcccgttccagtgggcactttccctctaacaaagcccacttgctgtcttggcagggtctgcatccggcacttgcagacatgtgctaagggcctgttgacttgggagcctccatcactggactgtgggccttggagagcaaaagggtaagagcatctcgagctccacgcctgctgggccagtcgctggctgaaggcaggggaaggatggagtttagctggccagcactaatgtcacacagggcaacgccaaaaatggcctttctcccaggtgggctcaaagttaacagaaggcagtgagtaaacagtccactggggcaataactatgcacatttactaagccatgggaagaatagtagtcacgtggccctcgagggcggtgccctcagcttgagatggagttaactccaaatctaatcacagaaggctttctggaggaggcggaatttttatggcggccggatccggctttctctgaacagcgagaaggcgcttagcgccctagggaccaggtaactcctgaggtgagcttcttggtggggatcaagcccagggggcgacggagtccgggctgggggaagggcccgaggggctggagtcgcaagttcaggcccagcttgggctccctgtcccgcccttccgctgtcttgggggattggacgccacgcggtcgtgctagattcggtgctgcgggcccggtgcag

SEQ ID NO: 10521 - DNA, 1769 bp, Artificial sequence
  DNA replication origin
ctcccggcgcggcccgtgccccgccggccgcctgcgaacacctcggcctccgcctcccctcaggtagcaggctgcggggcgcggggccggctgccctcccgcagcaaactttgcttgctgctgaatattgatgagagcgatcggctcggctgggaggtgctgccgcggctgcgggaaggagcgcggcccgggcaggcggcggcggcgtcggcagcagccatgtttttcgagctgtagcagctgctgctaccctgactgggcttcgctggccgcctcggtttctccctctgccgggtccaggcctcttcgccctgcagctgcggatccagcaggcctgcattcaggaaggcgagctctggggtgcagccgcctcggccggctcgcctgcggcctgcgcaccgccgctgcaaaggctccggcgctggctgggcgcagggtgcagcgctattgtgaccgctgcgccctagcgagccaggaaggggggggtacctttttgtgcagggtccaggagcccccctcggaccccgcagccttttgcttttgagagatccagctgctcgacccctggcgagggagggggaggactagtcctgtttgagaattgggaattttgacgggcagaggggttttaattttagttcatcccaagtgtccaccagtctacagaggaggaaaaagagacgggctgtttctatgtagcaggatcggcccagcttcgggaaaatggagttttcagaggctcatcgaggccattttttcatctccagtcgggggaactttttctgcccatggaagtgcagcagaaaggcatagaggccactaggccttgaagtggctgccattttaaagagtcgagtcagatggcctattaactcagattaattgctgtgcttttggattccaggttgatgccggcccaggatggatcagacctgtgaactacccagaagaaattgtctgctgcccttttccaatccagtgaatttagatgcccctgaagacaaggacagccctttcggtaatggtcaatccaatttttctgagccacttaatgggtgtactatgcagttatcgactgtcagtggaacatcccaaaatgcttatggacaagattctccatcttgttacattccactgcggagactacaggatttggcctccatgatcaatgtagagtatttaaatgggtctgctgatggatcagaatcctttcaagaccctgaaaaaagtgattcaagagctcagacgccaattgtttgcacttccttgagtcctggtggtcctacagcacttgctatgaaacaggaaccctcttgtaataactcccctgaactccaggtaaaagtaacaaagactatcaagaatggctttctgcactttgagaattttacttgtgtggacgatgcagatgtagattctgaaatggacccagaacagccagtcacagaggatgagagtatagaggagatctttgaggaaactcagaccaatgccacctgcaattatgagactaaatcagagaatggtgtaaaagtggccatgggaagtgaacaagacagcacaccagagagtagacacggtgcagtcaaatcgccattcttgccattagctcctcagactgaaacacagaaaaataagcaaagaaatgaagtggacggcagcaatgaaaaagcagcccttctcccagcccccttttcactaggagacacaaacattacaatagaagagcaattaaactcaataaatttatcttttcaggatgatccaga

SEQ ID NO: 10522 - DNA, 1229 bp, Artificial sequence
  DNA replication origin
ggaaatacttcaccatcgtcccggccgaagcgggctcagcacccgcgcagcatcaggggtgcggagcctgggaggcacgcgagggccgggccgggccggggctcggcgcacacccgccgccaggctcgtagctcagtcaccaccgcaccgcgcccaagcagctgccgccgccgccgccgccgccatgagttgtccggccgcgcgccacttccggcgcagccacacagtagccaccgcttccggcgcccgcgccacgtgaccttgcggccccgccccctcgccctctagccccctcccgcgggagtcgcggcgctgcgggtaggagccgggttgcgggagaccccaggttcggttgggattcccagccagaacggagcttaagccgggcaggcgagcgaatgacggagtagcgagctgcacggcggcgtgctgcgctgttgaggacgctgtcccgcgcgctcccaggccgccccgaggcttggggtcttcgaaggataatcggcgcccggggccgaacagcgggggcacacggggcgctgccgaagtgcaaggccacggccagagctcgagcccgacgcgctgtctggagtcgtaggttggcgccgtttggggtcggggtctgaggcttgggcgctgcctgggccgagcggagatcggggtttgcctcccgtccccgctcaggaccctgacgtggctgaagcggccccgggagcatgagcgggcagcgcgtggacgtcaaggtggtgatgctgggcaaggagtacgtgggcaagactagcctggtggagcgctacgtgcacgaccgctttctggtggggccttatcagaacgtgagtgcatccggaggggccaggcacggtgggcgggggagtggggggccggtaatctgcacctatggccccgatctcttccctctcgttgcagaccatcggggccgccttcgtggccaaggtgatgtcggtcggagaccggactgtgacattaggtatttgggtaagtcccccggccatctattcttgggagactcattcctgaggaggtgtaggtcctgcctattactggttgatttgtggcctcacagacccatttctcatagacccgtttccttatctggaaaatagcggggtctggagaacgtggccttaagtttgactcaggccttactctttaggacacagcaggctctgagcgctatgaggccatgagtagaatctactatcggggtgcca

SEQ ID NO: 10523 - DNA, 1731 bp, Artificial sequence
  DNA replication origin
accccaagcctcggggcggcctgggagcgcgcgggacagcgtcctcaacagcgcagcacgccgccgtgcagctcgctactccgtcattcgctcgcctgcccggcttaagctccgttctggctgggaatcccaaccgaacctggggtctcccgcaacccggctcctacccgcagcgccgcgactcccgcgggagggggctagagggcgagggggcggggccgcaaggtcacgtggcgcgggcgccggaagcggtggctactgtgtggctgcgccggaagtggcgcgcggccggacaactcatggcggcggcggcggcggcggcagctgcttgggcgcggtgcggtggtgactgagctacgagcctggcggcgggtgtgcgccgagccccggcccggcccggccctcgcgtgcctcccaggctccgcacccctgatgctgcgcgggtgctgagcccgcttcggccgggacgatggtgaagtatttcctgggccagagcgtgctccggagttcctgggaccaagtgttcgccgccttctggcagcggtacccgaatccctataggtacgtggtatttggaagagcaaaaccgcgccatctcgctatctggagatcgaattatgggtaacccccaagtactgggaccaggaaggactcgatatcgaatcctaggtagaccttatcggggaagcggccaggccaggcctgcaaggtcctgaagggaggttgggcctgggtggtggtttacttgagaccttagtgtaagattcttttctcagtgtggtgagacaagaagaggcggcagtatgggagttgggagggatcttggagttggaaatcctatttctctgcccgtggcgctttcctggggtgcaataaatcatgaggtccattcctgctagaaggcaggaatccaggtcagtcagatggcgggagtgggaatttgccctgggatgggcccttaactctggtttgaaccatagcacataccaccctgcaaggttacgggaaggcgtggcctctctaggcccggagcctccaaatgggaatcccctcgggcagtctcttaggggcaagcttctgagggtcaccttcaccctgacacctgcagcaaacatgtcttgacggaagacatagtacaccgggaggtgacccctgaccagaaactgctgtcccggcgactcctgaccaagaccaacaggatgccacgctgggccgagcgactatttcctgccaatgttgctcactcggtgtacgtcctggaggactctattgtggacccacagaatcagaccatgactaccttcacctggaacatcaaccacgcccggctgatggtgagacacctcctgttgtgattctgcacctccccctctcccctccccccgagatagagagctcctcagatacatgtggctagagagccataaggcagcttttgtggccggaggcaggtctgggttactgagggttgacagctgtagagtatgacctcaggttttcttcttttcagctggccatcctctctggacctgtcctttgactcattcatacagtgggggaggggtacctatcttacggagttgtcctaagttctaaatgcaaagcgctcccatctggcatctatggcacagatatatgttggactcacaggagtgatgctgagtggcggaggcagtgcttttcttttttttttttctgttttttgtttttttctggtgacaagagtctcac

SEQ ID NO: 10524 - DNA, 948 bp, Artificial sequence
  DNA replication origin
cagtccgggcgcagtggggggcctcacctggatgtgcatcctggcacggcgcagcaggctcagcgtggtgtaccgggcacagtcggcccccaggggcatctgctgcttcagccgctccaggcaccgcttcaactgggccctcctgtggggaagaggtctggagggcagtgccagccccaccttgccggccacaggaatggcaggggagggaaggccagagggcagtggcccctgggggctggcgctgtcagggcaggactgggactcacctgcgcttctccagttcattgtgcactgacctgccaatgccagagaggatgaggtgaaggggaatcagctactgcccatgccccaatcccagggcccccagtggctcaagagccactacagatgtctgccccaaacaagtcccctgtggagagctcatgctggcctcagacaccagagtcccctggcagggcgaggggagtcaaagacacacggagccaaatgcttaacagaagcctgcccaggtgggtatgagggccctaacaagggcgcctgccagctggccagaaaggacctcccagaggtgacagctaactgcggaaacagatgtttcccaagccggtactggagggaggggcattcaaataggagggaacagcatatgcaaagggctggggagaggagagaagaggaggaagccagcgggggaggtgagtggcctgatgtgtggggtgcgggagtgcgagtggaagcgggaccccaactgctgttggcagttcccggcacatctagaggtgctcaagaaatagtccttgaatgaatagaaaggtgtgagtgtgtttggagagtggggagatggcaggaggggtctgaacgcttcctggagcgggacacctggcccaaaagatgcaagcaacaagtgggcagaggagggcccgaccaggggcggcgcccaccccc

SEQ ID NO: 10525 - DNA, 1297 bp, Artificial sequence
  DNA replication origin
ggtaagggcgctggctccaggcctggccctggagcgaaccctcaggctaaccggtgctgcttcttgcccgcctcactcatccacccacgccggctcattggcgtctttgatctcagcttccagccccgtgctagtgactagcccccaacatagcacggcgctctgggggcctggtggtcccctgaaagcgccgggcccagccgctgcacgtgggtgccgcgggggcggggcctccggccgccgctcgcccattcgcacatggcttctcaaggatcgctgttgtcatcctcggggcggggtcggggagcctctgatgccctattggctggcgctctgccccgccctctcccgccgctgatccacacgttcgggcgggaaaagaagcaggtttcaaatttgaaaacccaagcgatggggcggggttgagaggggagctgggcctcaatgcgcaggcgccggcggaggggcggcggacccggctcctgccctccggggtctgtccccaagcctgcctgccatctgcccccgaaggcccccgtgggccccagcttcctactgtgtcgaatgggaataatatctcggcccccctcctcttctgtgaggaagctgttgttgctacgaaaacgtcagtggggtaacagcttcctcaggcaggccataccctggaggcacgcgaaatggccttttccggggccttgggctctggtatccacgcagttggggtcctctcctgtcactgatgtctcagctgtgtatgactcaggaggtgacctccgtctctaagcctcaggagccctgcgacagcgttgaaggatcagagccaatgcctctgcggtgcccatggcatgaaggagccgcccatctcaaaggccagtgcaaccagaccgcggcgtttgcctcccaggcagcccctgcttgccttactcagagtccataaacccttcttgcacctgactctcctagccggccgaaggagtggctgtgatgacttctagcctcagcaccagcaggtggggccacatctggggacaggaagatgaacgcagctgtagcagggtggagcattgctgccagccacgggctgagtctgtgactccagtaatcccaaaatagagaggggagggaaggtgggagggatagatgctctgtaaagagacagtcctggtaaacacaagcacatgtcagtcaggcctcagttccttgggaaaaatcttttttttttttttgagtcttgctctgttgcccaggctgaagcgcaatggctcagtctcgactcactgcaacctccgcctcccgg

SEQ ID NO: 10526 - DNA, 627 bp, Artificial sequence
  DNA replication origin
tggtgctttcactcatggggcctcattcaagcttcacagcagcctcaggaaattgggagtgctgagccccatgctacccagggaaaactgaagctcagagaagttacttgttcccgaatagcagagctggaattggattccacccccactcccacccatctccagatttctgtccctactcaatttcagctccagctatgctatcaacaactgtcagggcaagagaggctcaggatggagagctacaggtggcattcaggggctgagagtccctagtgaaggggtgccaaggccagggtcctgatggctgcttgggagcacgaggcaaagacggtgcttcttgaggagggagttcagatctgacccctcccaccaaccaggccagcactccaggggtgaccagactggcagggagagaggccgggacatgggtggataagcacgtggtgggaaggggcattcaaggggcctggtgtttggggacgactaatgtcaacgggcagagatcggggagcaattccaagcgaagagcaggagcagatacccaggcactggcaatggcaaagccggaagcaggggtgtggggaaaatagaaaagttcggtgaagtgtagggtggaggtgaggg

SEQ ID NO: 10527 - DNA, 746 bp, Artificial sequence
  DNA replication origin
caagtaacataaatgcattaaactggccccagaggcctctgagaggagtgtaagcccttttggggaaggtggtggctgctcaatcccggacaaggttgtcctgctgggaaggagctggagcattacagtctcacggagcaagtggaatttaaaatctcttgctttttaaatgtggaaaatacctttaaataaaaataataatcatcataataaaacctgagagggccaaggtaatagtaatttcccacatatctgcagaccggatctggcccacagatggccgccctgtgacctgaatactctcagggtgggagtaggaaacagagaggaaggttccattcaggagggtgggggttggggggctttccggggtggagatgtttgcaggcctgtttccagttgggatgggaataaggggctggtggtaggaacttctgtgacagggcatggtgaaagtgtaggaggtaagcgggaagtaggaactggggatgactcaagccctgatgttggaagcccgggtgatgggaagaaagatgggggcagggaagctggtttggtactgtgttttggtggaggcagagggagcttccatttgggacttccatttgggagcttgagggcttgtgggacatttgaggggggactcgcccccctccgctgggctgcctggccctgccctcctcgcgcacaccctgagcctctgtcctgccctctaaccccaagtcaggggtgataggcgctggagc

SEQ ID NO: 10528 - DNA, 886 bp, Artificial sequence
  DNA replication origin
gcagagactcagagacacagagaccaaactgggggatgtgatcaaaaagattgggacagagacagggccaagagaccaagccagacagacagggccagacagacagacggagccagaccgatctgaagacagggagagaaaatgagaggcagagacaaggacagggagaaggaagaaaagttcccagctgggagaagaggaagagggtgctgcaggaaggctagatgaggaagctgacagaggaccccactctggccagcctgaagctccatccacgccctgccctctcccgtgtccccccttccctttccctaccccaggcttacagtgaagtaagccaggcccagcgggtcctgcaacagccgctcgaaggacagggcccagctggccacaggctgctcctcggttgggaaggggctgctgggaccactggggaggctgtggatgctgagagagctgccgcggccctcgccctggccctggggccccgtcgtgctgctcagctctgcagggggatggacaagttggggtgagccttgctgccttccccagcccctggcacaacccaccctcccccatgcatccactctgcagccatgttccctggaaagatagcaggtggcaggggtgtccccacccatctccacctccctcctccctcccactcagccagttctccacacattctgtcacttacctccatctgacacagccagaacctataagagacccaacagagaaagtcagaagagcccagtgaggattcccaggggacagttctgggcccgactcccaggagctggaactgcgttctcctccacctgggcatccccggccaggttctacttggtcagggttttcctcagtctgcccctggctccccttc

SEQ ID NO: 10529 - DNA, 1477 bp, Artificial sequence
  DNA replication origin
agccaggggcagactgaggaaaaccctgaccaagtagaacctggccggggatgcccaggtggaggagaacgcagttccagctcctgggagtcgggcccagaactgtcccctgggaatcctcactgggctcttctgactttctctgttgggtctcttataggttctggctgtgtcagatggaggtaagtgacagaatgtgtggagaactggctgagtgggagggaggagggaggtggagatgggtggggacacccctgccacctgctatctttccagggaacatggctgcagagtggatgcatgggggagggtgggttgtgccaggggctggggaaggcagcaaggctcaccccaacttgtccatccccctgcagagctgagcagcacgacggggccccagggccagggcgagggccgcggcagctctctcagcatccacagcctccccagtggtcccagcagccccttcccaaccgaggagcagcctgtggccagctgggccctgtccttcgagcggctgttgcaggacccgctgggcctggcttacttcactgtaagcctggggtagggaaagggaaggggggacacgggagagggcagggcgtggatggagcttcaggctggccagagtggggtcctctgtcagcttcctcatctagccttcctgcagcaccctcttcctcttctcccagctgggaacttttcttccttctccctgtccttgtctctgcctctcattttctctccctgtcttcagatcggtctggctccgtctgtctgtctggccctgtctgtctggcttggtctcttggccctgtctctgtcccaatctttttgatcacatcccccagtttggtctctgtgtctctgagtctctgcctgcctccccctccttcccctcccaggagttcctgaagaaggagttcagcgcggaaaacgtgactttctggaaggcctgcgagcgcttccagcagatcccggccagcgatacccagcaggtgggggaagggggagctggggccgagggctggggagaggggaactgggccacgctccctgaccaactcctcctgtccctcctccttcagctagctcaggaggcccgcaacatctaccaggagttcctgtccagccaggcgctgagcccagtgaacatcgaccgtcaggcctggcttggcgaggaggtgctggccgagccccggccggacatgtttcgggcacagcagcttcaggtgggcgatcctggggggattggccttgaaagggagacaaaaggagcaggggcggggtcggaccctggcggggagtctgaactacaaagcggagggggcaaatttggaggcggagacagagccaaatgccggggcaggcagggcggagctcagagggcggtatcagaggcacggggaaggacagttagaggcggagcctagctgagctcggggcgggcttggaccccgggggtgggtataggaac

SEQ ID NO: 10530 - DNA, 1952 bp, Artificial sequence
  DNA replication origin
ctctgcccatccacatctactgctgcttcttccatgaagccttccggacaccagccagaaatgcctaccctctcccaagagaccttctctggagttttcactcttcctcctccctgatcactccctgcttggcttactttcagcctgtgggccaggaggacagccccagatctaggttcctctcccccacacacctggcaaggccttaggacttgtctactaggtaaatgaaatcccgatggccccctggaaggtagcattcttccttgagattcccctgactgaatggtttcctttaaagccagttttcccctaggtcttctttaaagtttaagctagtttgcacctaaaggaaaaagttcattggttaggtgcacttgggtgcccctagaggctaaggaggtgagggcaccccacggatggccatttccaggatgggtctgtggggatgggagtctggactctgggaatgatgaggggcaaaccccagctccaacagtggttctctccagttttacctccctaaggtcaccacaataggatgatggatgaaggtggaaacctggaaggacatgaggtggggggtgggtggatgtctgagtgagtgaaagttggtgctgagggtgctttggagttgggtttagaacttgaattggggttggagccatgactgagcagagacagaaatggagttggggtcaggatcaggaaggaggttagagttggagccaggtcacgttcccacctgttcattgcccaccaggtagaccttgatgtcaggtagagagaggcctcgtttctcacagatccctgccagcatgtctcggatggtgaggccaggtctggccagggccaaggaggctgtgccatcgggcaggtacacacagcagtacttccctggccggctttcactttcaccctccgtgctcccaaggctcttccggtggctctgattcatggcaggagtgggggagattatgtgtacacatgcaagggcatgcacacaggtacacagagataggtaagcttgctggggctcaagcatgcacacgcactcccaaggcaggcaaagatacgtcctcctgcaggaacacatgtatgcacacccaggcatatgggcacctagagacgggtccacccgctgattcccacacacgtgctgtgtatacacacctgggtgctgcacatgtgcacacatttgccaactgaggatgtgtacccatgacatatatggggaccaatgtagtgagacaagtaaggaggctgaagggttggctacgcagagcaagctgggagacgcagtaaggacagcaacttggaatgagggccaccacgtaaatgggcctgagtagtgactctagcccatagagcatcttgtcttccccaacagtcggctcacctcagatttgctgctgacgaaggctaggaagccaaggtccaggctggcggaggagttgagggagccctgagactctcggcgcaaggcggcgtttgcagtcccgcccagctctagtgaagagggagcgatgaacgcgaacagccccccgccctcacccatcctctgcggaagcctgttccccactggtgggccttgtttggagccatcctgcaggggcccaggtgtaaatccctgggagcgacaccaccgttggagatttccaaacgtctgaggtctagcccaagacccgaaccacccaggggagtgtggtggtcactgggacctgggtttcaattttcacagacttacagactgtgggccacgtaggaggaagggggcactccccaaatttaaccaaactcccgccttccccacatctctgttgctcgctcctgccctcaccccggcggaaggacttgcggagagggcggcccccaggaccctcaacgggtggcagctgccccaactcctccacacccagcggcagcgacttcccgggcttcagcttcggctt

SEQ ID NO: 10531 - DNA, 1739 bp, Artificial sequence
  DNA replication origin
tcaagccccgaggccagcgtcccctacctggaagagtgtccaaaaccagtctctgggccgccaccgagctcactagcttccccagatccagaggctgtttctcgcctggctgtggggagaggtcagcagcccgcggtacaggcctccgcccggccccggccccggccccggccccggccccggccccggccccggccccggcccggccccgccccgccccgccccgcggcccggaagctcacccggtgcagcaccacctctagcgggctcaagccgtgcttctccagaatgggctgcagcgcctcctgcagccgcttggtgggcttggctgagattcgtaccacgcgctccagcgccgtcagctccagcctgcgaggaaccctcgggcagcagagggccggagggccggccccccgccaaacccttcccaggacaaacgcgagggggtggagcttgaactgcagaaggtgggactggcttgtagggggcggggtttgtcccaggggcggggctagcacgaggggcggggcctggggagccaggtagctagaacagggcctgaagggagcgtcaggacctgggacccagacttgggggcaggacactcactcgaaggtgatcctgttttccagccgcacttcctgatccgccagcacggtgcagtcctgatccaggaccagggccttctgtggatgccaggcagggtctaagagtccctcccccaacccccagccatccctgtgggtctgagaacaacttcacgccctcccatggccaccactgggcttcctagaggaagggatggagggtggaagagctgtaggggagcaaatgggttaaggtaccaagctggagtccaagcccaggaaagccaaggccagggagaaaagtggcaagaatgctggacattcttgggaaaggacagaaattacgagaaacgtagctgctggcatgaaatgataaggggcaggcctagatccgggatctctggcctactctttctgtgccaggacaggctctgcctccaggacagctgtctcgtgtccctcaggtgtgtgaaatccgaccagaccagctggaagcatttcctccctcaccacccacctttgaccaaccaccctggcctggtcccatttttgacatttgtccacttctctccattccccgctactaaggacacttcttgtttcctcattcaaaaagggcccaccctcaaaactgctgtgaaaccagaggatgtgaagcatctggcacaatgcctggcacacagtaggtacataaacagtaactctcgtgatgaccaccttcagaggccccactgcctgctccagcctgatgtgggggttgggggcagcatctcccaggcagtaggcttatgctgtgctgcaggagcaggtggagtgtgggtgaggaagttatatttagcatgtatgaaagcccatctgggctgctggcagccgccctagcggcctgagaagagtgggcaaaatgcctcccactactgccctcgcacccctgcactccaggcccctgaacatgccccgcaagtacccacctgcaggcctttgcctaagctgttccctctgcctggaatatcctcccccacagctctgcccatccacatctactgctgcttcttccatgaagccttccggacaccagccagaaatgcctaccctctcccaagagaccttctctggagttttcactcttcctcctccctgatcactccctgcttg

SEQ ID NO: 10532 - DNA, 1637 bp, Artificial sequence
  DNA replication origin
gtgagtgtcctgcccccaagtctgggtcccaggtcctgacgctcccttcaggccctgttctagctacctggctccccaggccccgcccctcgtgctagccccgcccctgggacaaaccccgccccctacaagccagtcccaccttctgcagttcaagctccaccccctcgcgtttgtcctgggaagggtttggcggggggccggccctccggccctctgctgcccgagggttcctcgcaggctggagctgacggcgctggagcgcgtggtacgaatctcagccaagcccaccaagcggctgcaggaggcgctgcagcccattctggagaagcacggcttgagcccgctagaggtggtgctgcaccgggtgagcttccgggccgcggggcggggcggggcggggccgggccggggccggggccggggccggggccggggccggggccggggccggggccgggcggaggcctgtaccgcgggctgctgacctctccccacagccaggcgagaaacagcctctggatctggggaagctagtgagctcggtggcggcccagagactggttttggacactcttccaggtaggggacgctggcctcggggcttgatctggaacagctgtggcccaggaggaagggggtccaggtgggaggcaaacactaactgtggccctctctgctgcaggtgtgaagatctccaaagcccgtgacaaatctccctgccgcagccaggtgagcgaaaggcgagtggcctcttccaccctctgcttctcccctcccgattttggctctgaccccaaattctcgcagggctgcccacctagaactcaggataaggccacccatccccctccagcgtcccccagttctctggtgaaggtgcccagtagtgccactggaaagcggcagacctgtgacatcgaaggtacatggtggatgagctggggatcagaaagactagggcagtggggttggggaccattcagggtggcatcagagagccttgagctaaggcagggggctgggtgccactgggcgtggaacaggaaggatgggggttggggggtcaaaggggctggaacagggggccgcaggccattggtgctggggccagggaggcagtggccacagtaaggcagtgggactatcgtgggctggcatataggcaggtctgctggggggaccctcatgctgtggcttgcctccaggcctggtggagctgctgaaccgggtgcagagcagcggggcccacgaccagaggggccttctgaggaaagaggacctggtacttccagaatttctgcagctgcccgcccaagggcccagctccgaggagaccccaccacagaccaaatcagcagcccagcccatcgggggatccttgaactccaccaccgactcagccctctgacagctacccaacagtccaggacagctgcatggcacccggcgggccgagcatgccatgggtccgctctgcatgccctgtctgtgccatgagtgtccctggccccttcctgccatgggcaggcccgcaggaagagccggtaggggtggaaaggggactcagatgagacacaccccacagctgccaccgccttgtccctcaacaagctcacccccaatcccttgcagcc

SEQ ID NO: 10533 - DNA, 2160 bp, Artificial sequence
  DNA replication origin
cgtgccccagcctgggtggtcgctccgggacggcgccttgtgtgacgtcacagccccgcccagcctgcctcacagcgccgcaggccttccccgcgtggcgcctctatatttccccgagaggtgcgaggcggctgggcgcactcggagcgcgatgggcgactggaaggtctacatcagtgcagtgctgcgggaccagcgcatcgacgacgtggccatcgtgggccatgcggacaacagctgcgtgtgggcttcgcggcccgggggcctgctggcggccatctcgccgcaggaggtgggcgtgctcacggggccggacaggcacaccttcctgcaggcgggcctgagcgtggggggccgccgctgctgcgtcatccgcgaccacctgctggccgagggtgacggcgtgctggacgcacgcaccaaggggctggacgcgcgcgccgtgtgcgtgggccgtgcgccgcgcgcgctcctggtgctaatgggccgacgcggcgtacatgggggcatcctcaacaagacggtgcacgaactcatacgcgggctgcgcatgcagggcgcctagccggccagccaggccgcccactggtagcgcgggccaaataaactgtgacctgggcgcggctggctcctcctccacttgcgcggtggggggagttgtaaataaggaaactggtctttgcaagacggttacctggtggagccgggattttgagtctagaggctgccaggcccctgtgccctacaccctgctctcccatggacgccttgcagaggctcctggcctgactgctgctccttggcgcgttcccagggtcctagggactccgcagctgaggaagagtccaagggtgggggcttctcaaagtctgtttcagccttagcgtcctttctcagagatattcccacacattaggcaggacaagtaaagggagccccctccccatcccgcgaacacctctccccatcagggtgtcaggctggaggccaatttgctcctcccccctccactcatacctcaagcactagcaagttgtgagtgggtgacaggatgggcttggtggcttgtaaagcagttctggggctcacaggcctctgcatctctgcccacattcctccaaggggagcctactgagagggctcatgtccaagaccatcgcaattgggtttgagaccttacatcctgccttccccaggccttcgaaaaggccccgcaggagtccctggactagagggaggaactctggcatccctacccgggagtctcactctgcaggcctcagtttcagggtgacctatggaggagggggaattgaaaagcttgggtaagtttgaggcctggtttattgcccaaagatagtggacaaaagtgggagggagggtgtctggtccctgccctccatgtgctggggcccagggcatggcctctcttgcccacccccacccttcccgtcccctcccccagcggccctgatggcagaccccacctgtcacttattctggagccctgatcttatcccagcaggaaggagtgatgtgtggctgaggtgggtgaatttagagggcagagggagaccagaggaagttcagccaggtgggggtcagggggtgggggtgcagaatcctccttacacttgccttgggggtggccccaggcctaggaggggcttccagggagtttgaattgtggtttggactcactaaggtagggccaggcagatggttggggtgagcctgcagggctggcttctctggaactgcacctggcctgggcagggcaggctgctcttgcagccagtctttgaggggagatggtgctgctgaaccccctggcttggtcttccctttgccattgatggagagcaaaaagacttccgaatgcctgaggagagttttaattcctttgttttttttccatcaggcaagtgttgggaagggaattaattgtggtggtgccgaagacctgggttaggatgaggagatggtatcttggaggaaggaaggtggcaaggaggtgtgcaaattcagtaacgcaggcaccaacatctatgcacaaacagctgcacagtcatatacccagacccacccttactcctgcctatcctagtcatgtgtacacgtgcagaggacctgaaatcatacccagatatcctgcagcct

SEQ ID NO: 10534 - DNA, 1261 bp, Artificial sequence
  DNA replication origin
agagagcttggggccccggcgtccccgcctcacgctcctctccgcccgggttagctctgttgcgccttcaggaggatgcggacggcagctgcgcgctcctgtcgccttacgttcagccggtgtgcctgccaagcggcgccgcgcgaccctccgagaccacgctctgccaggtggccggctggggccaccagttcgagggtaggcacaactgctaggggcaggggtaggggaggagacctttgatcactgggttaggcggaagaagcccgcgactttggtatcgttccgggtgcctacagaatgggtggcgctgacctgatgggttgtgagaatgtgtaggtgaatcccaggtagaatcccagggcctgggattcactgctgggatccccaaatctcctggggatacagggagaatcgaacttgctcttggttccctctgggcgccgggctgcaaaggccaactaggacgctggccccgcgctccgggctagtgtgggagccaggttctgcgactctggatgggtggtgggggaggggtttctgtttccgctccgcccattcaaatcctggcttttctctggacctcagcctccttgcctatgaaattgaattaatggcacctcctccccttcgggcttgctgcgagagaggaagggcatgagtgggtttacaagcgcctggagcagctttgtccatcgtccgggcggcaagcgttgtcagatggggtgtgaagaaggcgctctgtgttcgcaggggcggaggaatatgccagcttcctgcaggaggcgcaggtaccgttcctctccctggagcgctgctcagccccggacgtgcacggatcctccatcctccccggcatgctctgcgcagggttcctcgagggcggcaccgatgcgtgccaggtgagctcttagcccggttggcgcccttccccgaggccgtcaggcacaaatctcaggtccacagcgctgagctgcgtgtttccgacccagggtgattccggaggcccgctggtgtgtgaggaccaagctgcagagcgccggctcaccctgcaaggcatcatcagctggggatcgggctgtggtgaccgcaacaagccaggcgtctacaccgatgtggcctactacctggcctggatccgggagcacaccgtttcctgattgctcagggactcatctttccctccttggtgattccgcagtgagagagtggctggggcatggaaggcaagattgtgtcccattcccccagtgcggccagc

SEQ ID NO: 10535 - DNA, 1783 bp, Artificial sequence
  DNA replication origin
attctcctgcctcggcctcccgagtagctgggactacaggcacctgccaccacccccagctaatttttttgtatttttagtagagagggggtttcactgtattagccaggatggtcttgatctcctgacctcgtgatctgcccgccttggcctcccaaagtgctgggattacaggcttgagccaccgcgcccggccctgaacccaacttttagagcagaaagtgttttcaatgcacagcgacctttttgagggtctgtccttttcctgaccagaccctgagggacagtgcctgagcagttgagtacaggggaagtcctcagagagtgtgttgtccctgcagttctcactgtcaccggggagccctgccacttccccttccagtaccaccggcagctgtaccacaaatgtacccacaagggccggccaggccctcagccctggtaagactacgcagaggagttggagcaggggcctgggagacatgtaccctgcctgtccttctgtccaaggaactctgcttggagagaggggactgtgatagggcagggtgggccaggcccctgggtagagcagggaagccttgtctctttctacaggtgtgctaccacccccaactttgatcaggaccagcgatggggatactgtttggagcccaagaaagtgaaaggtgctacacacagcctctggggtggcctggggctctctcctcccgcctcattactctcctggtatcaccagaccccacacacctgggattctggacccagccccttctctccctccacaataccctttggaagtccagagggagagttctgggaaggagtggtcccattttgcaggtgggtaaaccaagcttggaaacttggagtagcaaggtcacaaggcaagtaggttcaagaagggccttggcccccagctgtgtgactcagctccctgctcttccttccaccatgtccatctctcagaccactgcagcaaacacagcccctgccagaaaggagggacctgtgtgaacatgccaagcggcccccactgtctctgtccacaacacctcactggaaaccactgccagaaaggtgaggagatgtggaggacctgggcggggtgctgggggacaggggcaaccctgggcctacagaataggttgctggatactcggagacttggcatggtcctagactctcctgagaccactatccctctttgtccccagagaagtgctttgagcctcagcttctccggtttttccacaagaatgagatatggtatagaactgagcaagcagctgtggccagatgccagtgcaagggtcctgatgcccactgccagcggctggccagccagggtgagcagatggttgggaacgggccagggaggagcgtcaggaagacaggctggcaggaggccgggtggtgtgccaggaaggagagctctctgggggggtctttaggcccaggggtggctcactgcgttccctccccaagcctgccgcaccaacccgtgcctccatgggggtcgctgcctagaggtggagggccaccgcctgtgccactgcccggtgggctacaccggagccttctgcgacgtgggtgagtgagggtctggggcaagcagaaggccagcccccaggtgggacgggcttgccaggaaggaggagggagagtgcggaaagcagatgagagggaggcaggagagcccagccttggctgcccagggagccccctttctcctcagacaccaaggcaagctgctatgatggccgcgggctcagctaccgcg

SEQ ID NO: 10536 - DNA, 1094 bp, Artificial sequence
  DNA replication origin
tcttaacgtccgaagagcagttgtcactctctgaaaccatctatttgtttatttacagaataattacctttatctcaccctgccctcacttgctccctccacttctagcaagtaagcagggagcctggctatcttgctgccatcactgtgttctccagcacctggcttggtgcctggcacagaggtgttgctctgtattttcggatgaatgaatgcataggaactagagaagcctagatggatccggctctgccttactcgcggagtttgggcaagcctgtttcctgctgcgtgaagtagggggtggaggaagcggggtgttaagctacaaggtgttgattagctgtaagatttcagccttgttttctccgtagtcttcgggctggagccagccacttgacgtccggcgcctcagctccccacctgtataatgggtgtgaactcatcccgaggtctaggggtggtagcgctgccttataaggcggcagaggccgagggaaggcgaggccgagtgggtggagagaaatcacaacatccggctgcgggggctgggcggggcgcctgcggcgaccgggcaagaggtcggggaacggctgcgaggccgcagcctcctccctgtctctccctctttcgatgtgcgccctcctgattggggccgacccaagggaatacggccacacaagtggaccaaacaaactcgctgccagcccgcaggaggcccaggatacggagcgcgtccccgacaaaaccctagaaaagccgtctgcgagccaaaggccgccgggccacaccttcaggcgacgacccaatcaaaatgcagtacttgagatgacggacgtcttcttcacccaatcacatattcggcctcctgggcgtgccccagagtacccacctccattgtcccggctgagggctcggccctaattggcagtttggtatcctacgaaagcctagaaattcgaacctaggggctgaaccccgccctcagaccaaccaggaagaggtgacgtgattggtcccgcccccgtacttctttgagcgagtccccagctgggggggcgggggaaaaaatgaagaggaagactaatgggaag

SEQ ID NO: 10537 - DNA, 1908 bp, Artificial sequence
  DNA replication origin
gggcggggcagggcgggccagcgccggggtggcccccgggagggggcggagagtgcgcggctggctgcggcggccggggaggccggggaggccgcggcgcggtcactgcgagccgagccgagccgcgccgagccgcgccgatcgccatccggcctcggcactcgcgcgcgatcccggccggcggcgcggcccggcgggccaggcggcgccacagcccatggagctcgagaacatcgtagcgaacacggtgctactcaaggcccgggaaggtgaggcggccgggtgggcggccgggcccgggtgcgtggagcgcgagtgcgctgcgtctgagctccgcagggctacccagccgtcggatcccctaggcccgcgggccctgcgccttacaccccgcccagacacgagcctttccggcccgtcgtcttcctcctccgcacctgcccccgggattcggggcccaggaaggggcgggggtcaggccgccgccctcgcggcgggtgggggtgaaggagtgaaagaaggtgagacgaagagggaagggtgggaccggagccccaggagagcctgtctgagaggcaagcctcctccaggggagaggtgtaaagatgccccacgtgccaggggcccagaccccagcaccctagcctaatcccgcgcaaagttggcgataggtaaagctggagaatgaataaacggaccctctgcgtagcacagcccacctgacttggggaaactcctggccacaaatgctacttataggactgccacttgctccgtgcctcaggacactgagggcagaggtgaatggatatttgccctcagggagcccatggtctagtggggctagcggacacagaaagaagtgggagcagagcatgctgctctgtcagtattgtaagctcagaggtctggctggggaaaccagtctggtggaccgagtgtgtgtgtagctcctcgtggctcccaccccagatgttatcaggcacttgctctgtgcaggtcctgggagacacagaaggaccagatcgggtcctcactgccttgtggtcagtctgcccccacctgccacactccacctcagtaacatgatcactgaccacccactctgccccaccttttccagggtgctggggaagcagcagtaaacaagacccatctttttggaactccagggcaaggagggagattgtgacagtttttccaccctttgctgggcttccaggcttaaaaagtcatctgcttcacctttctaccatattttacatgtgggaagctgaggctcaaaccagggattagcatcagtcacacagcaagattgtgattgactcgggcctaagacacaggatgaccggcacagtctataggaagcccagaggaactttcagctgggtgctacacctggcaccccgtgcccaccaagtgctctggcgaggtgcagcccagaaatggcatggcaggctgggtcctcattgcctggggagcctgtcttatcccctgtcccttatcgagcccatgggctaggccttcctcccagcctctgggggcatctgccgattctgttctgcctcgtcatccaaccagccagggaggaggggtggggagggccgaaacaggccttcttccctagggctgtagccagttaaggcctcaggcctgctgatggcactgcctggccggagagtgtgggtacctttggacaagctttgtcaggccatgggcaaggcacagggtggtatggccagactggggactggtacctccactagagaacccttacgacaacctggctctgcccctcccacctgcatggcttttttttgagacagagtctcactgtgtcacccaggctggagtgcagggctcactgcaacctccgcctcctgggttcaagtgactctcctccctcag

SEQ ID NO: 10538 - DNA, 800 bp, Artificial sequence
  DNA replication origin
gtcactgagtcctgagcccaggcgcctggacgggctgcatcagaaccacctcatgaactggcttttcatgagcttgaggctggggcccctgacggcttctcaagtgatctgaggccccaggtggggtttgggaacccttggtgtgtgtatacagttggcacctaatagatgccagccatgtttggggtgggaaaggagcttgggttgtggccatagggagctgggtacgaatcctgtacccaggattggtctctgggcttggtcatcttgggtatactctgggcttggtcatcttgggtgaattgattcctcacttcagaatctcagttttcatataaaattgggcctgctctggcagagttgctgtgaggatggagtgggacaacgctggggcttgagacctccctcagtaccccttctcttcccaggcactcagaggcatggggagggggcccagggacactgaaaggggacagggagggtggggaagagctccactgactgggcagcccaggacaggatatttgcatgtgactctttgctgctgccttgatgtggctgggaggggggaggaggaagtaactgagggtgggaggctggcggatggagggttgggtgagggacctgtgggtgtgggggaggagttccccttctgggaaggccttgccctgggttgaggggtgggtgtctgttgctcactcacagtgaagcaatgactgcagggcatgttcgcaggaggcctctagcaagtttctcaatgggcccctgcagtacttccttctccaggcagcttaggtcgg

SEQ ID NO: 10539 - DNA, 1152 bp, Artificial sequence
  DNA replication origin
ttgctgtggcaaccgtttccaagcgaactggtggcggctcgcgccccgttccggctccctcgctcactggcgctctccctccctccggtgtggactgggggaggggctgctcgcggcccgggcgggggaccggggcggcgacccggggccagggcgctgagccgcccgcggggaagggctcagtcctgggaccatcttccgcccgcgctccgtgcccgcccggcccgcagccgccgcggtactcacgggcccaggcatcctcctcgagctcgttctcctggctcggggcgagcagcgcgggcccagcggacagagccccgggcctgcggggggaggcggcggcggcccgggggagcagacagtggcagcgaaagcggctccgagcgctgggctggaggcgcggggcgcgcgcacgggcgcgtacacggcgggtgctgagcccggcgtgcgcgcgcgcggcagccggcagagggccccgcacccccagccacacgccgcgaggaggctgcccccggagggaaggagggggaggacggtcacccacctgcggcgccgagacccggttctccagcccgccgggctcacacccgccagggcaccctcacaggggaggcacacgccggccgacccggtccacactccaggctggagcccaggccacaccggtcgtgcacgctggatgcacagccaggcagctgaggtcgagaacccggacgcgcacacagctcagctcggagagcacacacatgtccaggtccccgtcacatcctgacaggcgctgcgcacacgcagtgggcaggggcccccgagcaggcaggcaccccaacgtggctccctcccaactcacgacccctctcgctaggtgcccagcaggcgtacaccaccacatgcctactaggaagccacggggaggaggacctagtgccgaacccacagccctggcctccgtggacatgcctcccccctaccccagcagggaacagatgacccctagagagcgccccactgtctaccccgaggtccaagcttgcagaggccactctgaagttggctgtccatcggcctcttaactgggctgtttttcgtccaacttctctactgcacttaagatgatttgccaaaaacccctccaccaccatattagctggaaca

SEQ ID NO: 10540 - DNA, 1810 bp, Artificial sequence
  DNA replication origin
gagggagagcgccagtgagcgagggagccggaacggggcgcgagccgccaccagttcgcttggaaacggttgccacagcaacggggttgcgctccccggcaacacgactgcggggcggcgacgccccctccccctccctcccccctcccccgacgcgggcccacagcccgggggtgcagggggagaggggtgcgcggcgggggcatgtcgcccctctggcccggctgggtgtgcctgcctccacagcccgtcgagggtgggggtgggggcgaacggccgtgggcacgagctggctcccacgtggctgcagtcgtcgcagcagggctcctggggtggctgcaaacgtgggggcggcccagcccctgggcttgtcacgggaggaggaggcatggaggctggcgctggggtctttgcccatagaccccccacccacccacccaccgccgccaccacctaatcgcgccggccctggacatggcctgagccgagctgggttccccaggggcgacgtttcttaccagggtagaggagcgaagcttgcatccctcctcctcctcacggccgaggcacgtgccaaaccgggcatgggcccgcggtgagtctctgctccgtgttcctagccaccattctccagggaggggtggaagcagagtgggcaggagcagaggaaaggatattgctgacccagggaagctgaagcccaggccaaatgggagcgacccagcccattgtctggatcacaagtgcccctttcttgtctgagcacaatgccccaactgtactgagtagcatgcaggttggccggcagggaggcacgcgccacatggaggtgcctggtccgccaggggagctcctctgggaggagaatggcctctgactcagaggaaatgacctctggctcccctcccaacctcccctcagcgggcatcatgctggagagagaaatggccctcctgccagctctcccaggcctgactcagcagatgccagccccgaccgcgggcttcagatccaggatcccagcgaccacaaccgtccttgggtttcctttcccatccggggaggcatcctagaggtgactggcatctggggcattggaggccttggcataagatgcccttagatgggtggtgccctggaggtcaggcctgagtctcctgcaggcaggggcgcctggggaattactcacgggtgcctttcattcccttcctgctctgtgagacctgtgttgagtgctctgcatccattatctcctaatttttttttacaacagttgcgcaaggtaagtttattatccccattttagagatgaagactctaaagggaggctcagggaggtgagtgacttgcccaaggtcacactaccagtaagtggcagagctgagtctacactgcaggcttctctgggggcaaagctcctctctgcctgctagctaacttctcttgtaacccaggagaagaactgtagagccttcttccttcactttcctccagtgaggacattccctgtctttcgggtcttggtacatttttccttcttccagctaaatcagccacattcttgctcccccagatgcattataggatggggccagctttctccctcccttcttcacttcctccctccctccattttctccggtgagaccaagcagcaaagggctgcctcagtcccctgggaaaaccccaagccctggtcctcggctcatgggctccatggcctgctcagcttgcagtcttggctgtgggagagaaaatttagcaaagatgggtccatgcactgctgcagcctgtgggtgctcagtctagc

SEQ ID NO: 10541 - DNA, 2144 bp, Artificial sequence
  DNA replication origin
cattttgaaaggtctgaatgaacctctgatgtttatgtattgagcacctatggtcggttagatgagagtctactgagcacctgggagggaggcttcagacaggattccagtcccgtgggcctgctgtggcactgccgagaagacagcgttcagtgtcaaatccctacccactccacctgggggtggagccaggttggggccagggggctagttatgtgaccttaagcaagagccttcctctctttggcccaaagttgcctagtttataaaatgcagctatgacggcacccagcaggtcctgggcgtggcctgccctgtatggcctaatgccccacctgctgagctgggcgccctcagggcacagagggccctctcttttgtctcttgctaacctggcgctgccattacatctccccttcatcctgtagctctttctcacactgctattccacagcagagtcgggctggtgatcaggcatgccagggccctggtgggaagggatgggaatgcattttggctgctagctggcttgtctgcccagtgcccccatggctgccacttacatctggcacagagtttggattcagactcaggctaaatcctagctcctccccttctgagctgtgtgacctggggcaagtcattcccctctctgagcctatctccctgtctatcaaatgggcacaaccaccacagacaaggtggtgttgaagagaggattctgcgtggtccttgaaagatatttctaattcagctaaaccccatcacctccagccccagagttaccttttctgacccagagctgttcctgcctggcagaccgggggacctctagttagtgccagtttcctcagagcattcctgatggctcaggaaaagaataacagatgtaattaactcccagtgactggcagcatcgtgtttttatctgggctgcgtcaccatggcagcctcatggcagggttgtcgagggggcgggcagagctatggttcctgccattgtctgttctggaacgcaggcccaggagaaggggactggcaagggcaccaagtggcacgtggctgaaggcagccatggagtcagacaggagccatctggggagaagtgtggggtggccatggcctggcttccccccagcctggggctcaggctccctgtggctctcgaagcagtgtgtgtgtgcctcgggcacgcggagggtagggtccgtggggctcctggaagaggcccacaaagtagcccaggcagcgctaccccccaccccactcaggctagagttttgtggccaggcctgggttcaaattatggtgctaccacctgccatctacacagccagttgttcccccaactcctcgtctgtaaaataggaatcattccagttaccccaaaggctttcgttcaaacctgtgtgtataaggcattcaggaaaggctcagttctgttctgtgggggcggtgagcagtcacctgccacccttcactctcagagtcagggctccctcctacctccctcttagggtgcaaggttccccctctcacccgcagctgtggagaggaggaagcggaactagagatgcccatctggagtgagtgcaggaccaggtgggtacgaaagactagcttccaaccctcatctagttttcctcccctccgcgagagggaaagggagacggcggcctgaagacagaggcagagccaagtggggctgtgcaagggcaggaggcggggaagcggagttggagcaggcagggcgcctggaggaaaggaagagagtgtggcccacgcccggcgcggcgcgctaggctcagacaaaggcagggccggtggcacgcattaccagtcggagccacccgcctgagcccccctacgggagcggcgggagacccggagggcgcggtgcggagccagttgttccgggctttgggcagccaggggctgccaggcgtctgtacagggcgtcgggtggctgtctgtggggctctaggagatgtaccaccctttccccgccgcacagcaacggcgccgagacgcctcttcagggacctggtgcgcacaggctcctgaaaccctttggccccgggactgcggatggcgaatctctcgttcggactcagagctggagtccgtccttcgcgcgccccct

SEQ ID NO: 10542 - DNA, 2034 bp, Artificial sequence
  DNA replication origin
ggcagccagggactccccttccacttcctctgggtcacagaaggtggctggcggctcaggcagctcatcaaagttgagaagggtggcacagccttcgcctgctggcagcagtggctccggagccacctcatccagcaggggcacctctgccagggtgacctcagtacccgagggtggcgtgggggccctgggctcaccctggagtgtggaggccccttccccgttgccaggccataggtcaatgaggctggtggcggcggggggtacgttgttggcaacagtggtgtcagcagtggcagtgtcagtttcaatggtgtcagctgcatcgtggatctccgtggcgtcagctgtggcaggctccacgggagcagccaggacagcctgctctgcagactccatgaacatcaagtcctctgcagggctgcctggcccccggggaggcgcctgtgcctgagggggctcctccatggggccggcccaggcctgaggggctgctgctctggtctcctcactgtctaggatggggctgggctcctgggtctctgtcacagcacaggcagaggagatatgtaaccggctcccctcggggaggatggagaccctgcccacccactaaggagtgagggagccagggacttccatgcaggtgtcccactgcccccttacccagtgaccccagtgactttaagccccttggcagctccgggaggaaggccaaggcccgattcccacttgagagggcgggtgctaagctttagagagggcaggtctgactgtacaccagggctcctccccacacagccgcctccagggcagtgcagtcttggtgatgggtggcccagatccctggagaacggttaccatggcaacctggggctcccagccagggactgatgatgggaggcctggtgcaggtagcatccctctctcaccttgggctggtgggggtggcggtggcagtggtggaggctgcgaggaggtgacctcatccagggcccgctctatctgctcagcgacaggggtggaggcggtgctggagtcagacgggctccgcgtggggatgggagtgggcgccatcctccggtggctgtccaggtggctgcctgtggaacaaaccccaggtgggtcagtgagggcgggggagccgggtgagacaggattgtccaccttggggcctggccagcacctcctctctggaatctgggtgggggctgggagctctccagccccaccaggggccagactacagctccagaccctgtaagctaggcccctggaggccagtgccccataaggccaggggcaagaggcaggcagtgcctgccctgggggcaaacaccagagatcagcggtcagactgggggagtgagggcggggggctgctgggaagcggggccctccttaccacccccgccgaggcctggggctgctacctacatgggagggaggaagagaggtttggggtgcggtggcaggtgatatagggaaagggagtccgtggaggggaggaggaggaagaggaggaggaggaaggcccactgtccgatgcctttatgaaagggcagtacggacgacctgccgagagagacagacagagaaagagacagaggacaagagagggtcagtctcccccacccctgcccgaggcctctcccgcccccagggcctggccctggatgtccaagctgccttcagccaggggcacaatcagccaagccagccgcagcctcacaccagccccagacacacagccagcctgggagcagtacagcagggacggcctgtggcgggaccccagcatggggcaagcacactcagaccagcagacagggcagggaagagcttcaggagaggcggaagcagcacactgagaagcggaacggggacacctgggtgcaagctccgggaggctccctcaggcccggggcaagagcccagcacgcatgcattccggccttccaggccagacctaattcaccccagccgagctgctccccgtggccagcgctgtgcctcagcccatgccagagctgc

SEQ ID NO: 10543 - DNA, 1392 bp, Artificial sequence
  DNA replication origin
ctcctgaggtgggatactacgaagggcccttctcccagtgctcctgacataagctaaaattttagattataggctcaaaaacagagcagccctgggacttcaccaccttagcagcccctcctgcccaagctgccacctgagcagcaggggacaccgactaagaagcctttggtgtgtgagtgcagttgagcaaacatgcgcccgccttgtgctggccacccacccggagaccccggtcctcatcctgcgttgctcacagcggaggggggaggtgcctccggaaacaggaacttaggatgtggtgtcatcgtggtggaagccaggagcaccctgtggggacccagaggaggaaatgacctgaacaagcctcttgttcagaggtccttccccaggaagcagtggccacgctgcagctggaaaccagagggcctggcccccgggtggggagcaggcatttgggagggaggccagtctcccatgctgaggcttggaggtgggaacgggtgtgcctgttctgggaactgactgcgtcgtgctgaggacttgatgtctacatctcacagtatgtgggagccttggggtgggggccggcagggggtggtgttggagaggtgacggctaggtcaggcaggggtgggggacgtaggccaagtgcgggcgctgcccacccaaaacaacgtgtgcagtgggcaggtgaagccagtaggcgatggtggggccgggggtgagcgggtggcacacgcctgtcttaagggggctgcggcgaggccccggtgatggctgctccgggcttgcaggtgatgtcgccagggctctgtcacctcaagagaaactgggaccctcatctcagtatgaaagttcctggtttttaagtggtggtaactaatgaacatggtttaaaaatatcataccagcaaaacaaaagccatctgtgggtcatatttagccagtgcttgctgtggctcatgggaacccctgagggattttaagctcaggaaaatcatggtctgatccgcattttggaaaggtcctttcagggcctatggagagcaaataaggcaggtagcagtgaggaaggctggaccatgatgccacggtccaggcagcaacattgggagcatggtggccccggcactagggtaggaggtccaagaagttatctgcaaaacaaggagcacttctggagggccctaggcacctgcttagatatggggatgagcaagtgagtgagtgagcctggtgcccagaggcctggcaggtcagagatgaggtggctgagggccctgagggaagagaggggctgtgtgacagggtttgacggggcagaggtaccacctctgaaacccttcctgccagattgcgaaagaagcatgggggctgtaagaaggccag

SEQ ID NO: 10544 - DNA, 1422 bp, Artificial sequence
  DNA replication origin
tcagcctgcttatgctgggtccttcgacactgcagggcaccacctaccagaagacggatgcagctgtggaaatgaagcggattaaccgagagcagttctgggagcaggccaaggtatggaaccctgagcccggcctggctgagccacccctcatggaccccatggggcaggtctgagtccctcactgcagtggcatggcccatgccacgtgccccgcccccagcgctgggttagggaggggctggaggggcagggtccaggcgcctaggctcggggcctacccttgttcgcaccggggcttgcagaaggaagaagagctgcggaaggaggaggagcggaagaaggccctggatgagaggctcaggttcgagcaggagcggatggagcaggagcggcaggagcaagaggagcgcgagcggcgctaccgggagcgggagcagcagatcgaggagcacaggtgagcctgcccgcccggagcgctccaggggcccccgggcgcaccctgacgggtgctggctgcttatcgttccaggaggaaacagcagactttagaagcggaagaggccaagaggcggttgaaggagcagtctatctttgtaagttctttgccaaggctcccggtctctgggtcagggaagtgagaatggtccctgtgttcctgggccttgtggggagatcagtggctcagggacagtggtggctgttctggggagctgcatgggcacagggtgccatggagcatgaggcctggcacctcatcacgtggggctctggcctctggccgtggaaaaagactactttggagaagcttgtgctctagattggaagagaaactccatctagacccagaccctcactgaccaggctccccctcccctgccctggggtttctcggcgattagacactgttctgcactctgaggggccacaggagtgaggcaggcggcatgggtgagcctgggccagtgctgagcatctgcaggcagtgtgtaccatctccttgggagcagcatctccctgggagcagcccctttgttccaggggtactgtctgaatctccacacattgggaatggcccgtaggtcctgtggattggtccctgagaatcacagcagagtcacatctccatgctttgaatttagtattttggaaatagctaatgtcattcaggactgagcatggctcagttcaggaagggaggtgggttgatactcatctggattgggactgtaatgggcagatgcatggctgtggggactcaaacgggctccggagtcacccacaggaggctgagagagaggaggcaagacagtcctgcaggcagcagcattaagtcactccagtcacatctgcccttggatggggtggggatgatgtgtggctggtaagctccatcctcagtcattcattcaacacacacct

SEQ ID NO: 10545 - DNA, 1235 bp, Artificial sequence
  DNA replication origin
cgaaagctcctgcaagcccccttctagggtaatcaggagagtgtcaggtctctctgcctcctaaacccttcccaaaaagagcctggaactcaaagcaaagactcctccaggcctccacaggcacccccaggggtcttctggcctctggggtctgtgggtcccagttttgtgttggtatgtgtgggggtggtggcgcacagggatgtagctttgcctgtgactcctgcagggcctgatttgggggtaggactgaggaagtgtttgttcttcacactcaggtctcattcttcacacatcatcatgtctcaccaggtgccagtgcccagaggcacaatcaagccttctggctctggggaaggcggtgaatagggcccttcccccaaagtgtcccagctgtgtggcttcagataagtcactttccctgttggaggctcagcctcagaagtccaacattcaacaaggctctgagattcctccccaccctggggacacagggatgactggaggaaggacacccgccagatccagacaagtgtggggctgcagggtgcaggcagggaggtggcctacagccaggtgggtggggaagaaaacaaccaggaggagggggtggagaaggcggcgagggaatggctggaattcctacctcctgatgctgcaagcttgaggtcatcggagccatcttcatatgtgtacagagccctggggagagggaggggtggctgtcaaactgtcagggcccaggccgccaattctgggtggggacggctctggggagggagagggacatggagtgggtaggacaggaacggggagggctcctgctgtagccatgacaacagggccaggcatcggttcaggcgggagcccagcagggtactgctggaggcctgggtcaggggggcgcaggcagtgaggggagaaattgctggctggtcgagctcagtgcgcagcatcccggccctggccctggcagcctacaacccagtggagcgggtgtgtgatggagattccaaggcgacggttccttggttaccgttccctggctaccaggatcctcatcccccattggctagtgccaggaacttacctggcacgtgccttggtccccgctgcccctcccccggggagggaggaggagaagagagaacctggtgctcccaacagctctgggcatcccccagtaaccatggcaaccctgcaattggcacacgactggcccaccccaactgcat

SEQ ID NO: 10546 - DNA, 1794 bp, Artificial sequence
  DNA replication origin
ggggccgggcgccccgcccaccggggggcctctcggagtgggccgccctccccccgaaacctgggctggagtgaggtggaaggatgtttgctgccacatggcgaccgcgaagtgactcccttaccgccgcgggtcgcggaggaggcaggggtgagctctcctcccctacctgaaggggactgcggggactaggcagctgggctggggggcaccgagctgcctaaggggccagctgagatccctgggaggaagccctctggagaacaagtgtggagggagcccccaaagacggctgaaggggtgaacagatccaccggcccccagcaaggggcactcggtccctgatgggggaggagctgggccgcccctcaccccgccccccagctgttgtctcccgctgagctgggggaggggatggaccacctgctctggggctggcggcccagggtggtggaaaaaggaaaccgaggggttcctcacagccccatcctggaatcctttaacccccccgtaatactcttcttctagggaaggtgcccatctggttcctaggcctcctctccctgctggcagatgggaacaggttcttcttgaggaaactgaggcaaagaggagggcaggtctgagggaccccgcttgggctggcctcacccgcacactgggagggcagccaggtggggactctgacctgggggcttctggaggagaggatgagatggctgggcatccatggcatggtactgcagcactggccagcagccaggcctggagggatggacgcgagagacaagctctcgtgtcctgcaggtcagtcacaggagaggccggcacaggctcagcaggcaggcggcccacccattgtcccagccctgccccaggggggctgagatcatgggaggagctctgggcaagtggccggcttggcctggtgaaggagctggctttgggataaggccccgcctggggagaagcacagctcaccccagaacacctcctttgccctccagcctggaggggtgttgtctaccaacaccccattttctcctaaaagcagagctctggtggcctattgccaaggccacacaacccctgttgccccacatcctgctcaacacaggcctgcccccacccaccccagcagcatccgtgtggccaaagcgagttattcatcactggtgtgcgtcagcccccatctgggttgtgtgtgggacacacacagatgcacacatgtaccctcgcacatgcacacattcgttcactaagggcccagataacattttgaaaaaggggtgtgaggatcactttctacacaagagaatatgaataccccagggcccagcatggaaccaggggtgcagtgaggtctgaagactcagaggcagaccctgcacataggtccagagggaggggtgtcttgggtaaattgctgtctgccccccgacccttaccttgcctccaatggggaggggtggttgggggagttcactcctaggtggcagggcctctgaagtgcaccactactctggcacagggagcaggggacccaggaaatgaggttgtgtggtgggaagggccactgttgtcctggttgtgatatgactcactgtgatcatacacaagttcctggtcctcttggaaagaaaagggattgggcccagcactacctcggatactgaaggcctttctagcaccaccatcctgagagtgatggtcctgcggggtccacctgccctcagcccccgactccagctcaccctccaccccagctcaccccccatcccagctcaccccagg

SEQ ID NO: 10547 - DNA, 1562 bp, Artificial sequence
  DNA replication origin
tatactatctttgtaacttttctgtaaatctaacactgttctaaaatagaaagtttatttaaaaatgttgatggcaagaggtgagagtgggcgtggctggagagtttgtaggtggctggtggggaggcaggaatttgaggaaggaagagcttagatgcatttagggcttctgttttttggatgcaaaattgagtgtgcaggaggctggggggtgaggggagcggggggggcgaggagctgtgagctaggacaaatcaaaggaagctggaagaggctgaggccacagatgctcatggccagccatctgctgcccctccccggctgcagggtctccctcctcaccagaatcaggctcttcatgcctaagggtgggggatggctgaagctctgtccctccatggctctccccacttcccttccccaccatgtgtcacccactcccttagggatccccatggcaggccaaccacacctactggccagttggtctagggcacagggcctggctgtgtccctgcctgggtgcctcactctagtggtggccatggagaaattgccatggcctgtggtccctagacatagtgggcactgacttcccaaggcaggggcctgtgagtattttgagttttaagagggttctcccaactccaaagcgccaggaacactgccacataggcagccctgctctccttctcttggcatagccaattacccaacgcagaactcggaggcctggctagaaccacctcctcctccgcggtgcggttgggaccaggtgaagtttgctcagggaggtcgaggttggaggctttgtagtggtggaaaaggcttctaagcgctgtggacggtttcagggtcccaacctagcaaggaacggagttctggaaggccctggcatggtgtccactcccttgcagggggtacttttctgaggccccctcccgttctgtgcttagagctttaggagataaaggtgccaagaggctggccctgagcgtccttggaggagccctgccgtgggagtctggggttagatgctgcttccggaactctacttgggactcctctgggaggcgtgaggcttgagagagaatgcaaaggatctcctagctggccccatctgagagggcacaggcgtggaggggaggagaggcctggaatggagggataatgagctgggtaggggctgagaatggcctggaataagtggtcatggagccgagatggggggctgtggttgggaattgggaactgggatcaggatgagactgggatgggttggactgaagatgtgccgtgacacatgttgggggggacacgtgctaagcatggggctgaagctgggatgggaaagcaactggggtggatttgagggtgggatgcagatgacagtggatatgatgggatagactaggcaaggacctctcagggaaaggagacgggccaggggtggggtgttgtgtgagctgggttgggatgaaaatgggtttaacatgaggtgggacgcaccaggaatggagatcaatgaagcaatgggtggggcggaaccggattgggacggg

SEQ ID NO: 10548 - DNA, 1622 bp, Artificial sequence
  DNA replication origin
ataataacaatcaacacattgacagcacctactatgtcctggtctcattttaagcacttcctagatactttttgaaaatcctcaaactgaccctaggaggtaggtaccatcactatcacccccatattacagttgaagatgagtgattcaagataggtcaggcaccaagctcaaggtcacaccattagcaatagactcctcaggagcagagctaatgtgaatgaacgtggctggcccggcgccgggggcagatacctgggaacagccatgagctttgtgatgatcaaggggcaatctgtgtgtgtgcttggtgggatcttgcagaggttggaagaggccagagaagactccaccagctcttgctgaaaaagtcttgcagcctcccctcagccctaaaaccttcccggagaggtgtgggggagcacagaacaggaaggtgggggtggagggaggagggtggggctgtgaggagggagggagggagggggttctccttctaagcctccatccagtcccattttattctcacaacaggttatcaaaaggaaactcagagaggggaagtgtttcagccaaggtcacacagcaaaggcccagtttctggatctcagtcctcccttgtctcatcttttccactctggggatccagaagtcattggcccagcctcccgctgtgtgtagggggagctcatgctctgggggtgggagagaccgacctgtcagtgacttgaagggtgatcggtttgggggtggcagacacgaagtcctggtaggaggaacccaccagcctcccacccaccaaggctgagtgtgtgggcttcaggggcaacagcagctgaaaggaggcaggttctcagaggacagtgaccagtggccacccactcccaccagtcagggcaactgagaactatgggtccactgagtttggcaagttaggggttactggtgaccttggccagagcagtgccagagaaaatgcggggaggaggagacagaggacagatgtctgtctgcatcctatagaaatgaggggatgaagataacctggaagggtgacgggtgcggagaccaggggagtgggctctagggcatgccagcagggaacacccttgcttccctgaaaatagggaaaactgagtgcagggtgtatgggaactctctatactatctttgtaacttttctgtaaatctaacactgttctaaaatagaaagtttatttaaaaatgttgatggcaagaggtgagagtgggcgtggctggagagtttgtaggtggctggtggggaggcaggaatttgaggaaggaagagcttagatgcatttagggcttctgttttttggatgcaaaattgagtgtgcaggaggctggggggtgaggggagcggggggggcgaggagctgtgagctaggacaaatcaaaggaagctggaagaggctgaggccacagatgctcatggccagccatctgctgcccctccccggctgcagggtctccctcctcaccagaatcaggctcttcatgcctaagggtgggggatggctgaagctctgtccctccatggctctccccacttcccttccccaccatgtgtcacccactcccttagggatccccatggcagg

SEQ ID NO: 10549 - DNA, 805 bp, Artificial sequence
  DNA replication origin
catggatacaagcgagaagggcacagggacggatggtaactgtagccgggagcccgtctgggaacgccgagcagcacggccagatctgccagtttatcgacagcgtccagaggttcagatttgtatgtgagatctggtgtttgaatattggcaactacattagattttttttttaatcctattagaaaaataacaaatgtgggccaaatccagcatgaggacggccagggcccagcatagtgaggaggtgagacgccggaacaccagcatcacagcactgggcaggaacagcacggccagggcaggaggacaacaacctccagggaaggggcaaggaagcctggacagggcaagagcgtgtcaagaagctgccgacaatgtcaaccaggcagataaggccgaggagtccctcgtggcatttcacaacaaggtgacatttgccagatcagtttagccgagctggggcggctgccagggttaaagaggaacaaggcgggagggtggggaggatgtggaaggagagagtgcagacagctcttttaagaggtttggctgtggtgggccaagatgaccgccaagctcagctgagaggccagggtgtgggtggcgggagaggcctgggaggcatctgctggaggatggtgggagaagatgggagaagttgggagggggccgtaaggagagagtggggtgaagggcaggggcaaatgcagaaccgtggagctggagctggcctagagtggggcaggagcaggtgccaggcacctccttgaaacagccaccctcactccgtaggccggaaaca

SEQ ID NO: 10550 - DNA, 1014 bp, Artificial sequence
  DNA replication origin
aactgctggtgacaggagaggcagctttagagcagggaggaccccgggaggaagggctgacgactggagcctcataaaagctgagccgcccctgggcaaaccctggagctgccctgtcctgctggcctgcctgttctacctggcaagagctgatagagtcggctgggcacagtggctcacacctgtagtcccagcactttgggaggccaaggcaggcctgagatcacctgaggtgaggagtttgagaccagcctggccaacatggtaaaaccccgtctctactaaaaatacaaaattagccaggcatggtggcgggtgcctgtaatcccagctactcaggaggctgaggcaggagaatctcttgaacccaggaggcagaggttgcagtgagccgagatcgcgccactgcacgccaacgtgggcaacacagtgagactctgtttcaaaaaaaaaaaaaaaagagctgacagagatgagagcaggccaggcctgcgaattaggaaggctctagaatccggcacgctgatgctggggggtgtttgatgctgcttggccccacggggcagtgcacagagggagtggctccaggcctgtatgctctgagagcagagggagacagagagcaggagggaggggcagacgcgctgggagggggcaggcccctctttgcccagagagcagcaaaggtaggggtgcagcttcagcctatggttggcccttcggctatttcgccacggcagatgctgctagcagttgttgtgggtgggctggggtaggtagcgtgggattaagaatgggaggacccagcccaggtccctactcctactccagctgagaactgaatccttattccccccagtcgcagctgaggcaagacaggtgggcagacaggtggggctgggctgcaggatgggaaagccagggtcggacaggaacaggccacccaccggatgaccttgtggcactggtgacacacgggagtcttgccgttgttgctgccccctcctggcaccc

SEQ ID NO: 10551 - DNA, 1596 bp, Artificial sequence
  DNA replication origin
ggcaggcccctctttgcccagagagcagcaaaggtaggggtgcagcttcagcctatggttggcccttcggctatttcgccacggcagatgctgctagcagttgttgtgggtgggctggggtaggtagcgtgggattaagaatgggaggacccagcccaggtccctactcctactccagctgagaactgaatccttattccccccagtcgcagctgaggcaagacaggtgggcagacaggtggggctgggctgcaggatgggaaagccagggtcggacaggaacaggccacccaccggatgaccttgtggcactggtgacacacgggagtcttgccgttgttgctgccccctcctggcacccctccggcagctgcctgcacaatggaggtgcggctctgcagcggcgtgggcgtggccggctggctgtgccgggtcagcactgtgctcgttttgtccggggcatagcgctcggcaaacgcagggtccacagcccagggcgggcggctggtagggctgggggcggtagggcctgccggggaaagtgactctaaaggggtgcccagggaccccaaaggacgggggtggagccccaggcagctgagagaagcccaccacccccatgcccctggaggctgcccacccttgcccaggcccgagcccactccctctcaccaggccagggctcctggggtgtagatgaggctggggctggggcttctgtcctgggcacctggctgcaagatctgccattcaaggccctgcatggctgagcttcctgacatggccccaccccccaacctgggtcctgctggccccacgggagatgactgggggcgtggaaactgccgagttggattccaggtcccactggggtagggatgggaagggcagcttctcctagcaatgtccagttagctggtgtgcggtctctagctgggagacgaggcagggctcccgcttctgaggcagctcctggggttcccctcatgccaggaagccatctgtgatggcagggcagggcccctttgccaggtaccccctcccactgaaaacgaggacggcagggcccaaacagtccgaaccacgaaacacccccacaccccaaatgcaaaccaggtccacaaagatagaagacaggcagagcaagcagggctgagaatgtttattccatgcccaaggcagcacagacctggcagacagcagtaccacagggcaaagagggaaggcagtgtcagatgaacccaggtgggcggccagggccaggccagcaggaggctcaggccaggggcacgaaagggggggtgaggtaggcagaagctggaggcactaagggggtgccctgggcaggaggaacagaaagagggaggcagagagggcagccggctggagagggccgggctacgactgcacgttgagcacgtgggcagagcgctggtggtgccagtcccggaggcgggtgtagcgtgggctctgcagctccaggacatacttttccctgaggggcagagagagagggaggaagaagtggaaggaaggagagatggaagggaggcagggagggaggagggaaggaaggagggagggaagaaatgaaag

SEQ ID NO: 10552 - DNA, 773 bp, Artificial sequence
  DNA replication origin
agacagcagtaccacagggcaaagagggaaggcagtgtcagatgaacccaggtgggcggccagggccaggccagcaggaggctcaggccaggggcacgaaagggggggtgaggtaggcagaagctggaggcactaagggggtgccctgggcaggaggaacagaaagagggaggcagagagggcagccggctggagagggccgggctacgactgcacgttgagcacgtgggcagagcgctggtggtgccagtcccggaggcgggtgtagcgtgggctctgcagctccaggacatacttttccctgaggggcagagagagagggaggaagaagtggaaggaaggagagatggaagggaggcagggagggaggagggaaggaaggagggagggaagaaatgaaagaaggaaggaaggaggaagggaaggaaggaaggaaggaaggaaggaaggaaggaaggaaggaaggaaggaagggagaattgagagccccagctgggagcctcaggagtagacacagggcagtagctggaatggaagaggcaggaggtgggagaggggctggtgcccgtccctgtaccttgatttcttcaggtgctcctcatccgggtcttgcactgagagggcagaggcaggcattgaccaaaaaagacacagggtcagggatcacgcctgggctgggggcgaggaaagtaccccctgccctgggctggcacttactgaactcggtgcctgtgaggtgggcaaggatgcggaaggaacgcgactggcctgtc

SEQ ID NO: 10553 - DNA, 960 bp, Artificial sequence
  DNA replication origin
aaggaaggagagatggaagggaggcagggagggaggagggaaggaaggagggagggaagaaatgaaagaaggaaggaaggaggaagggaaggaaggaaggaaggaaggaaggaaggaaggaaggaaggaaggaaggaagggagaattgagagccccagctgggagcctcaggagtagacacagggcagtagctggaatggaagaggcaggaggtgggagaggggctggtgcccgtccctgtaccttgatttcttcaggtgctcctcatccgggtcttgcactgagagggcagaggcaggcattgaccaaaaaagacacagggtcagggatcacgcctgggctgggggcgaggaaagtaccccctgccctgggctggcacttactgaactcggtgcctgtgaggtgggcaaggatgcggaaggaacgcgactggcctgtccccggccgcggccgccagtcctctgtgttctccatcagccgctgcttgctggcatctgggaccagcggtcggagcggctgtctgtggggagggtgtggctcagaaccccacactgggggtgggcggtgggggcagcccctcccaggatttggtgcatgtgggtttgggttacagtgatgggagggagtgggtaagggtgaggccaggagccctgctgggcgggtaggtgagaggacaggagggcgaagtggagaggagggcagccagggtggggaggggccgccacccagagtgccaaaaggaagaagaaaggcacaggcagaggggggctcactgacttgtcaggggtctgcacctgtgaaggaaataagacagacagacagataaagggacaaagggacagacacaggagaggaagaaagacggggaggggtcagaacagccggggacaaggcggcactgagtgtctggggctcagctggcccgacaccacaacccaacccccagccgccagcaggggg

SEQ ID NO: 10554 - DNA, 2053 bp, Artificial sequence
  DNA replication origin
agttgtttaacctctctgtgtacatttgcaagtgcaaaatgggtaaaatcccagattactccacaaggttgttggaagattcagtgtcaatatgtagcatagttggtgctcaataaactgaagcaagtcttcttatctagcgagtgaggaaggggccgccgagctctcttagccttctgacctcctacgcaagcaagaggtcatgttgagcccagctcgcctttcttttcccagtgctgtcaagctctgtgcctggctgccctgccctctgacatctctctgaaacctcttgcctcccctctccctgcctcagctcagtctgtgcactgacccacctgaggagcctcctggggccactggcagcctggacccccccagatcccccccacccagtgaaattgtcttccagcactgcctcacaaaagcctacttgatgcagtgccaggcctcttgccagatggctgggtggtcccttaggcttggacccagtcaagctgccctgcctgtgttgctggggctgggctagaggcctggaaggggtttatcagggtcaccctctcagggcctgggagatacccaatcccagacattaaaactgccagtagcccctctaccttcaaagccaagtcctggtcccttcccctggcattcaaagccatcgtaagtgaactctcacccgctaggcagcacacgccattctcctttaccgaggcccaccgcttcctcaaagtcattcctgatggtctcagctcatgctggtggcagccatttctcccagcctactgtctctactcattgccacaggaaccagggactcccagctcaagagcctgaaggattggggtcaggggaaattggcagtcgagggcttgggagtgacagccatgtatggcctacgaagtcccagctgtcaacttaggtcccattcaggcagtgttcacagggaaccgggagataacagggcctgttcctggctctcaaagggtcccagcagacccctatagatggcccccgacagggtgctggggggtgagaggtccataagagcccccggtggtttcggggaggaagctgccccctgcatgggccagagggcatatctggtaggtggagtggcctgggcaggaggccagcaggagcctcaaaaggcaatggtcctcctgaaacacttgggctttagcctgagcgtggctgtttgtggacatcatagcaatttctggactgtgggggagggtggtggcggtgaatagataagcatcgtgactggggaagctcaggtgagcaccacctgagggagagggtctggcagtgaataaataagcagtgtgactgggaaattgtgaagctcaggtgagcgccaccacctcctgggttgctttagtgtccagcagctgcctagaactatgttgaatgaagagctctctgggttctggaagtgggacagctttgggtggggcagtgttaccaccgtcagcctggcttgggtctgcagggtccagggcctcggtcactttgcttctctctccacagctcactcctgggggcaaagcggcgcaggccggagtggccgtgggtgactgggtgctgagcatcgatggcgagaatgcgggtagcctcacacacatcgaagctcagaacaagatccgggcctgcggggagcgcctcagcctgggcctcagcaggtatgcgggtggacatggatgggtgcgcccgcgctggcagtggggatccctgcgggcccggcccgctgtcacgctttccttctcctccagggcccagccggttcagagcaaaccgcagaaggtacgaggctggccgggacatccgggcggtgggcggtgtgggcttggacggccaggcctgctcgccctcctggcacattctcggtaccccaatccctggccgggagtggagggcagaaaccggagctaaggcgggtctagggccctggagttgagccaggggctgctgcacggtcctggcaccacgcatgtccgcctgtctgtccgcctgtctgtccgcctgctgcctcccgccgccggcgctgcgtgct

SEQ ID NO: 10555 - DNA, 1380 bp, Artificial sequence
  DNA replication origin
aaggctaagagagctcggcggccccttcctcactcgctagataagaagacttgcttcagtttattgagcaccaactatgctacatattgacactgaatcttccaacaaccttgtggagtaatctgggattttacccattttgcacttgcaaatgtacacagagaggttaaacaacttgcctcaagtcacccagctagtaagaggcagagccaggaagtgtctctgaccctaaggctccaccactgtgggccacctctgctgagcatgggggcccaactgaggggtcagcccacctggagacaccctgagccactccctcacctttagttcaatccaactaaatcaaccccttatactgtgtatggggaagtgacaccccagaggggaagtgacttactcaaggtcatggtgagtcagtagaagggaaacctggcccagccactccctgcccacagggctggctcctgggagctgtgggctgagcccgaggtgggggtcttggggtgcagctagctggctcctggagagggggtggggggcggggacggcttcccttcccagagtgaggagggcaggaagcacagaggatgaggggtgttcagagcgtggggagggcagcaggagagcagaagacagcgctgggcgggtggctggagagaggcagggaggggctcaagccaggggcagggtaaggccagaggaaccaaggagggaaaaagccagggggctggaccctgcatgaggtgggggtgagtcagcctgagcagcccagccccccagtcccagacgttacctcatctcccaggcctgggcccacagccagcccttgcccctcccacctccctccattctggggtcaggggagggggagggggctggcctaactcagaaaagcccacctcacccacccatgtgggcccaggtccaactccagggctgggatcagctagtggccccgcccacatgccagggatgctgaccagggagctggagcccggagtgcccccaacaggccatatctgaaagtcatctccatcagggaagaaactgaggttcaggctccccagacacactgggccagcactttcccagggagcaggacgtcaggtaggtttcagggctgtgtgagggctatgtagtgggacgtgtgtcatagggcaaccactgcctcactaccctgctggcggggcaggttccaggagaatgccatcaaaggacccctgagaagagcactgctggcctgcccaccctaacccccacgcccagctcctacagacagactccagcttgagcccctcctcaggccacgaccctctgggcccctccaggctgggcttgccttgggcttcctgacaacagctgcctgcccacccggcgcct

SEQ ID NO: 10556 - DNA, 683 bp, Artificial sequence
  DNA replication origin
gccaggcaggcacgggcagcccctgagcacgcccaagccataggaggcaggtattttgtcaggctggcctgggctgctggctggcggacctcactttggaaagacaggagcagcccccctccccttgggactggaacggtgaggggtgcctgaatccaggcttgaggttctttgcaaccaggggtgggccgagggactaaactggcgcggcctccccccaagccagcctggagcctcgggcggccgggtgagtcaggggccggctctcctctcccccgcccccaggtcccggcaggcaggccgcggctggagcctgctcggactatataaggcgtgtaagctgacactgtgcggagagccagcggagggagcacacgggggcttgggacgcgaggggggggggaggggaggggaggggaggggaggggagggaggcggctgcagcggatcctcctagccattccgggaccagtcgaggctgctgggagccagggcgggacccctgggtgctgaagaaggggaaggcgggagtggggtgcggcccctgtggagacagatgggggctgggaccctcaagcatagcttggagggggatccttccccgagcccagtggggggtggtgcctcccacacagaactgctcccacaccgacgtgactcagtttccccttagtcccccgccc

SEQ ID NO: 10557 - DNA, 793 bp, Artificial sequence
  DNA replication origin
ggccccatggcctccaggccacaggggaccttgagaagagagatctcaggggacgggtgcggacaagagcccgcctggcatggcttcaagagataactgaaggaaagcaagtggagacgcgataaacagacaactccctggaggaattttactctcgagaggagaattaaagggtagtagctggagagggatgtggggtcaagagaaggtctttaacgacgagaactctcacggcggtttgtgcagaacagggtgggtgtgatgactgtggatggagaggggagaactgcagcgactctgtcctaggaggaggtgatgggccgggaccaccaagcgagtggagggtggacgccccttccctcaccccgacacccgcatgtgctcagtgtccgtgccgccggccctagtgcctgggctgaacgcggggccgggactctgaggacgcctcccaggcggcgcagtccgctctggccaaggtggagcgggacgcggcgcttccgacggtgcgcgggtcggctcggggttgcagggacatccggcgtccgctcctgccctgttttcctgccttcggcagagcgttgcgcaactctagctttaaacgcccctgtccccctcaacttgtctcccccagcccctctgatttacagattctgcagtccccgagggttgcgcctacgataccgacactcgcggcagccctgcgaggcgagtatgatcgtcccatttttcggagtagcaaactaaggttcagagactactatgtcccaggtcggtctggtttgaaggtccgctt

SEQ ID NO: 10558 - DNA, 1243 bp, Artificial sequence
  DNA replication origin
tagactctttttttttttttttttttgagatagagtctcgctctgtcacccacactggagtgcagtggagccatcttggctcactacaacctctgctgcccaggttcaagtcattctcctgcctcagcctctcaagtagctgggattataggcatatgcgccaccacgcccagctaatttttgtatttttagtagagacggggtttcaccatattggccaggatggtctcgaactcctgacctcaagtgatcctcccccgcctcaacctcccaaagtgctggggttacaggcgtgaaccactgcacccggcccatttatcattagattctcataaggaatgagcaacctagatccctcgcatgcacagttcacaatagggttcacgctcctatgggagtctaatgctgccgctgcactcagcttctctggcttgccgctgctcaccttctgctgtgcagcccagttcctaacaggccacaaacggggagttggggacccctgatctagtaaacatctaggcagggttttggataatggagttagagttcctggggagaggtcaggctggccatgaaacatgggatgcctttgcatataggtggtgttgaaagccacaggacagtacggggtctcagggggtgagcataaagagaggcgacatcagatggccaaggccagaggcagaggaggatgggaaggaggggccagtggggcagggggaagctgtgaagccagggaaaaagggtgtttcgcggaaaaggatcaacctggaccagtgctgcccctaggcagggcaggatgaaacttaaccaccacggattccatggccccatggcctccaggccacaggggaccttgagaagagagatctcaggggacgggtgcggacaagagcccgcctggcatggcttcaagagataactgaaggaaagcaagtggagacgcgataaacagacaactccctggaggaattttactctcgagaggagaattaaagggtagtagctggagagggatgtggggtcaagagaaggtctttaacgacgagaactctcacggcggtttgtgcagaacagggtgggtgtgatgactgtggatggagaggggagaactgcagcgactctgtcctaggaggaggtgatgggccgggaccaccaagcgagtggagggtggacgccccttccctcaccccgacacccgcatgtgctcagtgtccgtgccgccggccctagtgcctgggct

SEQ ID NO: 10559 - DNA, 1157 bp, Artificial sequence
  DNA replication origin
gtcaggagttcgagaccagcctgcccaatatggtaaaaccctgtctctactaaaaatacaaaaaattagccaggcatggtggtgggcacctgtaatcccagctacttgggagactgaggcaggagaatcacttaaacccgggaggcgggctgggcgcggtggctcatgcctgtaatcccagcactttgggaggccgagacaggcggatcatgaggtcaggagatcgagatcatcctggctaacatggtgaaaccccatctctactaaaaatacaaaaaaaattagccaggcctggtggcgggcacctgtagtcccagctacttgggaggctgaggcaggagaatggcgtgaacctgggaggcggagcttgcagtgagccaagatcgcgccactgcactccagcctgggcgacaagagtgagactccatcttaaagaaaaaaaacaaacccgggaggcggaaattgcagtcagccgagatctcgccattgcactcaagtatgggtgacagagcaagactccatgtcaaaaaaaaaggcagttgacaggagcaaggagcctggtgaggaagctgtggcatttgacccggctgtgttgctatgggccagggtggtgctagtagaggagctgagtgggaaagagcacaggggacatgctgaaggcctgggtgtggggatgaggcagagattgggggcaccttgcagggtcatagcaggtggctgtggtgagatggaggaagacacctggggtactgctctaggctgtcagacatacagaagctggcccagccaagcccaggggctgcaagggacatccttttgtgtccccagtgatctgcagctctcagacaccctcaagcacagtgcctcttgcccagcccagcactctcagtggggagccaggtgggagaacaggctcggaaggggacctaggcttatgcagcgagccgggcaaagctggaactggagcccaggcccctggatgccccctggcttgtggagttctgggatactgaggggaggggacagggcatgggagtgcggtgctctcacctttgacttgaactcattccccaggggacaggggaggcctcctcaggatccacagatgcccagtctcccaagaggggcctggtccccatggaggaaaactccatcta

SEQ ID NO: 10560 - DNA, 1015 bp, Artificial sequence
  DNA replication origin
acaggaacccactgggcaaaggtctgaggacaggggcagcctggggagttgtgaacagagggagtcccgtgggcagaggccccgaggccggacagtgtggggtgtttaagggcagaaagaaggcgacgtggctggaaggaaaggagtgcaggaggaagccaactcacagagcttaggagagcggctgaaatgccctaggccatgtgtgtggttttgttctgagtgagaggcgaaggctttggagggtttaagccggacatgtttgtaaagccccaaaaggtctgtgatgggtcaaaaggaagtgagcctgggggttcttcaaagaggtaaacagagttaccatgtggcccacaggtccactcctaggtgtgtgcccaagagaacttgaacaggtgttcaaacaaaacatgtacatgtgaggcaggaggatcgcatgagccccagaggtcgaggctgcagtgagctgtaatcgtgccacttcactccagcccgggagacagagcaagaccctatcttaaaaaaaaacccacatggacatgaacgtccatagcagcactactcacagccaccagaaggtggaaacagcctacatggccatcagctgacaaatggataagcaaaacgtggtccgtccgcaagatggaatactactcagccataaaaacaaacaaacgcctggcacagtagctcttgcctgtaatcttagcactttgggaggctgaggtaggaggattgcttgagcctaggaattcaagatcagcctgggcaacatagtgagaccctgtctcaaaaaaaaaaaagaaaagaagaaagaaagaaatgtacagacaaggtaactccattgggatagaaatcagatgagtgttggcaggagctggaggaagggagaagtggggagtggctgctcatgggtacagggcttccatgtgggatgatggaaaagttctggaactagacagtggcaacagtgcacagccttgtgagtatactaaaaagcactggtggccgggtgcgg

SEQ ID NO: 10561 - DNA, 1117 bp, Artificial sequence
  DNA replication origin
ccaatcccaagcatagccaaggcctccttacctggctccctgagaaactggggagcagaggcccgctcctggctgggagcgtttgccgagcagcttgtgctgagccaagtggcacggacaatctgccacccaagggtcttcaccctcccgctcccctcccgcagaagtgctggcggaaggtgtgggctctgctgtatgcaggaggcccatcaggcgtggcacggctggagagctgggaggtccgggatggtggcctgggagcagcgggtgacaggtcggcagggcctggccggcgaggggagcgacgggtcatccgcctggctgactgtgtgtccgtgctgccggctgacggcgagagctgcccccgggacaccggtgccttcctgctcaccaccaccgagcgaagccatctactggctgctcagcaccgccaggcctggatgggccccatctgccagctggccttcccggtgagtgcggcgagcaggggggcgattgggctggggcacctgcccccgacttgtccacctccacgctcacatcccatcacccagcaagctccaccgagcacctacaagcctgggaaaagtaaatctataatgactctcagagggccgtgcgtgccatggagaaaatggaccgccaggggagcaggaggaagtgagggagcgacgggcagggtggccagggaaggcctctcagaggagggccctgaatgacaggaacccactgggcaaaggtctgaggacaggggcagcctggggagttgtgaacagagggagtcccgtgggcagaggccccgaggccggacagtgtggggtgtttaagggcagaaagaaggcgacgtggctggaaggaaaggagtgcaggaggaagccaactcacagagcttaggagagcggctgaaatgccctaggccatgtgtgtggttttgttctgagtgagaggcgaaggctttggagggtttaagccggacatgtttgtaaagccccaaaaggtctgtgatgggtcaaaaggaagtgagcctgggggttcttcaaagaggtaaacagagttaccatgtggcccacaggtccactcctaggtgtgtgcccaagagaacttgaacaggtgttca

SEQ ID NO: 10562 - DNA, 967 bp, Artificial sequence
  DNA replication origin
cgcgcatgcgtgcagcaaagaatggaggagtcggaacccgaacggaaggtaggagagaggcgagaccccgcgcgtgtgggagcgggcgtgaagaggggagcaggccgtgcctgactggcgtgtgcttgcagcgggctcgcaccgacgaggtgcctgccggaggaagccgctccgaggcggaagatgaggacgacgaggactacgtgccctatgtgccgttacggcagcgccggcagctactggtgaggggcacgcgtccggggagggatggggccgtgaccgcggggtcgcagggggcgggcgtggcctcggcctccgtggggaggagggcagtctgaggagtgagcttcagtacaccagggcgcggcccccagacaaacgagggaccgacggcttgatctgaggggtagggcagctttgcgcctcgggcacaggatcctcgccccaaagccaggatcctgacgctgaccttgtggactccatgcccatcctatctgtggatcccgggtggaacctcagctccagaagctgctgcagcgaagacgcaagggagctgcggaggaagagcagcaggacagcggtagtgaaccccggggagatgaggacgacatcccgctaggccctcagtccaacgtcagcctcctggatcagcaccagcaccttaaagagaaggctgaaggtgggctgggcagcactgcctgggcgagaaagaagaagctgagcctggtacaccgttttggtatctgtctgacatcttccacttcttttctcagcgcgcaaagagtctgccaaggagaagcagctgaaggaagaagagaagatcctggagagtgttgccgagggccgaggtatggttgtagccaggatagtgagaaggtggactgagtcttctcctcccagccccaggcatgttatatctcaagggatctggcttctcagaagcaggagccagccctgagccatgtct

SEQ ID NO: 10563 - DNA, 694 bp, Artificial sequence
  DNA replication origin
gtaggtgcacagcccgggggagggtgaagaggctcaaaggagagcgcttactagggggtggggagaggggcatcttctatcttggaaaagaggccagaccaggtgaaaaagggtcaagaggaggcagtggaaggagacagttgcatttgatttcttgaatgacagaactgggcttgtgggaggaaatgcgatctcttttctctcagtagggataacagatgaagtgcctggggttcctgctactcctggttcccatggaggtggagaagaggcaggaggccaccttggatctggaagatacttctggggcttgtgggcatctcagtttggcaaagggggctgactgagcccaaccccttcagaggagaggaggactaaagtgagtgtaaagaagacagtctggactctggggcagcacaagggtcacagggagccccagctctgaaggctgtcctggctgcaggctctctgagctgcccctggggagctgagggtccaggaagtttgctgcttaggcccagagaggagctggcctggcactggaaagaggagaaagacaggtggggccatcatgggggaagtgagttgtttgtgagctcagtctgcctgccccagccttccagtctccaggacagctgtgtggttgccagccggaaaaggcctgaccccagggacacagctgagggttgagata

SEQ ID NO: 10564 - DNA, 1192 bp, Artificial sequence
  DNA replication origin
acaaaacaaaaaaaccccacatactatttttttttttttttttaaagctctgtcacccaggctggagtgcagtggcatgatcaatgctcacagcaaccctaaactcctgggttcaggcaatcctcctgcctcagcctcctgagtagctaggactacagttgcatgccaccatgcctggctaattttcaaaattttttgtagagaggggggtcttgccatgttgcccaggctggtctcaaactcctaggctcaagtgatcttcctgcctaggactcccaaagcgctaggagtataggtgtgagccactgtgccaggccaaaacacatacttctttacaattgaaaaataatgaaaggaaagacatagtctactttttaattgccacctcaaagttaaccccaaattttccaaaattctaagttcaagtgggtagcgagtttgcccttcatgcagcacacttacctgtgagtgctagggagtggctgagagctcgggggtgggaggagaggcccactgcagtgcccaccacagtgcccgctgcaggggtggctgcaccccgagaatggtgggggcatcttcaggagcggcatgctggtggagggtagatgggagctctgacatggccctggagtgtggggggcagtggcagcagcaacagggcactctgaagcctgggcagggaaaggtgctgccggggtggtgggcagcaggtgtgggtggggtggggagccaaaggagctggggtgagacgggattagagatgctggctgcgggtggtggccggtggggctgttagggggagcagtgaggtctgagtgctggtggtgctccgagacggggaaagcctcacctgtgggcagagggaggagaaaggggtcagaatgggagcccagacctgggaaggaaagcccacaggctcactgccacagcatcctgcttctgtgacaagagggcacagcctctcagcacaggggaccctggagctgcagaagattctgtgtgggcagcaacacagctgagcaggctcaaggagcccaggcccaagcaagaaggtactaggaatgctgattccacacaaggccccatgccttttctgcagcatgagcagaagatatgcattctgtctctgagggtctctctaggatctgcttgtacacaggtgctcctcaggcctggaggatgatctgcagaa

SEQ ID NO: 10565 - DNA, 1953 bp, Artificial sequence
  DNA replication origin
gggtggtgaccttattcaaaatggcgcaggcggcctcgggggctagtgcggcggcgcggactccgcgtgccctctgacctgttggcagcaggcggagggggggaaccgggcgccgccatattggctgttgtcctgtgaggggagcggtagcggcggcggcggcggcggcggcggcggcggcggcggcggcgtgtggagcgagggagcggcgcgagcggcggcatgacgcggaggcggagcaggccgagcggcggtgcgggcaggcgcgagcgggctcgggccgcggggccgcagaagccccaggcgcccgagcccccgccgccgccaagcctggaggcgggagcgggtgcaggccctccggaggcgccggcggagcccgaccacgacggccccagggaggatgacgaacccaacctggtgcccggcccgcaggtaggagcgagcggggagacttcggcggctcgggcgctttcaccttccccgagcgggagcgggagtggggcggggttggggatgggccatcctgccgcggctggggtagcagccttcccccgggtccggcgccgaagctttctcccccggggcgggaatggaggctggacccctctccccaaagccgaggctcggtccgcgctcctgcgactaggctgaagctgctcccctctccccgccgcctccgggcgttccggccgtacacccacactgggactgggactgggactgggctgtgatcccgaggccgcagctccgctctcggcccgccacctcccccgggcccacctgctccctcagccacaggccatctcggggctctgggactggacgactgcagcctcttccctctgcccccgggaacggctccactccgtcccctgcagcgcctgcagccgcggccccctcagcagctgtgtctcctggcgcctcctcgccatacccagcagagcagttggagcagacagccaggctgcccggaggagtttttggtggggtttctgcactgaggtggaaacccagcagaacctgcccttcttccctcccctgctccgcaaggcagcccaccccgaccttgagatcccaggtttggagaatcctgctgagagcgaacagtaggaggattccccaaagcttccagcttgccacctggaagaaggtcactttcttttgagcaaaggagataacgggaggtaccctgccaaagttcactgagaggcgggggtgacatgggccacggttgctctgggagggttgtggcactcggggctgggtggctctccctaagcttgctctgacaaaagagttttgagttggtcttttggctgagcctgcccaggaaggcaggctcctgcaggagtcttggagggtcggatgcggcgccggatgaggatgaggcgtggcggaagatgcgtttggctctgcagacactgcatcgggcagcaggggactctgggaggctggtgcagccagaaggcatggctcttgacagccttctagtagaatctctggaattgtgcatgtgagtggggttgccgtttggggtaccttcccacaaagcctcccctgacctccccagttgcgtcaggtgccctctctgtgcccacagccctctgtgcctccctctggtagcactcccctttctgtgatgaaacattgtgttgatatgtctgttgcctgccctggactgtgaactccacagggacacaggctatgccatctttctctgatcttccacgcctcgcccagggccttgctaacacagaataaaaataactaggtgaatgagagagaaaatgaatcggtccagaacccgtgcttattgtaacccagttttcatgctgatttcctttgtgtctcagatcacaataaggtttttaattaatgaaaatgtcagcacttactgagtgtcagaagctccaccttcatccgcatccccatctcctatcctaggctgacact

SEQ ID NO: 10566 - DNA, 1032 bp, Artificial sequence
  DNA replication origin
atccccaaccccgccccactcccgctcccgctcggggaaggtgaaagcgcccgagccgccgaagtctccccgctcgctcctacctgcgggccgggcaccaggttgggttcgtcatcctccctggggccgtcgtggtcgggctccgccggcgcctccggagggcctgcacccgctcccgcctccaggcttggcggcggcgggggctcgggcgcctggggcttctgcggccccgcggcccgagcccgctcgcgcctgcccgcaccgccgctcggcctgctccgcctccgcgtcatgccgccgctcgcgccgctccctcgctccacacgccgccgccgccgccgccgccgccgccgccgccgccgccgctaccgctcccctcacaggacaacagccaatatggcggcgcccggttccccccctccgcctgctgccaacaggtcagagggcacgcggagtccgcgccgccgcactagcccccgaggccgcctgcgccattttgaataaggtcaccacccggagttcgctgggagaaaaacttggtggggagacgcccttccccccctacgcgggacgggaaggatgcaacctgctggaggaacgcgtgtaatgcggtggtaatcgcgctgcaccaccctagcacttaataattgcctgttaaatggatgagtgaattaatttctatagtgttacaatactttcacacccatcgtctgactccttccgacagcacagcgaggcaggtacggatcattcccattttgcaggtgagaaatattgaggcaacataaaggcctggaaaaggttgctgtacatcattttgttggaactcctgggctcgtggacggcctgagttgaaagggacgaaggtctttatttgcaacatatggtctactgggagtccagcgttctgtgcttgggacagtgggactcaaacccgactccttgttcccgagtctgatggggaaggtagacacgtaggtacatagttacaaccggtgtgataacgatgagacgactaggtgtttccaaaaa

SEQ ID NO: 10567 - DNA, 955 bp, Artificial sequence
  DNA replication origin
tgggcgaaagagcgagactccatctccaaaaataaataaagaaagaaagaatttgggggggggtcagccccccgcccggccagccgcccagtccgggaggtgaggggcgcctctgcctggccgcccctactgggaagtgaggagcccctctgcctggccagccgccccgtccgggagggaggtgggggggtcagccccccgcccggccagccgccccgtccgggagggaggttggggggtcagtcccccgcccggccagccgccccgtccgggaggtgaggggcgcctctgcccggccgcccctacggggaagtgaggagcccctctgcccggccagccgccccgtctgggagggaggtgggggggtcagccccctgcccggccagccgccccatccgggaggtgaggggtgcctctgcccggccgcccctacagggaagtgaggagcccctctgcccggccaccaccccatctgggaggtgtgcccaacagctcattgagaacgggccaggatgacaatggcggctttgtggaatagaaaggggggaaaggtggggaaaagattgagaaattggatggttgccgtgtctgtgtaaaaagaagtagacatgggagacttttcattttgttctgtactaagaaaaattcttctgccttgggatgctgttaatctataaccttacccccaaccccgtgctctctgaaacatgtgctgtgtcaactcagggttaaatggattaagggcggtgcaagacgtgctttgttaaacagatgcttgaaggcagcattctcattaagagtcatcaccactccctaatctcaagtacccagggacacaaacgctgcggaaggccgcagggtcctctgcctaggaaaagcagagacgcttgttcacatgtttatctgctgaccttccctccactattgtcctatgaccctgccaaatccccctctg

SEQ ID NO: 10568 - DNA, 1157 bp, Artificial sequence
  DNA replication origin
ggggaacatcgtgcggagaggcggcggcgcatggggcaggcgctcgcagcccggccggcccggcctcccgggcctacgcggcgcctccgcctcccgctccgcccaggcctgtccgccccgccccccggtccgccgggtccgccgctccggccgcgccgccagctcccggagccgccgcctccaaggttctgcttgcgagcagcgcgggcgcgcctccctctctgggcggctccttcctagccgccccgggacccgcctggaagcccgagaaactgaagcccagaggcccagggcctcccaacaaatcactgggctgggactggacctaagagtccagactcccaaaccaacgctcggggagaatctgcatctccgtcctctttccgaggggaggcgggagcgtcccggggtccccgtctcggcccaggcggcgcgttctccgcgcaagcttggaggggcaaagccaagctcacggctcggcgctgagttcagctgacagcccgcgcaggcgttaggagccgagccctgaagacaagttgactgaatttgaaacccgactctgcttgccgggcgcggtggctcacgcctgtaatcccagcactttgggaggccgaggcgggcggatcacgaggtcaggagagcgagaccatcctggctaacacggtgaaaccccgtctctactaaaaatacaaaaaattagccgggcgtggtggcgggcgcctgttagtcccagctactcgggaggctgaggcaggagcatggtgtgaacccaggaggcggagcttgcagtgagtcgagatcgcaccactgcactccagcctgggtgacagggcgagactccgtcaaaaaaaaaagaaaagaaaaagaaaaagaaactagactctgccaattcagctgtgttttgaccaagccacatctctgcatctgtttcctcacctgggtatatcaatggctcctattctatatggtagctgtggggattcaaggagaaagtgcaaacacttgtgcagcgctaggcacacagttcaacgccatataaatgacagctgtcatccaggaaaagggtactttggtggagctgagaactgaagaagggaataggagactgagttcccatatctgccccgtcaccgtgggaacttaaccatccccctcac

SEQ ID NO: 10569 - DNA, 1101 bp, Artificial sequence
  DNA replication origin
cccgcctcccctcggaaagaggacggagatgcagattctccccgagcgttggtttgggagtctggactcttaggtccagtcccagcccagtgatttgttgggaggccctgggcctctgggcttcagtttctcgggcttccaggcgggtcccggggcggctaggaaggagccgcccagagagggaggcgcgcccgcgctgctcgcaagcagaaccttggaggcggcggctccgggagctggcggcgcggccggagcggcggacccggcggaccggggggcggggcggacaggcctgggcggagcgggaggcggaggcgccgcgtaggcccgggaggccgggccggccgggctgcgagcgcctgccccatgcgccgccgcctctccgcacgatgttcccctcgcggaggaaagcggcgcagctgccctgggaggacggcaggtgagcggcggcggtgggcccgggccccgtcctcccgggcgccgctcccttctcggccgccggcggaatctgggaacccgaggccatcacgtctccatgtctgcgggtttctgtgagggcgtgtggttctccctgtgggtccctggcgctctgttccggtttctgtctgtccctgtgggtctctgcctcccccgccccctctccctttccgcggcactcgtccttcccccagcaccttccccccggcccgtgggtccgtatttctccattgacttccctttgtgagtttctgatcccctctttgctagtctctctcgttatgtgtttcgttgtgtctgtgtttctccaccagcctccctctatctgcatgcgggtctctgactccgctgacctctcaccatggatttgtgtttctcaatttgtctctgatccctgaggacgtgtattccgtttctctggtctctgccttcctcatcacatccatatagcctcagaccctacccttcctccttaacacttccccccatccttcgcaggccaccagcagaacccaccagacagaagctccgtgctctgcctggctggtcactgcctggcacgtactagacactccttatacacgcattagtccatttcctgtgcagctgtattggccctacgtg

SEQ ID NO: 10570 - DNA, 1038 bp, Artificial sequence
  DNA replication origin
gagagacgaggggagagaaagggaaggaggtctgccagaaagcagagaagggtgacagcctcgagggatgtgggatccagggagtctttttcctttgagagaggagccacttcagggtgtgtgtgctcatgggtatgctccaggagaggaacgctgatcgagagggagaggaagggcccaactgtggggtggggggaaatactgaaggatggggatggtgggagtcagcccggacagaagctggaacagccttgagtccctgtgcacagaggctggcaggtgagttgtggagggaactggggaaagttctcttccatttcattctgttttctgaaattggaagcaaagtcgtcagctatgagtgaggacgagggatgaatgaggagaacagatagttttaaaggctgcagtggacagaccagaggaaagtgaggctcccagcagggcagagggccttcctggcaggggcatcatcggcatggggacagcagcatggccgcctcacgtgttgtctttcctctccataccctccagtgcccaggcacaggtgtggagcagagagctggagtaaatcaggctgggattacgccagcagcaagggaccagaggcttgagggagtatgccagggagggttttaatgatggaccttggactccaggttgggtaaggaggaagtaaagacaagaagggtggcagggaaaaggggggggtctggggatctggatcaaggggacttgaaaaggtgggaagatcaggctggtggggctgagaatccatcttccagtgggagttacctagagggaaaggaggtgggggctggtgggtgagatctcaggctgtggtcatggaagggagcactttttggtaagggcagggattttaggataacgccagactgtgggcaactttaaagccgtggccttgaccctccctttccctaatccccgggccaatccccagggagtcctgtctgggcttcctccacagcacctctctctacccaccccccaccaggccatcaagccactgtcaccgca

SEQ ID NO: 10571 - DNA, 948 bp, Artificial sequence
  DNA replication origin
ctgcctggggctcagcacccacccgggggtccccatggtgcctatgctgccctctggcccagcactgacttcactcagcctgtggggcagtccctccactcatcgcatatttactaagcacccactatgtgccagaaaccattcaaagcacgggaggtacagcagtgaaaaaccaggccctgttctcaaggaactgagattccaatagaaggaaacagaaacaagcaaacacaaagcgtggccagcagtggttcgtgctggggggaaaagcaaagcaggcaaggagggcgatcttgctgggggtggaggtggctcttgtcctcggtggggccgtcagggagggccaggggaactgagtgacagaaacctgaaggcctgaagagatgacccacagggcagtgggtgcctagggctctgcataggagagatggcactgccacggcaggaggcaggagcagaccaacgggcagctgggcagggcgagggcagaggtggggatgttgggggtgacacagtgactgcacaaggcccaagggccactgaaggacggggctttgactcgggtaagatgggtgccatggaggctctgagcagggtagaggcgtgctgtgacttatgcctggacaggaccgccctagctgttgtgctggaagagactgtcagagcaggggtgaaagcagggagaccagctgggagactatggcaatgatttaggtgagagaccaaaagatgaaggtggcctagctcaggaggtggcagtggcaacagcgagaagcgggcagattctagatggattttgctgacgaataggacgcagtgtatgacagagaaggagcagctgaggatgacccccgggcttttgggcttgagcaatgagagcaaagagcttccattcccatggagaagaggacagagctacaggtttggggcagggcaggccaccagcaa

SEQ ID NO: 10572 - DNA, 2159 bp, Artificial sequence
  DNA replication origin
cgtcgccgccgccgccactgcctgggtcttcggtcggggcccgcagccatggaggattacatcgtgatctcggacgacagcggctctgagagctccgggggcgcccgcccgggccggtcgcggaggctgcgccgggccctgtcgcgaacctccggcgcgctgccccgccggaccgtggtgagtgagcgtcgcctcgtttgggggcgcgcgtcttcgcgaccctcggctgggcccgccgcccgcttcccgcccctggcgcctcacagctgcagccacttcccgccttgcctccttccgggcctctcgggccccggggagcgcggcgggccggggcaggggccagggcagggaccggggaggccgggcctcccaggctcagcgctgaagcccgagaggactgcggctggaaagcggccgagcacatggacgagctcctggcgcgcctgctgcaggggctggggtctcaggccggggccgcgggcgtcctcggagcctcggcgggacgtgggggctcgggtgtactggccgggccgatgcaggaaagcgggagcgcgtaattcttcggcctgtggtggacacagatgtgtgcagggaggtaacaggagcccaggctgggagggagggaagcgcgggcctgggccagatggtggccgcgctccagggcctgactgcagagcgaggggcccgattttggagttgtacaggagggcgatttatttcctcagcacttaccctgtaccaagccctgaaggaatagggaaggaaacctcgcgcgctatttctgtttccctcagaaccccttcgtctttgtcgttcatgaggtggtgaattatctgcctttcgagaatcctgcatcgatgtttattgaatccctactatgggccagatgttgtaggggccggggatacaacggcgaacacaatatccatggtcccctcagaaggtgatacatcatcaggtggttgttgaggacctactcaagcggtgggaggtggagctttctctcagaaggcttccaacgatctccccagcctcccagagccatcccccggaaacacaaggattatcaagctgatgttatgtgtatagatcatacagtttaccatgcttcctatgcaaatactcgttcaagacgtttcctagcttctgctgcccctgttccctttctagctggtttacagtccctaaacctccattgggaaccccttctgtgcccgaggtacagtgccaagtgctagatgatcactatagaatgaatagcatgcaaaactagttaatatatattatttttcaagcaagagggtttctcaggacgtcttagagacaaatttagttgagttaggcagctcatgaggtagtgagagaagagatttccaagatagaaatgacccgacttcatgagtgaatggatatatctagggctgtggctgaatgtatcggacataatagatgcacaataaatatttgttggatgaaggaacgattgaaagaatatggggagagagaatggtttagatggatgtttgataagtataagagaagtgcatataaaagtagcagcaggcttgagatgaaggagatgctgaattcaggttggacctgttggatttacagtgttaataggaaatgtagatggatgtggccagctcagtagttggagaaaaggcaagaatggagatatttggcaatcatgcaaacagaaaggagtattgaaggcctaatagtgactgagatcatgaaggaaaagagtagagagagaaaaaaggtggaagggaaaaaatacttctttcctcctagttcctcctcattcctatagcctcttctctcactacctgtttaactttgtccttcccacttgcttcctttcctcccaagtgttgtccattttccctcattctcgtccagcttccttcttcagtggtcagatgccatgcttatctcagtcttttgtggtctttcacatacgtacatgggcgtagtctctcactgtttccctcacttgtgaccactcaagcaagcattttgatcttgagcctttgagttgaatcgaaatgaggggcaagttccagagagcagtacccaatttaaatcgtgcttctccagatatttattccagctctctaaaagctccaagcttattctcgttttatcttttttgc

SEQ ID NO: 10573 - DNA, 1368 bp, Artificial sequence
  DNA replication origin
gggaagtggctgcagctgtgaggcgccaggggcgggaagcgggcggcgggcccagccgagggtcgcgaagacgcgcgcccccaaacgaggcgacgctcactcaccacggtccggcggggcagcgcgccggaggttcgcgacagggcccggcgcagcctccgcgaccggcccgggcgggcgcccccggagctctcagagccgctgtcgtccgagatcacgatgtaatcctccatggctgcgggccccgaccgaagacccaggcagtggcggcggcggcgacgacttcggttcctgcttctgaggtggcggcggcgggggcggcggcagcggcggcggctacaacccgggccaccgccccgccggccccgccccgagccccgccccgccgggccgccaagccccgcccaccggcggcgggcggctgaggtcagggccagggtcgctgtgcttcgtggcggcgcgggtcctccgtttcccaggaggaagaaaaaaagaaaaatggagtcgcagccggcttcggcaggtgttggggccaggcgtgcgagacgccgaggccgcggggacttccccacctgcttccaaccgacgaaagcgtgaagtgaggcgcgcccagtcccaccctgcccaggtgtgaagcgcctcccggactgagagggccttgactgaggggcagggagagaggtcctggcccctgagtgaccgaggataggtgacctggcttctggccgagctaagggagagagagagaccccactttttggtgcacacgcccatgtgtatctgtaggataaatgcctaaaagcggacttattggggcaaaggccatgtttttgtagttttgataaatgatgccaaattaccctcctaaattgtaccagttttgcgatttcaccaacaatatgtgtctctcaggagtttaaactgagatttagagcaggggtgtccaatcttttggcttccccaggaagaagaattgtgttgggccatacataaaatacactaatgatagctgatgacctaaaggaaaagagttgcgaaaaaaaaaaactcttaatgttaaacagggagttaaacaagtttgacgtagacagttgttcagttggtatcaggatcagaagctgaaaaggtgcacaaaagaagccatgaagtagcagaggccatgaataattagatgttgtgaataagcagaagttataaaggtgaaaaaggttgtccccagtagaggaatcggtgggtagttggctggttggttggttgtagggcaggaccattaaaatcaagataggacctattggtacactaaatgtggggtattgacaaaatcctgctgctcaggctccagaagttttgcaaaatatgttaacagat

SEQ ID NO: 10574 - DNA, 1587 bp, Artificial sequence
  DNA replication origin
ccagaccccagaatggtagatccaccagcagcttgcactctgtgcctggaaaagctgcaggtactcaaaaccagcccttgagagtggtgtcgggggctgagccttgcaaagccacaggggcagagttgcccaaggccttgggagtccacgccttccatcagttgccctggatgtgggacatggagtcaaaggagattattttggagttttaggatttaatgactgccctgctgggtttcagacttgcatggggcctgtagcccctttgttttggttgatttctcccttttggaatgggaatatttacctaattcctatacctcaattgtatcttggaagtaactaacttgtttttgattttacagacctataggtggaaggaactagccttgtctcagatgagactttggactttggacttttgagttaatgctggaatgagttaagactttaggggactgttgggaaggcatgaaatgtggaaaggacctgacattggggactgtcaaattgtaatcctcaatgtttgaggtcgggcatggtggggggtgattggaccatggaggcggtttctctgtttgaggtcgggcatggtggggggtgattggaccctggaggcggtttctctgtttgaggtcgggcatggtggggggtgattggaccatggaggcggtttctctgtttgaggtcgggcatggtgggaggtgattggaccctggaggcggtttctctgtttgaggtcgggcatggtggggggtgattggaccatggaggcggtttctctgtttgaggtcgggcatggtgggaggtgattggaccatggaggcggtttctctgtttgaggtcgggcatggtgggaggtgattggaccatggaggcggtttctctgtttgaggtcgggcatggtggggggtgattggaccatggaggcggtttctctgtttgaggtcgggcatggtggggggtgattggaccatggaggcggtttctctgtttgaggtcgggcatggtggggggtgattggaccctggaggcggtttctctgtttgaggtcgggcatggtggggggtgattggaccctggaggcggtttctctgtttgaggtcgggcatggtgggaggtgattggaccctggaggcggtttctctgtttgaggtagggcatggtgggaggtgattggaccctggaggcggtttctctgtttgaggtcgggcatggtgggaggtgattggaccatggaggcggtttctctgtttgaggtcgggcatggtgggaggtgattggtccatggaggcggtttctctgtttgaggtcgggcatggtggggggtgattggaccatggaggcggtttctctgtttgaggtcgggcatggtggggggtgattggaccatggaggcggtttctctgtttgaggtcgggcatggtggggggtgattggaccatggaggcggtttctctgtttgaggtcgggcatggtgggaggtgattggaccatggaggcggtttctctgtttgaggtcgggcatggtgggaggtgattggatcatggaggcagtttctcatgaatggtttagcactatccccg

SEQ ID NO: 10575 - DNA, 971 bp, Artificial sequence
  DNA replication origin
tcagaccaggtaggctgtgcactcagtgaccctgacgccatccaagggaagctccgccatcccgcgccagtgccagagctgcaactgcaaactgcgcgtcctggcacgagcagcggtgggggcgggtgggggaaggagcgagtgactctccaggcgtcttccgctacctgacaccagccaggcagcccccagggccagagcgtcagcgccgaagccaggctcatccgggaagccactccggtggccgcggggtgcccatgccagcaccagatctctcttcggaaggaggagcggggcgggctacacggccaggcgggccctccccttaaggcggggtgggccgcgcgcctgcgattttccgtccgtggtcctggggcagccctggccagcccaggagaacccgcgagcccagcggcgcctgcacctgcggcttccgggagccgggcggctttgcgaggctcactaggtctgagaggtcggaggccgccagtgtcgctgctgaagggtggaccaggcgggatcgcggattctgggctagatcgcagacttggtatcgcggattgggatttggatcggggattttgagttggatcacggattgggggttggatcacggattggggtttggatcgcggattgggggttggataggggatttggagttggattggggatttggggctgggtgtggggcgagggggagtgaaaaggtgacacggagctgccgcggctcaggagccagtggttgggggtctgagaagaactcaccaccttgaagaagttcttcggctttgggagccgcaggggccggcggtccggggctccctaggccacgtctacaggggttcggggtaccgaatcggaagatccacagggcgctgtcaagggcgaagccgcggaagtggagcgctgcctggcgcgcaggagcagagacctggaagccggggacaggcagcacaggcagtggggtg

SEQ ID NO: 10576 - DNA, 1853 bp, Artificial sequence
  DNA replication origin
tctcatccaatcagaacatgctaacaaagtccaatcagagtaggcctctgcgttttctcttacccaatcctggaacatgtaatccaggaacctcatatgcataacctcagtatataaatggtgccgaaggggagtcaggccgttctaggctcatgcgtgtctgcgcgcggggctgctccgttcccggcttagaggaccaggacaagggctagccaccgctgcatgctggaggctgtggctgcggcaccacagctcgcctcgctgcggttggtggcagcgacggagactgcagtgtggctggagcggtaggaaggggaaaatagttttggggtagatggaggagtaaagagggtggttagtgccaaagggaaaagaggatggcgagcaggagaaggtgttgcaaaaagacagtgaggaaaagatggtggggaaaaaatgttgggggtaggtggagggggaaaaacggtggtgaacaggagggagagaaagttttgcagaaagatggtggggaaaaagtttttgggtagatggaagggggaaagagagggtggtggggggaacgggggtgagcaggagggagagaaagtttgcaaaaatacagttgggaaaaaaagaaagggaaagaagagggtggataaaaagattttgagtagatggagcggggaaaaggggtggcaagtgggaggagaaaagagggtgcagagagggagggggaggagagagtggcgagcaggagggagagaaggttttgtgaaaaggcagtgaggagagaagcttttaagtagatgaaggggaaaagagggtggcaagcgggagaaagataaagagggtggcgagcagggagaaaaggttttgggaaaaaccggtgggcagaaaagaaagtgcagaaagaaaacacggtgggtagaaagtgggtaaatggagggggaaaagagggtggcaagtgagaggagaatagaaggtgcccagggggagtggggagagttgggaaaaagatgatagggaaaatagtttggggtagatggagggcaaaaagagggtggcaaacaggatagaggaaagaagagggtgagcgggaagcagggaaggcctttgtgaaaagacggtgggggaaaattggggaggtagatgggtaaacgagggtggtaaggaggagtaggaaggcggctttgcaaaaagatggctgggatgtttttgggtagatggagaagggaaagaggatggcaaggaggaaaggagaaaaagacgatggggaaacagtttttgggtagatggagggggaaggagggtggcaagcagcaggagtggagagaaggctttgggaagagatgggagaaaatgtatttggggagatgaaggaacaaaagagggtgatgagagccggaggggcaaaaaagggtggccagggagagggagaaaagacggtggggaaaagtttttgggtagatgggtggggaaaacagtagtgagcgggtgagtagagaaggctttgcgaaaagatggtgggggaaaaagttttggggtagatggaggaagaaaaagtgtggcgaaagagagggggccaaaggtcgtcgggaaaaaaagatggggaaataatggtgggggacaaaggttttgagtagatctttttctgatttttaaatcagattatttgtatttttgcttttgagtagcttcagttctttatatgttttgtgtattaaccctttgcctgatgtatagtttgcaaatacttccattgtctggtttgtttcttcattctattgattgcttcctctgctttgcagaagcttttaagtttaatgtaattgcatttctctattttggcttttgttgcttgtgcttttgatgtc

SEQ ID NO: 10577 - DNA, 1671 bp, Artificial sequence
  DNA replication origin
tgtagttcagaatccttgtgcataaccccatgtgcatgctgaggaggcctcacgccatcctaggctttcctaaatcggccggcggagctactctgttcccagctcagcagatcaagagaagggggagctggatgctggagcctgcaacactgtggctcgcctcgctacagttggcggtggtgacagagacagcgggcagcacggccagagtggtagaagggaggatggcagcgggagctgctcttgactggctagcggtctagaagaaggggggccctctgctccacgctggaggctggagcctcggccaccgaggctcctctggctgcggttggtggtggcgaccgagactgcaggtctgttagagtggtagaaagtttgccgggtaggtgcactctttgcggctgcactgccctcctgcagggggttggggaggcatatttggtaagctgttgaggctgcagtgcctgccgcggagttagggaggggctggtgggggtgctatctggcattgcattgctgtgggggtggggggcaggttggctgagttatcagggcctacagtgcccaaggtcgaggggtcggaggcaggttgtgtgcgctattgtgcacagccagcggctcatgggggcaggttaggggtgttatttgctgcactgccagaggcagggggcaggttgggtgtgctatcctgggctacaatgccagcaacaatgtgggccggcagtcgggggaggtttaggggagctgtcaaatgctgcagtgcttgtgggggaagggggaaaggggaaggtggggtggggggtttggttgggtgcactatcccgggcattcactgcccacgatgggagcaggttgggggcgctatccagggctgtgctgcctgtggccctggtggggggctggtttggggcgctgtcaggtgctgcaatgccggtagcgggacgggctgtggacaccatcaaatgctacactgctgggggcagagtggtggtttgggggcactattggggttacattgcctactacagtagtctctgggtgtgttgtgggtgcaatccgggggctgcattgccggcagcgggggccaggttaggggcgctatcggggtctgcactgctgccaccagaggcaggttgtggaggtggccgggacaacggttgcctctgaggaaggggaccttcttcttttctcagactcagggctctagagagagaactcctcctgcttgtgtgggagtgtggcgggcgcacagagttttcatgccaatcctctaagcatggcagggcccccacacccactgtggttccccagcccttgccctctcgctccatgttgtggagaccatctgggacccccaggcatggagcaggagtagtgggcaccacgggggctcagggcctgtgggtggaggagtcaggaatgggaaccagtacttgggtggggagtactggctgagtgtgagtttctgctgttcctgctccccagggagtgtcgggcactgtggtgtctccagtccccaccccaggtcaggaggccagcttgggccaggaggagaggctggactttggcaggtgagtgtgaatgcctttgctgaaactggccgctgccacccagtggccagcatgacaaggcgaggctttaacactaccactttctgcatcccgttgt

SEQ ID NO: 10578 - DNA, 1035 bp, Artificial sequence
  DNA replication origin
atgccaatcctctaagcatggcagggcccccacacccactgtggttccccagcccttgccctctcgctccatgttgtggagaccatctgggacccccaggcatggagcaggagtagtgggcaccacgggggctcagggcctgtgggtggaggagtcaggaatgggaaccagtacttgggtggggagtactggctgagtgtgagtttctgctgttcctgctccccagggagtgtcgggcactgtggtgtctccagtccccaccccaggtcaggaggccagcttgggccaggaggagaggctggactttggcaggtgagtgtgaatgcctttgctgaaactggccgctgccacccagtggccagcatgacaaggcgaggctttaacactaccactttctgcatcccgttgtaggtttttctggcttttcctctccagctgttccaagccaggctggtgaagtaggagtcacctgtggtgagctggaggttggagcctgtagatggcgtggctctgtggctcacttcctgtggttgtggcagcgacagcgatggagactgcagctcgacaggaatggtaggagggtgcccgtggaggccaggtggaaggagccctggagggtgggtgggtgcatggaaggtgacagaagcactggttgtgttggcatcggcggtaatagtggtaacagcagcaagtctgggggccgggaagggggagtaggagagctttggggcctggcctggcctggggtgtgtaggaagctgctggttctgtactgcaggcctcagtgacagtggtggaggtgcagccagggcaaggaggagtcctcccctttcttctgcagtttctggagggtgtcctcctcctgctggtgcctgagccaggagtgagtggcagcattgtctcattcttaacagaatttagggggtgactagttgtgtgtctttttgcttgtgtttgttttgataacttatcccttaaggaacaaaaggcttctttggctgggttttggtgtggtgggatccccttcccatgcaa

SEQ ID NO: 10579 - DNA, 1181 bp, Artificial sequence
  DNA replication origin
agggtttggatgggggtgtgtgagtgagggtgtgggtgggggtgtgggtgagggtgtgggtgagggtgtgtgggtgggggtgtgggtgggggtgtgggtgagggtgtgggtgggggtgtgggggggagggtttggatgggggtgtgtgagtgagggtgtgggtgagggtgtgggtgagggtgtgggtgggggtgtgtgggtgagggtgtgggtgagggtgtgggtgagggtgtgggtgggggtgtgtgggtgagggtgtgggtgagggtgtgggtgggggtttgtgggtgagggtgtgggtgggggtgtgggggggagggtttggatgggggtgtgtgagtgagggtgtgggtgggggtgtgggcgagggtgtgggtggggatgtgagggtgggggtgtgtgggggagggtgtgggtgggggtgtgtgggggagggtgtgggtgggggggtgtgggtgagggtgtgcgggtgagggtgtgagtgcctgtctggctctcctgggtggggctggatgaatgtttgggcacaggcagcagctgtcacatggcctggctgtgggtttgggacggaaaccaggtaggtgtgccgtatcaggcacagctacaaactgtgccaaggaaacagtcagagcaggggcccggggaaacttctgccttggcagaaggtactggggagatgggatgatttggggaggtcttccaaggcccatggtgcttcatggagccagggcccagggcagggagggctataaccctggcttgcctgattggctgaacacaaacaggatggaagggggtgtgagcagcccgctaggtggatgcctaagtgaggaaggaatgggtggccacgtggctgagacccccaagaccaggaccccactgtcaggccagtggcttccataggccagtaagaagcgttctcctttgggcactgaggccatcggcttcagcttcacacccttttccaaacagacagaagtccttcaggtaacctcaaaagtcacttctcctggccttccccagaggggaaaggagagagcggtgcttgtggcagggggccctcagagctggtggagggcacagcagagagactgcttgcatgtgggaggcccccagcagaccttgcccagatgtcagccctcgtttgaggcaaactataaaattattacaatttaggccag

SEQ ID NO: 10580 - DNA, 1850 bp, Artificial sequence
  DNA replication origin
aatattactaagtaagcagacgcgggcacgcgctgcataccgggatttgtagtcccttccggggcggggtacagcgcgcctgcgcagaggggccgtccctcttccgggcgcatgcgtgcggcagcggcgccaggactgactgcgccgtggaggctgctgcagtgttgtgagttggaagctggggagctcggcatggcggtccccgctgcagccatggggccctcggcgttgggccagagcggtcccggctcgatggccccgtggtgctcagtgagcagcggcccgtcgcgctacgtgcttgggatgcaggagctgttccggggccacagcaagacgcgcgagttctggcgcacagcgccaaggtgcactcggtggcctggagttgcgacgggcgtcgcctagcctcggggtccttcgacaagacggccagcgtcttcttgctggagaaggaccggttggtgagctgccggggctcggctcaggctagggagaggggccgtggtgaagtgaggtgcggtagtgggagagcgaatgggggcgaacggagccgcgggggtgaaaggagagtgggtttgagggaaggggaaagggggagtgtggagatgaggagggagtagggagaaggtggagtgtgggggtgacggggtcgtgaggggtgaggagaggaagactgggggcgtgtgaagagtgtggaagtaaggaggttggcgatggcgggtgaaggtgaggagagggtggatgggacagggctgcgatgggagccttactcgtttggagtcgaatcctgtgctgataagaagtggctaggggctgtggtggtggtggtggtggtggtggtggtacgttggtggtacgttggtggtacgttggtggtagagtaagggtggaaaaccaggaaggaggagaaggccagggagggcacaaaagtaagggcataggtgtggaagctgagaaaaacagttcagaaggcctgcggagaagagaagggagaaagggcttggaggaactggattctgaattacccagatctttactggtcccagcatactttggtttgaataagcttataaagttacatgcggaggcagttacatctatgtgaagtcacatctggattctgttctttcaggtcaaagaaaacaattatcggggacatggggatagtgtggaccagctttgttggcatccaagtaatcctgacctatttgttacggcgtccggagataaaaccattcgcatctgggatgtgaggactacaaaatgcattgccactgtgaacactaaaggtgactattcagagagagggcaataggaagataagctgtttggattcattcaacaaccattttccgaatatcttttctgtgcctggcactcagctgtgtatgagacatcctgagctgaataagagtttccagctccaaggacctcccctgcggggagaagacatatatatacaaataacatagcaagatatggttcattttataatggagaggtctgcaaggtggatacccagaatagaaatgaaaacaaaagtctgcctaggggagccagggaaggcctcaccaaatttgagcaaacttttagggtagccataggagttgagtggtcagggtgctgtgggtggggaatgggacatttccaggagggaacagcatgtgcaaaggcatggagaatttggaaaattctgatgagttagaatggttgaaacttggatggtcttggtgatctgggagaaagttgtgcagtacatttataggctctgttgtaagtattgaggccggtattgtatgggactctgagttttcattgatcgtaagatgttccattaggaaagaaagttggta

SEQ ID NO: 10581 - DNA, 1012 bp, Artificial sequence
  DNA replication origin
agagtgtgttgcggactcagagatacccagatgtaggtgaggcgttgcgttcttttctctctctgacgctgtggtgcggtggagataacactggcttcataacttgggcagaatcagatttgaagctggctccagcagtggtttatctgaacccactttgctcatccattaagtggagacaatgaatccccttcttgggtcgttaggaagattaaacaagatacagcctgtacggtgtctagcacagcacctggcacaagggaggtgcttaataagccttccccttgcttgaggtggaggagctcctagcgagagcatggagacctgtcactggtctgtcatccttctcagctccagtgccgccaccaagcgagcaacgttcatcattccagagtgagtgctgtgaagggaggatatggatccatcacaccccgggcgcagtgggaggttcagaggagaaatatgagatctgctttccgtttgcagtcagtttgggctcatgatggataagtgtgtgtgtgtgtgaacaagtggagcataactcagactgcacagcagcgggtgaaggaggaggggggcaaagctcctgttaactgaggctgctgggaaagggtcgtatggggagggggtggcctcagtgcaggccttgggtagagcagaggtgagtgcaggacaggggacaggtgggggggcgttgctgcagcttggagccaagccaaggtgtggccgtcagtgtcctggacgtgaagatggtcaggggcagtaggagatgtcgctggagggaagagggagggaggggtgtctggttctgagtggtttcagtttggactggctggtagtgtggctgggtgagtaggtaagagacggatatacctgggttcagatcctttcctgccattgctaacagggagactttagccaaattacttcacctccatgattttgcttgtctttaagatgtgcctgatggtaatgtgacttaggagggttcaatgagttgctgtgtgtaaat

SEQ ID NO: 10582 - DNA, 1583 bp, Artificial sequence
  DNA replication origin
cccgccaccagtgcgctcccagccgaggccaggtggccagtcacacgcagcccgctgcccagcgcaagcagaaaggtgcttctcaaagctcggctccgccgcttggcactctgggccacctttgcactggccgatgcgggcgcctgcagccagcaagacttacttttgtgagcagcctcggcgcaccggatgtcgtctttgccatccccagtgggcgctggggccgcgtctggagagacggtggctctggccggcggggtgcggcgctaagcccgaccgccccatgcctgcccgggtgaggccgacgtgggcgtggcacctcggggcagggactccagagcactcagcggctgcgcgccctgctctgtcactgttgggccaggcgggtgccggctgctggggaggagccggaaggggcagcgcaaggcggcgggtgggagtgggcacgggccgggcttagctaggagcggggcacggataggagtggcgcacgcgtaggagcggggcgcgggcaggtacagaacgcgggcagcaggacgcggaggggagcggggcgcgggctggcagaggtcagaacaggacgcggtagcagcggggctccactaagcagggataggagcgtggggcggtagctgccagacaggcgggtgctggaaaggccaccagtatcctgggtcagcgcacctctgcaagcacagccgctcctttcaaacaggtgcgccctttccactgcacagcgggcaaggaaaccaggtggggatgcaagatctggtactgctggggttgctggggttgcgacccagaggactctgagaacaacaccctctccccaaccccccatccctaccccagctccaggctccccagcagcgcacccccgcagcgcacccccagccatttctcagaggcagaggcacagtgtagctgggcctctgcatggccaaaggtgggaggaggggaggagctggttagggagagggaaggagagccttcgtcagcatccagggcagtgcagagggtgggggtcctggaggcctggccaagaagaaatgtaaccagttgtggaaaaacaggagttagagagcagggaggcaaaggcgttggtcaacagacaccaggtggctgaggcactccggagggctgaggggcaggcctctcactatcaggcccagagctctagctcgtaagtttcagctccctactgttctctgggaggtttcccaagaaaactccactgagacaaatgtaactttctttaaggctgggatgatcaatttctatgtttattcaaagccgcagcaaactttttctatgggagaatttggccactttcagcctcatgggggggagtgtggagggggtggccttcccccttctacacaggggaagtgggatgtgggactggcagcctaggagagccagcagcagagaggaactggagccccaaagaatccaattttcccccaaataaatgatgcccaggatcacattcacctctaataacgggaagccactggacctgtgctggggggtcctggggtgagcctacgacccggggcttatacccagcgcctaggacccgg

SEQ ID NO: 10583 - DNA, 1447 bp, Artificial sequence
  DNA replication origin
ctctgctcatgcttgctcagaaagggctgtcctgtttacttcgggaggcggctttggcgggaggggcagccacattgggacctccggctgtggctgggttctgggcaccaagcccgctgccaggccggcgcctgctcctgcagacctgccatgccaatgctctccaagctgaggccgggtggcctgcgacgctcagcccgatgcccatcacaagaaaaaaagcaattatcagggcgctgtgcgcacggggccaccttcgcgctggcccgtgagggcaccctcagccggcgggactttcacttttgccgagcagcggcagcagcaccggatgtctccttcgcccctgcgcaccggggtcgcgcagaaaggacggtggttctgaccggcggctctgcggggcggggtgcggcgctcagcccggtcgccccatgcctgcccagggcttggtggacccgagggacactgtgggcatggcacctctgggcagggactcctgggcaatctgagctgctgtacgccctgctctggtctctgcccgccaggcgagcgccgtgcgcgagaggagcaggcaggggaagcacgcaggcggcatgtaggagaggagcgcggactgtgcaagggcaggagcggggcgggggccaggcaggggcaggggcaggggcaggagcggggagcgggccaggcagggataggagcgggtcgccacaggagcggggcgcgggtaagagcaaagccggccggcagaggtaggagcagggcgcaggcgggagcagggcgtggtgctgggaaggccaccactaacctgggtccgctcgcctttgcacgcacagcccctcctttcaccaggtgcacctgcctgcagtccctgtgctttgccctttttgctgcacaaagacagcagggaagccgtgcaggatgcaagatctgagactgctggggttgtgacccgaggactctgagaacaccaccctccccgccaaccgcccatccctaccccagctccaggctccccccaccagagcgcatccccagccatttctcctgaggcagaggctcggtggagctcagcctctgtggggctagaggccagaggaagggaagatatgggcagggaagggggcaggagagcgtttgtcagcatccagggcagtgcagagggtgggggtcctggaggccaggcctgggaaaaatgtaaccaggtttggaaaaacaagaattagggaggcgggaggcagaggcgttggtcaacaggcaccaggtggctgaggcagtccagaggggtgaggggcaggcctgtcaatgtcaggccccgagctggtaagtttcaactccctactgttctctgggaggtttccggagaaaccaactccagtgagacaaatgtaactttctttaagactgggaggatcaatttctacatttattcaaagaagcagtaaacatctac

SEQ ID NO: 10584 - DNA, 1146 bp, Artificial sequence
  DNA replication origin
ttggtgcccagaacccagccacagccggaggtcccaatgtggctgcccctcccgccaaagccgcctcccgaagtaaacaggacagccctttctgagcaagcatgagcagagggccggggagcccagaagtcgccactgtcctgggcctgctgtttctgcagcagatggcccagtcctgagttcccttctgcgctctacctccctcattcctcctccagctctgctgctggagtggagcggtctcttaggcaaggctactttgctctcctgcatttttgccactctggtctttaaacatctaaaagcctgtcgtttctggggtggaacccttggtgaggctgccgtgggcctcaacccaccgggcagcctgggagttacgtgctgctgcggacagagcacctgaagatacggccttcagggccatgggaggctcagggccaacacttaccggtgcgggttttgggactgggtgtcagaggacaggggtgctgctgtgctgaggacaggtggggcagggcgggtggcccgggcatcaaaaggcatggatggtgctgtgctgagggcggggttcagggtggcggggctgggattcagggcaggggtgctgctgtgctgaggacagcgggtgcagggccgggggctcgttttcaggggtcagggtgggggaatgggtgtcggggcaggggtgctgctttgctgaggacagggtgcagggtggggggcttggtttcatgatacaggggtgctgttgtgctgaggacggggtgaatgttgacgggctgaaggtccaggtacaggggtaccactgcgctgaggacagggagtgccgcgtggggcctgggtgccagggtttggggtgcaaatatagtgaggtcaggatgcattggggagagtgccgcagggacctcgggagctgtcacatggcagggagaggccgcagtcaacaccctgtgtcatgatttcttccccacctgtgtgtggccaggcgcaggggactagacagtggctgccaaacagggagtgcaccccggcggtggctgtaggggaccacgacagtggggccacctctccctgcgtgtctgcacctgggcctgccagggctgtctgccatgctccatggggtgggggtcttcggcccctgggagg

SEQ ID NO: 10585 - DNA, 2822 bp, Artificial sequence
  DNA replication origin
acgaggtttagcgtgtctatgtgacaccccaggattttagcagatacacaagtgaaaaaccatgttgctaaaaagtatttcccatcttccaattttcttatcatcatcttggaaataaaatctgtacgtacttgggaataaaatttattgaattatcaaaaatatgtatgctaatgtatgtgagtcattagctatatccacattgacataaaatttgtgaagactcttcaaaatctcttaaagatttatttggctgggcgcggtggctcacgcctgtaatcccagcagtttgggaggctgaggcaggcggatcatgaggtcaggagatggagaccatcctggctaacacggtgaaaccccgtctctactaaaaatacaaaaaactagctgggcgtggtggcgcgcgcctgtagtcccagctactcgggaggctgaggcaggagaatggcgtgaacccgggaggcggagctcggagtgagccgagatcacgccactgcactccagcctgggtgacagagcgaggactctgtctcaaaaaaaggaaaaataaaaacacgagaacgtactgcaggagaaaacaggcctggcctgagacggctgtgccggctttctgaggccgtgaatggcaagacctcgagactgtcaagaggagcaagaggagtcgggatttagcgtcagtgatgaggtgcgccactcactgtgtgacttcagagtgtttctggggaaagaaaatgaagtcctgtgaagtatgcggagcaccctcagcagcagccgtggatctgaacagcctcccagacacagacgccatgggtgtgaagtgtgtcaggaacaagcgaagtcacccacaatggagaggaacaccctagtgtgctagaacttttgaaccacttttcctcctgtcttgggtcaggcctcatagctaaccctttggtgcgcggtactctctctggctattggagagatgtgagaagcttaagaaaagcaaatgagaagacgtggagcaggcagatggccggtccccatggaagagtccccattgtgaggcctccctggggatctggcggtggccacaacacactggccggtgagattggttgtgattgtcattgttgtggaaaatgattatcatctgtcctcaatggtgccaatgctgactcacctggaggtggaatgatggccatggtgacactgaggagggagcgtggcagagggaatgatggccgtggtgacactgaggagggagcgtggcagagggaatgatggccgtggtgacactgaggagggagcgtggcagagggaacgatggccatggctgacattgaggaaggagctggcagagggaatgatggccgtggtgacactgaagagggagcgtggcagagggaatgatggccatggtgaaactgaggagggagcgtggcagagggaatgatggccgtggtgatattgaggagggagcgtggcagagggaacgatggccatggtgacactgaggagggagcgtggcagagggaacgatggccatggtgacactgaggagggagcgtggcagagggaacgatggccatggtgacactgaggagggagcgtggcagagggaacgatggccatggtgacactgaggagggagcgtggcagagggaacgatggccatggctgacattgaggagggagctggcagagggaacgatggccatggctgacattgaggagggagcgtggcagaaggaacgatggccatggtgacactgaggagggagcgtggcagagggaacgatggccgtggtgacactgaggagggagcgtggcagagggaacgatggccgtggtgacactgaggagggagcgtggcagagggaacgatggccgtggtgacactgaggagggagcgtggcagagggaacgatggccgtggtgacactgaggagggagcgtggcagagggaacgatggccgtggtgacactgaggagggagcgtggcagagggaacgatggccgtggtgacactgaggagggagcgtggcagagggaacgatggccgtggtgacactgaggagggagcgtggcagagggaacgatggccgtggtgacactgaggagggagcgtggcagagggaacgatggccgtggtgacactgaggagggagcgtggcagagggaacgatggccgtggtgacactgaggagggagcgtggcagagggaacgatggccgtggctgacactgaggagggagcgtggcagagggaacgatggccgtggctgacactgaggagggagcgtggcagagggaacgatggccatggctgacattgaggagggagctggcagagggaacgatggccatggctgacattcaggagggagcgtggcagagggaacgatggccgtggctgacattgaggagggagctggcagagggaacgatggccatggctgacattcaggagggagcgtggcagagggaacgatggccatggtgacactgaggagggagcgtggcagagggaatgatggccatggtgacactgaggagggagcgtggcagagggaatgatggccatggctgacattgaggagggagctggcagagggaatgatggccatggtgatattgaggagggagcgtggcagagggaatgatggccatggctgacattgaggagggagtgtggcagagggaatgatggccatggtgacactgaggagggagcgtggtagagggaatgatggccatggtgacattgagtcagcacttattaggttccacgtgtacatggtcaagttttcctgtggtttttctcagaaaggagccatgatcctg

SEQ ID NO: 10586 - DNA, 1161 bp, Artificial sequence
  DNA replication origin
gaccagcctggccaacatggtgaaaccccgtctctacggaaaatacaaaaattagccgggtgtggtggtggatgcccgtaatcgcagttattcaggaggctgaggcaggagaagtgcttaaccccgggaggcagaggttgcagtgggctgagattgcgccgccgctctccagcctgggtgacagagtgaaactccatcttgaaaaaagaaacaaaaaagttggcggggggcggagctcggcggagacgggaaggggtcgcagtggctgccgctcctcgagttgggggccccctcggacaccgccaggcagacggcgagtaccgagcgtgggtggccgcggtgtccgtgggccacgctcagctgcggtcagaggcgacatgagcgccgcggggctgctggccccggccccgcccgggctggagcgtccccggggaggacgaagagctggagagcgccaaggacgacgagcgcagctgccgggccgcgagtcggacgaagacactgaggatgctagtgaaactgacctggcaaagcatgatgaagaagactatggggaagtgaaggaacagatgtatcaggacaaactggcttctctcgagaggcagttgcaacaactacaagaaggtacattacaggaatatcagaagagaatgaaaaaactaggtcagcagtacaaagagaggatacggaatgctgaactcttcctccagctggaaactgaacaagtgggacgaaattacatgaaagaaaagaaggcagcagtgaaagaatttgaagacaagaaggttgagctgaaagagaacctgattgctgagctagcagaagagaagaaaatgattgaaaacgaaatgctgacaatggaactgaatggagattctatgcaggtgagacctatcatgaccagaaagttgcggaggcgaccaaatgatcccgtccccatcccagacaagaggaggaaacctgctccagcccagctaaactatttgttaacagatgaacagatcatggaggatctgagaacattaaataagcttaagtcacccaagagaccagcatctccatcctctcctgagcacttgcctgcgacacccgcggaatctccagcccagaggtttgaagctcggatagaagatggcaaactgcactatgacaaaagatggt

SEQ ID NO: 10587 - DNA, 886 bp, Artificial sequence
  DNA replication origin
ggaggagcagaccctcagaccaggtaggctgtgcactcggtgaccctgacgccatccaagggaagctccgccatcccgcgccagtgcctgagctgcaactgcaaactgcgcgtcctggcacgagcagcggtgggggcgggtgggggaaggagcgagtgactctccaggcgtcttccgctacctgacaccagccaggcagcccccagggccagagcgtcagcgcccaagccaggcttatccgggaagccactccggtggccgcggggtgcccatgccagcaccagatctctcttcggaaggaggagcggggcgggctacacggccagacgggccctccccttaaggcggggtgggccgcgcgcctgcgattttccgtccgtggtcctggggcagcccgggccagcccaggagaacccgcgagcccagcggcgcctgcacctgcggcttccgggagccgggcggctttgcgaggctcactaggtctgagaggtcggaggccgccagtgtcgctgctgaagggcggaccaggcgggatcgcggattctgggctagatcgcagacttggtatcgcggattgggatttggatcggggattttgagttggatcacggattgggggttggatcacggattgggggttggatcgcggattggggtttggatcgcggattgggggttggatcgcggattggggtttggataggggatttggagttggattggggatttggggctgggtgtggggcgagggggagtgaaagggtgacacggagctgccgcggctcaggagccagtggttgggggtctgagaagaactcaccaccttgaagaagttattcggctttgggagccgcaggggccggcggtccggggctccctaggccac

SEQ ID NO: 10588 - DNA, 1184 bp, Artificial sequence
  DNA replication origin
cctcaacatggagaaaccccgtctctactaaaaatacaaaattagccgggcgtggtggtgcatgcctgtaatcccagctactcgggaggctgaggcaagagaattgcttgaacctgggaggcggaggttgtggtgagccgagattgctccattgcactccaacctgggcaacaagagcgaaactccatctcaaaaaaaaggttgggaagcgctgactcacagtatgttccatgaggcctgtgctctagagaaaaattaccctaggtaaggacaatagagatgcagcaagtgtaaaggccctgcggtgggccagtgtgactggagcttgaataacgggacagtgggagaagatgaggtcagagtcaggatggagccacggcagctatgacctgataggacatggtaaagagggggctgcgggaagccactggaaacaatgaagcagagaaggaacatgaccagattcaaggcttagaaagccacttcggctgctgtgtagagaatggactaggtggagtgagacaggaagcaaggaggcaagctgggtggttcctgcaggaagccaggtgggagggggcaggcgcttgcactgagggctgcagagacaaaagaagtggagggatgtgagacatatctggagagagaatctatagagtttgttcatgaatgggatgggaggggtgtgatacgaggcgagggaagaaattgaggctactagcgggtttgggcttccgctatggagtggatggtcgtagcacagactgcagtgaggaagacaggttcgaagagggaaatcaagcatcttgttcaggacctatgaagttgtggagcccagccaacatccaagtggggacagcccataggtggtatttgttgactgcgtaagtgagctcagttcttctggtggggaacacggtctgtagtaaggcggagtattgagttttagacaactctgccgaaaccccttaggtggagaagacttcggctgccctgggccttgcacccactggttctggatgtgccatctcccgggctcacatgctggattcacgtcagtcctccctcctccatggtcactcttcagatggcttcacatcggtcctccctgctccatggtcactcttcagatggattcacgtcagtcctccctcctccgtggccactcttcagatggcttcatgtcg

SEQ ID NO: 10589 - DNA, 1225 bp, Artificial sequence
  DNA replication origin
gtggtctcctcccttagtatcaggaccttttctaacgggggactcctctgtcaggcacttcgatccagagctcttctgctggtgccctctgcccaatcgccttcctccccatttttttttttcctttttgagacagggtcttgctctgttgcccaggctggtcactgttccctctggtgcattctttgtccccgtcaacctggtaagctccaggggctggcagctggcacagagtaggaggctgcactccctgacttttctatgctgcacacagtcctgtgcccaccctgtcctcagacctgccagggccatgaccaacctgccaagggcatgggaaactgtgtgtaagacagctctaggaggaggtggagcaggcggaaggtaggggaagctgctgccccagtaggtttagagggagggtggggtgggggtgtggcagggccaggcaggtgagggtgtgtgggtgggggtgtgtgggggagggtgtgggtgggggtgtgcgggtgagggtgtgtgggtgagagtgtgtgagtgcctgcctggctctcctgggtggggctggatgaatgtttgggcacaggcagcagctgtcacatggcctggctgcgggtttgggacagaagccaggtaggtgggctgtatcaggcacagctacaaactgtgccaaggaagcggaccagagcaggggcccggggaaacttctgccttggcagaagatattggggggacaggatgatttggggaggtcttccaaggcccatggtgcttcatggagccagggcccagggcagggagggctataaccctggcttgcctgattggctgaacacagatagatggaagggggtgtgagcagaccgctaggtggatgcctaagtgaggaaggaatgggtggccacgtggctgagacccccaagaccaggaccccactgtcaggcctgtggcttccataggccagtgggaagcgttcccctttgggcactgaggccatcggcttcagcttcacacccttttccaaacagacagaagtccttcaggtaacctcaaaagtcacttctcctggccttccccagaggggaaaggagagagcggtgcttgtgggcagggggccctcggagctggtggagggcacagcagagagactgcctgcatgtgggaggcccccagcagaccttgcctagacgtcagtcctcgtttgaggcaaactgtaaaattattacaattt

SEQ ID NO: 10590 - DNA, 1149 bp, Artificial sequence
  DNA replication origin
ctttctctctccccacagcctctggctctaatctgctttctgtttgtctggatttacttattataaatggcatcattaacacatgtgggctttgtgtctggtttctttcacttgccatgttttggaggtttatccatgttgtagcaggtatcatcagtgtttcattcctctttttcttttcttttctttctttttttttttgagacaggcttacgccatcatccaggctggagtgtagtggcacaatctccgttcattgcaactctgcctcctgggttcaagcaattctcctaccttagcctcccgagtagctgggattacaggctcgctccaccatgcctggctaatgtttggtgtttttggtagagatagaatttcgccatgttggccaggctggtctcaaactcctgacctcaagtgagccgcctgcctcggcctcccaaaatgctaggattacaggggtgagccaccacatcaggtctttttttttttaagatagagatggagttttgtgagttgcccaggctgttcctgaactcctggcctccaaaagtgctgggagagttcagacatgagtcatcacatggcgttcatttcttttttatggctgaataatattccactgaatggatctaccattgtttgcttacaccctcatcaattgttagtttgggctgtttccaccttttggctctttgactattgtgactagtactgccaagaacattacttgtttgaggactataattgccggatcatatggtaactctatgcttaacttttgaattagaaacggtgttttaatttttcgaatatgactcctttacgtgtctgtgtctgtttccatgtcttcctactgtcttagtaggaagctcacgactcatttgcgtaatttttctggcccctgaaggcacctgattttgctgcccctagaatactttggaggcaaaaagaaaataactctgtgcccaattcagccagagtcgtggggtaaaatcttttcacttctcaaagtactactgtggttcatccccaaaggggggaaatcaggttttccggagaggaggcggctacaattagggaggtgagggacctcacgcgcctcttccttagaggaggcgggcgaggcgaacggcggaggaggagaag

SEQ ID NO: 10591 - DNA, 1650 bp, Artificial sequence
  DNA replication origin
ggaccaatccttggtggagatggaagacacagctgccctggccaggaagcaaagaaggagaggacgcgctttctttgaggggggcgtcccagagcctgttggtgcccttttgggtcacgccaaagggcactatcacatcctcacaagacacacaggagatgagttctgtcatcccccacttcacaagaggaaactgaggttcagaaagtgaagtaacacgcctaaggtcacgttcagccgcaggggagaaagcacacaggctccaggattagaagtcctctcggatcccaccttgcatctcctctggggtgggacattccagtccccacatgggcaggagtgctgcctgccctggctacagtcagcccctcctgagccctggccccagggaaaggtcccaccacctgctgggggatcagctctgctaaggggcgtgtctgcagctgcccctaaggaatgggactggaatgtcccagctccaaaaggggggggtagtaggcaaggggggcccagagaggggctgggagaggctggcccaccccatcccctctgtgacagacacttgaggcagagacaggggctaaagcctgcggaagtggtgcttagtatcaccatatagtgcttcacggctgcaccgcagtctacagttttttctcagcccttctatttcattatctcatttcatctccacaatagcctcgtgggggcaaacaggacagtaattaccctcacgccattttacagatcgggaaactgaggcctcggaaggcgaggtgagttatccaagatcccacagtgagaagcaatctcaactccctgggcaaggtcctttctacctcagcaggttgtcctaagccaggggtcacgggttcccctccatgggcacacactgctgtgtatgtattgcatatatgtctgcccagccctccatgcctgtttctcccaaggacacttgcaaccaggctgccctagactgcggtccaccaggcctggaatccctcctgctgccccccaggtcaggaagaaatagaggaaacctgcctcatggggactccgagtcgctatgctagctctagaggcggtggcagaggcaggctggccgcattcattcacagtctggcacatgcacaccacacgctgccagccggtagagaagccctgcctgggagggccctgggaggaggctgataaccgcgcccaggatggcctcctgcgtccgctccctcccgaggacagccaggcccaatctgttcctatgtggttggggtcggggggtggcccagtgggaggcaacgggtctcagttctctttctggatacagccagggccctgatttcggcttgtccccaggccagccctcacttgggccaaaggctgtggccgggactggaccgggtgctctggcggtcaagacctaggaatgtcccctacccgcagacccgcagctgcagcctggtggaccggcagggggttgggggataaaggaggtgtgggaggaagcgagagatctcatggggaagtcagaggggcaaacgaggttgcatccccacggaatttgtgtcaggaaagcaggggtgaaggcgagggttccccaaagctgcgggaggtcccggagctacctggggggcggggtgggaggcgcgtctcctc

SEQ ID NO: 10592 - DNA, 1251 bp, Artificial sequence
  DNA replication origin
aggtcccactagacattgggcagccatgaccagctacgaccttgggcaagtcacttcacctttctgagccccactgacctttaagaagggtcaatagctgggcacagtgtcacgcacctgtgtttttagctactcaggaggctgaagtgggaagatggcttgatcctaggagttcgaggctgcagtgggccatggttgcactactgtagtccagcctgggtgacagagtgaagagcaagaccctgtctcaaaaaaaaaaaaaaaaaaaaagaagggacaataactctgtcacaggactcagcaggacccgtatgcagggccaagtcgctgtaggaacccatcccctgtgattccttacctggatgcatctcctatgtagcctgcaacgtgcgttctcaggggctgggctgggtggggtgtgcaaacccggattcgccccatcctgggtttgggggttggttgggggagagctgaggtcatttttgcacagggtgaggtgaggctgtggggttggggcaggtccccctcccggagagctttgtcttccacaaacacaaaacctggaaatggttgaggaagatggaacctcctaacgaccattgttcgggggcaggagtgggtgcccggaagcatgggtggtagtaggggacccacagctgcagctggcctgctgggcttctgttcgagaatgggagcagctgctcaggggtgggaggcagagaaggtggcatttgttcactcggccagacctttctgcacgcccgctccatgctgggcactgggctgtgcagaggatccccaggggactaggtaccagccctgcctccagagtgtgtggcccagcacaggtggaaggtggtccgtcagcctagtcccttggtgatgtttgtgtgcctggctgagctcggctccagccagcctgttgaccctggctgtggcccaggccctgaactgggtgctctgtcatgttatcccaccccatcctcccagcatcccagtgataagtgttattgtcgccagggtgtgtgtgcggaagtccaggctcactgaggttagtggcttggccggggtcacacaccgattggttccgccagggttaggatttgggacccaccctgccgggtggtgggctttggaataagagcatatacaggggctggagtgagtccagctgccccttccctcctccacccaccactgcccagacgggaacacctgtcccggaaactgtggccattgttcacgtcatcc

SEQ ID NO: 10593 - DNA, 1057 bp, Artificial sequence
  DNA replication origin
tcctgatgctctcacagcccctgagggatcctctttgagaccgcggggcacgtgccaccaggaggcagtgaacaaacctcaggccagcccatagcacgattttcgtatctcagcatgccccgtccccaccccatcccaacatcagggtctccaaggagaccccaccctccccacaccttgtaaggggcatgggcaaaggtgcaccttgtcaaagcgaccccgttctggcagcgaggtcttgctgaagtcacccgcgcgagaatgttcccggtagtagagggtggcatagtcggcaggctcgttccgaggggcccgcttggtgttcttggtgctcttgctgtccttcttggggaggtgcaggtagctgaggaactcacgctggcccaagcccttccggaggagcccatcaggctggcgggagccccgagacccggcaagtgccgcccgcagctcttcaggggagaagtcctgccgttccaacaggctgcccacgctgcccatggcaatgccagcagggcctggggctgtggccatgaagtttcaacagggtacaggcagctgcttctgggaattgggaggctccattaggggcaggtgagcactggctgcccaacttccctggggcctgaaaacaaggtacttgctccctgtagctccccacaaccttgcccaggcccaggtaaggcagatgtgggtccaagagagaaccccgggacaggatccctagactggcaagagaaagaagtacaagccccaaagccacctgcccatctgtcacttgctggactgagtctaaggaagagcaatggtgccccagccgagcaccgaagggccagctccacctcggggcctgtgtgggattcagaagtaccgggaggggataggcctggaagcagcaggacaggagccgtcctcccagcactgggcccgcacagggctaaggaagacaaacttggccgggcgcggtggctcacgcctgtaatcccagcactttgggaggctaaggcaggcagatcacaaggtcaggaaacgcagaccatcctggctaacactgtga

SEQ ID NO: 10594 - DNA, 1038 bp, Artificial sequence
  DNA replication origin
ctccagggcaggggctccctcacctgcgtgaaggggttggagccgtcctcatcgccaaggcccctcttgagctcctcacaggtctcgggcagcacggctcccatttcctcggcagaggagcaggagaactcgtaggggggtggtggctcgggcaggcagctcagcacagctggtggcccagcctccttgggtccttgagaggcccggtccagggagcccccgaggtggttaaggtggccaagggaggagctgaaggggctagggccagtaccaggactgcgaccaaaactacccccactggaggagtcggacaggctgggctcgggctcagggccgccctcatctaggctgagggcgtgcagcagctgtgcccgggcctggctggcccggggcccggggctcaggggcgggtggcaggccagcgtgtgcaggctgccattgctgcgccacagcttctggcctttgtgggacgccagactttgcatggataggaagcctttcccgttgcccgccgtaggcttgaacactgaggggcgaatgcggcactgccaggaagagagggcagagagggcaggtgtgagacctgggcagctgcctgctctacctcctgatgctctcacagcccctgagggatcctctttgagaccgcggggcacgtgccaccaggaggcagtgaacaaacctcaggccagcccatagcacgattttcgtatctcagcatgccccgtccccaccccatcccaacatcagggtctccaaggagaccccaccctccccacaccttgtaaggggcatgggcaaaggtgcaccttgtcaaagcgaccccgttctggcagcgaggtcttgctgaagtcacccgcgcgagaatgttcccggtagtagagggtggcatagtcggcaggctcgttccgaggggcccgcttggtgttcttggtgctcttgctgtccttcttggggaggtgcaggtagctgaggaactcacgctggcccaagcccttccggaggagcccatcaggctggcgggagccccgagacccg

SEQ ID NO: 10595 - DNA, 817 bp, Artificial sequence
  DNA replication origin
gccaggcccgggcacagctgctgcacgccctcagcctagatgagggcggccctgagcccgagcccagcctgtccgactcctccagtgggggtagttttggtcgcagtcctggtactggccctagccccttcagctcctcccttggccaccttaaccacctcgggggctccctggaccgggcctctcaaggacccaaggaggctgggccaccagctgtgctgagctgcctgcccgagccaccacccccctacgagttctcctgctcctctgccgaggaaatgggagccgtgctgcccgagacctgtgaggagctcaagaggggccttggcgatgaggacggctccaaccccttcacgcaggtgagggagcccctgccctggagtcctgttctgtgcctcagcactggggtacaggccagagagaggggccccagccagttcacccacgtggccgtggacacaagagagcaagaaagggggagctggcttggcttccttcctctgcatcccaggtggtggggatgtcatgtcactgggggtccttgcctgggagttgtgtgggaaggagagaggctccctgggagggccatgtgatggggacacctcaccctggagggcatcccgggttaaagcgcatgtgtggctgggtcctgtggtgtaggggcacaggatatgatcagtggctggagtatcaggtggagctctgagtcgcctctagggggcagggccacggtggatgcatctcttccccttgacaggtgctggaggagcgccagcggctgtggctggctgagctgaagcgcctgtatgtggagcgg

SEQ ID NO: 10596 - DNA, 1834 bp, Artificial sequence
  DNA replication origin
cctgcgcaaggagctgcgggctcagcagggcctggctccggagcctcgggcccccggcaccctcccagaggctgaccccagtgcacgaccagaggaggaagcccgatgggaggtgagagatgacacagggctccgagactctcccatctccattgccggtcccttcttctgcctgccccctcccaaaccggctccccacaccctactttgcttgcgtcctccccatcccccaggtgtgccagaagacagcagagattagcctcttgaagcagcagctgcgtgaagcccaggcggaactggcccagaagctggcggagatcttcagtctgaagacacaacttcggggcagccgggcacaagcccaggctcaggacgcagagctggtccggctgcgcgaggctgtgcgcagcctgcaggagcaggcccctcgggaggaagccccaggcagctgtgagactgatgactgcaagagcaggggcctgctaggggaggcaggaggcagcgaggccagagacagtgctgagcagctgcgggctgagctgctgcaggagcgacttcggggccaggagcaggcgctgcgctttgagcaggagcggcggacttggcaggaggagaaggagcgcgtgctgcgctaccagcgggagatccagggagggtacatggacatgtaccgccgcaaccaggcactggagcaggaactgcgggcactgcgggagccccccacaccctggagtccccggctcgagtcctccaagatctgaggccagcagagcgagctgacagcagcaacactgtcagaaggtgccctgagacggccggctcagccttcccttgcactggttggggtggaacctgcagaggccagcccggggctggggaggcgcaaggagaggagggatccagtggggccgtgggctgggtagggtgccttggcaggagccaggacaaggccctcctggcagaggagcacctaggcagggcccagccctgcttcctggagtggatgtggcccagagaaggaggctgggggatcaccagccccaaggtcccgaagggcaggtcagagggagagaggctggagacctgggctggggccttcctccagggaaggaggctggggtgggaacactggcctcccccagaataaaaccatgttttctaccagaggctcagaatacgctgagcctgtgaccagaggatgatggatggtcgggattgaggctgttgacctgggcagtagctcctcccatggccagtggtcagtgggagggtgtgccctgcgcctgtctgcatggccactgggcatgtgtgttgggagcagaggagtcctactccttgcctcagccccacacggttccttagctgccgtgtgggctgaaattcctttctttagcaccagtggagttttcagaaggaacaacaccagggaatgccaaaaaaacaaagggcaagtcaaccaaggcattttgagaacatgaaatgtcttcttggtgggaaggctgggccccaggagtatccacaggctcaggccatgcccctccccgcacccacctcctgtctccctccctccctccataggagtggggggcccctagaagtgctctgcctcattccctgttcgtaggaaggtgcaggagaggaggtgggcaagcttatgggtttcttggtaaagagcctttaccacagcaaggaatgggaacatttccccatcagcaacggggctctagggcattattaagtaggggtgaaatatgattgatttgcattctggaaagctctcccaggaggaagcattccccaccccaccttgcctctgtcctgcgctgggctccag

SEQ ID NO: 10597 - DNA, 1612 bp, Artificial sequence
  DNA replication origin
ctgtagtcccagcacttcgggaggccgaagcaggcggatcgcgaggttaggagttcaagaccagcctggccagcatggtgaaaccccgtctctactaacaatacaaaaaattagccaggcatggtggtgtgcacctgtagtcccagctactcaggaggctgaagcaggagaattgcttgaacctggcaggcggaggttgcagtgagccaagattatgccattgtactccagcctgggcgacagagcaagactccgtctcaaaaaaaaaaaaaaaaaagaaaacagggcaaggaatggtggctcattcctgtaatcccaatacttccaaaggctgagaggggaggatctcttgaggccaagagttcgcaaccagcttgggcaacatagggagaccacctctctattttgaaaaaaaaaaaaaaagtaagttgtgcaaaggggagggaggggaaggcatggaggattcaaggggaggatggcctggaatgaggcccaaccaaaaagggagcagaagtgggcaacacagagacctggctttttctccagggctgttcctagtcccagctgaggcctgaggaggagtggggacttctctactctttccctccagagcagagggtccgggatagaaaattcaatctggggctgggtgtggtggttcatgcctgtaatcccagcaatttgggaggctgtggtgggtggatcacctgaggtcaggagtttgagaccagcctggccaacatggcaaaatcccctctctactaaaaatacaaaaattagccgggcatggtggagcatgtctgtaatctgttactcatggagctgaggcaggacaatcgctcgaagcttggaggtggaggttgcagtgaaccgagatcacaccactgcactccagcctgggcaacagagcaagacttcatctcaaaaaaagaaaaagaaaattcagtctggacctgggtttggggtcagtgcctgttccctcctccttcctaaccctcacccttcctccttagggcagatgggcagctcccatcttctccccttcccccgttccccaggacagcgaccaacacagggcggcagggtagggctggaccccctcctccgcagaactgaattctgttgaatacccagtgggcagattaagttcgggctaaggggaccagaaaggctgggacaggaaaggagttttcttttcttttcttttttttttttttgagacggagtctcgctctgtcgcctaggctggagtgcaatggcgcgatctcggctcactgcaacctccgcctctcgggttcaaacgattctcctgcctcagtctcccgagtagctaggatcatgggactacaggcgcctgccaccattcccggctaatttttgtatttttagtacagacggggtttcaccatattggacaggctggtctcgaactcctgaccttatgttccgcccgcctcagcctcccaaagtgctgggattacaggcgtgagccgcccggcccggagttttctattctttttttttgagacggagtctcgctctgtcgcccaggctggagtgcagtggcgccgtctcggctcactccgagctccgcctcccgggttcacgacat

SEQ ID NO: 10598 - DNA, 1267 bp, Artificial sequence
  DNA replication origin
gcatgcgcggcggggagcctcggcggtgaggcgcaaagccgcgggctcgtgggacggccacccctccgcaaaaccgccaatgggcgggcccgggccgccgatcgcccgccgcggcttccggttccgatgacagtggcgccggaagccggggccggggctgcggggcgaggtgagagcgggcgggcttgggagccggcaggtgcgggccgagggcgggcacagcggccggcggagctgaggcgcgcggcggggaaagctcggccggcctcccgggccccagccttctccagaacccctgctacccacgactaagccccgaacaatctgcccttgggcttgttctcttcgcagttgtcggccctgggccgggagctggagtcccagactcataggtcccggcccagcccccgaagagccgcctcagccggggggagttgctcggactcaaacgtccagtcctcgtgcgaccgcgctgggtcggaagtgagcaggtgcgcaccgggctcggcagggctatggagcagggtctttggaaggatgactaggagtttgcctgtcgtttgcatgttaatgcgggtgaaactcccagtaggcgctgctgtccagggaaaatgatgggctttttcctccctccagttttggttaatgagaaaagaaagattagaaacttcaagtaggactgtatagtaaaaaaaaaaaaaaaatggaggagggcgatatgacacggtaactggtgtgagggtggggcggaggggtcagtattagatactgtggtctagcagagcatctctgaggacgggacatttgcgttgagacccaaattaggaggcaggcttaggaagatacgggaagagagtggtccaggcagcgggaacagccagtgtgaaggccctagggcagaaatcaactgagagtatagtcaaggaacagaaagcaagctagtgtggctaaagtatggtaagaaagggaaagagtggtaggagatgaggtcggataattggggtttggtcacatagagtctgtaggtcagagagaggaatgtggagttttttctaagtacagtggaaatcttttggttttaagcagaggagtgacatgtagggtagagagtggatggaggtcgcggctgcaaaagcataagaattggctgggcacggtggttcacgcccgtaattccagcactttgggaggctgagactggcagacggcttgagctcagcacttcaagaccaacctggccaacatggtgaaaccctgtcgctccaaa

SEQ ID NO: 10599 - DNA, 819 bp, Artificial sequence
  DNA replication origin
cgtggccccgtcgcccgggagcccgctgtggcctcctctccctcgcctgtaccgccacctcgtggagcagtgtggaatcgccagcagtcagtcagggcgggctttggttctgggagtcagtacttcttatgaccgtgctcgtctgacatctggcctcttgcttcgcaggaggcagaaaggccatgctcctgccctagaaagtgagcgcgcttctagtgaagggtctttagagcccattgattcaccctcccgtcaacggagtggaatgacggaggccaggcccagacccctgagcaaatcaggttccgaggtgggaggggaacccaggcagccctccctcattcattccttggcacctgttcagcctctggcttcccgttggccatggagaggaggagaggcagggagcagtgcgcctccccccttctgacctgtgcttattctccagcagcagacacctggcgctgctggccttccttttctcgtgagataggaggcatctgtttttctctttcttcgtgaaagacaggagagcagccaggccagaatgggggattgcggggggcgtggagaactgggctgagggtgtttgggacctgctaggcaaagggcttgagtgtcagtccaactgatttagatcgaggtcagaagatgttctctgttaagggccaaacagtaaacattttaggctccgtggactatacagtctctatcgtaaccactcagccctgctgttatagtaggagagcacccagagacaatatgtaatcaaatggggtggctatgtaccaataaaactttatttataaaaacatgggg

SEQ ID NO: 10600 - DNA, 906 bp, Artificial sequence
  DNA replication origin
gcagacacctggcgctgctggccttccttttctcgtgagataggaggcatctgtttttctctttcttcgtgaaagacaggagagcagccaggccagaatgggggattgcggggggcgtggagaactgggctgagggtgtttgggacctgctaggcaaagggcttgagtgtcagtccaactgatttagatcgaggtcagaagatgttctctgttaagggccaaacagtaaacattttaggctccgtggactatacagtctctatcgtaaccactcagccctgctgttatagtaggagagcacccagagacaatatgtaatcaaatggggtggctatgtaccaataaaactttatttataaaaacatgggggccgggtgtggtggctcatgcctgtaatcccagcactttgggaggctgaggcgggcggatcacgaggtcaggagatccagaccagcctggccaacatagtggaaccccgtctctactaaaaatacaaaaaattagccgagcgtggtggtgggcgcctgcgggaggctgaggcaggagaatcgcttgaaccagggaggcggaggttgcagcgagctgagatcgcgtcactgcacatcagcctgggtgacagtgcgagactgtctcaaaacaaacaaacaagcaagcaagcaagcatgggtccgcgggtcgtagttcgctgaccgctgatctggacggtggtggtgcctgcaggtttttccaatcagatgcaacagctgaggctgggggccgtggctcacgcctgtaatcccagtgttttggaaggccgaggcgggaggatcacttgagcccggaagtttatcagcagcctgggcaacaaacaagacttctgtctcaacaacaacaacaacattaaagaaagaaaaaatgatgcgccgg

SEQ ID NO: 10601 - DNA, 1394 bp, Artificial sequence
  DNA replication origin
gaggttgcagcgagctgagatcgcgtcactgcacatcagcctgggtgacagtgcgagactgtctcaaaacaaacaaacaagcaagcaagcaagcatgggtccgcgggtcgtagttcgctgaccgctgatctggacggtggtggtgcctgcaggtttttccaatcagatgcaacagctgaggctgggggccgtggctcacgcctgtaatcccagtgttttggaaggccgaggcgggaggatcacttgagcccggaagtttatcagcagcctgggcaacaaacaagacttctgtctcaacaacaacaacaacattaaagaaagaaaaaatgatgcgccggggtcgcgtcgggctgggccgggggcgcgccgtgcgagcgggatgtccggcctgcgggcgctgccggggctcaggctgctggttgcggctcgcgcctgcgcgaatcaaaagccagaccagcgcctgccgctcgggacccacctcgtggggacggcagcggctgaactcgggtggccgctgggactcagcggtcatggcgagcatagcggtgaagcacctgagccaggaggaagcccaggtcgtggaccaggagctattcaacgagtactagttcagcgtggcccgacttgtggagctggccgggctgagctgcgccgcagccatcgccaaggcatattcccccacgtccatgtccaggagctcccctactgtcctggtcatctgtggcccggggaataatggaggagatggtctggtctgtgctgcgcacctcaaactctttggctaaccggccaaccatctattaccccaaaaggcccaaccagcccctcttcattgcgttggtgaccccgtgtcagaaaatggacatccctttccttggggaaatgcgctcagagcccgtgatgattgagctgtatgagctggtggtggatgccatcttcggcttcagcttcgagggtgatgttcgggaacgttccacagcatcctgagtgtcctgaagggattcaccgtgcccactgccggcatcaacattccctctggatgggatgtggagaagggaaactctggagggatccagccagacttgctcatctccctcacagcacccaaaaagtctgcaacccaggttacccggtcgccaccattacctggggggtcgttttgtgccacctgctctggaaaagaagtagcacctgaacctgcccctaccctgacaccaagtgtgtgtatggtctgcagtgagggaaggtgggtgggtattcttcccaataaagacttaaaatcgccccctcagaaaagaaagaaagaaagagagagagagaaagaaagcgagagaaaggaaaaaatgtaaattaaaaaagaaaagcatcacgccattgcacaccagcctagttga

SEQ ID NO: 10602 - DNA, 1120 bp, Artificial sequence
  DNA replication origin
agcactttgggaggccaaggtgggtggatcacatgaggtcaggagtttgagactggcctggccaacatggtgaaaccccatctctactaataatataaaatttagccaggtgtggtggtgcacgcctgtaatcccagcttttcgggaggctgaaatggagaactgcttgaacccaggaggcagaagttgcagtgagccaagatcgcatcattacattccagcctgggcgacaagagcgaaattccgtctccagaaaaaaataataagataaaataaaatagaataaagacttgaagtcaagccaggtacggtggctgctcacacctgtaatcccagcactttgggaggccgaggtgggcagatcacgaggtcaggagttcaagaccagcctggccaatatggtgaaagtgaccatggctgggtgaaatgatcactgcagccggtctgggaaggcagaagcaagcagagggcctgggcaggataggcagggattctctgtggggaggatctgtggagacaggggcagcaggattaggatgtcggaattgaggaggcttttgtccttgggggatggagtggagaagtggggcatggtcctggaaatttgccctgcagcctcaccaggccatctggaagctacttgttgggaaccccgtgtgtgtaaagggctgacccaggcccagacccggaggaactggagaagggcacacactgagaccacccgaggggtgtgctggaactgcttggccagtccttggggatgggatggctggggcatgtgggtgtcttcctgtaagaaaacaggacttgatgaggaaggtgggaggctgttccaggcagatggaggtctgtgcccccagagcaatgtaggagtcgccatgcggggctccatctttggtacagtgggggcagagattggcgaggggcatcagggccagatatgtaggtgtggggagccctagatgggccagtgctgcagggggaggcaaggtcatgccagggaggtggatgggacgctggacacaagtgaagagtgaccagccctgtggcttcctcaaacctatgtgagtgcctgccccattcccagatgaagaaaacagaggtttcaatagggaaagtg

SEQ ID NO: 10603 - DNA, 1553 bp, Artificial sequence
  DNA replication origin
gaaggcgagtcgccggccggggctggcacgggcgccgcggcgggggctggaggcgcgaccgcggcgcccccgagcgggaatcagaacggcgccgagggcgaccagatcaacgccagcaagaacgaggaggacgcggggtaggtgcggccgcgggcggacgggggcgccgcctttgttccggggccgccttttgttggcgccacgcggcggggggaggggcggcggcctggcccgggtcggggctggtgcggcccgcggactgtcgccgctgcgttcgcgggccgggcctggcgctgccactcgcgctggagtttgcgggagtttgttgggtcgactttggcgccgccccggggccgctcgcgcgctgccagggccagggccagggccggagccggcgcaggggcgggcggatggcccggaagagggaaagcgctcggacccggggcccggcggcgtcttgggccgcgccggcggctgcgtgggcggagttggcgcgagccggggcccggacctccctcctccgcctctcccgggggcggagtcacggtctgaaccctgggcgggcttggtccccggaaacatcgagttccttgaaacgagttctcaggagttggtggagacgctggccctttgctacatggttgtagaacacatgaatttccagttatgagtggttaggtcccatacccctggtgaggtggtcccttctttgcttctcacaggctggggctgcagagccttgttaagcctcgttagggtcctggttgagttcaatttggagggtagtggagatttaacatctttctaaggtgctccttgcagactctaagggtagctgtagacttcgtgagaactttgccagggccagtcctttccaaaatcacagcttgcttacaagacttgttgccgtgtgtctcaccctaccatttcagaaaaatgttcgttggtggcctgagctgggatactagcaaaaaagatttaaaagactattttactaaatttggagaggtcgttgactgtacaataaaaatggatcccaacactggacggtcaagagggtttgggtttatcctgttcaaagatgcagccagtgtggagaaggtaagctgggtactggatttcagcagtctcagtggaaacgatttgaattctaagaggacacctttcttaaagcatgactagtttgtgtggtctgcatgtgatttaagtgctttgggcaaaacccaaagccggaggttatgttccggtttttgaggggatgaaaatacagattaagctgggagtgagagaatgtgctggagtggttcgggaagatgacagttgacattcattaccttttatgtgcctattctgggtacggcgctaaacatctgggaggattacaagagagtccatgattggtatgataggcttttagccccattttacaggacaaaaaccaaaaccctaaggctcagaaatgtaagtagaagaggtcacagctagtagggagtggagggaggattccttcccctgtggcccatcttcagcctatgctccgagtccctgctgct

SEQ ID NO: 10604 - DNA, 2003 bp, Artificial sequence
  DNA replication origin
gggcggggcccggagcggggccttggaggcccagcccgcgcggcgacgtctccgcgtggcgtcacggcaccgactgacggccacccaccatggccgcagaccagcgcccgaaggccgacacgctggccctgaggcaacggctcatcaggtacccgggcggggggcgggcggcggggggcgcggggctgcgcggagaggcacgcgcacgcacgacgcacgcacgcacgcactacgcacgcgcctccggctaggaagccgctgctacccatcccgtccggccgctgccccggccccgctggagcttctagggcccgaggcgggcggcgccgttgggcagtcccggcgggtggtctccggggccgcctccccgacagcgccgtctccaggccgcccagttcaggagacggccccgccctcaccgctgttcggctgtgtcagcctcgcttggcagcctttactccggagaagaccttcaccctggcgcctgagaggacctcacccagggtggcccgtcagcagcacctgggcctggctcgagagtgacctgggagggggctgaaagggcagacaagggagagtcgggggagtcggttcacaggcagcacacttgacctgtgagggggccctcggtgggacggtgggtgaggtcgcctcccactggagcttagggctggcacccagcgaggggcagcagggccacgtggctggcaaggagctgtttagggctgagagccaggcacctaatgttggtgccctggcccatcccatcgaagacacgcggccttatggagtccccatgggacggggcagccaccttttctcaggatccgggagactgacgcggacacatgcagaaatgagcaaggaggccacagaggctgaaaatgctttcagaaacaatccgaagtttcagcgacttgttaccccatctgcttcctgctttgcaaccacctgtggagtggagagacaaggcagggaagcagcaccttgcccttccagctctcatttcccccccgccaccagaaactgggaaggggtgggcgggggtctgcgatgagtagacttcaccctttcggtcttcagacatggctgtccactccttgcctgtccccacagctcttcctgcagactcttttttcccgaggatcctgttaagattgtccgggcccaagggcagtacatgtacgatgaacagggggcagaatacatcgattgcatcagcaatgtggcgcacggtcagtatcacacctcaggctggcagggcaggagaggaaggcagtgctgtgaacctggtcccaaggtgacctgagattgccgagaggtgtggagaacctgggtggagttgaggcactgtcagtatgcagaggaggctcagccttcgcaatatagctgtggaattctgcaatctggagctgtgctaaaccaggcaggggtcagcaatctaggtctgtgagtctagttccacttgggactgatgatgagctcacaaagtggcagatggcccagctgtgaccagcaacgtagcacagtgctggccaagtgctggggtcatggcagtgcttcagccccattggccatctcaggtgctaggcaagggagctgaagtaggaattcagtcatcttgatgaggctgccagagctgatggaaagaaagggagtctgagactcagcaggcacatggaagatgaataaagttgaggttaaaaaaaaaaaaaaagcagagactctagtcttagactgcttgggctcaaatccctgtcccctacttactaacttgtgatctcgggcaagttacttaattctcagtgcctcagtttgcttatctgtgaaagacataatgatactaggtacccactttaaggtgtttggagaattaagtgtgttaatttatgtagcttgctctgaatgtgcctggcacatggtgagctctcagtacatattcactgttattatccttggcctttgacaatcaagattaccaccagcccccttggctggtgaag

SEQ ID NO: 10605 - DNA, 1138 bp, Artificial sequence
  DNA replication origin
atgagccgttgcctcagggccagcgtgtcggccttcgggcgctggtctgcggccatggtgggtggccgtcagtcggtgccgtgacgccacgcggagacgtcgccgcgcgggctgggcctccaaggccccgctccgggccccgcccctgcctgggtcgggatttggggctcaggttcgcactcggccccgccccgaagcgcccgcgttgcggtggttcatttcttcgcttgcccactgggcctggcagccttccggcccgtggtcgtgccttggcagtcccgcgcaggaactcgagcgctgccccgtctctggttccgggacgcgccccgggcctcgccccgcaggccccgccccgcaggcccctgcggcctcccttccgggaaagggtcccggacgaccccgcccctgctcccggcgcccaggcggggctcggagctcctgcaggccttctctgggccagactcagtctttgagtcgccttgtgcataaaatgggatgaactgtgaggcctaagtgcgagtatgtgactggtaccttacccgggcctggtacacagtaggggcctcagggtgggagaagcaggtcctaggttttcccagccccatgaaggggcagcaggaagagcagaaggagagcccagggtcccttctggggctgaccaaggagatcaccatgggcttgaccttcagggcaccatagttcctgctagaatctaggcagggtgaaccggacgagctgtatcgtcgctgagagaatcatgcagcgtttgggcaagaagagaggttgggaatcctccttgtggtacatgtcggtgaccctgaagcccagaaagggaaagggttttgttgtcagacacgcagcaaggctgcagaggctggactcctactgaggtcttcttgactcccagcccagggagtgagaagaaaaagcctcccaaggggctgggatatgagagaaaagccccctcctggggtgaggcactggggctttctgccttgaagaaccctggaacacgggcctgggactgcagcaggtgcaggggaggctcctgattgtcccttctttctgtccacatcatgattcccaggcctctgcttcactccctcattgctgatttcttcttctcttcccaatacag

SEQ ID NO: 10606 - DNA, 1171 bp, Artificial sequence
  DNA replication origin
agggctgggactgcaactgactggttccccctgtgtccccattgccaagtccagtgcacgacccagagtaggtcctttgtggatagatgaatggattgttgatggatggataaatggatggatacattggtagatggaggatggatggacaatggaggatgaatcgatggatggatgaatgcataatgcaggattgatggatggatggataaatggatggatgggtggatggatgggtgaatggatggatgaatgaatggatggatgggtgaatggatggatgggtgaatggatggatgggtgatggatgagtggatgatgggtgggtggatgatgggtgggtggatgatgaatggatgatggatggatgggtgggtggatggataatggaagaatgatggatgaatggatggaggattgaatggactcatccatccattcatctatctatccactatggatggatggatggatggatggataatagatgaatgatggatggatggatggatggatggatggatggatggatggatgatgatggcagtggagggatggatggatggatgatggatgatagatgatgagtggatgggtgggtggatggatggatggatggatgatagatgatgagtgaatggatggatgatgatggcagtggagggatggagggatggacggatggatggatgatagatgatgagtggatggatggatgatgatggcagtggagggatggatggacggatggatggatgatagatgatgagtggatggatggatggatgatagatgatgagtggatggatggatgatgatggcagtggagggatggatggatggatggatgatagatgatgagtggatggatggatgatgatggcagtggagggatggatggatggatggatgatgcattgtagcaaggaagtgaagagagcagtgaggagcctgttgcaatatcctggtgacagataatagggctttagctagagcagtaatttgagaagaagaggaagggaagtattagcccaggctgattatgtcaagtctcttctggtagcatacatagaaaacatagtttaaactggcttaaaattactcataactgaaaaatctggaggttcaacacatggatccagggctcaactgtgtcaacacaactcagcct

SEQ ID NO: 10607 - DNA, 1040 bp, Artificial sequence
  DNA replication origin
gaaggtgattacggtcacacccattccaaagatgaggaaagcaggtgcagacggggggcggggggggggggacaggcccagccacacagcgggaggcagcagagctgggtccccatcaggcttctacggcaagccttggaccctgtcctgatagcagctgcctctttgaaacatgaactgtggtggccttaagagaaagcagaaccagaagcagagcacctggtggggctgcaggctcgggcctgggcttccacgattctcagtcccacatctggcctctgagctggggaagcagagatttgctcacgccaggagggtggtgtgacaaggagtgaggccaggtggcctccccttctgtgtctgcctccctggggcagggcatgcaggcaggccacactcgaggacttaacgtaagagcagggaacacgccatcatgtaatatacaccaagcccaagactttgtgcttagactgtggcagctgagagacagatgtgtgtggggcgggctgggatggggagaggtggggacagtgcaaggaactgacaggcacagacaaaggagaaggggacaagcagtggaaacggtggtggacctgaggaggagagagggacagactggggtcccgggcagagggagaaagtgggagaggagagcctcaagggtggagaggggggcattggcctcaacgacatcggggaggttatgccctggggacttgggacgttcaggcgctgggaagactcagggatgggccagggcggagcgtcaggccctttgctttgcccattggcaaggctcttggaaactgcccagacggtgagtctgaggccagtagaggggtctgtgcccactcaccttgggaccctggattccctggaggccctgcaggaggaggaagcagataagaaggctggctccggaccctcttgcagtggccactcactggcccctggggccctgtcctgggctctgccctctgcccatgtgcccctccctgaacgaagaagcccgctctctcctgggtcatggctctgggacc

SEQ ID NO: 10608 - DNA, 1258 bp, Artificial sequence
  DNA replication origin
agcactttgggagcccgaggcaggtggatcacgaggtgaggagttcgagaccagcatggccaacatagtgaaaccgcgtctctcctaaaaatacaaaaattagccgggcatggtggtgcgcgcctgtagtctcagctactcgggaggctgaggcaggagaatcacttgaacccgggaggcagaggttgtggtgaactgagatcgcacctctgcactccaggctgggcaacagagggagactccatctcaaaaataaaaaaaaaataaaaaataaaaacatattgggggaaggctagctagggaatgatatggacagtgaatgaaagcaggtgttggagcagggagcagggggaccccaggcagggaggtcctgggcctgggcctgggggagggtagataagatggaggccagggacatctcaatgggacaccaacaagaagggcacaggatagggaggtgggaggggagagacctagagcttccggggcaggggtggggcaggggctgggcagggtgcagtttttcagaagggaggggaggagtgtggaggctgagcagggggccagctgggccctggtggcaggtagcctgcagaaagcctggatcaggacaggagcttgagagtggggtcggacctggaaacactggagaccccacccctacctgcgagactaaggaactccctaggcccagcagatggcaggcagcagagccagaaggtcagagagctcacaggacagtcagagacggtggtgctgggccaccattggggatgtcattcttggcaggccttgaatgccagcaggggatttaagcttgctttgagaggcaatagggagccaaagcaagatcttgagcaggggaacatcgtgaagaaatctggattggggcagagggccgtccatggcagcagacactggtgtcttgtcaaatgctgggtgtcacctcctggcctcccccaagcctgggaggccagataaagccttgcacagtgtggcctgacctgactggggaagaagcagtccccaaggaccctgcccctgctctgctcagctggacggggacttgattccaggtggggagctggatgggtagcgaagggaggccctgcctaacccatgacactgaccggcttcactctcacacacaggggcctcccggaccacaggggcccccagggccaccagggatccctggagccaaggtcagtgcagatgcagctatgtggtcccccaagcatttgtctccagggcccac

SEQ ID NO: 10609 - DNA, 932 bp, Artificial sequence
  DNA replication origin
ctggaggggcaggtgcacaggggtccacacacatgcagacacgtacatgcagaggcgcgcgcacacacataaacatgtgcgcgtgaccctgctgtcggcgtgtgtgggaaaggggcttccaggtctgggaaccatgatcctagcagcccaggcctctggaatgccctggatactgaccatctcgccgtcttgtccgggctctcctttggggccctgcggaagtgtgaggggacagcagtgaaggatgcaggatgtcacattgaactgagcccaaatctcaggccagaccccgggctggggctctaagtacattatcttatctcattctcgccaaacctgaagagcgagtatcactgtccccactccacagatgagaatgttaggctggggaagccactggcccggtgtgacaagtaatggatgagccaactgagcagctgtcctgggggaatctggcagcagtttggtggggatccatttgactggggggggaccctggtggcagtctggtggtggcatgggctccacaatgaagggaaggacaggctggggattctgggttagggaaaggggtagtaggatggggcctggcctctagactttggagaccctgggaggaaagctgaggctgagatactattggggagcatgaggggaggggctgataaaggtctgcagagacagtgtccccagaagggtctcaggctcagggttgagtcaggattgggactgggattgcaactaaggtcagcttagggtctctgggtctgtttgaagttagagttgggttgggagtcagggtcagagtctgtaaggttcagagttagggtctgaattgggggcgtagaccaggatttgggaatgagttagaggtcaaggtcttgattgggatcagagacccagttagtgttagatttaaggttcgaatggga

SEQ ID NO: 10610 - DNA, 1708 bp, Artificial sequence
  DNA replication origin
ttctattcctgcccttcctctgctctctccctcacagcaagaaacagtgggaggtggctttagaggggcaatgtggggcaattgggtagggccttgagcagagagagggtgagacctggctcatattttaaagatccccgtgtggggtagcaggggtagaacctggaggctactgcatgctgcaggggagagaggacagtggctcacagctggtggtggcagtggaagtggtggacgtggttgggttctggattgattctgacagcacagccaagaggatctccctagttttggcttcagcaactgaaaggatggggctgccgtcaacagaggtggggagatagtagtggggcaggcttggctgaaggggtcagaagcttggcacacgtggcactgctgcaagttaaagagaagatcaagaagtcctggaagcaaagtagagaaagtgtctcaggagggagtgatcgcctgtgcacaggacgaagtaactgccctgctgatgggtcaagtaagaagaccaggaactggatgtagcaatgcagaggcatgtccagggagtgacaggaggggggtctgatgggagagggtttcagagagaagggggttgagggatgtggacagtgggtgctttggaggagctctgctgcaaaggggaggaaatgaacagttgctttgtgggagtggggcctggagatggatatgggtatttctttaggatgagagacatggccacatgtttgtaggatgagagtggtccagcagagagagaggattcggtgtgggggaggaggggagagtcctagagccacattcttgaggaggtgagaagggctggctcttggcgctggcacagatgggggcctggacagtccatctgtggagatggcaggaggaagagtgcctggtgctgctaggcatgtgccatggaggtgggagttcgggcaagttctcttctgattgtgccaactctctcagtgaagcaggaagcgaggccgtcagcctcaggtgatgatgctgcaggaggtgttcggggactgagcgggagaggctgagtgggttggacaatgtggcctcagccaggcagcagaaagggccacgggggctgggggtgtttctctccagctgggtaatctgcacgcactggagtggagcatgtggaggggactgggttcagtctggggtggggcttttgctgagtaagaatgagggaggagggaggggcagggaggtctggcatggggaagctggcaggattccagctggaggggtgaggggcaaggggctgggatccatggatctgaaggctggagatggaagggttgtgggggtcaggaagagggaatgggctggaatttgtgaactgagaatttgtggatgctgcatttatatcgggcaagacctctggagggacaggctgttgtcagaggaggccaagtctatcagaggagaggaggccacggagtccagaggccaggctgtgtaaggggcttctacgtggctatcaagattcacaggaattcacccagaagtactgtgggagagagggctggtgacccaggggctggaaccgactagcaatgaggtgggtgcacgtgggatcagagatggcttctagaatgacaccccatcaccaccccagtctcccattctggggccagggtcatagttctcaaaatgcagatctgatcctgacacttccctcctcact

SEQ ID NO: 10611 - DNA, 1745 bp, Artificial sequence
  DNA replication origin
taaagtgtgtatttggcagggtctcgggtgattacacacagaagccaggctaaaggaagctccagccattgaactcaaaacaggcttcagcttccagaagtcaaggcagagagagaaatgaagggtgcttcttgccggtgagcgctaaggagtgtatctggagggtctctgcgtaaggaactcgacactgcaaaccagtggaacaaggaggcagaaagcctgcgcccagctccagggagaagagtctgaggcctggagaaaacgtgccactgcctccccttgggcccagttggcccggggtcctcttggtggtgagccagcctggcttcgtcaccatggccaccttgtgaagttgcttaggggctgggcattcattcgttcgctgttctgtgcatttacatgcctgggggctgcccgtgctgagtgtggggcgatacctcttggacaaaaccattagaggtttttttggaggagatgcttgagctaggcttgaaggacaaagggtaatgatcttggggtgggagtccaggtagaggaggagatgttctgggtgcgggaagacataagagtgaaggctcagaaggtggagagccctggacatccatggtgaggctggaggtggggacatggcgtggggggtgatgagagctgcaggaggtcacggcagtgagaagagagaagaggacatgggtccgagacatggagaaggaggctcatggggacttggcgtgggcagggaagggatcgaggatgcagccaggtgtctacacagggaagcaggtggctagatgcctcctccctgtgacggggaagcccagggaagaaagctgggggagatgctggcttcggcagggcaacgtccaacctcggggacccggaggagaggatgtggctggaggcagggagaggacatggtcagtgtcacagcagtgggagactgtgggagagaggagaggagacgaccaagggagattcattcacggggcaggtgggtcccgtgagaatggcaaaggagcccgggtcacagatgagggaggaagcgcagggaggaagcgcagcccagacagccgggactgcccagcatgggggagtggccaagggtgggggtcaagaaagagaaagacagcaaagcatccagtgtggccatcagaggtcagcatgactttagctaagacgatgtcagaggggcttagggaagtccctgggcgaagggggcaatctgctggggactgggtagggggagttctgggtgaagcagagacagcaggaaggaagggtggtgaatacaggtgcctctgtgggctgcagggaagggaggtgggggagtctcctcctggcggctctgccaaggaaggacaggccacgtctggggagggatgaaacccacaggagaacccggttgtgctgaaggacccatgggggagggtgtggctggcggagtcatcaccttctgcctcagagagagggggctgctctggagtgggggactaggggccaacaacgaggttcgggggatgactgggggcagaggggacagtcctggaattgtgaatgccaagaagccccggaaaggcagtactgggtgctgcggcctcaggaaacggcagctggacttggaagggggaggagcacctgcccaggaccaaggcatgactcagggtgggcagcaggtggccaggccctgcagtcagagcctggggccatggtggcttccaagccttggcttaggagctgagaaaacctgg

SEQ ID NO: 10612 - DNA, 1128 bp, Artificial sequence
  DNA replication origin
gagaatcccttccagactgcccggcaagacgcaggaagacaatgccgccttctgtgttaagttgagcagagcacctttgcacatgtgttcaccccactcctgcttgggttcaggtgggatttgggggtcggcctgtgctgctgacgcgggtgggggaggctgaccctctgcagtgggacgagctgcagccctgaatttgatctccctccctgctggggggttggcctgggccgtgtgcagagagtggctgggcctcagatggaagggctgaggaagggctggattcagagcaggtggagtggcaggacccaggacctcttggaagtccctccctaaatcagacttaggaaggtgggagccactgggcacccatgggggcctggtcctgggaaggggctctgcagacccctttcccctcctgaggcagaatgctctgcagccaggcagggagctcagcccagaagccaggtagtaaatgggcgtgaggcactttgttagcagggaagccgctgtgagggtatgcctgctggcccagcgccgttcggagccctgaggccacacacccaaccctgactgccaagggaggtagccatgaacatggaaaaggaccagaatgcagcatgacagggctgcggtgggggtgggggagacaggatggggccttgaccctgccaggggcagtttagggtggccttctgcctgaggtgtcccctcctcagtaagaaaaagccattagcaatgaggtagaggaggggttcttttcagcaaaataatgagaagaaagcaggtgatcatagcccagagtcgccccgagtgcgtgggaacacagaggtccctgcaagaggcagagctgctgggaagagcccgcccaagccctgggcggcaggtggagaggccaaggcaaggccagtcggggggcggcgtcagggcagctggagctggatgggaacaggggcgggggtgaggtcacaggccatcaggaggcacatggaggcatgcgagaccccgaggggcactgctggggctgggaggcatgaatccaggacaggggaggatgatcaaagttctagaccactcctctaagtttctagaactgtgctagcctatatggtagtcactagtccgtgt

SEQ ID NO: 10613 - DNA, 1426 bp, Artificial sequence
  DNA replication origin
tgcactgtgtcagccaggaggtatttcttcttctggactgtaggttctacacttaggctatcctgtcagtgttttcaacaacttggagatgcaaaatgtatacagtgatcaaattagcagataacaagaggatgataggtcctataggagaggccagaattaacatgtgataaaaccttgatacactgtaactctagggcatgggctgatgcttagtgccccgcagttatgttgtctgactccctaaaaatactgctcacacctgttaggacactgttgcttgtcataaaaacagccaacttgaattgacttaaagccaaaaaacaaaacaaaacaaaatatgtggggttgctgtgggagtgggttgctgtgggagtggattgctgtgggggtgggttgctgtgggggtgggttgctgtgggggtgggttgctgtgggggtgggttgctgtgggagtggattgctgtgggggtgggttgctgtgggggtgggttgctgtgggggtgggttgctgtgggggtggatgtgtcatagatttggcttctgtagggtgggtcgggctgctgggctgtgccatgggctgggctgtgccatcgggcagcctctcccagtgcttgggatgctttcctctgtgccggcttcaccttcaggaagtggagtcttcaaagttctagccttactcctttcttgcagctgcaggaagaaagcctcttgtctaatagttccaacagaagtcccatggcggagactcctgggtgacattttacactctgagccagtcattgcagccagaaaaatgagggtgtgcccgtgagccaggccagagtcacctgccggtggcaagggtgggtgggagaggctaagacttaacaaatccaggtggactgagagtggggagggtggctcttcaaaggaaaagtgaggtgctggtggcaaaaaaaagagagagtggctgcttggcaggccacaggcacccctcggtgaagtgagcttagcctggattcggtatcagcccagaggctggtgtcgtgctgtgggcccactgagacacagagctgtccatggttcagtgggacatgcccccaccaaccccggggcctgtggttgagccgctattcggacccacagccgcctggctccaaactcagcctccctccattcacttgggctctgggtggaaatgggaatggtgtgtctgtctaacagttcacaggcagggacaggaggagccgctctgcacaccacctctcaccagctgaatgtgttcccacctcaatgccctgccacacctgcagcgacgtccgctaaaagttggacctaggaagcctccttgttgcttgtaacaatgaccccgtatctgcaggaggggaggagggaagctttgcataagcatcactactcctttatctcccactcagcatttcct

SEQ ID NO: 10614 - DNA, 1028 bp, Artificial sequence
  DNA replication origin
agccccacggaagtgcatctattccccccatttcatagaagaggaaagtgaggagcgtggtatgctttccctaagccgtgtggctgataagtgacgagactgcggtagaaactcagacttgctgaaaacagttcttggttcagcttttccctgagactgaaaacaagtgttagaacttcaggcaagttaaatttgatggagtttacttgagaaaacaaaaaagagaaaaagaaatgatttgtgaatccagcagcctccagaatcacagcagattcagagagactccaggggtgcctcgtggtcagaacgaatttatagacaaaaagggtaaagtgacacacaggaatcagaggtgcggtacagaaagagtgagactggttacagctcggcgtttgccttatttgaacgcagtttgaacactcagcggtctatgagtggttgaaggatggccgctgggattggccaagactcagctgttgttacaggtgcatactagtaagttaggttttcagttttgcctgcctattaagctaggttatggttcatccacaaggactcagatatagaagtactgagtccttctcaggccatatttagtttgctttaacacgaggtggggagaagaggaggaaaccccacacgccgacattagggactgggccagcacatggggaggcatagggatgcccagtctgcaacccactgccccccagcactttctcatctacaaaacaggctgatgctaatcatagtgaccccagggtttgctgtgcagattaaaggagataattcaggtcgtggtgccgagcccagtgcctggcacagaacaggtttgcagtcagtgtttactgtcgttaccggtgacctcagctttgcatgggagagaagggtggaggctcgccttggctctgctgttcctgtgtcctcagccactgaccctccatgcgactggctcttcggcttaacgttagaccaatgtcaaccttgacgagaacagagttcctgagcaactgagagcaaaaacccag

SEQ ID NO: 10615 - DNA, 1764 bp, Artificial sequence
  DNA replication origin
ggcacttctgtctgtttcttggctgtgggcaggtggcggatggatgggaggatggatgtggttgtggcagcaccccgcagcctggaggccccgtccccactgagtcctggcccagtgtgttgatgtggaggcatgcccacctcagtgacaggcgctttccacacacaaagccacagatattgcagctttctgcgcaggaagcccgctcccaccagctactggtcgcacacacagcccgtaatgtaccctcctcctcttatttaactactgattagtttgcttcaggataggtgtgaggtgcagggatcatggggtggacaaggtgggcacggtccctcaaggagcatctggggagcctgggggagactaggaggggcacccgccaggcctgaggaggcagaaagcttccaaagggaagcaacacctgagttaagaaaggaaaaggcaggaattggcaagtggataaatgcacatcttctctagtcagaccaaacagtacgtggaaagagacagggcctggcgcgttccaggaaataagatttcagcacggttagaaggttgagtttatgcctggtggtggcagggggctggggaggggacaggtcagggatgcttggagggaatgccggagaggaggggaggaggcacaccggtgctcagagcctctgtcctttcacactgtggtcaggagaggtgaacttaaaaccagagagatctggcagagagccgtcatcgggcagcgcctttgggcacgttggcatctgagctgggtgcgggtgggatgttaggaggccaggcctcagtggggctgtgggcgagggccagcctgctcagcctctgggtaccagagacgcaggagctgggcgattcttctgcaggtgtttgggtgtcattagacaacagaggggagaggggcaaacagtgagggaggtttctcagagactgggctgggaggccctgaagcacgggaagaggggtagggtggtggaaatgaggacgaggacggggcaggtggaacgcccagggtgccgtggagtatttggttctgaagctcaggatctgccagggaggtgaggcctccagacagctctgcagagacagaaagagacacaaaaagagaaactctggaactgagcctgaggaacccaccaagacaagggaagggcgtgcagaggcgtctggcagggtggcgaaggcccgggtgaccccgagcactggaccgggtccaactccatccagcagctgagagctcctgtgaacacttggtgcgttactgggggagtgggttcagtgtgggtgggagctgtggaagggaaggagagcaggcgagtgggctgtggaggaaaggggcacgatgcaggtggcaggttcaagagggagaagccctgagtgtgcaggaagctgagggctctgtagccgcagagccgggacagatgtagacctagggtccagcagaggcggggagcgggggtccgagctgaaggaaaggtaggtattagaggctgagaaggttgcccaaaggccttctgttttcctgggtgaagaaggaggggtgctgagtgcaccaggatgggcaggtaggtcggaggcctgaggagcctggagtgggatgggcaagagcaggaatgatttcaggcactcgagggccagggagcgtttgtggacctgacatgtccctactctggctggttagtggcttccaccccgtggaaacctctgcagtgattctgttctggtgctgcccctgggcggaccctacccagc

SEQ ID NO: 10616 - DNA, 938 bp, Artificial sequence
  DNA replication origin
gtctcagtctttgccgccgcgccggcgagcgccgcccgggaggcagcggctggaggagcggacgggccccgcggggcccgagggcaaggagcagccgcctgccttggcctcccaaagtgccgagattgcagcctctgcccggctgccaccccgtctgggaagtgaggagtgtctctgcctggccgcccatcgtctgggatgtgaggagcgtctccgcccggccgccatcccatctaggaagtgaggagcgtctctgcccggccgcccatcgtctgagatgtgaggagcgcctctgccccgccgccccatctgggaggtgaggagcgtctctgcccggccgccccgtctgagaagtgaggagcccctctgcccggccagccaccccgtccgggaggtgaggggcgcctctgcccggccgcccctactgggaagtgaggagcccctctgcccggccaccaccccgtctgggaggtgtgcccaacagctcattgagaacgggccaggatgacaatggctgctttgtggaatagaaaggcgggaaaggtggggaaaagattgagaaatcggatggttgccgtgtctgtgtagaaagaagtagacatgggagacttttcattttgttctgcactaagaaaaattcctctgccttgggatcctgttgatctgtgaccttacccccaaccccgtgctctctgaaacatgtgctgtgtccactcagggttaaatggattaagggcggtgcaagatgtgctttgttaaacagatgcttgaaggcagcatgctccttaagagtcatcaccaatccctaatctcaagtaatcagggacacaaacactgcggaaggccgcagggtcctctgcctaggaaaaccagagatctttgttcacttgtttatctgctgacattccctccactattgtcccatgaccctgccaaat

SEQ ID NO: 10617 - DNA, 742 bp, Artificial sequence
  DNA replication origin
acagggcactggcctcccggtctgaggcctgggctctgtgctgacaacgttctgcccctgagcccacagtttcctcatctacaaaatggggctgcgggcagagagggaagatgataaaattggtgaaaaggactgcagactacaagatgctgttcagcagaaagaactgctgttgagaaggctcgaaggcgccgcgggctggggtcggtggcttagggagcccgtccggccatggtggccgcgggtggtggttggcgcggctgcgctgcggcccggggcagtgcggagccgggacagtcgcggcgctgacgcccgcgggccccagctgcagatatgaagcggagccgctgccgcgaccgaccgcagccgccgccgcccgaccgccgggaggatggagttcagcgggcagcggagctgtctcagtctttgccgccgcgccggcgagcgccgcccgggaggcagcggctggaggagcggacgggccccgcggggcccgagggcaaggagcagccgcctgccttggcctcccaaagtgccgagattgcagcctctgcccggctgccaccccgtctgggaagtgaggagtgtctctgcctggccgcccatcgtctgggatgtgaggagcgtctccgcccggccgccatcccatctaggaagtgaggagcgtctctgcccggccgcccatcgtctgagatgtgaggagcgcctctgccccgccgccccatctgggaggtgaggagcg

SEQ ID NO: 10618 - DNA, 1124 bp, Artificial sequence
  DNA replication origin
agatgaggaaactgtgggctcaggggcagaacgttgtcagcacagagcccaggcctcagaccgggaggccagtgccctgtctaccttcacaggccataaagccaatggctgctgcaaacccagctgctgtggggtgtgcagactcacaagtctcccatgaccaggcacacaatgtgcgtccatgaagggtccaggagcaatacagcagggagtatcaggctgtggggaacaagtggccgcgccctgcacaatgccacacaattctgacagggactgccaggtggaaaactgggccctgtgtggtctgatctcccagtttttccaagagaagccagaaatcatgattttaaaataaattttcctgatttttgagacattttcctagctggatgcatctcacaggtgtcagtttgcaaacccttgtctgcctgtgttaaaggatgtttgtctcactggtcactggtgctgcccatcactgtatctaagagcctagcacaggacatagcagccaccaggcctgtgataaatattgtctggtgtagtggttattggttgaatgaatgaatgatgtatagatggatgcatgggaggatagatggacagatagatggaggatggtcagatggatagagagttgggtgaatagatggtcagatgatggacagatgcatgggtagatggatggatgaatggtcagatggacagatggttggatgaaaggatgatggatagatggacagatgcatgggtggacagatgaagcatagatggaagatggtcagatggatagagagttgggtgaatggatggtcagatgatggacagatgcatgggtggatggatggatggatggatagatggaggatggttagatggatagatggtctgataaatggatggatggatgcatctgaatggttggacagatgcatgttggatggtcagacgggtgaatgcatcgaaggatggatggatggctggtaaggaaggagggaagactgggaaggaatcagtgtgtgactagtaagattggacagtccttgactttgctgccagagcagaggctcggtggaggtagccagtcattggttccccaactgtactgcagacagatctatcagttc

SEQ ID NO: 10619 - DNA, 1118 bp, Artificial sequence
  DNA replication origin
tagggtgtgtgtgtgggggtgagggggggtatgtgtgtgtgggtgtgggggtgggtgtgtttgtgggtgggtgtgtgtgggtgggtatgggggtgtgtggggggtgggtgtgggtatgtgggtgtaggtgtgtgggtgtgtgtggggggtgggtgtgggtgtaagtgtgcgtgtgggatgtgtgtatgggtgggtgtggggtgtgggtgtgtatgggggtgtgggtgtgggtgtgtgtaggtgggtgggtgtgggggtgtgtaggtgggtgggtgtgggggtgtgtgtcagtgtgtgtggggggtgtgtggggggtgggtatgtgggtataggtgtgggtgtgggggtgtgtggggtgggtgtgtgggtgtggggggtgtgtatgggtgtgtgtgtgggtgtgtggggggtgggtgtgtggggggtgtgtatggggggtgtgtgtgtgtgggggggtgtgggtgggtgtgtgtggggggtgtgtgtgtgggtggttgtgggggtgtgggtgtaggtgtgtgtgggggtgtgtatgggggtgtgtgggtgtgtttgtgggtgtgagtgtgtgggtgtgggggtgtgtatggggatgtgtgggtgtgtgtgtgggtgtgtgggtgtgtgtgcccacacgtgcatgcataaagagatttatttgaaggaattggctcacgtgattatggggactatcaagtccaaaatctggcccaggagagccaatattcttacccatgttctttcccatgttctcgccacccgccttttttctcactgccggtcatagaggtgacttgggccagggctcggctctgctgagttccgagtgtgccccaggggctgatgattgaaagtcatttgcatttagctcggtgctggcgtgaatcagatactgtcggggtacttgccactcagtgtcacggaaatgtattccctacggggaaatagtttggaaataccttccctgaaaagccttctctaccttttgcagctgacatttcctgttttacttcccaaattgcctgaattgagcagagtttgggagctctgtggacccaggcgctcccagaaggatgccccccaagcttggaaggccactctgcatgcgagcggcttcc

SEQ ID NO: 10620 - DNA, 1548 bp, Artificial sequence
  DNA replication origin
ccgcgccccgggctccggaccacccgcgggatccccggacggcagagcagggacccgctgggccttgggagttgggctgagcgaggagcgccggggcctcggcccacagggcgcggaggcgcagacggcgacagggaggaccccggcggggagtcctcaggcagaagcagtaccgcgctagggacacaggcgccggccgctgcccgaggaggggccgctccccgggcgctgcgctggggccggggcgcagcggggaagacgtctccgcggggctgacccggcagagcggccagcgccgcgctgctcgcctggtccaaagccgaacccaggcggcctcccgtgcgcgcagggggaggggcggcgctgcccgagaggcccgcgctggaggcggaggcctggcgcctcggaggacaggaccgagaggccggcgcggcggtcgccgggggacccgttggggcttttcgcagggcctggcgcgcggggcccggggaggagaccgcggccgtggggaggagagagttcgaggatcaggaacagcccggggccctccacgaccccgcgcctgtccccgctcctaccgcctggatgggtctctgcgccagcccagcatggtgaaccctggagggcgggttctgagaagccgtgtgtgtctttgaaaaataatgaggacgggctcggtgggtggctcacgcccgtaatcccagcactttgggaggccgaggcgggtggatcacgaggtcaggagttcgagaccagcctcgccagtatggcgaaaccccgtctctactaaaaatacaaaaatcaggcgtggtggggggcgcctgtagtcccagctacttgggagggtgaggcaggagaatcggttgaacccgggaggcggaggttgcagtgagctaacatcatgccactggactccagcctggggcgacaagagtgagactccgtctaaaaaaaaaggataatgaatggcaacgccagtgggctattgggcagcagggcaagactttttcagccagtatgctttagggaactgaactttgcttgaaaaaactaccttcgcaaaatcacccccaacggctgtaagttggagctcccagcatcgacttgctgcgcaaggagaaacacagtctgaaggggtattgagggactgccaaaagcactgcggcttcgtgaccgagcccctctcgacatcactgtccaggccaatttgagttgggtttttatccatcgctactagaggaatcaatggattgacttgctcgcttggaagattgtgaagtagttgtggctacggtcatattccgaacacctggtgtatgtgagtttctctgaggacacatatgcctggcaaaactcggagcaagtgaaggtggacctggtctccgcttccttcctgtcctgcgccccttctcctcacccccaacacaatggctcatgcactcttcttgcctttcccaggaactgtcctgcgttctgtttctgctctcacagcaatcagtctcctgaatagtgaggaccaggtggcaggtgccttgtctatgggaagag

SEQ ID NO: 10621 - DNA, 1253 bp, Artificial sequence
  DNA replication origin
tgcttcatgaccccattttttggtttatcatttgagcagactgagactttccattaattttaaaaagtcatgaccaaaataaaaataaaattattcatgaaaataattgtatggatttgtcattgtgaaagggcacacaaatacctaatcaatttgctttaattaagagagtcctctgtctcaaaaaaaaaaagtctgcttttataatcatgcggtatggcggcaacacggcgaaatgctcgtggttaacctggtgagctagaggcttcacacacatctgcttcgcttcacactgggaaatgagaaaatctattctcctgatgtagccacggaatttttggggggcaggggtgggtgggggaaggcggtgcttgcaaatgggtaatggcaacttctaaaatggaatttgtttccaactctgagctgtgaaacaaggcataaagcaattagaatgtatttgaaaagacagtttaaataaaatctactcaactttgggcctcccgggaggaacatcacacaaaaaatgccggatctgctcattgatttgactgtgctttaactgcgcctttttgcgtggggcttgggcggttatattacctcctgcagcctcctttcagaccaggcttgtggtgcagtcaggaagggaagattcccatgatgtcaaggggactcgagtgtgtgtgagcgtgagctagtgtgagggtggaagtgtgtatgtgtgtgccaggagaatgcatgcatgtgtgtgtacatgggtgtgtgtgcacgtgtgtgccaggagtatgcatgtgtgcatatgtgtgtgtacatgggtgtatgtgtgcacgtgtttcatgtatgcatatgcacgtaagtatgcctgtgtgtgcatgtgtgtgcatgcatgtgtgtgtgtgcatgaatgtgtgcatgtgggcgtgtgcatgcatgtgtgtgtgcatgagtgtgtgtgtgcatgtgggtgtgtgcatgcacgtgtgtgcatgctgtgtgggcactgtacaggcatctcacttagacagtgagagactttataaggtccccagatgggaccagcctgaccttatcgcctcactgtggaagttatcccgtccaagtgtccccgaaagaccctgtagctgggccctgacggctcatgcagtgggctttagaattgggaagcctgggtctgagtccagagctgcctctgaaccggccagcgtcctgggacaagttggttgacctttccgaacctcggcttcctcttctggaaa

SEQ ID NO: 10622 - DNA, 1497 bp, Artificial sequence
  DNA replication origin
gcgcgccggtggcggcggcgacgcggggaagggcaatgcggcgggcggcggcggcggagggcgctcggcgacgacggccgggtcccgggcggtgagcgcgctgtgcctgctgctctccgtgggctcggcggctgcctgcctgctgctgggtgtccaggcggccgcgctgcagggccgggtggcggcgctcgaggaggagcgggagctgctgcggcgcgcggggccgccaggcgccctggacgcctgggccgagccgcacctggagcgcctgctgcgggaggtgagcgtcttggcgcgtggctggggcggacttgggtgtgtcgggttgagggtggcggtacgctgggagccgggggcagcgtgcaggtctctgggaggagggtcgcccgccggctgcgtgcgctcggggccgtcccagagatgggcacgtctgcgccaaggcggaggcagggggtgccggccccaaggggttttgcggtctccgctccggcctcagggtcccgtgccaggcaggcggccgcgagaaaggggaaggagagaccagggactttggagtaacagacctagggtcagtctccacggggtgtgcgctcggacacgccgcttcccgccggcggccagagtcggggataaagatgaggctcgtgggaagtatctggtgactgtgaccagtagcacctactgttcctaaccaacgctggtacacctggagaggcggtggtcacggcggaggaaagcctcagacaggcccgagggctgggccccgctgtgctccagtgtgtctccagcagctcaggccccaagactgagcggtcaccgtcgcactgaggcctcggggatgggggtgggggcgcccacatgacttggtaagatgagaggaaggagaaacaatcgggggtggaggacctggattctggtttcaggcggtgccatctggggtgtgggctcgcaggacatccggagtttcccgtcccttacctgggaatcgcgacttccacagcttacttgaaagctcatatgaggctctgtgacacttctaagggttaagattgctgctgtgtgtcttcaaagaaagagccacctttgggtcctccaagccctcacccagcatgttggtcaaagcctccgccttttgtgtgcggcatgtgcggcagttcccctccccacgaaactggacaggccctggtgggctggccagagcctcccctgccgagccttcctccttctcctgggatagatggctgctccagaccccaaggtcgctgtccaagggcgcatcctcaattgctgtgtgaaaacaggcagggtttcaaggtggaggagagggagcactggcctgtacacccccaattccctagactgcccagctgggatctttattaacgtatccagctgtgtttccaatgttgagttcctttggattccaaaggaaagtgggagaagatgacttgcgtaccacacctccttgttcaccccacctgtttcttagtcacttta

SEQ ID NO: 10623 - DNA, 1169 bp, Artificial sequence
  DNA replication origin
gggcccatggcgcgttcgtcgcgcgtggactctccgagggggcggtgctgctggggcagaggctgggtgcgagaggagcaggcgggacagcccgaggcacgaggtccgccgggcgcgggggttagcctccgggtagcagcggatcgccgcgcacgcccccttcgccgcagccagctcctccacagcggccactttgggcagtttcctctatgcaaatagaccctgccagaaaaggagcagggacccacccaggggaggagcggccgggctggccccgcgcggcgagggggcgggggcgaggaaggagcgagctcctcggagccacccgtcggcgccgggctgatcccacgcgcagcgcgcacctctgccctcacctagcccgggcgccggcacccgcccccgcacgcacctctgaggcttccccagcccaagcccgcactgtggaccccagaggtcggaggggagcccggcgacaccgcgccccttctgcagcccacccctggctggagcacccaccactcgtgccttagcacattcctctaaacttgtgaattacctttctgacacttgtaaaagttcaaaacttcaaatcctgcaaaaaactgagtgggtctgtcctcggtggtggattagcgccgcttcgtggcggaaagcgacctctgcgcactcacatttagagaggcagggtcgagattgcgccaaacagaaatacgccccttagaatcttctcacgagttcttagctgccggacttcggtgcgggaaacaaaaatggtaagactgtttctggcctggagagggcttttgagaaaactgagactataacgaatgggaaagattcagaaaatgaacttcaagtcttgttcaactgatgacttaattctgtattagacgcacaacttggccaaaaattatgatctagtatgcaccacacttaacctgtactgcgattctgctgcaaatttaaatcacagggctgaggcaagaaggctgtggcgtacagcctgggtccagagaacagaatgagtggcactaacaagtcttggcaggaaagggaagaactgctggaagtcaggctgggttcagattcctaccaggcatattcatgtcctaaatgggtcccaagtaactctttcgctaactcctgtaatacctaaatgaaacaacaaa

SEQ ID NO: 10624 - DNA, 923 bp, Artificial sequence
  DNA replication origin
tgggacaggcggctgtcggtctttaggtctccgagccaggtgtcggagaaacgaccgcgttaggggcctgggcttctggagctgagttgggagttctgcgaggcgctgctcggctggtgcacgccggcagcaccgaaagttgctcgggcgtcgcggttctgccgctgacccttctctgagggccctggccgctcgcgtcgcggctccggaggccgtgggctcgcggtcccctgctgcctggcgagcgcggctgttggttaaccctgtcgggacctcttccagccggcgggcgctaggacctgtcgggagacccttcgagagccgtctctggcattcgtgttgtcggagatcaagtcttcccctggattcctggcctgggccgtttgtagcgtttcgggggttttccagagtcaagcatttgcccctgtcttgagtgcgccaaaggcactggccgggtgcccaggagccgggaggtggggaccgggcgtccgtgcaaatccaggtggttgagggcagtagctgcttgtgagaggtggaaatttgcggaggctagtcctctgtgctatgctgaacacaacattgttgcagcgaacctgcgtttctggtggttttgcatcttattatccctggttgcctaaatagtccagataggcttatccgatccttaggaaaccgccccgcaaactgaactcgccagccactttgtcttgcctcatagctgtcctgtgcgattgtgctttttacacacccctacaggcttgtaacccattaaatgcagtcctcttggagccatccaatcctaaacttataacctgtttcgatgtttttaagccatgtacgtagcgtaaagttgtcaagaactacaggatcttaagggcagtggcgatggatctacatatgagatccattgtgtcattattttt

SEQ ID NO: 10625 - DNA, 784 bp, Artificial sequence
  DNA replication origin
gaaacctccgggtttttgttttgttctgaataggagcacgtgccttgaaaagattagcaccccttgagcttgttttctgagacagcctctttgtccgaatccaccttagactggaagcgccaagtgggcaggacaagcacccagtccagggaacagcccagggaccagccaaggcccgccctaggcggttttggggccgttgtcgggtgccggctgcgggagttgaggtcccgggggagggggcagacacgcggtacacactgagggcgggacacgggcgttccttcccggttccacccgagcccgtagagaacgtaaacaccctcccggcctagaggccccgggaccgggtgggcgggggggggggggtggaaatgcttgggccgcgcagccgcagtgtggaggctcgagccccgctcttacgtcacgtggagccccgcccttaggtggagcggcgggagcgcgcaaggttctgtcacgcaggcgcgttcgcgcggcgtaggtggtgctagaggcgactcgggggattctagggcgacggcgctgccgccattttgtggggtgtttgtcgcagcggccgaggagggaagacggcagtttggcgacatttctcggccgaagggccatttgcttttgcggaggtagggttgcagatggtgtgtgctgggacaggcggctgtcggtctttaggtctccgagccaggtgtcggagaaacgaccgcgttaggggcctgggcttctggagctgagttgggagttctgcgaggcgctgctcggctggtgc

SEQ ID NO: 10626 - DNA, 910 bp, Artificial sequence
  DNA replication origin
acgcccccggtcttcgggttgatgctgcagcagtcgccatgagccctgatacctgcaagggcggcagaggtgcccggtcaccccgaggagaaggggccgtgatgggctgcctggacagacactaggtgcggatccgcagacatcattggggcccagaggcaggcctggcatggggctggggcaggagggagctagactgttcctgccccaaggaacatgccctctagtgagggctgctgccagggcagctctgacacagccggcgaggagacacagctcctgaggcaccagcaaggacccaggaattcacagagggcgggaccaagtgcggccagggcactgggggtcaacaggagcatctggagacacctctgagtggagcgcaggaaagaacgagccacgtcttgggaagcaagagtggccaggggcagctgagggcacaaggtgtgcagaggttggggtcagatattagaatggaatacacaagctcatggccaggaaggaggctactgcaccagtcccagccatgcaggcttgaaccaaagcattagccacatggacagagaaccgattagcaggtaaaacccaggaaacgaggtgggtgggggaagaggaaagagccagaggtgacggcaacacggtatcagcaggctacatgagtggccacgtgtgcagctgttcagagaaagcctgtgcgctggggtggtgctgtgaagctgatcgaccaaagggatcaaaacccagcgttggacgcagcatctaaggagagaggttccttggccacatcctccacccaggcgccaaacagtgaagagaagccacgcatctgagagtcaccaaaggagcagttaactcacgctcagcccttgatcatccacactgaggggaactggctggccatcatcaaaag

SEQ ID NO: 10627 - DNA, 1734 bp, Artificial sequence
  DNA replication origin
aaaggtggtggggtaggttcgctgtctgtggctgcactgcctgcctggggaggcagatttggtgtgctgttgggtctgcactgcctgccgtgggggactggtggtggagtgctatccagctttgcggtgctggcggtgggtggtgggaggggttggctgcgctatctgggcctgcactgcccaaggtggggtgaggggggggttggaggcaggttgtgtgagctattgtgcactgccggcggcggggagggtgggttaggggagctatcagctgctgcactgcccaaggcagagggccggttgggtaagctatcccaggttacaatcccagcaacaatgccagccaacagttgggggctgtttaggggagctgtcaggtgctgcactgctgggggaggggggggaggtgggggggtggttgattgggtgcactatcccgggcgttcactgcctgtgatgggagcaggttgggggcactatctggggctgtgctgcccgggggtgggggaagaggggaaagagcaggttgggggcgctattgggtgctgcaatgcctgtggcagggatgggttgtggacactatcgggtgctacactgccagcgctgccagcggcagaggggtggtttgggggtgctatcagggttacattgccaacagctggctctgggtatgtcatgggtgcagtctgagggctacgctgctggcactaggggccaggttggggcggtattggaggcgctgcactgctgctgccggcagtgggttgtggaggtggccggtacagcagtggcctccgaggaaggggcccttctcttcctagagtcaaggctgtagagggtgaaattctcctgctcgtgttggagcgtggcaggcgcacagagttttcgcagcaattctctgagcacagcagggtccccacacccactgtggttccccagccctcgcccttttgttcgtgttgcggagaccatctgggacccctgggcatggaatagtgggcaccacaggggctcagggccctgtgggtggtggagtcaggagtgagaaccggtacttgggtggggaggactggctgggtcggagtttctgctgttcctactccccaaggagcgccgggcactgtggtgtctccagtccccatcccaggtcaggaggccagcttgggccaggaggagaggttggacttcagagggtgggtgtgagtgccttcgctgaaaccagcccttgccacccagtggccagcatgactaggtgcggctctaacgctgccactttctgcatcctgttttggggttttttggctttgcccacccaggtgctccaagccaggctggaggaggaggtgaaggaggagttacctatggtgagctggagcctggagtttgcagatggcacagctctgtggctcgcctcctgcggttgtggcgacagcaatggagactgcagctcggcaggagtggtaggagggcgcccgtgttggccaggtggtaggagccttgtagggtgggccggtggatggaaggtgacagcactgctggttgcgttggcgtcggtgctaatggtggcagcagcagcaaatctggggcctgggaagggggagtaggagcactttggggcctagcctggcctggcatgggtaggaagctgccggttctgtaccgcagccctcggtgacagacggaggcgtagccagggcaaggaggagtcctctcttttctcctgcagtctctgga

SEQ ID NO: 10628 - DNA, 869 bp, Artificial sequence
  DNA replication origin
tgggcacagagaagctcgctgagcagacacagcctggaatggcctgactccccttcagcactatttatacacagaggttatgcatatgaggttcctggactacatgttctgattggatatgagaaaaaccagaggcctactctgattggactttattatcatgttctgattggatgagagcaagtctcaggacaaccaatcagagtgtgaaaataaagtccaatcagagaaggcccagaggttttctctcatccaatcagaatatgtagtctagaaaccattctcataagcccatgtgcatgctgaggaggcctcccgtcattttaggctgttgtgtatcagttagcagagctactttgtttcccgcttggaggacctggagaaggggagctcagccacgtgctgcacgccggaggctggagccttgcagcaccgcggctcgcctccctgcagttggtggtggtgagggagaatgcagtgtgcggcagagtgtaggagggcggccggagcggtagaaggatggccggcaggaagagctgctcctgaccggctagaggacgagaagcggggaccacttgtgcatgctggaggctggagcgtttgccactgaggcctgcctggctgcggttggtggtggtgatgggagactgaagctcagttacagtggtagaaaggtggtggggtaggttcgctgtctgtggctgcactgcctgcctggggaggcagatttggtgtgctgttgggtctgcactgcctgccgtgggggactggtggtggagtgctatccagctttgcggtgctggcggtgggtggtgggaggggttggctgcgctatctgggcctgcactgcccaaggtggggtgaggggg

SEQ ID NO: 10629 - DNA, 906 bp, Artificial sequence
  DNA replication origin
aaaccgggcccggctgcctctgccctgcgctcggggtcccggcgccccgagtccgcgaggcccacacggcgcgcgcagggtgggcccgggaggaaacgcctggccccgcgttcacggcgggcggcgcgagccagaggcaggggcgtcggcagcggcaccggagcggcccgtgaggggcgagagtccaagtcctggcgcgggggccggtgacagacgcgggggtgcccccccgcgcccacagaggccctcggagccccgcggcctcaggtcgccctggcgccaggcgccgcctcctcccggcacagccagccatgccgctcacctccccaggatcccgcgttcccgggccgcgcctccccgccgcactctgcaagcaggaagctccagcctcgtgacccggctcctccgacgtctgggcgacctcaagcccggcgccgctcaccgggcagcgaaagctccgcagagcgcctgggacctagaggagcaaggcggccgctaaggcctctaggaaatggagtccacgggaggacgctggctttctgggaagtgtagttccacgcgtttgaggcgaggtcgcagctgagctgttaggcgcccagacctatgagagggcccgggtgagctgtagagccccgggttcctggttcttcggaagagaaggggaggttcccggagggcagtaacttgcaactctgtgtgtgaatttcaggatggcgtgggcggcacgaaaacaactactacacaattgggaaaggaaaatcccctgcaaaagatgttgacaaagctggatttccacgtgcaaaagatgagcctgtaccctgaccgtacaccatacataaaaattaactcaaaattgattaaaaacctaaatgtgagaccaaattattttataaattactaaagtaa

SEQ ID NO: 10630 - DNA, 1492 bp, Artificial sequence
  DNA replication origin
gcaatacagaccccccctgggcgttgggggtgccagagtcagcttccgtcccacccacccacacacccacctggccaccgctgcagaggactgtgtaggctggctgaagggtctgcaggggtgaagtctggcctgcaccctccgccaagcctgaggcagggctgagtcgtccaaaacaaagaggtcccgcccacatggagcaccagccaggcaacctcggcccagcatggacctgggccccccatctttctgcttctgccccaactgagggccccgggcccacactatgtagactccttggtgcctcggagcccccagctcaccagcctctcgggagatctgaacgaaggcctcaaccccactttcgccatagttgccctcggaggccagcgtggacacatagttccatcccagtgccctcacgatgtccaccatggcctgcgcctggtaggagtcgggtggcaccacccgggagaagaagtcatagcgtgtggagtcgctgagctccggggctgtggaggcatagctgatctggggtatctgtggggcaggaaggacagctgggctgtggatggaggtcagtaactcaagagagggagggtaaggggggcccaggacacggacggggcacagaaggtgtgtggcatggacctgggacacagatgggagatggaagggttggggtggggacctggggccagctggagcagccacctggaaaggctggaagctgtggtgttttgcgagtgggcctgagaattccgtgaatgctgtgcaggtgggaggtatgcagggctggggagagggcaggaccgccacatatactggtacaagctgtgtcctgaacaaggacccccagcagagggcctgcagcccatccagctgcatctgcctgtcctagtcaggcccagggcaaagcacgttttcttgattcacaccaaggggtggtccgcagggacaggcagccctaggagggattagggcagacaggggagcagcaggggatgttccatttaaagctgtgtctggcctaggatggggattgttggaaactgggtttctctgcatgcattagagtgattaacagcagagaccagaggctgaactgaccggggagtgtggaggcagagacacggggctgagaaggccgccaagagggggctatggggctccagcgcaagaggggctatagcaggagctggtgtgaaggccagagagggggagtttctggaaggagggaggggggctggtccagggttgtttgaagcaggatagaaagtatagagacagcatgaaaaggaagccgggagtggcagggagagagaaagaaagagggaaggtggggctggagagaaacaagaaggagagagggagagagagagagagaaacaactgaggagaccgagagacgagaaaggcccagtggccacagctcagtgaataatgctgtggtcctcccagctctcctggacacttgagtttgggaacaacc

SEQ ID NO: 10631 - DNA, 1451 bp, Artificial sequence
  DNA replication origin
gagaggcgggggaagagagaaaggtggcatgtttcttgcttgctccctctaccagccttgtccaaatccccgcagccaccctaatccagcctgtctaatggagcccaagccggctcaggccctcggacgaggagcctgctaatccctgtggctaggagctcaccacctgtctccaggacgccctttgctctcttggcatcagagagccaaatcctgggcctcggatggggggatgataaaagcatcttttggccaagccccctcaccttggcctccacgatgagatggggagttaggtgcagagagcgttggcacagtgagcaccgcagctcgagtggctgcctcagacccagagcccgaggagactttatacggagccagaacgaccccgcggggttccatcctcccaagcaataggcgggagtgggagctgcgaggaaagccggcccctcccctccctccatccaaggcagtgtgggctgtttgtttcatgccattctgggtgtgaatcctgatgcccacacatgccagctgcatgcacttgggcaactcaactcactcctcgagggctgtttctcgactgcagggtgttgtaagttcgctaatactaaaggcttctccctcctggccccttcctgcccctcgctcttcctcctcttccttaggccctcccagctcaggcagcccctgccccctgcagggttctgcaaggagaaagctggggaataccttaggcaactgcagtcaggagcactggtggccaggacagagacagagagacagaaaaggggtcagggacagagagagataaccgcagggagagacaggaagggacagagacagaaaagatttccaagaagaggacagaggcagaaagccagggacagagactgagaaacagagacctagaggcagaagaagactgagatagagatggacagagattgtgtcagacacagccccagagacagccagacagtctgagtcagacgcaaaccaaagacaagaaaacaggaaaacagacccagagattgggagagggaggggaaggagatgcggggagagccagcaccgccaccccccacactcaggaggggtctccaccctcggagcggtctctcatccctccctagaatccttaaatcctctctcgctcagggcctcggccgcatctgtcacagacttgtcctgaaccgacagcggctggcgcaggtgactggcttggggcgggagcctgggtgtgcgctggggatggaccccgaggaagaggggccaagctgtcgggaagcggcagggctggaggggtggaggcagtggtcgggcgggaccccgggcgacagggttcggcgcttgtaagagcgagacggaggcccgggcaggccggctgagctaactccccagagccgaagtggaaggcgcgccccgagcgccttctccccaggaccccggtg

SEQ ID NO: 10632 - DNA, 1027 bp, Artificial sequence
  DNA replication origin
ctgagccggcttgggctccattagacaggctggattagggtggctgcggggatttggacaaggctggtagagggagcaagcaagaaacatgccacctttctctcttcccccgcctctcccaggccccgatagtttctactgccagaaccacttctcctggtggaagcccagagtcaacaggctgggcctagccctgctcctatccattttaacagtgggaagggtggggagcttggctggtgccaggccctgagcctgacattgcgaaggactgcataaactgggtttgggaggtggatgggcccttccctgttcaggacgagcctgacagctcccagcacacagcagcctcctgcttggcatgaccaaggcagccactgcccctgtctggaggacagaccatcaggaagcgggggcagcagctgggggactggcagggggtcctcgccgtgtaggagggaggcatgcacacctgtgagcagggggctggaggagaaggggaggggggtggcaggattttagacctgatggagatttggctcttggaggggtggaggatggcatagctgctggggcattccctgagaatatgaggaccagagacacagctgagcaggtcaaggagggcagaagccaagagttcgggtttgggcaggaaagtggaggcttcgtggttcatgagcctggaactgagggaagaggccagggcgggagagaaagctgaggtgggatcgccacggaggcgtttaaagccgtgggacgcaggagttccctggggctgagagtgtggacagacagtgaggctggagccccaggaaccccaacatgcaggtctgagcagaagtaaggagactgggagggggtggccgaggagttagaggagaagcaggagcgtaggcaccagaggggcccagaaacaaggattgaggaaggagggaacattcagcataatttattcagccccgtgcaggggcagaaggccaaagtgcacctcgcacaggccatagggccctcttacagcatcctg

SEQ ID NO: 10633 - DNA, 1964 bp, Artificial sequence
  DNA replication origin
ctccagcctgggccacacagcgagatcctgtctcgaaaccaacaacaaaagaaacaaaacaaaacaaaacaaaaacacagacctttgttgggaatgtgcaggctttgagcaatccaggtctgctgagtcagccttttcctgtgcacctggtgaggcctggagaattttccttgggcaaggctgggcgtgactgctccttctggcacctccctggtcagtgtggtggagcagtggtggtgctgggggctggaggagccagtgagggcactagtggtggaccctcatgcccaggattgtggggagcctactggcgcctcctaggctgggtcagagctttcccagtgccccacctcaacccctgcccagggcacagcaggttctcctgggccttggacctcctccagccagagaagtgaggctgtcactgagagtccagcagcgccaggcctatgccagtctgtatatgggcactgtctcacagcagctcagagagacaggcatgtgggtcccttctttagagccccaggagattggggctgcccccgagggtggggcaaggcaacctgaaaccccactctccccactgtcccacacctcctcctgagcgcatgggtcatgtgcctggggactgtgggctcctccagctctgccagtgcgggccctgtgtgggaggtgaaccctgcctggcgactctccccctgcagtgctcagtaacctgtggcaacggcacccaggagcggccagtgctctgccgcaccgcggacgacagcttcggcatctgccaggaggagcgtcctgagacagcgaggacctgcaggcttggcccctgtccccgtaagccacctgcagcccctgcccctgctcccagcatgcagcagcccagggcgggggtgtcagaggcttggttcaggcaaatctggctcttcccggagagtagctggactcaacatctgtgagcatggagaagcggggcactgcaggccaggtctgggacctttgcctggcaggaaatggagggagctgtgtggagctgactcgcccctccctgctttcagggcactgcagactcacggtgacagcaggactcggccagctagggaatgctggtggctatggtgtagggggtgcctgtgtgaatagggggacgcctgtgcgagtagagagtgtgctctgtgacctttgaggagaaccagaatacctaccacgcacagatgcctgtccaaacgctatacatgtgtcacctctaaggtctccacacagttcaagactggaccgtgcctgccacagttcccttctatagaggagggagctctggggggtctaggcacctgcccccagctggggagggtgtatccaggatctctcattcccctggcactctctgtccaagctttctgggagctcagagctcgagtcagcaggtggaacccggggcgcgggcagggtgcaggggcagaggagccggcccagaaaaggaggcggcagggcctgcatgccagggcagcgagagggacgggatagctgagacccagctgagaccccggctgctgtcaggaggggcaggaggtgggcgtggacttggcagcggaggaccctttgtccgcccggggaggcgagggccttgaatgacgcttccccaggaccccgggagacccggagcctctctgcctggggtgggggccccagcctggtgccctgcggccgcagcccctctctcctccctctaggaaacatctcagatccctccaagaagagctacgtagttcagtggctgtcccgcccggaccccgactcgcccatccggaagatctcgtcaagtaaccgacccgtttataactctgcctctgccctccagtgcatgccctgcgccctgtggagcttgccttgggcccccctcctctctgtctatggaaagctcccctgactctgcgggcgcgctctggggtgaccgttttctcccgggc

SEQ ID NO: 10634 - DNA, 1627 bp, Artificial sequence
  DNA replication origin
cccccaggtcctggccacgccggccttaagggcttttcctggatacacaccatgtcccaccttggggcctctgcgcaggcttctcctcgcctgagcccctccaccgccctgccaccacgtcagcctccccagcctctgcttcctgggatgcctccaggcacccagaggaggtcaggctttatctccatgctttctttggtcttacccagcaggccagggtttcgaagcctgggcatcactgacattttgggctctgtcactcgccgccatgggggctgtcctgtgcacggtggggtgtcaagcagcatccttggcctttgctcaccagatgccagtagcaccccttcccccagttgtgacaaccaaacatgtcccagacgtggccaaatgtcccctgctggagaaaatcacccgggttgagcacggctgctctgggcctgtgggaggaagcatgcgggctgcgggcccagtgcttgcccggctcctggcttgcaccaggcctgctgggcatgtgaggtcaaggtagaagcggtgcctagcagtagcaaggaaatagggcctccactctgacccaggagcccagtgagggagaggcagcctaggggagaaaatggcctctcctgccctctcgcccctccacccgggacacaccaaggcctccccccagccagccgcaggctcggtgccctgcccacccttattgtcatcacaagggtgagcaggaaaacgaggccagcactgctggtgcagcccacccctccttgcaccctcgggcagggcatgctgccccaccgacccccgtcgagctctctgccttcagggtcccagttcaccaagtatggctgccgccggaggctggaccacaagatggtacaccgtggcttctgtgccgccctctcgaagcccaaagccatccgcagagcgtgcaacccacaggaatgctcccagccagtgtgagtgcccccagctcgggctcccactagaggagacaggccaggggccaccaggggctcccgtgcttggaggtgtggggcctgggcctggcatcatccgaggcatttgaccaagtctctctcaccacatttcatggaatctaagatgctgcagggcagaaggcgcaccccagcttcaaacccgccaaactgaacagcatcttagagatgacaagaaacagggatgcccagatggggaaatgggggttcagaggcgcagggctcgcctcctggccctgtaccacggggtagatgtttcttaagcagtggctttgacgttcaggccctggggctgggcccagctgcgtttctgggtccagggacctcagtggggaagacagttgggaaatgggcaggtgggggccacataggacagcgtgctgagggaatccacactgctcttgagctctgccgagaaggatttgtgacgtcagcagaaggtgaggccaggtagcagggcccagaccctaaggaggctgggaaacctcttcaggctagggacctccagagccaccagctccaccagggcctcccagtggtgacatgcatgggactcatggtcagtaggacctggggcagctgagcctcagtttcccctctgtgcaagcctggacagccagcatcttagtgagaat

SEQ ID NO: 10635 - DNA, 945 bp, Artificial sequence
  DNA replication origin
aaaagatgaggccaggcaaggtggttcacgcctgtaatcccaatgctttgggaggccaaggcaggaggatcgcttgaggccaggtgttcgagactgggggcaacatagtatgaccctgactctactagcaggacgtctcaagtgctcactgcctcctcccccaacagaaggtgggctgtgacggtgtgatcggctccagcaagcaggaagacaagtgtggcgtgtgcggaggggacaacagccactgcaaagtggtcaagggcacgttcacacggtcacccaagaagcatggtgagtgggtccctgctctccaccctggagcctggatgcctgcagcaggctcatgcccggacagctgagggcctgactcatcctggggctgtccgggcttatgactgttctggggagggggagaggtctgtgacactgagggggagggagaatcctaagtcggggacagccccagctgggtgccagggtgggtggggaagaggagagtgggggccggggtcacaggggttagagtggagaatgccagtatatgaggatgcccgggttgggccttaaagactagcctggaggcagcagctttcctggtggcccctctcaggtgggtcctcaaagccagagaaataccagggtcctgggagagcctccggaggagctgccttcaagagcgaggcccctccttgcatggtgcgaatttgagcggcgccttcccttctcagttttctgtgtctttccacatcaaaaaaaggttacatcaagatgtttgagatccctgcaggagccagacacctgctcattcaggaggtagacgccaccagccaccatctgggtgagtctcagagccggacaacttgacgtcctcaggacctggctcctctgggatcaatgggcagagtgccaggggtcaggggtcaggggcccgggttgtgcagccat

SEQ ID NO: 10636 - DNA, 976 bp, Artificial sequence
  DNA replication origin
gaaacagccgcatcggcaggaaggcacctctaggggagtgggcgcagggacagcggctgggggctggagccgggagctggagctggagtcgggagctgggggctggagccgggagctgggagctggagccgggagctgggggctggagccgggagctgggggctggagccgggagctggacccgggagctgggagctggagccgggagctgggggctggagctggagccgggagctggggactggagccgggagctgggggctagaggcccggagctgggggctggagccgggagctggagctggagtcgggagctgggggctggagccgggagctgggggctggagccgggagctggggtctggagccgggagctggacccgggagctgggagctggagccgggagctgggggctggagccgggagctgggggctggagccgggagctgggggctggagccgggagctgggggatggagccgggagctggagctggagccgggagctggagctggagctggagccgggagggtgctcgagggctgctctgcatttgctcctgtgacttcggcagggccgggaggctgggctatacagctggctcagagatggcgacaccaaatacgccaaaacaagaacaggtggtgtctgctctgtacccttgggattttaatttatggaggtgacccagtgaggacgtggggaggccaatgtcactgagagggctcctgaggaaggcagggcagtggaagggggacagctcaggaatggccagtttgaatcattccagtgggctctggagtttagggtggtccccagtagcctggtacccaaccctgggatgagttagggtgcaagaatcttggtttggtatgtgagtcctggataaaggaggtgcttggggtatagactgaagactggctggcttgcatgtgaaaggtgtgtccccaacccagtgctttgctgtcccttaga

SEQ ID NO: 10637 - DNA, 1683 bp, Artificial sequence
  DNA replication origin
caagcgattctcctgcctcagcctcccaagtatctgggattacaggcgctcaccaccacacccagctaatttttgtatttttagtagagacgggtttcaccatgttggccaggctggtctggaactcctgacctcaagtgatccacctgcctctgcctcccaaagcgctgggattacaggtgtgagccatcttgcctggcctgaaaagggttctttagatagcaacccagcaaacagacatttgcagcctcggaggtctccaagcggggcctcggggatgtgagagccgggctgcaccaacagcctggctggcttggttgggaaaagctcttccaaagtccacaaccaccagggtcaaaggcttaggagacacagagacaggaagggggctgctgtcacccacccctttccctctctgtctgccctggagggtgggccacgtggggacccttgtggaaatttctcctgcttggtgcctcctttgcacacacatggggaagccatcagggctccttgcagacccccagctgcttcccttccagccaaggagagatgccacctgtactgcgagtccagggagaccggggaggtggtgtccatgaagcgcatggtgcatgacgggacgcgctgctcctacaaggacgccttcagcctctgtgtgcgcggggactgcagggtgagtacacagaggccggcacggggggctaccgtgtcaagtctcagcttcctgggtactgacctcccccttttcggggtattggcaagatgcatgaggtgaagcatacgaagtgtcagaaacaatgcccggaccagggcaggctcttggcaaatgtctgtttacccctcccctgtgctgggagcctgagacttgagtatgcctaggactcacctggagagtttggactccacctcagacgtcctgattccacaggtcacggtggtggcggcctgggagcatgaatttttaggagcatcccaggtgatttccaatgcacgtgacctacaggggacccttgtgaagcaggccccatccttgcaccctgcagggcactgggcagcttcttgctggatctgggtggccactgtgagggtcactggtttggtgctttgtagaaatgccctcctctgttttcttttattatgatgcctttggcttcaatctttggctgtcaggaaaaacaatctcgtgtcacctcgccatgtgacggtgacatgaacatagacttgtccctgccaggctcccccgaaaacaaccggaagtctctgcttagggcttgtgtagacaggactgatggcaggagtcgtggaggctgactctggcttgaccttcctgagaaacagccgcatcggcaggaaggcacctctaggggagtgggcgcagggacagcggctgggggctggagccgggagctggagctggagtcgggagctgggggctggagccgggagctgggagctggagccgggagctgggggctggagccgggagctgggggctggagccgggagctggacccgggagctgggagctggagccgggagctgggggctggagctggagccgggagctggggactggagccgggagctgggggctagaggcccggagctgggggctggagccgggagctggagctggagtcgggagctgggggctggagccgggagctgggggctggagcc

SEQ ID NO: 10638 - DNA, 1125 bp, Artificial sequence
  DNA replication origin
cacggccgctgggttttctccctgtggagaaggcgggctgcgtttctgcaacgtcttcgcttcactgggaacagcaccaacccacacactgcctcttgaggttctaaatgcccagcaatctctttccgagtctggcgtaaaagccccaggggtgcttgaggaggggccacggggctccctgtctgcttctggccgggagggcagcctggagcctggggcaggaggacagcaggggtaggagagggatccatgcacgagcgtgttcacacgtgctgctgagggaggctgtcccactgcgggatccctccgcggagccgtgactgcgggtcctctctggctccgcagggtccagctcgggcctggccagagcaaggagagcagcccgagtgaacaggacccaggagcggccgcagaggccggagcgcagcagccgggacgcacccggagccctgcccgccagctggtaactgggcccggctgtgcatctgtgatgcccaatttggaggctggaaatctgttttgtttgtttttctaatgtgaaattacagattgtcaatattttcaggcaaatcaaaatctttaaaataccagacaggccaaaaaggaaagaccgaagctctgtgtgtctaagcagctgcagggcctgcggcgtaagagcccgctgcgcaggtgggagacgggggtaacgctgatgtttgtggagggttctccctccatgccagcccccccgggacactccctgggtgaggccagggtgagcgttcaggcaggaggagacaggcagtggaggagggagaggagggtgtggatgagaaagtggctgcgggctgaggagggagcacgggcccgggagatatttacggggtgtgtgggggtgaggtgggaggaatgagaaggggcaggaggacagcacagggcatggggcctgcgtggcgggtggggctgaggtatagctgagcatggggatgcagctggcatgggccggctctacaggttgtccctcccctgggcagccagacactgatgacaaatcccgaccctgccctcacctggctgcaaacagctgcccaggtgctagcatcgggggggctgagagaccacccccgcttacccccatttccccag

SEQ ID NO: 10639 - DNA, 1740 bp, Artificial sequence
  DNA replication origin
tcaggtcctctaagcttgtgtgcgggggaggagagagggcacacctgtgagagaagcctggtgtctggaggagaacccattgtcaggggtctgtccttgaatggcaagtgggcacggcggctaccctggggtccgctcaagccaggtcctggtgtcttacaccaaggacaagagatgcagcagggaaactgaggcagcacagccaggggccgggatgtgcaggtagggctgccatggcagctccagcaggggcctcagctgcctccagggctgtggatggtcagccgcgctgaaggctgctcgcggcaccgtgtgtcccccacagctcctatgactgcctgctggatgaccccttcgcccacgactggccggcgctgccccagctcccgggactgcactactccatgaacgagcaatgccgctttgacttcggcctgggctacatgatgtgcacggcggtgagtgtgcagccctgcagccgggaccctcccaggtctggggggaggcgtgctggtgtaggggcagctcccgggacagtgtgaggaccggcccagtgtggggagggcagagcggccctccagagtggcagcctgtccctctgcacccaccactccccaccccctaggcaccctgagcccacctggcaggcccagacgtggtcctaggcaggaagcacacgggggacaggactgtgaccagggtgtcagccaggggcagtgagagcctgcagaggtcaggagggctcccaaggaagaagggaggcctgcaggctaagcggaaggagagggcattcaggaagggagggccacggacgcagaggccacggacgcagaggcctggaggagagcgcggcaggcacaggagcactcgctgctctccagggccaagtgccagggctgagccgtcagaggaaccggccatcggcatggaggccacactgtgggagcttcagtgtctatgagcgtcttaatgctcgcctctgctgcatgaaggaaagaagcaaagtagtcccattttacagatgaggaaacagagacccggagaggctaggtaacctgcctgagcccacaaagcgagcaagtggtagagtcgagtaccaacgcaggagggccacctccttccaagactccctaaggagcacagtggactcgattctcatggcgatgggggctctggaaaggcttgagtaggggaggctcagggccacgtctgagtttcagctgatccctcagggacgtcctgcaggaagtgctatcaggacaggaagcagaaaggccagggaacaggactgtgaagtccaggggaggccgaggctgcagagagggcaggcctgtgggggtgggggtagggcttcgccagggtttaggagggaaatccacggcaaagggtcagcaggtgcccacctagcctcaggctggcacttagggcccagctgcccgccaggctccctgaggtgtgcagcctccaaagactggaggcagagaggcccagccgcgtccagggatgctgcagcctccacaccgtatgggcaaggtcttcaccaccccagaatcacaacacccaccagcctcacgggcccatcatgggccagtcccactggggcatctcaggttccagaacccgggggtgggtggcatccctgggaggtccctgaggtgggagggacctggcaagctatggtgctgtcttccagttccggacctttgacccctgcaagcagctgtggtgcagccatcctga

SEQ ID NO: 10640 - DNA, 1187 bp, Artificial sequence
  DNA replication origin
cgatgcttctatttttaggcgcgtacaccgccagctcacccggggtcccagtggccctccttcccttctctgtggaacgcgtggcctcagggtctctcagtggggcatggcaggagtgagggcaggttggggttctgaaagtcagggctccatgcttggcaggcctctaggaagactcccaggggtacaagcagagacctcgtgtggcacccatagccctgtaggcacttccctatctttccaagccgcctccctctgctgagacaggagctggggaagtgaataggtctcattatccatcttcctcagtttgacgtggggtctctgcgtcatgaacttctgccaccctccccctggccctgggctgtcgtaggccactggcctcatcttctacggcggctctgacctcccagtccgcaccagccagccccctgctgggatattctgcagggtagtgtggcccatcggctgaacagctttgcagccttctgcggcattatggaaacaggtctagctagggtctcaaggaccccagagaaacacggggagacccaagaaacgccccccagaggaggtgggcttggagggtgtgataccaggcagacgaggggcaggatgcctctagcagagagaggtgtggaagcaggtgctgctcaggggccactcagtgaggcaggcagggggcagaggcaggtggcgtgaaagagaacggcaggcaggaaagtcaggtgtcagacaagccatagcaggtgacatctgactaagcagagggccccagctgcagtgtggctgttacaggcagaacggccacggggcttgtgtggtgacgggctgggggcctgctgtcagccagatgtcacaggctatgagctgtctgctgtggtgtcttctgagctgtgccagccgggggcagttgcctgtggtagagagggcattggggccttgaggagaagcagcgcctgggagttaggccaggcctcaccttcccggccaggctatggcagcatctggagccgcctcttgtctcctcccaggctatgctcctgtcaccggcatgtgccatccggtccgcagctgcaccctgaaccatgaggacggcttctcctcagcgtttgtggtggcccatgagactggccacgtgtaagtggcctggggaagggtggggcacagaggggccaccctaggat

SEQ ID NO: 10641 - DNA, 1749 bp, Artificial sequence
  DNA replication origin
ttgttcttgcctcgctttgttctcggcccagtccaagaaggcagcctgccactttcgttctccaaccccaaggaggttgtgctgcagggtccagagctaaaggggtctatgacccccttctggctttggggttctgaggagactccctgaggagggggcagaggggagggctggggtgcatgggcacagggaggggaagctgcactggggccaggggagccctgggaggcaggacttcaggagacatgagagtgtgctagaccctgggagcctgggtcccagcagggggtaccccaagaagtagaggagagggttacctcagtgtccgggcaccccaggactcaacctgccactgggagcttaactgacaagccacagagctgcttgtgcttcctctctctctctgccaacgtcccaacatctccaaggtcccagcctatctctgacgggcacagaggagcccaggggcagagatcttgtccttgctgggtctggagcattcaagggctatggggtacccatgaggcccagacattgaccttgtgcccagaggccagggcaaggtctgtgtgcattcttaaaacagccctttgggtcagtgaggaaggagtggggatagaaggggacagtgtggcactgagatgcatgcaggtgtggctggtgccacgtcaggagggtcaggacctggtggcaggagctgagaggcatcagggctgcagggcgggagcaatgaggcagagacggcaccagtgtctggctttggggattggtagcaaggcagaagaggcggcgcgggaaggggacggcaagtgccagaggaagagcgtggggtccgcagtgcaggaaacatggtcacggcaatgtctttcctggccagcttgctcgttgggaagagctgggctgttttgctttgggagctctcccacttctgggggtgcagcccttgtgggtgatcagtcccaagccgtagctgggacccatgttaggcccatggagcacaggttcgaaaggactgaaaactggctgaagtgggtttgcctggtggcagcacccaaaacaaccatccgcaaactcaggctcatgcaccccagagccccctttcctccacccactcctcccactccatgagagctacaggcagccttgggttctgcatgcctctaaggactcctcacagaaagaaactgatgtccaggcagagacatcggggcagctggacaggtctgcggcccaggagggaagtctgggctggccgtggacagggcaaggccctcgctactggaggcagtcggaacccaagggaagagccaagctcaggtctctccgctgagacctccagccaaggatactgtcctgacatgcagtgaactcccctgtgggtcacttgggctccagcgggaccacctgctgggatgcgacctcctttgctcctctgccacctggcctgcatgcaggaggccagatgggtccctgctgcctggggcaccccagcccccaccatcctgtgcccttgctatgtatcaagcctgggaactgtgcttcccctgagcgagaagaagacacatttctcatatatggatctcctccagaagtgagggaggctgcactgcttgtttccactgaggagtctttcaccagctcgccctggtcatctacgtccctcccagtcctgaatgcacctgacttccagctgcctgctcggctctgcacggctcctctaggaaagtctgtctgtgtgactccacctgt

SEQ ID NO: 10642 - DNA, 1513 bp, Artificial sequence
  DNA replication origin
tgaagtggaagcgaggtgtcgtgtgccaagcctgagcctagcggggcgctccttgcggacggtgacttcctgctggggtcagcatctgccggggcggccctttgggctcacttccccaggcctcccgagaacgtccccgcagccggcgcctccctccctgcccagcctggctcctgagggtgctcgtgttcattccttcatcactgagcgcccagcagccggggtcctctggccgcgttcgctgcctcatcctggcatggagagcagaagccgggattgctccgtgaagggaggagtggggctactgagggcaggcgtgggccagggctggggcacagactcgggcccagcaaccacccggccctcaaggagcttaggctttagtgactcagaggccagcgacagcaacaggcacatccccagtaggtgccccatctggcaggtgaccgatcgcacgcaggaggagggacccggcgggcagctcagagccagggtcccgcggccaggatggggctgggacttggagctggacgcagcctactcgtccacccaaggcccacgggccccctaagctcctggctgttccctgaggcccgtggggttacccagacccctgcaggctgggcctgaggttcaggggcccgcagtgtttcctcacccttgccctggccaagcctcctgacagccctggggagcattcagcaaagtgaccttctgacccaaggtgagggccatcaagctcttgcctccctaaggccctcagatctgccctctccacctcatggtgggatccctgggtctttcaggcatgtcctcagaccctttccagcccgggccaggggagccaaacaggctgaacccggaggaaacaccatccttcttgggaccaggctcccggtgctgctgtgggagggccccaggggcctggacgagtgtctgcctcctgcatctgggcagctctgtgaaccagcatagcaaggagggtctccatgtggacataggtgggcactcatgatggccaaggaggaccctgcactctggaagagccagcctggtccagggccccagagcactcgggcagtggagcccagttgggagcccatgtctgcagtggtcgatgtcacctccaaacaggggtggcagagccctccatgaggggtgacgactgtcctggggcccctgtagaggatccgatcagcctcttggaagctcatctgttcccgtgctctgagctagggtcagcccactcaggactcctcctgcatcctgggctggatgggcccctggacttcatccacagccctactgcaggcttctcccgcctggctcttctggggccctaggctggacctgggagttctgggagctgctgccgctgtgaagagtctgccctcagaggccctgcctcactcaggaggtggaccctgcagctaccatgcagccccagggcctcgaaatgtccatccccggtcatacagcaccatctaccgccccctgctctggaggctgggtg

SEQ ID NO: 10643 - DNA, 1759 bp, Artificial sequence
  DNA replication origin
cccacagccggaaagaggtcggggtgctgccccccgcgcggggcgggcagaggaagggccgggcccgagcggccaccaggtggcgctgctgccgcgagaacagcggcccgggccggggacgcacccggcgcccagactccgcggccgcacccgggctcccggggccccagcggccccaagacagcctctgggcctcaccctaaatacatcaattatgacctgagcaaaaagttctgttccaatcgttgctctccgacatttccattgtttgctctggaaggagctgaattatctatgctcttccctccttcagtcaaggagacgtgggaggaaaccgggatggggatcagcagcctggaggccgcctccgctggaaccgcgcccgccccgccaggaggctctgcctgctgggcaaggcgcactcagccagccccgcaggccgccacgcgaccgaggctcaccaagtccactgcaggtggcaggtgaggtcacctgggcagctctaggcccggccgaaatatctcatctgctctgttcttgggcaagttaccttacttgtccccacctgcaaaatgggcacaactgcagctccgagcttggagctggggggcttccgcccatgacagttcaggcagggtgcagtcagcgcccacaaatgtcccttgtccttgtctctgccgtgctgttgatactgatggagtataacaccagtccctggggactggcctacccgctggggctggctcatgcccccaaggggatgcggcttcagcaaagcttctcaaccgtccccatcccagaggggccctcctgcctcagaccagcctcctaaacaggtgcaggataggacagcagggaggttgggttctggtgagcagaccacatttctcaacctcagcactccagatatttggggccagataattcctgttgggtgaggcgggcaccctgttcatggcaggatgttgagcacacccctgggcactccttgccagaacccagtggaaccctccccctagtcgtgacaaccaaaagtctctccagacactgccaaatgtcccccgggtggggggaggggtggcaaagtcactcttggttgggagcaactgaccctcaggggaccaggacaaggagcctgaagctggtgctcctgaccagccgggatcacagagtccagcccctcctcccagagcagagtggctccaccagcgtgtggccccgggcaggccgctcgccccctggagccagggtcctcactgtcaaatggggatgatcacagcgcctactccacagggttgctgtgggggtgagggcataaagtcacataaagggcttcagacggtgcctgtcccagaagaagctctacaaacagtcacttgcacgaacgcctttatgattgtcgtcattcctgttgtgtgctggggtttcacagacctcctcttatgggggaaactaaggccccatgatgttaaattgctcaccaaaggtcccacgagtatggacaaagccagaatgaatggcagggacaaggtcccaccatccctgctctgtgagcacatgttctaccgtgccccccagctgagtgcaaagtgggctcccccaaggctggaggtctcttgttccaggcagggcttacagatcaaatctcatcacgacagagaaccacgagagctggggcaggaggcgtgcacctcatttctctgccagaactcccatatcgttccagcattttgtttccagccatcttccccaaagcctg

SEQ ID NO: 10644 - DNA, 1027 bp, Artificial sequence
  DNA replication origin
caggaactgcggtctcatgccttggggtaggaagggtttaagcaaggaggtcactgcctctttcctttgagatatattttttaggatgagtcttttttttcaaatgctcctgagatatctaaagaattgaggggctgcacagggagagtgaggattccaggcctgaaccaaagcacaggcagcaggagagggcagccggctctggggaaggctggctgggctgtcaggagcaagggtgccatgtggggaggtatctgaagtgacgcatggagaagccagccagggccagcgtggagagggctccgaatgccaggcgaggggctgggccctgcttccgaaggcactggagagccgttgagggttttagacagtggaaggggaaggtgagatctattccgcttggtgatcgtagtgaagaatggtgtgtgtgggtgggggggtggggaggacacgagggggaccgttggggagccctaccgcctgtctcctgtctggcagagaaagtgggtggggccgggggaggagggggatgtgcaggaggcaggcatgtggaggtcgccttctgtcttcagttgctctttttgccacatcagtcgactctctgctctgcagaaatgttgccgctgtgtccttactgaggacgccagtgttttgtcgggaattacactgattactcccagtggttcccatgcccaggtgggccctgcaggcctctggccagggctgggcaggaaattttggcaattttgcagcctcctgaaaagcaggtagagccctgggatggtagagggggcaggacggggctcactcctcaggcccacggaggacaaggacactgtggagcacccctgcctctcacatgccccacaaaccctgcctgccccccatgtctgttcctgatgtatcatattaacctacggggactgagaggctggacagcagaaggagcccggccccggactgtgggttggactttgccatagcacacgcaggggcaggagaaccacccaggccagtggtcagtggt

SEQ ID NO: 10645 - DNA, 1774 bp, Artificial sequence
  DNA replication origin
tatgaactgagcctagtaattctgatcctggccatttccgtttcatggtagtttgatattttgagcaagagtcacgtttcttctagcattccctctgaagcatctgctgaggagccgagggtgaagaagatctgcaatgggaacgttgattctcatgataagcccaggctctggcagccccgtttaggcaccatgcaatgcctaaactcttcctccacggaggccagcagacctctgtcccctgctcctggctgcactctcttctctgcctccatcctggtggtccaagcctggcctccgaaggggcacagagagaacagccttctcctcacttatttcagggggtcccagagaagccacagagcagcaggcccccctcccccaggcctctgacagacttttcaggcctggcttgctcctggacatggttttgccaggtgggccacaggctgcctctggtggcccaaagctcagctgagcgaaggacatgggaactttcctgaaggttggggtggctgctgttccagggcccctgcctgtctcctctgtggctggcaggccagtaggcctccccagtagggagcctgcaccggttcccccctttctgcacccctcccccaccttggcagaggacaaagtcacctctgcccagcagccgcaggccacctcccagggctcaccatcccctgggtggaactctgccaccagtgaggcaaactttacattgccatgcagagccgctccttcctcattgtctattccagaacagaaacttggctgcatctttgcataagcaaaaggcgcattacaatgtgtttccccaaacaagagagcccttggcctctctccgcacagagatggctgcggctttgaacatttccccccaaggtttaaagattccaggatcaatttctcagacagtactcaaggacattgtccctgggcttcccctccccctgcaacctgggaaaggagagctgcttctccccagcacacgcaggccttgggtagggtggatgcggaggaggcccccagggctgctggggggaggggaggggaggcccttagctgggggcctccccatgagaggggtcacaggcctacgctgggtcatacattttgcccatttcctgttattccatatcttcaaagtgattcactccattcattcagcaaatgtttactgagcacctactatgggctagacactgctgggagcagttgcacggcaagtccaaagttcctgaggtggagacaggctgcctgtgcaaggagcagccgggctagccgctggagcacagggagcagggccagggcagcccgagaagactcagcagggccagaccctcctggcctggaggtcacgccaggaactgcggtctcatgccttggggtaggaagggtttaagcaaggaggtcactgcctctttcctttgagatatattttttaggatgagtcttttttttcaaatgctcctgagatatctaaagaattgaggggctgcacagggagagtgaggattccaggcctgaaccaaagcacaggcagcaggagagggcagccggctctggggaaggctggctgggctgtcaggagcaagggtgccatgtggggaggtatctgaagtgacgcatggagaagccagccagggccagcgtggagagggctccgaatgccaggcgaggggctgggccctgcttccgaaggcactggagagccgttgagggttttagacagtggaaggggaaggtgagatctattccgcttggtgat

SEQ ID NO: 10646 - DNA, 1419 bp, Artificial sequence
  DNA replication origin
aatcaataaacagggagaggatggaatgaggggaggcagcagttctgtccagggaattccatcaggggaacgggtgggtcacagtagccacgggctcatccacagtgccacagtgcacagggcacgtgggcaagggctgcaactgccagcatcctaggcacaccccgagtctccaggcaggggtgtgtgcacagcccttcacagtggcagctccatacccccagcagccatccaatcccctcgccaaggtggaggcgtgtcaccatcagcatatcgtcctatttcagcatcagggaaacaaaccaaggagcaggaaaattacatgactcggacaagccacaccaccagagaggaggagtgggcacgcgcccaggcctctgagtccaacgttgtccacatgcccggagcccttctgtacttcaccagcactgaggggtgatttgcgggaatgagaattgtagaaacaagtatgattagactagagaagagaaaacctgggactgagtctgcaacctcgggagcatcgtgggatggtgcgggctctgagggtgggtacagtgggcaggtgtgggatctgtgggcaggtgcagtgggcaggcacgggctctgtgggcaggtgtgggctctgaaggcaggtgcagtgagcaggcgtgggccctgaaggcaggtgcagtgagcaggtgtgggccctgagggtgggttcagtgggcacgtgtgggccctgagggcgggtgcagtgggcaggcatgggctctgtgggcaggtgtgggctctgaaggcaggtgcagtgggcaggcgtgggccctgagggtgggttcagtgggcacgtgtgggccctgagggcgggtgcagtgggcaggcacgggctttgtgggcaggtgtgggctccgaaggcaggtgcagtgagcaggcgtgggtcctgagggcaggtgcagtgggcaggcgtgggccctgagggtgggttcagtgggcaggtgtgggccctgagggcgggtgcagtgggcaggtgtgggccctgagggcgggtgcagtgggcaggtgtgggccctgagggcgggtgcagtgggcaggtgtgggccctgagggcgggtgcagtgggcaggtgtgggcctgagggcgggtgcagtgggcaggtgtgggctgagggcaagtgcagtgggcaggtgtgggctctgaggtcaggcaggggctttgcagtgctaagggtggctgggtgttcgctgtcccctgtgcgaagctcagtcctatgccttttctgggctggcctcttcacctgcgatgccctttttgctgctgccgctgtgctggccaaatttaggccccctgaaagacccagaaggaagggagcccgctgcctcccatgggactcagagctcttgaaagacaggagcatgttctgcccccatctgcctcctgcac

SEQ ID NO: 10647 - DNA, 1061 bp, Artificial sequence
  DNA replication origin
cgaagccatgttcttggagagactttggggaggctgtgcactctggaaacagccaagctgttctgtggcttggaagaaacaagcagttccatccactctgggctcacagatattcctcctgagcttgaaggaagccacagcggaacttggagctgctctagttctctggaacatgcagcaggtggaaccgcagacgtctctccagggagctgagtcccggttttcacctgctgggtgtccacggattcacccccagctactgtgtaggggccagctcccctcagggactgctcctgggagaccgtgggagtcaccgcagctccctgctctgtggagcggccacgctagcagaaggaacagagggtgccagtgctctgagtatgccggagggcagtgagtgctgcgggaaggggctggagggcacagggtctgcgagtgccagggcaggtggtgcggggggagctgtctacaaagccttagagcgccagggtaggtcccactggaagggaacatgcaagcaaagactcgaatgaggtgggagggtgagctgagggtgtctagaaagggcatccaggcggaaggaggaccccatgtggggttttgaaaagaagggcaaggaggcccaggatggcaggaatcaagtgagtgagaaggaaaatggaggccacggggtcccagggcgaggcgctgggtcgtgtggggtctggtaggtggcccgggtgctgggtgctgacttctgagctgaacgaagcaggagccactgtgggatttccagcagaagacagacatgatccagcagaaggcatcaaaggatccctgaccacggaccgccccaggacccttccaccatagtgcaggattcctcttacaggaaatgccccagtaggcagatctagagaggcaggaagtggatgaatggttgcctggaaggtggtgggggaggaaggacgacagctaaggggtgtggggtctttggggagggagaagatgttgtgaatataataaaaaccattgaatcgtacactttaaatgggtgacctgtatagtatgtgaattatatc

SEQ ID NO: 10648 - DNA, 1366 bp, Artificial sequence
  DNA replication origin
gcgaggcgctgggtcgtgtggggtctggtaggtggcccgggtgctgggtgctgacttctgagctgaacgaagcaggagccactgtgggatttccagcagaagacagacatgatccagcagaaggcatcaaaggatccctgaccacggaccgccccaggacccttccaccatagtgcaggattcctcttacaggaaatgccccagtaggcagatctagagaggcaggaagtggatgaatggttgcctggaaggtggtgggggaggaaggacgacagctaaggggtgtggggtctttggggagggagaagatgttgtgaatataataaaaaccattgaatcgtacactttaaatgggtgacctgtatagtatgtgaattatatctcaataaagctgttagagaaaagaatccctgctgctgtgttgaggacacatgggggtggggaggcagggaggtctgctgggggctcccaaagtcatcagaagaggacaaaggcttgacgcaagtgacaaccgtggagatggtgagaagtgatcagggtcggggtggattttgaaagaaaacctaaaaagatttctcaacaggtttctcatcagtgtgagaggaagagaggggtcaaccctaactgcagagctttggctgtgcaaatggaaggaaggatcagccgtgcacagagctggggaaggccgagggtggagtgcggagagggtgagcgcgagttcagtgaggggcgtgctgaggtggtacttccaaattgaggttggcaagtagagaaatgccttggaacttggatttgaagagtgcagagacagatgaggtgcagattctgctggagtcaggagcgtgggcaatacagagagcatggaaggtggaggggcagttggaatatgagtcttgggtgcaggagagagatctgggctggagacgcaaatctgggagccatttcatggtacataaagcaacaagaggaatgagatcgcccacagaggggtgcagagggagaccaaggagcgtccaggacagagccctgggcgcatcaaccccagagggtgcgggaagaggaaggatcagcaaaggaaacggggatgaactgtgagtgctgtgattagaccaagaaagtgggtgtccggtaagccacaccaagggagcaggagggactagcctgccacgtgctagggatggcgactgaggattggcagggagatgcagcagcatgatgacctcggggagggtgcctctggcagagtggcacacacagaggcctggtccaagtggggttaagacacagtgagaggagaggaatcgaagatggcgtctccacctagggggtgctgctgagagagcaaaaagctgggagagtaggtgac

SEQ ID NO: 10649 - DNA, 779 bp, Artificial sequence
  DNA replication origin
ataatactgctccccaaatcatgggggaataatagcattagcagctctactgcttagggggagactgaggctcagagagggcaccttgcctgctgccacaagtgtattttcctgcattcactcgtcacgttcttgctatgtgtccaccatgtgtctgacaggactgggtgctggggctgtagcagcggaggaacccgatcgagtccctgttctctgggctcacagccccgcaggggagacctggtgagcagatgctcgcagacagtggagaatcctgtgaacaaagtaaaacggggtgaaagggcagcgtgagaaggcaggtaagggagggaggcgccccaggttggtgatgatgggaaagcccagccctgggaagggtgttccaggcagagggaacagcacatgcaggagccctgaggctggagttaccgcagcgtgaccaaggggcagaaggaagagctagtacctggaactgaggacgtaatgggggagtgggaggcgtgcagggccgggagggatgggtggcactcatcgctttgaagggacggtcacggtacggggtgagaattcattccctgtgcggtggaggcctttggagggttttcggtggacggtgtggaagcagggaggagtcccggtgacagatggcggtggaggcagtgggttcaggatgagtttgaggtggagcttccgggacgtggtgtgaaggaaggaatcaaggacacatcctgcccctgagaggtcacgtggctgggaggctggctggtggcctgaggctg

SEQ ID NO: 10650 - DNA, 1613 bp, Artificial sequence
  DNA replication origin
ggggcagccgcccagcaggccctggggggcactgactgcatctcggtctgcagaggctcccagccagcaacaggatggggctcaccgagcacctggggtcagggagaaggaggggcagcccgtgcgccaccgtgcccccccacaaccaagatgatgatatggcagaggccatcatgaggttactttggggggggtgtggtttccgcacatccagatggcaggtgccgggggctgcccaccagagggcacactcctaactggacaggggaccccggccagcgccagctaagctggagtgtcgatgggtgctggaaatgccagcttttctgattttcaagagagtctggaaatctggtcgtttatgtgaactctcctgtttcttaagtttggcaacaaattcaagcttttaaaatcccctgcatgggtcataagcttgtgatctgaaggaaacactctgaaggctggacacagtgtgcacttccagtgtgagaccttggtttatggataatggaccagaagataaaagtgtaggagctggagttgtcatgggatgggtggacctgatggtgccagcaggctggatggcagggtatggcaggggagggcagggtatggcaggggagggcaggctggatggcaggggagggcaggagaggtgagggggtctgaatcaggcctcgaagggggaacacaggtttaccagatggccgagctggggatggggtggtggggtgggagaatggggattcctgagttggcagcatggggttcaggggctgggtggctcggcagggtgcacccagcccagtgagaagcatggggtggtgcaagccgcggtctgggagggtggggcaggccaagagcctgaatgccagcatatagagcagcctgagtcccaacggaaatgaggacccagcgaggagtttgtagtcagggagggtgctggctggcctagggggtcaggggcagcagttcagctgcctgtagagtctgggctggtggctgacacagagagcaggagagacagttggggggcagtagggactggagccagttgcaggggcatgtgttccatccaagacccgctgtggtcagggcctgcgtttccaaggaaagctgggattccatgttcaagacatgaaatctcatcattctgagtgttagcttcagagctttaaaaatattgtttggcccagatggaacatgtgtgtgggcagattcaatccccggctggctgttttgacctttgtcttggactctgggctcctgggagtgggggcagcacttggcccatattgatgcactttggtggatgccctcctggggacacgcacaggcccacagctgcccttgaatgtctccctgcttctctggacggttttgactttataaacacagtaacttttctgaaagcagacagggttggtgtataggggtggagatgacccagacagaggcccctttcctagacagggtgggcggcggggggcggcctctgggaccacatgttcataccctccggccagcccagggttcaagctgagcaccagctggggtgctgggcagggtcttcaggtgggaggtactccctgagggggtctcctcgctgttcc

SEQ ID NO: 10651 - DNA, 944 bp, Artificial sequence
  DNA replication origin
ggggtcagcctttggtctctggggggtgtcagcctttggtctcgggtggggggtcagcctttggtctcgggggggggggtcagcctttggtctcgggggcggtcagcctttggtctcgcggggggtcagcctttggtctcggggggggggtcagcctttggtctcggggggtgtcagcctttggtctcaggggggtcagcctttggtctcggggtgtcagcctttggtctcggggcaggtgccaccatgttcatcgtccagcatgcgttgtgcgcatcgcacggtggtcaacagagacgggcggggctgtgaggagcatgttgaacgtctgtgttggagaatgccaccgcttggaggcttctggctgtgtgaggaagcctgagcccaggccctgcttcagatggaccccagtgtgctcctgtgccctccgaggagtcgcctgcaggggtgcccttccaggaggcaaggcccagggcagcatcagatggagctagtgctgttggctcagcccagtgattgtcctcagggaggcagccagggaggggagcctgacccctgctggtcagggagaccccaaactgtcccccgggttactccggccagagagtactgcccttccccaggctgagcctggcctcattgtcacactaggtccctccagaataaccccagggcctcaggcctgtggcatcgatggctcccgacctgggctgcaagttcccccagaagatggagctgccataaggggtcctcatgccccagtgtcctgccctaattggctcaatcggcccagtctggcccagggacctgtctgggagatgccctttccgtgtaggtgtgagttctgatccctagaacctgtgtgtccccagcagcctgtctgcccatctaggcctcggtttcctcatttggaaagcaagctggctggatgaaatcacttgggt

SEQ ID NO: 10652 - DNA, 1071 bp, Artificial sequence
  DNA replication origin
gggaggagctggaggctctggaagggattcaggagcagccaccaaggccaccttccacacacgtcctcaaaagcccttccatattccgctgaaaccactagtggggcctgtgctgggagcaagggaggcgtggagacaggtggggctgtggaaggaggctgccatgaggagggaaggctcctccaacccaggacgccccactgcaggaggaaatgcctttctggctgtggtccaggagactgagggtcctgctcagccacacagcacgtgccaaggtgcagagcccaggggaagagcaaaccgaggagctggcggtgcctcggacgatgcagtgatggtgaagcaggaggatgggggaggcctgagccgtggggacaggagaatgaccacaggatccacacctctgtggtccgtgggacctcagcagacgctttgggtgatgccagagagccatggaggaggtggcggcaggggctgtgcttctgagaatgctgacaatgatgggacccgggagcagccggagctcaagggacgggcaggggcaatgccggggcctgtctgtgctcggaggagggggaggtgggtgagcaaggaggtgggtgagcagggagcgggaaggtcccaaggggggatgctgcctgcagaggccagcagtcaggaatgtcgaagtagatccttcagcgaggctggggcccctgctcggaggcaggaaagtaagggaggagggatggggctggacccagcaattcagcaaggaaagcaggaggcgggagacagtggtacaggcagggagcaagtacagcaaagaggaccagtggcatccgactcggataaggaaggaccgcaaggcaggtggagatgggctcagtgggtaaggtccccaggggcggcctgggcagagggcaggagggagaggcggcgggcagagagaggctgctgcgtgctgtgggtcaggagggtggtgcctgggaagaccagctgcctgcctgctcccagggtggacaggggacaagtcaagcataaagatgcaaaggtgcaggccgaaaaaaggacgggccactggtatcacta

SEQ ID NO: 10653 - DNA, 982 bp, Artificial sequence
  DNA replication origin
tttgcacacagtggagggtgcacaagctccctgggcctctctgataagggcactaatcccattaacggggtccccaccctcatgacctcatcaccttccaaaggcccgcttcacaccatcaccttgggacaggaagagctcatctccatggaggcttggcagggccaggcctgccacagagttaggagtgaaggggacagcctgggttccccgagcctcggggaatttctgaaattgcctctgtctcctggtgtttgctcagcttctatgaatgtcaggtgggcttctgaagggagcacggaatctgcgttgcagggtcactgtggcacgaggggaccctggcctctggtgctgtggaaaccggagcagctgggggcggccagagagaggctgagcaggagggtgtggaggtccccggggccctggggaggagggacagaggccatgggcattggtgcgtgggagggagcagcagaggccagcctgctgagaagggctgtgagggaagggaggtcctgtggctggaggggaagcagagtcttcttgttcaggattgaagagacccggttctgttgttgggctgagagaggactttagagaggaggaggccgaagacgcagcaggggaggcgagaagggacttgtggagagccctgagggagctggtggtgggcagtgggttgtctcggctcagagcaagagctctccgtcctctgggattatagtggagggcgttgggggcactctgccagtgacttcatcagtaggggtggggagttggcattatgccccatgatgcaagggcccaagtcaccctggagagggaagccggggtcttgagggagggtcctgggagacatggggcctcagcgtattggggaagggaacagtcaagagaaaggggcaggctgtggggagggccttctggctggacagtactagcagggagtggggcagaagggggtccccataccaacttcacc

SEQ ID NO: 10654 - DNA, 1039 bp, Artificial sequence
  DNA replication origin
gaggctgaggtgggcggatcatgaggtcaggagatggagaccatcctggctaacacagtgaaaccccgtctctactaaaaaaatataaaacattagccgggcgtggtggggggcgcctgtagtcccagctgctctgggcgacagagcaagaccgtctcaaaaaaaaaaaaaaaaaaaaaaaaaaaagcgggggagtgataaggccccggacaacccaaactgcagcaagattctctgcggaggcagagctgcctcctcctgggggtcctctggaccaggaaggagccctgaggacttgtggcccagtgggtccggcttcccaacctccaccttgccagcagcaccgatagatgtggccacaaaggtgcattcacatttgcgacctgtggctgaatgcagaccctgggtgctatctcccgggggggcaaatggcagtaagcaagcaaagaggaagtcgacagagagtgacgcagccgtgaggacaacagcacagagtattgttgaggggggcgggggacttcctggaagagatgacactggagctgaggcctaaatgattggaaagaggcagcgatggagagatctggggaagtgggctccagcacagagaacagcacatgcagaggacccgaggtcagaacagacctgccatgtttgaggaaagggaagaaggccaatgtgagtggagtgtggagagcaaagggtgggcgggggcgagggacaggagggcagagtggtgggcctgggtggggtacaggagggcagagtggtgggcctgggtggggtacaggaggtcagagtggtgggcgggggcagactgcacagagcttcctctgctgtggggaggagattggattttctcctctgtgcagtgggcagcccctggagggtggaagagacctgattcccctgtcagttgctctgggcatgttgtgagaattgctgggggcaggatctccctccctctctctatgaaattcctgttcagcagggatctgcctatggctgtatttctgctggtagaagtccctccctgatt

SEQ ID NO: 10655 - DNA, 1034 bp, Artificial sequence
  DNA replication origin
gagggctcatgccagcttctagctctggcttctcctcgtgagcgggacaagggagatgggaggaaagtccccagagatggcttccctcccacccaagctctgtttcctgacctgggatcctggctcccaatggtgggaaacaaaccccctttggggacacccccacttcactggcaggagtgcagtcagccctgggatcccgacatgaccttcccaaagcactgtggcctcagtgctttccagaagccaactgtggcctcagtgctttccagaagccaactgtggcctcagtgctttccagaagccagggtatttaatcttgtccatggcgacgtggacgcgtgtcttgggaggagccctctggggtggggcagaggctgtgttaggtgggagggtctgaggcagggacccaggaggaacagaagagagagagtgagtgaggcctgctccatgcaggggcagggggaggaggaggccggggtggggccttggggattgtggggggggtgggtgtaggaatccagtaccacttccaggttccttccaggcttgaataactgggagaagggggcgtagctggctgtgattaggctctgggaggggagtcgcttaatgtcaggaaagagagttacttctaggtaggccctgggcttgaggctcccgggccatgctaagggacattcctatgtcccttgcagctcttggttgggcctggcacaaaaaagtgtgtgcccaagactcctgtctgtaggtggaggtctgctggagtagaggttgggggcactggcgggggacaggagccccacctgggtgcaggaaggctacaagggcttggtggaagagcgtggaagcccccagaatcaggggcttgtaattctggcccgtcaccctgtgggacaagcacatgggcctctgcatgctgtctcacctcatctgtaaaagggagacagtccagtgaggatgtgggcccgtgagagagagacacggcccggggggctgcagaggcaggagcgctgtgggtgggagggctgctt

SEQ ID NO: 10656 - DNA, 1112 bp, Artificial sequence
  DNA replication origin
ccctgggaggctcctggtctcctctccttcccttccttcccctcccttcctctctgcactcctccctcccttcctctcccatcccctccctccctcccctctgccctcccctctctgcacgatggctggccactggccactgatcccagcacactggccctgagctgaggtctgggcttctggggcaatgcaggttgggtcacagactgaggtactgtctgagaccctgtgatagtgggaaattataaatgtatgtttgttcttcatctctggttcctgcctcagagctcctaaaacctttgtaatttcctgagtgttaagggtgatagaaacaccttttattatcagatttggtctgagtccccttgttcctgatataagagtttctggattgttgggttgagaattcagcctcacttccccaacctctggggatgggagtcatggaacttccatgaaaacccctaaatgacaaggtttggagagctttgggttggtgaacaggtggaggttctgggagggtgagtgcccagagagggcgtggaggctctgcagcccttcccgttaccttgccctgcccatccctcccatgcagctgttcctgggttgtgtctttaataatcaactggaaatagtaagtaaaatgcctccctgagttctgtgatctgttctattaatgaacacatgtctgtctgattccaaggtcacagttacttttgcaccaacctaatagcaaattacagaacctgaggagggagttgtgggacccgcccaatttatagccgcctggtcagaggcacaggtggaaagctggaacttgccaccgcaagtggggctgctgtgtgggactgaggccttaacctgagggctaagctgaccccaggtagttggcatgagcattgcactcaactgtggggcacccagctagcgtctggaggttggagaactggttggtgtgagggaaaccacatgtttggtgtcagaagcattgtgagtgaaaacagatcccagtggacctcacccagcctgggggctctgatagaacaaggggaggtcccagaccagggctcagccctgccgacagggagaaggcctgagtttccagaacagcc

SEQ ID NO: 10657 - DNA, 1041 bp, Artificial sequence
  DNA replication origin
ttcccgttgcaggcgggcccctggggcacggagcggagcgcatcctggcggtgcccgtgcgcactgacgcccagggccgcttggtgtcccacgtggtgtcggcagctacgtccagagcaggggtacgagcccgcagggccgccccggtccggaccccgagcttccccggaggcaacgaggaggagcctggcagtcacctcttctacaatgtcacggtctttggccgagacctgcacctgcggctgcggcccaacgcccgcctcgtggcgcccggggccactatggagtggcagggcgagaagggcaccacccgcgtggagcccctgctcgggagctgtctctacgtcggagacgtggccggcctagccgaagcctcctctgtggcgctcagcaactgcgatgggctggtgagtacgcacttctctagctcctttctctccgctgctctcgcctgggttttggaaaagggttacctgggagtcccttgggagggcaaggcctgcgctgaggactttccgcgcccttcccgtgctttagtgagcctcgtgctccaactgaagggcttggctggaaagcaggttgttttgactggtctgagcagggggccatttatgcatggggagcgcccgggtctccaaaaggctcagcaggcaggagcgtgcgcctctctcttttgcctgcctgaacaggtctctggcttgcatccgggggtgggtccgtgtatgtgtgtgtacctttgtgagtgtgtgcacatgtgttgtggaacgttggtgtgtacctgcatctgggtgcccgtgcacctgtgtgaacatgtgcgtgtgccagtgtctcttgtgcacgtatgtgtctgggtttctgcacatcagtgtgttgagcatctgttgagtttgtgtccgtccttgtgcatactggcgtgatatgtgtgtggtggacttatgggctggcagtcagtcttcctgtttccttgcgtgcgggtaataccagcccagggagctggcagtgatgctgaaatgcccagttagccctctgccccttggctga

SEQ ID NO: 10658 - DNA, 875 bp, Artificial sequence
  DNA replication origin
gccaagttggccaacttcggggccgggttggtcgcgcagggggcgccccgcaccgcccccgagcgccttgggccgggggagcctcggagcactggcggctcctgagtcgcggagggtggggacggagggccgggaaaagccccgcggccaagagcgcagagtcagccccagcgggtccgaggggggagccagggcgaggcggcgccggggctcgcgtccggggacgctccggaggagccggctgccgagcgcgtagccttgggccctaaggattggttggggcgccccgcagggaatccccggagatcggagggaccctgttccacccctcccagtcctcgggcgctcggggagacggggccggcagcgggctgagcgggagctggacaggcaggacaggccgctcgtgctcggggaagccgagactccgccgctccggaggctggcggtgagggcactcgggcggcaggggcccgccgaggggtcgtggcacacgggtaagggggccaacccggaatggcttccgagcagctccacgtcctgccaaggacggtaggtgcaagggtcgggggactctctgacggggtcgtcccttcgggcacggggaggttcccaccgagccccaaccctgaacggggcagggggcagagctcttggcaggcaaggtctccggaggagggaacggctggggagtggcggagccccggagtggtggccctgttaacgccccttcccggttgcaggaaagccggggaggtgcaggctggcttctggggtcgcctggcggaatgccccttcccttcgcagtggggcggggtctgggggggcgtggcttgccggcgggtctctgaggcactggggctccgtggtctccg

SEQ ID NO: 10659 - DNA, 1175 bp, Artificial sequence
  DNA replication origin
tcacaggtcacgagagcagatgcctacagagagtgaggagaggcgggacctgccacaaactgcaaggtaagtgcccatttaatggttgctaagcaggactgtggggctagcgtggccacatcttccaatatctcaagaaaagttaccaatctaaatttccatgtgacatctcaccatgcctgggagctggatccagcctcgggcacccttaggtgacacagaaagagtacagcttgcaggtgaagatggctgtccagctgcgatgctctcacacccaggacccacaatcgaaagaaccaaggacgtgagatcacagttagagcctgctgtgtaagtcgtgtttcccccaacgactgggacctcctggccagcagggagaggcctgagtcatctccgggtcctctgcccctggccaaagcaaagaccaaagccctggccacacagacctggggcagggcaaatgagaaaatcaaaggggtgggtgttcaccctctggggaagtgaggcagaaattgggggtcccagggcagagatgatcaacagcctgagagggggctctcaggcaggccctggagagaggccgctgagctcagacagcatgggaggatcagggccttgctggagaggagggactggggaggggttccggttggcaacgggctctaacagcaaactggccccagaatgggcccaggtgtccttggatgcttgggtggaaaaggtaggcagagcttggagaggccatttcaggttgggggccgggagtgcaatggcgggaggacagaatgcatacgtggggttgaggacaggtgagggcaggagcctgactgtgctcatgggcagagagcccaggtctggcaggaagaggctgtgctgaggctgcagcggagggatgggaaggcagatgggggacaggggacagggacttcagaggaagaggaactggggactgaaggagccttgcctctctcagtaagggcaaaagttgatctttggggtcgcgccctgggtgtaccctcctaacagcatcttctggcctttgcggcctctatttgggcattcggcctggctcagaccttggacccagtagtcagtcccccctcccctttcattccctcaccctgtcctgccccagagcacagagacagggggatgcaccccttgaattccagggc

SEQ ID NO: 10660 - DNA, 924 bp, Artificial sequence
  DNA replication origin
ccacacagcatccatggtgtttgtctacactccagtttctctactgtcaaataatgtcctggtctggccaagagggcactgtcttctcatcaagctatgagggtcccaaggaagaggagcccagccagggaatgggagaagggggaggagtccagctgggggagagaagaaaagggggaggagctcagcgggggaggggaatgaggtaggagtccagccaggagagggggaaagggggaggagctcagcaggggaggggggaagggggaggagtccattcaggggagggggagagggaagtgtccaactgggggaggggggaagggggaagagtccaactgggggagggggaagagggaggactccagcccctggggaggaggagcccagccaggggtggtggggaaggggaaggatctcagtgggggagggggaaggggaggagtccagccagaggaggggaaaaagggaggagtccggctgggggaggggaaagggggaggagctcagcccaatgccccctcctgggctgtactgcatgagagtggctaccagccagaccagccatgtctataccaccaggtcccaccagaattgtggacaggccgggtgcagtggctcacacctgtaatcccagccctttgtgggggttgaggtgggtggatcacctgaggtcaggagttcaagaccagcctggccaacatggtgaaaccccatctctactaaaaatataaaaaattagccaggcatggccaggtgcagtggctcactcctgtaatcccagcactttgggaggccgaggcgggcagatcacgaggtcaggagatagagaccatcttggctaacacggggaaaccccgtctgtaataaaaacacaaaaaaaaatcagtcgggcgtggtcgcaggcacctgtagtcccagcta

SEQ ID NO: 10661 - DNA, 968 bp, Artificial sequence
  DNA replication origin
gaaggtcattgggggggagggtggaaggtcattggggggagggtggaaggtcggtgggggaaaggtggaaggtcggtgggggggagggtggaaggtcggtgggggggagggtggaaggtcggtggaggggagggtggaaggtcggtgggggggagggtggaaggtcggttgggggagggtggaaggccggtaggggggatggtggaaggccagtgcgggggatggtggaaggccggtggggggggagggtggaaggccggttgtgggggagggtggaaggtcggtggaggggagggtggaaggccggttgtgggggagggaggaaggccggtaggggggagggtggaaggtcggtggaggggagggtggaaggccggtgggggggagggtggaaggccggtaggggggatggtggaaggccagtgcgggggatggtggaaggccggtggggggggagggtggaaggccggttgtgggggagggaggaaggccggtggtggggagggtggaaggtcggtggaggggagggtggcgtgctggcggagcaggaggaggctggagtggagtgagtgaagggagccatggctggtgagggttcctcaagctgtgtggactcaagccacgatgcttgacatgggcccctcgtttggagcctccaccgtgcaggtcacagggggctctagaggctgactcctccccatcccgggttcacttgctgcttcgcccacctgcggctctacactgcaattattttttcctccctgacttcacaagtggggtttaggccccaactgctgtggtttacgcctttggaactcagggctattttatgtcaagttcaggccgaggctgtggctgggatttgggatctggagggtggctgtgtcctatggctctgctctctgaaactgaggaccccaccctcagttgggtcccagcctgcctgccctcccagagctggccctcct

SEQ ID NO: 10662 - DNA, 1191 bp, Artificial sequence
  DNA replication origin
cccgcagccaggacagcgctgcttggatgggcttctgttccctttgaaggcacttcccttcatagcctcctcccttccttccctggatgctgctgctgccccgagagccccaggcctggccttctctgtgccaggcacaggatgtggtggcccacagcatggacacagccctgcctccctggagctgaccttcccagggggacagtgacaagatgattgtccgagggaggctggcaggcaggtggggaggctgctctggggggggccctgagaagcactgtgtacctggaactgccaaagactaacctgggagctgggcagagtgtggggagcgggcaggggaccttgctgccagggggtgctgctctgaggagagtgcataagaagcgtggacagcctgtggccggctcccgggtgctgtgccctgctgggagtgcggctgtgacagactctcggatgggcaggatcctgccctcagggagctgctgtccagtggggagagcaggcactgtctggcccaccagatagtcaacactgaaagccacagagtgaggatgtggggacaggcacctggtggctgtgctgagggatggagatgggcacagcccttccgagagcaaaagggacctgccagtcagacagagcccagctagtatccctgcagagcccagccatgccactcccagtgcagtttgtccatagcttgtttgggcaccttttgtgggggtggtgttggggacaccctgagctctgctgccgtgagaagcagcaatctcagaaattcacagtgacatggctgggccctcactcggcaagggctattccacactgtgtgggaacgaggggtccacctagaagtagcccccatttcacaagggcgaacacaaggcaaagacgtggcaaaggtatggagtgttggccgtgcatggaaggcttgctcagcaggagctggagtgtaggggaaaggggccggtgaactcaatagaacaaggcagggatcttgggggccctcgtgggacgcaggcatagactgaggagtgtgaatgcagttccttccttccaaagctcaaaccatgacaggcagacagcacggggctgtgcgtctcatagctgctctgaagagggacgggacgggagtcccagcatggccgtgctgggggagggcggaaggtcggtggggggaggctggaa

SEQ ID NO: 10663 - DNA, 1830 bp, Artificial sequence
  DNA replication origin
tgggagccaagtgaagaccgtggatccatgaggagggcgccatgggctgggccaaagccactgactgctggaggaggatgacccagaggccatgagcctgcatgagaacagccttggtggagaggtggggagaagcccggatggagtcactgaagggagggtgggggatgctgctgcaaagggcgggaactgcatggaagctgggggggggatctggagtcatctcagttgtggtcaagacgggtgacagaagagcctatcgatctgcttatgggatgatacaacagagagaaacatgcagagaattgctgggcagcgcgttggagttggtgagtggatggggatccaggcccaagaggaagaacagagcaatgtgtccctgcctagtgcactcatgctaacaagtgagagggcagagcagggagcgatggtgacgggtgggagggtgggagggtggtgtgtggggatgatggtgatgggtgggagggtgggagggtggtatgtggggatgatggtgacgggtgggagggtggtgtggggaggatggtgaccagtgtgaagatgatgtgtggggaggatggtgataggtgggagagtggtctctgggggtgcacgtgctggggagggggctgttgtgggtgagagctatggaaagcctctcctattgttgcagtgagctgggcggccaggtccgaagctgaggttgtgtgtgtggctgttaggtcctgggagctgagcagagcagagggtgttcagtcgccaggtgggacggcagagtgggagggaccgggggtaggtcaggcaattgtgtgtcttccctgtgcctgccaggggttctaaggtatgggtccatgaccctgggcctggcctgggtgttgtctgttcacctgcagagggtgctggaaggcagaggtggggtacccaggccttcggctttgcccagggctttgcctaatgagagtggaaagcgtgtcgagaggcacagtagtggaattcagcagggacgggcatgatggtggactgcaagtcctggttgagggtgttggtgtctgggttatgatggtgcaacctggacagacgggagctggcggagcagagggcgatgtctgcagagatcagcgatgacagtgctgagaaggccctgcgcgccctgagccagggcaggtcactggagagtgggaaggagccccaggaggatgctggaacttgaggattggacagggttggggggcaaagggactggtcagtggaaggcagcacagaccaagggccagggcggcagccttgagggagctgcagctgccagggaggagagagggggctgaaggcagccatggtgggcagggtgagcaggccgcgagtgcactgggaagggacagggaaagagatctgaggtctgcagaggcgtgaggcagggaggggcagagatgggagaggcaaggggcttactgtggatgtgtaggagcaggggcttgcaggaccctgaggggcaggatgccggggaaagggctcagagggtgtgagcccagtcctagatctggactgtaggtcataggatgtggcagaatggagatggagcaggtgcatctgaccggtaacccaacctgggtgagcccagagtgctgagctgtggagtctctgaggcgcaggacaagccctgcctcctgtggggtgctccctaaaactgggccctggtgcttctgttctgggtcccttggctacagtctacatctggcccgtgtcccatttgctggggcatctccctcccctggagcctgtccaggattgtggacctggccttgcacctgtccctctgcccagtgacttcct

SEQ ID NO: 10664 - DNA, 1359 bp, Artificial sequence
  DNA replication origin
agtggggtgaggtagtaggaggtaggcttcagtatgaaacagggtggtcaggttgggcatcactgagaagggaccttctgggcaaatcctcaagctgagtgaaggagctggcggagtggggaagagttcccggcccaggggaactgcagcccagcacccaagactggaccaggagagagatgggtgtggcccgctggaagtgagccagggagagtgacagggggtgggtccagagagataaagcgggctggccctgacggtctcaggctgctgaaaggacttctgcttttacacgagaaaatggggagccatggtgggggccatgagcagaggagggaaggagcagaagcaggtcagaggcggtcacagtcttccaggctagaggtgatggtgggccagaaccggaggctgccatggagacagtgggacggggtgagtatgggagtgtactttcaaggtagagcccagagaatctgctgatggattggatggggggcgggggggcgggggcaggggtgtgaaggaagaagaggagctaaggcacctggaagaaagatgttgccatcaactgagatgcagaagttgatgcctggagcaggtggggctggggaagagcagaaatgcagctttgggcttatttcattggagtcaaggatgagacatccaggagagatgccagcaggcagctggacatttgaccttgggctttgggagcaagggctgggctgaaggcatgcacctaggggtgggaggtctatagatggcatctaaagctgtgagctgggagatcagtgtggaagtgagtgcagttagaagagaggagaggactgcactgtggcagtcagaagctggggagaagagtagaaccaagccaagttggaggggaaacaaccaaggcggagggcaaatgccagggtggatgtcctgggagccaagtgaagaccgtggatccatgaggagggcgccatgggctgggccaaagccactgactgctggaggaggatgacccagaggccatgagcctgcatgagaacagccttggtggagaggtggggagaagcccggatggagtcactgaagggagggtgggggatgctgctgcaaagggcgggaactgcatggaagctgggggggggatctggagtcatctcagttgtggtcaagacgggtgacagaagagcctatcgatctgcttatgggatgatacaacagagagaaacatgcagagaattgctgggcagcgcgttggagttggtgagtggatggggatccaggcccaagaggaagaacagagcaatgtgtccctgcctagtgcactcatgctaacaagtgagagggcagagcagggagcgatggtga

SEQ ID NO: 10665 - DNA, 1099 bp, Artificial sequence
  DNA replication origin
aggcggctgcgctgctgggcgggggcgggagctggagccggagctggagccggggccggggcccgggtcagcgcttgagccgggagaagagtttgagatcgtggaccgaagccagctgcccggcccaggcgacctgcggagcgcaacgaggccgcgggcggccgagggctggtcggcgcccatcctgaccctggcacgcagggccaccgggaacctgtcggcgagctgcgggagcgcgctgcgcgcggccgcggggctgggcggcggggacagcggggacggcacggcgcgcgcaggtaggctcgggccgggtctgtcccgcggcggactcgcgtgtccccgctggccgccggcgcgggcgcggtgggggccgggctgggagggcactggccgttccgggaggttacgcgagctgttggcgggcgggcggcgcctggctgcgcctgggtctttactccggcggcccagccgagaccgccccccgcagccccgcgtgcctgagcgcgctcccgcacccgcgcctctatgctctcccactaactaggtgaaggacgtgtgcgcgtccgggcttcggaactctgtagtaactccacacacgaaacggagccagcactgttctgcttttcagccgttcagtgcgggagtggagcgccggcgggtgttgggagggcgtgggccctgcgcgcagcggaccagcggcgcctccgctcacctctgcctgtgagatggggattttaaagtcacccgatgatctcttaaagaccttttcagcccttgtaatgaacagagtgccagcatatcagtgatagtaagagttaagtaacttagccctctaacgccagacatccagagctgtgctatccaatacaacagcacgcatatgtttttgtgtgtgtgtttttgtttttatttatttttatttttttgagaccgggtcttgctctgtcgcccaggctggagtgcagtggtgcgatctcggctcactgcaccctctgcctcccgggttcaagcgatcctccctcccgcctcagcctcccgagtagctgggattacaggtgcccaccaccacgctcggctaagttccccgcccccacccccc

SEQ ID NO: 10666 - DNA, 1275 bp, Artificial sequence
  DNA replication origin
tatgggactgtataggagtcccgagctctgggttgtgatgaggtgggcgtctttctaccccttgcccccaggctcttaccggcgcgctcctggccgacctgaaaggaggggcgcggccttcaggcgttcccactccccgcgccgcctgtcttccctttatccccaaaccggccgaagctggtcagctgcagattgtcgaacgtcctgggagctgcggggctgcggacgtcccgcgcccgaagccacccgtatggtgcctggggcacgtcccagccctgtgtgcctccacttccccttacctgccgtcgtcgggcctagggccccggtcggcgcgaggtttccgtgcctgtggctcgcgcctgtacccagcttttgcctaacgaattcgcaccctgtgtaccccttgacccgcctaacggtcggcaggccttgactgccctggggccctggcacgaggagggatcgcgagcgcgggctccacgggtgcgcgccggcctctgcgctcggtaggttaccgctgcatctcccagagcagaattggtaagagtgcgtccattcaccaggcgtagacgctgcattcgaggaggcccccgggtcaccccatgtgcacacatgctgcgagatgactaatgttcgtggtttctagcagcactgcccaaaacctaagatgccgtagcctcccaggcctccccatgtctgatttggctgccttcctcaccccagctttagtggacacagacaatacacaaattaacaataaggtagtgctggaccctgccgcagagctaccttagctagtgcaagcctgagtgccaccctgggaagatgcggacaaagcatgtttccaaccccagtgccacagagtccgaatccagttttgacaggtttgagaaaaagtagagaggacatcaaaagaaagacaggagcccagagctaagcagggcctgatcttcaaaggccacttaggccttggcaagggtgttatctccgagagaaggctttggcaggtgatcagcaggggagccgtaaaccctgtgtaaaggaaaactcttgctggatgtgagggggatgcagatggagcaggcagggtgaatgacggtacataccaggccctctactacaaactgaactagaagcacacacctgtggtaccatttcagaaggcactttggctgaggtaatcaagaagagagtccggccaggtgcggtggctcactcgtgtaataccagcattttgggaggccgaggcaggcagatcacttgagatcaggagtt

SEQ ID NO: 10667 - DNA, 942 bp, Artificial sequence
  DNA replication origin
taaaagataaattgaggccgggcgcggtggctcatgcctgcaatcccagcagtttgggaggctgaggtgggcggttcacctgaggtcaggagttcgagaccagcctgatcaacatggagaacccctgtctctactaaaaatacaaaattagccgggcatgtggtacatgcctgtaatcccagctactcgggaggctgaggcaggagaatcgcttgaacccaggaggaagaggttgctgtgagccgaaagtgcgccattgcactccagcctgggcaacaaaagagaaactctgtctcaaaaaaaaaaattttttttttaattaaaattaaaaaaaaaaaagaaagataaagcgaagtccatgtgtcaggagcaagcacaggacaaagtcacacagagcggtgtgagagggaggctgggagggcagccacagctgtgcggggtggtctggagaggacatggggcagccacagctgtgcggggtggtctggagaggacatggggcagccacagctgggagcgggggcaggggctggggaggagaggaggaatgtgcaagctcagctgtgcaagctggggtcaatggctacatcagaaccagaccccattgctggtagcttcaccgtctcgctctcatggggcctcccagctatcccaaatctccaagaaacagactcagagacctgcggtcagaggtccagcgagggggagagcggaagtgagctccaggccacgtacaacggcagtcccggttccccgccatcagcacgacctgtgtgagagcacagggtatctgggcagaaggaaaactaggggagcctcatccagcgctggagatggagaagctttgggcttctcgacggcgaggcacccggggaacggggagtcacttagaacctcaaagtagcctcgggcgagaacaagcgaagcaattccaagctctac

SEQ ID NO: 10668 - DNA, 945 bp, Artificial sequence
  DNA replication origin
gtataaaagataaattgaggccgggcgcggtggctcatgcctgcaatcccagcagtttgggaggctgaggtgggcggttcacctgaggtcaggagttcgagaccagcctgatcaacatggagaacccctgtctctactaaaaatacaaaattagccgggcatgtggtacatgcctgtaatcccagctactcgggaggctgaggcaggagaatcgcttgaacccaggaggaagaggttgctgtgagccgaaagtgcgccattgcactccagcctgggcaacaaaagagaaactctgtctcaaaaaaaaaaattttttttttaattaaaattaaaaaaaaaaaaagaaagataaagcgaagtccatgtgtcaggagcaagcacaggacaaagtcacacagagcggtgtgagagggaggctgggagggcagccacagctgtgcggggtggtctggagaggacatggggcagccacagctgtgcggggtggtctggagaggacatggggcagccacagctgggagcgggggcaggggctggggaggagaggaggaatgtgcaagctcagctgtgcaagctggggtcaatggctacatcagaaccagaccccattgctggtagcttcaccgtctcgctctcatggggcctcccagctatcccaaatctccaagaaacagactcagagacctgcggtcagaggtccagcgagggggagagcggaagtgagctccaggccacgtacaacggcagtcccggttccccgccatgagcacgacctgtgtgagagcacagggtatctgggcagaaggaaaactaggggagcctcatccagcgctggagatggagaagctttgggcttctcgacggcgaggcacccggggaacggggagtcacttagaacctcaaagtagcctcgggcgagaacaagcgaagcaattccaagctcta

SEQ ID NO: 10669 - DNA, 1043 bp, Artificial sequence
  DNA replication origin
cacaacacgcgccaggccgagctgggcctcgcctacggcgcgccgtgcatgcgcctcagcaaccaggccttcgtgttccgcggcgggcggtggaccactgagagccagctggcgaggacgcggtcgccgctgctctcgcggaccgcctggggctggaaggcgcaggtgcagcggtccaaaagccaagtgttgctggaggagaacaactacctgaagctgcagcaggaactgctcatagacatgctgactgagaccatggcgcgcatgcacttgctggagaagcagcgcaaccccgaggtgatcccgacggctgcggcgcgcgccgggcagaggaagatgcgcaagcgcgcaggcgccagcgcgggcgtgctcatgatccagccgtgcgctctggactcgcagtgacgcaataaaggccgcgctacgcatgcgcgcctcacgcctcgggtctgccactgccccagcgcgggactggctcccgcggttccccgggtcggtctgtgcgtgtgggttggggaggtctgcgtggcctcggggactgcccctcggtgctgggtgtcggcaggggacgcaagcctaagctgcctgtcttgggagggtgtgatggggccgtggaggagggtctgcgcgtggctctccgggagtgcggagtggaagccaagcttgcagccgacatggcccagatagggtggagtggcgggtaatggccttgcaggccatccaggtaacggagggcgaagtcccggagacggaggaaccgcggtgctcagggaatgaagggtgtggtgcggagggagcggaggacggtgtatggggtcggggactttgcacttggtccgtcttcagggcctctaggctcaggaggtttagaaactagaagtcccagggtaagtgttattttacattcccaagagaagctttctggaaaccatgggctgtgcggcccccacttgcctgtgtggcattttggagagtcgcgtctctgttacaggcctttttttttttttttttttttttttaaacttatttttaaacacggggtc

SEQ ID NO: 10670 - DNA, 1141 bp, Artificial sequence
  DNA replication origin
ccgtcgggatcacctcggggttgcgctgcttctccagcaagtgcatgcgcgccatggtctcagtcagcatgtctatgagcagttcctgctgcagcttcaggtagttgttctcctccagcaacacttggcttttggaccgctgcacctgcgccttccagccccaggcggtccgcgagagcagcggcgaccgcgtcctcgccagctggctctcagtggtccaccgcccgccgcggaacacgaaggcctggttgctgaggcgcatgcacggcgcgccgtaggcgaggcccagctcggcctggcgcgtgttgtggtccagcaggtagaaggtggacagggagggcatgcggcgcagtggcggccgccgtggcgagaagggccgcgagatgtgatcggcccaaaactgctgcagcgtctgccacaggcggctggcatggctcgtagccgagcactcgaaggttgccagggcgtggaccttgtagggcacgcaggtgctcgaaggggagcctcgggagcgctggcgactcgtgctgcgctcttgtctcgggagcccggatgtccagaatgatgaaggcgagccagggggcgctgctgggagacaagagtccgggtgagcagcgtgcttggtacaggccgcctctcaaaccgcgaggccggcggacatgtcttagccctgcagctacggctgcggctgtgtctcaccagctgctggccaccgaggagcccgtcgttccacgctgcacaggcagcagtctcacctaaaccatcttccccaaagaccactgaggatcaggccctgggatacatatgcagatgaaggacgggaggagggccttgttctgagttgcagctggaagggtgaggggtagggaatggtagcaagacaagtaagtaggtacttaaaggaggagtaggactttgccaggtgggttgaggatggaaaatggagaacttctaggcagagggaagagccgagcagggctttctttttctttttttttgagactgagtctcgctgtcgttgcccgagctggagtgcaattgcgcgatcttggctcactgcaacctccacctcccgggttccagcagttctcctgcctcagcctcttgagtagctgagattacaggcgcctgccatcacccc

SEQ ID NO: 10671 - DNA, 879 bp, Artificial sequence
  DNA replication origin
ggtagcaagacaagtaagtaggtacttaaaggaggagtaggactttgccaggtgggttgaggatggaaaatggagaacttctaggcagagggaagagccgagcagggctttctttttctttttttttgagactgagtctcgctgtcgttgcccgagctggagtgcaattgcgcgatcttggctcactgcaacctccacctcccgggttccagcagttctcctgcctcagcctcttgagtagctgagattacaggcgcctgccatcacccccacctgatttttgtatttttagtgaagacggggtttcaccatgttggccaggctggtctcgaactcctgacctcaggtgatccacccaactcggcctcccaaagtgcccggattacaggcatgagtcactgcgcctggccttttttttttttttttttttttttttgtatttttagtagaaatggggtttcaccttattggccaggctggtctcgaactccggacctcaggtgatctgcccgcctcagcgccaaagtgctgggattacaggtgtgagccactgtacccggcagggcaggactttcatatttcagatgtgaacacgagcttggataggattggtgctgggaagagcagaagaggaagctgggaaggtggaccagtgcactatgtgaaggtgccctacaggcaggctcggaagcttagacttccttttgtgggtaagagggaactgctgaaggattagaaagccggggttagatctggattctgaaagcaatctgggaggatatctagcatagccaacagcattattgccctcatcattcagtcatttgatagacttgaactagcatctgctctgtgccagactctggtcttgggaagggg

SEQ ID NO: 10672 - DNA, 1123 bp, Artificial sequence
  DNA replication origin
tggctactcaggggccaggggcgggcacagggccgggcttcgtgcggtggggctcgctcgcgcggcagcggtggccgaggcctcttggttctgcggcacgtgacggtcgggccgcctccgcctctctctttactgcggcgcggggcaaggtgtgcgggcgggaaggggcacgggcacccccgcggtccccgggaggctagaggtgagaggggagacctgagcgcgtcctcgggcctgtgaggacctcggggggctgggagcgcctctgcggctgaggggtcgggcgtggccggcgactgaggggtcgggctggctcttgagggcccaggccctggccgacgcgcccgccgtgagcgaggaggcccgaatccgggcgtctttggttgggttgcgggcccaggccgcgccgccggggtcgggaggcgtggcaggtggcccgacagccttctttgacctctgggaaagctgacttattcctatggctttgcttctagggctttcttaggcctctttgccggctgcctgggcagccgcgaggtgggctggagtaactgggtaaaagtatagggtggaatcgggcctactaggtacccctagtagtagggaagggtggtattagaccgagagggaatgtttacaactagcgttacagtttaatatttgaaaatccaaagcggagactggaccctagttccctgaagagaaaggggaatgtaccagaaggagaacacgcagtggttgagaaacttagcagttacagcacctattctggaggcgagtaatccagttggagagggacagggcgttaaaagcaggaaagcccccgaaagctcatctaagtgcatctctttccacaccggaggcctggaggtatgaaatgactggcccaaggtcatgcgattagtgtactgatggtgctgggattatagttcagggatagaccgtgcagtggttaacgctaaggccctggctcgagtctttgattggtcattggttgctctgtgaacttcggcagttttcttaccctttgtgcccccgttcttgtcaagtaatggatataataatacccgatggatttgtgaggattaaattaagatatgtatacaataagacagggaagtcc

SEQ ID NO: 10673 - DNA, 1061 bp, Artificial sequence
  DNA replication origin
gagagagacagtgatgaatccactaggtttaaaagcacagaagtttagcaatttaacagtttggggaaaaagagcattccaggcaagtgtgtgcaaaggcagagtcagaaaaaggcatctgtgtggggaactttcagagactggccgtggccgggatatgcagacagtggccagctggttagagataaaatggaagagctagttccggccagatagggaagagctgtggatggcgtgtgaagaacggggttgtggccgggcgcggtggttcacgcctgtaatcccagcactttgggagaccgaggcgggcgaatcacgaggtcaggagatcaagaccatcctggccaacatagtgaaaccctgtctctactaaaaatacaaaaattagccaggcgtggcggcgcgcgcccccagctactcgggaggctgaggcaggagaattgcttgaatccgggaggcggaggctgcagtgagccgagatcatgccactgcactccagcctaggcgaaagagcaagactctgtctcaaacaaacaaacaaagaacagggttgtaaagcccaagagtggctggactgagagtgtggctgagaccatgctggggagaggctgttcagtcacggagatgagggagggcagaccatgtgggaatggggggtggaggtgcagaactgtgtgacaacatctcaccagacaatataccatcttatggcacaccatttatactatgaaatgacaaggtggccaaaggagggaggagtcgcaggaaattaccagatcttcactgagtacccactctgtggcaggtgctgtgctggagagacagcagagggtggaagagaaagcacccctatgctcagggaactgctgtctaggcctcctggcttaagcaatggacatatgacaacaccattaactgaattaggttttgtgggtaggagagtcattgttcagggattggccgtaactcagtgctttgttcttcttcctctctactagcaaccatataataaaaattggggccgggcacggtagctcacacctgtaatcctagcactttgg

SEQ ID NO: 10674 - DNA, 790 bp, Artificial sequence
  DNA replication origin
gaccaccactgggtccctctgagactcgagccgcagcaccagaagtctcacgttcacggcacactgggaagagggccccgggggccatggggcagaaagccttccacaggtggaatggaggcctggtctctgaaacaatgatggggttcagaaaggcacagaggaagggcaaagccccaggggagagaaaaccagtgacctacttcatctaactttcaagcacccaccaaatttctgctctgtggggaccctgtggtgggcaccggggactctgaggtggacccaacgcaagatccgcctctgggaggcaaagttagcacatggcacgatggggcgcaatggggcgcgatggggcgcgcctggccagcaggctgcagggtgcaggctggaagccctggcatctgggaagccttgggcaaggcttgagagagacagtgatgaatccactaggtttaaaagcacagaagtttagcaatttaacagtttggggaaaaagagcattccaggcaagtgtgtgcaaaggcagagtcagaaaaaggcatctgtgtggggaactttcagagactggccgtggccgggatatgcagacagtggccagctggttagagataaaatggaagagctagttccggccagatagggaagagctgtggatggcgtgtgaagaacggggttgtggccgggcgcggtggttcacgcctgtaatcccagcactttgggagaccgaggcgggcgaatcacgaggtcaggagatcaagaccatcctggccaacatagtgaaaccctgtct

SEQ ID NO: 10675 - DNA, 1178 bp, Artificial sequence
  DNA replication origin
ggcagggcgaggggggcggccgggggcgctccaggcggggcgagggagacacccagaactccaggcaggagtcctcgggtgccacctttcctctccacctggccctgcgtgggctctgtcctcagggtggcccgccgtagtccccctccccactctgagtttcctgtcccaaagtcctaaggaagtttccagaactacatctcaccatcttgagtcagccttggctcagtgtccatctcacaggcctggaaggggcaggagtcagcactgtccagaccacagggcctgagtgtggggagggcagccgtctaggaaggtggtggagggttgttaccttgaggcaagagggctgcggggcagaaagacacagcaggtgactgttgtgggaggcccaagagaggcctgggagagggatggcccacaagggctgaccctcccgccacccagggggccttggacaggtttcctcctggcagggtggcccttgtgcatggaacccctacaacgactaaggctggcaggcatgaggtttcctgaaggagaaagagcttgtggggcccagtgtggctgggggggcgctgggactccattctgaagccaaaggcactgggaagggcttccgcagaggagggtttggcaggggttgccaggaacagcctggatggggacagggaacagataaggtgggtggaggagttagccgggagcctggggctggctccagcatgatgtgggggtctgcaaggccctggagaaagtggggtggtgcagcagggggcacacccacagctggagctgacccagatggacagcttgggctctgccacgcgggactaggcaaggaaggggcacgaacaagcaggaagtggtgaggcggtctccagctagctgctctcccctgcccagactttggtttcctccctgctggcttggcctggctccctggctctgtgtggtatggtcacacccccgtgcaccccctccactgagatggggcggggagagcaccgaggctgctcttcctctcctgggccgtcctctgagcagcagacggggctaagcgttccccagctcgccttcacacacagcccgtgccaccacaccgacggtaccatgaaggacgaggtagctctactggctgctgtcaccctcctgggagtcctgctgcaaggtgggct

SEQ ID NO: 10676 - DNA, 1883 bp, Artificial sequence
  DNA replication origin
ccgaatccccaaaggcgctgggctccggcccgtcgcccgcccccagcttcggtcccgctccccaggagccccgcccgcccgcgatctttccccggccccgccccgctccccgcccggccctcacctgagctgcgcggagcgcgcgtagccctggaagtagcggaggcgcgcgaacaggtagaccaggccgcacagggccgccgcccctgcgagaggtacgcacgggcctggtgagcgccctgcgcgggtcccgggggtccagcgcgtgcgcccctgccccacaccccgaccttcatgaaagaagatgccggcgacccagagcgtggcgaggaacagcgggaagtactcgctgcagttcaccctgcggtgggcgggtgggatgagcgcgccggccgggatggtcctgcgacccggacccgcctggggctcgctccccgccccgcgccctcccgccgcgcctcactgggctcggtagacgcgctcgaactcgggtgggccggtggtgagcggcggcgacacgcggaaggccctgcgcgccgagatcacctgcagggagaagtaggctgggggaggagggggagcgggagtcaggtctggacacccgaagccccagagatgggagtgggagggatcctgcaatctggcccttcacttggccgtgtcctctcctccctaaggcggaaccccgccccctccccgcccgaggagacctctcgtctcacccatccctggcctgccctgtgtccctgacattcagcgaggagggcagggctgaagcctggggcgcagagaggccctgtcccaacctgtgagtgtatgggggagggtgagtgattcaggcacagggacacctgctccgcgagagagaccacttgagtccttgtttctgaatcatttcactctcaaaacacaggcaaatgcagctttcaggtccctggccaggaagtgcctcgggagtctgagggcagagctggctgcatcctcccaggtgcaaggaagcacactccctgtagctaacagtccctggtcacccacctaccagcgcccaccagcagggccctctgaccctgcctcaggccgggatcactaaagcctgcgtccctgtgcctccaaacctcagtttctctgttcctgcattccggtcccaggcctaaatctgacagacaccttctctcctgctcccaggaggttgcagctgggactctcctagcctaaccccaggaccccagggctggggtagttgcagagggtgggctggccctaaagtttctctgtgggcaggagcccttctcttggtcaggtgaggccaggccagaccacacacagaccagtgctggctgtgcgctccctccccagacctcccgtcggaccatctccccctgagtcctgcagccctggcacctttggttctgggccctctgcagatgggtgtcacagggtggccatccagctcagtgcaggagcagctggaggtcaggctggcctgtctgttcagccccttcagagccccctccccaggctgtgccttatcctagcccacacactgtggagtagtggtgtctcttaggtggcaaggatatctggccaaggaatgtgtcctttagggccagtctgagaaaggcattaagcaggctctttttagggggctggaggaaggagtcccacctctaccctgctccacgtggtcccagtatggaggtgcctttgaagcagagccagggaatgggggccgcttgctgggacgcccagagaggggacagctggaaagagcagagatcagcttccccaagcccatggctatcctaccatttgtcctggcacccttgccacccccaagtcctacagctctcacagccaggtgccccccagttccctgaaagtcc

SEQ ID NO: 10677 - DNA, 1313 bp, Artificial sequence
  DNA replication origin
ggggcgggcgacgggccggagcccagcgcctttggggattcggtgggcgagccctggcggcggccagaggaagtccccgtggggccagggttgcggcggggaagaagcgggcctcctcgcgccacctccccgctgaccgccgcccgcaggctggcaccgctgtacgcgagcgcgcgcgccctctggctgctggtggcgctggctgcgctcggcctgctcgcccacttcctcccggccgcgctgcgcgccgcgctcctcggacggctccggacgctgctgccgtgggcctgagaccaaggcccccgggccgacggagccgggaaagaagagccggagcctccagctgccccggggaggggcgctcgcttccgcatcctagtctctatcattaaagttctagtgaccgagacccgggctgcgttctctgggtccgcgggggtggcgcaccgcgggctacggagcctggaggggcccagcccgagtccgggcagcccggggcgggcttcctagtggcggcgtgagagtggctgcgaaggaacgagccctccccctggggcgggactggatccggtcttcacctcctaccccactccctactcagcctcggggtcacaaggccgcccagtcctgccggggttcaccctcctagcgctcagcggtctcctcaccggtccccctcctcaggggccttccctcgactctcagccgccgcagtccctcgtcccctggccttcacagctgacactagatagagcctgtggctctctccccaggtgagggcaggggtttttcttttggtcagcactggatccccctcgttaactgtaggtgttcagggcagccctccgaggtccgcagagctgcgggcaccatgggaacgaagtgagtcagtgacaggcggtctcaaggaaatgtccagaagccttggggatccaggggaggcccacagaaacaaagaagtgacttttagccaagtatgcaggagaaacggagaaaggagagctttccaaggaggggcaacagtgtgtgcaaaggccctgaggtgagcgggagaccctaatgtgccagaggagtgtcggggacccaggatgaggaccaagctgagacacacggaggggaacaaggaggctgggaaatgccttcagcttgaggagctaagggaaggcctcatcgcaggccttggacatgggggagacattcgggggacctgctataggcattgtggtcccagattctgagctggtttcaccagtgacagactttgcggcctgatcctaggaaggggggtacgctggcgccgaggtggcactgca

SEQ ID NO: 10678 - DNA, 3922 bp, Artificial sequence
  DNA replication origin
gcccagtgccaggcttagttggcatgttggggcacagaccaaatgaagccaaccgcaggggcagagggagatgcccagggcgctcacatttgaggcacacacttcattaaccctttattacaagtcacgctcttatagaagtatatgtggacttacgtgaaaaaatcaaatgtatccaagaataaaaaacacagcacataaagtagtatatgcattccagtgttcgcgccagagacggcgggcgcccaagtaaaagctcttctaaaacggcctgactggggcaggccgggtgcgaacggttccgggcctcaggcacagtgtgggggccgcctgcctcctccgcggcccggcgggcgggggcagcaccagctcctagggcctccgggccagcggcggaccccaggccggcccaagcccgacgccaggcagaaccctttgggcggggccgtatctggccctccggggacggcagtgacgacacccccagaaatgtgggcttcagggctggccacagggtaccctcagaagcccgcagcttagtcggcctttttcaggaagatctggaagagccggacccagggtcagcagggcctctgagctccgccagggtctccctggctgctccccgtgcctggcctggccctgcccagcctcacctcgctcagaatcacccacacaggggagtccgtctggatcgagaggcgcagtgcttccagagggccgaaggctgggtccacctctccctctgccactcccttgtagaaggagcctgtgggagggcagtggtgagagggtgtccctgaaccccagcccacgctctcccccaaaccctacccaccgatctggaggtagccgtcggggctccgagggtaccggagggtggcggtgcggccctcctgcagggcctccttgtctgactgagggttctgggggcagaatcaagggctgaggcaggtggtcacaggaggcccggcttcagtgcacaccacacccaccgaacttacgtcgaagggcagcacctccacagacgtgttgaagagcttgtcctccgggtgctcgatgttcccactgcggaagaagaacctgcagccaggcaggcctgtgagctgctgcaggggcagcgttccagcacagcacccagggcccagcagagaaaggccaggcctgcgccaggagggccccccaggcagctgtcaggctgtgcaaagagaccagggccttcctctgggaggatggtgacaggaaacatccctgagctcctaggggctgcctgacttagtcctcacaaggtagctaccattacgaggcccacttcagatgcggaaactgaagaacgtgaggataacttgccggtgaagcctacaccctgggggccacccagccccgcccccatcgcagacccatggtgctggcactgaccgctccagtcttagaggttggaagaagcggaagcggatgaagtcccccgcggcaggggtgaaggcccagaagaagtcctcgcgcaggtaggctttctccagggtgaagtgctggtatgtcttcaggctcgtgctcacctctgctggcgggttcacatgctccttccgcagcgcctgctttccaaagtctttgtcctgcagcggaggagggacagcagtgatggcgtgggccccgaccttgatcccggcctagggagagcgtgcagtgcagcccaccttcagtttctggatcttgccagccagcgaggagtgagtgcccacgtgctggaagagggacggtttgaagcggatccgcaggttggctttctgccggtcacagtgcttctgtggagggtgggcaacaccccagggctcggcttagccctccttcctcaacacggcctctcctggggactaccagggccctcccacagctgacagtgctctatgtgagcagatgcaaggacagggacacagtttggggtggaggctgcctgccccttggccctgcccctgccagtcccgccagctcttgctcaccgcatccttctcggggttgcagactttcacccacagaatatggtccaggagccagtcgatgggcttgtcccggtagaacatgagaatgaactctacaatcaggctcaggtccagcgacttgaacatcttacctggtggggaggggcctgagtgggcagtgctgctctgcctacttcctttctccctgcagcggcccccgagtcccacagcaaacccaggggcaggcttcaggcaggtgtgggcataacggggcagggaggcagacaggtgatgagggcagacatgtctgatgcacaggcaatgagaacaggccaggtggggctgtagcacgcacaccaggcagggcccacctgggcaaaggctcacagtggacacagtgggactgggagagaggatggcagaggcaggtgggactgaaaggcaccgtcaggtaaggggaggggcacaccaatgaagcccagctgggagaactccaggatcatccagtcctctgaaggctgctgcagtgcaaagttcttcatggtgctcaggtagttgggcttggccacgatgtcatcctccagctgcgaggtgagcagagaggggctggggctgaggaagggcacccagatggaccagacccatcgcagggcagggcggcgcagggcagggcagggcaacgcagggcttggggctgacctgcacgtagtagatgcctttggactgcgcgtacatcatgaggaagcagtaatcgaggttctgtttggtcctccacctgtgggccggggcggggcctcagaagttcagacccctccacctccattgtggctccgcagagaagccgctgggtgggcagcttctgtccccccacccccatgcacgggtcctcccatggagaattcagggcactgcagggaaacaccctggactcaaacaccagtagatgggttctcagcacaggcaggcgggttgctgagggtatgggggagtaactagtacctgactctctccttggggtccccaaaggactctcggaggcgggagaagtcagggtagaagtggggggagggtgagatgacctccaggagcccagaatggatctccgtggggaacctgggggacgggaaggcctagtccgtatgcagcctccaggggctgagaggggccgagcccaccagactgtggccctttcttgaggctcacccagtgccagccccccaccaccccctacacccagccaactgaggtagcagagctccagaggggctgggccacttctgcacacccacccctcccccaccaggtccctgcctccccacgagataggaaaggcactatctcatggggaggcaggaacctgccagcacaacaccccgcaccgagctctcccgccaccagctctctggggtcgccagtactcacaaggccttgatgttctctgtcactgccgaagtgtactgtgagtcagtctgtggggagaccaagcaccctcccttagccctgctgctgccccaaaaggcctggaagggcttggagaaggggcacaggcttcagatgccccccacgtggagggagtgagcctgctgtgctgagggcggagtaagggggcccccagagacggccctttccctttgggactcgcatggccaaggactagggggtggcgggggcgatgggtaggggtagagggtgccagaaagccctttcaactttctatctcggagcatttgcgaatgaaactagcaactgaacttccgacagctttctcctcggaatggttcctgctgtcagttctgcaccgcgggggctcctctgaatgtcccccaaccccgcgtcccggctcactcgcctcggcgatcagcaccacgatgaccgagtcctccttctcctgcgggctcagctcggagatgagcgagtgcagagtgtcagtcaggtacgagtgcacc

SEQ ID NO: 10679 - DNA, 1899 bp, Artificial sequence
  DNA replication origin
tgatggctctctaggcctctgcacctccagtcccatccctgtgggcgagtgctgcctacacctggtgtcacccagcaatgggtgagccctggggatagccagctctgcattcaaggggttaggtttccagggtaaccgagcccctgagcccagcgtggagcctggcagagccagtaatctgactcccctttccctcccgccaggggctgtccagaggctccgctttgcctcagcctttagccccagagaggcagggtgtggagggtgggggctggcttcttgggtaagagatgcctcagggaagatctacctggctccctgctccttaaacctttccctcctgcccaggtccaccccttcctcttccctggtcacttggcacttcgacctcctgcccgtttcggaaaggggtgtgccctgaggtgactgaactttgcctgatcatgaccttgatcatgcacagggctgctggtggggtgaggccatcccacgcaactctggggtctgtgaagccaccaaggatcaaggaatggaagagctgcctgagtgtagagggagttcggtcaggcttcttaaacttggagacttggaaacagaaggccttgtaggccacataggttttcagagactcgcctggcagaggcctggagcgtcctgctgcgtggactgtgggcaccgagccaccaggaggttgttgatctcattcttgctcactggtccctgccagactggtggtgcctctctactgtcgggcagccccacctctgtgctgccccatccacctacagccctcatgcctgggcccagctggaggttctgacaggggccccctggggtggcatgcggacccttcagggtgccccaggcgcagcacaggtctccagagacacaggcaccagggcgttcagagctagtcccctcgctgctgttgactgtccttgagcagccccagggccggtttctcaacctcatttgctcacctgagcaatgaagtgaggtgggctcctggaactgcagcagccaccccccggggccatcgtgaggctaagaatccagtgcagggtgagcaaccagcgaccgctacaaggacagtgaagagctagcaccaggaccttgggtagcccacccgctggagggagcgtgtgctgcaaaaagcaagagtgggctttggaggccaacggatggagcggattcagtctgaggctgttccagcccttgcttaggatccacctacctaggtctggaaatcgtatttccacttcagatgccttctcagaggataaaataacccccggtgggggagagtactggaagagggctaattcccctggttttctccccatgagcattagtgtcagtgtaattttagagtgaccccagctatgtcacgtgtggcaggcacaagaacagatgtcaatgagctattgcagaggtggacacccagatgtgtgcgctggcacactggaggggcccgtagggtggctctagaccgccccctcgtgacggcttgcctaccacctgcaggcgacgttgtggacgtttaccagcgggagttcctggcgctgcgcgatcggttgcacgcagctgagcaggagagcctcaagcgctccaaggagctcaacctggtgctggacgagatcaagagggccgtgtcagaaaggcaggcgctgcgagacggagacggcaatcgcacctggggccgcctaacaggtgaggtctggggcgggagggggaaaaggcgggggcgggctggttgtaggttccctggtctcagtcccgatccttcccgacccacccagaggacccccgattgaagccgtggaacggctcacaccggcacgtgctgcacctgcccaccgtcttccatcacctgccacacctgctggccaaggagagcag

SEQ ID NO: 10680 - DNA, 3217 bp, Artificial sequence
  DNA replication origin
tgggtgctccggaccggactccgcgggcgcagctgtcccgacgctgagctggggacccgtggggttctcggagaggggcagagacccaaggtcacagaggtcccggaacgccagccacagccacctgggcaggagctggggcggcgtgagggacacaggcgcgagggcacccccccaccctgctgcctgctgccccgcgccggcctgggcgaccccggcgtgacacccggtcctgggactcccttcggcgcccagaacgcgtcggcagcatccggcctgtgggagggagggagggagggagggaggcgtcctgaggcagcccggcccctgctgccctgcgctcccgtgcggccccagcccgtcctccgcaccccgagcttcccgggctggcccccgccctccgcgtgcgcccagcgctcttgcaggcggagggtgcgggccgatccccccgcgccgccccgctggccggtcttggcgatggtggggccgagtagggcctgagccctcggaggcgctcttcccccggcctggaggttccgggagagtggcctcctgcctgcctgcctgctggaggcctaagcgggctgagtccagctgcccctcggcctccccgccacctgcttccctgtttccctgtcccggagcgccatcccagagaggctgcggaggagggcgagggaacctggacccttccggaccctccgagctccatctacccacgccgagctctgccagcacgcccgcctgccgcacttgttctgccagagcagaggcctgggctggccttggggctccagggccagagaggcatcacccagggactctgcggggagcctgcctgacacgggagggatggctgggcagaggccgtgctggcggggtatattatcaagggcaggcatggctggggcagaattctctgtaggtagggtgtgtcacctggggaaggacattctgggtccttggcagggtgactataaaagcacactggcatgaaggcctaggtggggccatatctgaagggctggggcatgctctttgagtcgtgggtagagccgtgagcccttgccctttgtcctgagccagtgtgtgcctcccgcagcagccacatgcccgcggattgatgtcaggagccacctctgcaagcctggcttaccacagggagccaggctccaggacagcagagtgagggagaggcactggctccatggcacccactgtgtctggggggcatccaggaggctggctctctgagggcctggggaacaggagagcaaagaaggggagcacttagattcacgagcccagcccctaggggatagaagcctaaggatcctgtgaggtatgagtatggggtgacataggcctcccttgtcgaggggctgtcactgtttctgtggtgacccagtagtaccaggtctttggaggcctcaagagaagctgggaatctgggctcttatgtgaacccatctcgttgtcacatgtagaaaatctgtcttaaacccctggtgaaaccagacgtagccagtcggaggccagattggaacctggcctccactttgcagccagcgggggtccaggaacttgagggaaggacccaggaagtggaatctgcagggaaggaaggaggtgggcagggaaccagagaggaagggcagcaggtgtgggcatcatcctggaaacgcaaggtcaagcccaggacggcctcttagaccaacgcaaaatggaccctggagaagggtttggggcccaatttcctatctagcccgtgcagcagctctgccagcgctcaaactgtggccctcggtcaagcacctgctgaggatctgcccagggaggcagacccttgggggcagcccggggtctcagccatgcagcgctcccagccttcaggctgtccgcctccccaggcctggacttcagcaatgatggacacccttactcctaggaggttgcagggtctggagaggaggcagacacctgccacacacatgcatggtgacagcagaccgttaacgggcctgatatctgcctatgcccctctgagcctgtcccttttccctgagtacaaggcacaaaggttgtgccccagcttggctctttaatctttccccaaccaagagggaagcagggggaactgtggtttgtgggccccaggatgtcctaatgactcgcctccaggggagggtgacacagcctccaggcctcattgctgctgctcttaacaacgtggtcctgaggcaagaaagtgtggcaggggctcccaggctggtccctctcctcacctgagctgcctccccagctcccgagggttatagggtgccagcatggcttggcagagccctggcatagggcctggcccatggggaggcagtcacagagttggacccacagtcagagaagctgagggcaaggcgggtggaggagctggcaggcgggggaggctgcccagggccagggcctgcagtgtgtagggaaatgacagaagggttggtgtgggcgggagcccgtggggccctttatctcctggtaaacaggacccgggggagaggggaggcccctaggaaggaagcgagggtaaggcgcaggctgttgccagggtgattcaggcagcatcacccaccactgcccacccagcctgtccatctgaggcagtcgtgtgggacagagaaagccagggtggggctcgggggtgggggtgggcagtggctgtaagtaggcaagcggggactggcatctaggcaggagggaggcgcacctgcaggtgcaggtggctctgaacccattcctgatggctctctaggcctctgcacctccagtcccatccctgtgggcgagtgctgcctacacctggtgtcacccagcaatgggtgagccctggggatagccagctctgcattcaaggggttaggtttccagggtaaccgagcccctgagcccagcgtggagcctggcagagccagtaatctgactcccctttccctcccgccaggggctgtccagaggctccgctttgcctcagcctttagccccagagaggcagggtgtggagggtgggggctggcttcttgggtaagagatgcctcagggaagatctacctggctccctgctccttaaacctttccctcctgcccaggtccaccccttcctcttccctggtcacttggcacttcgacctcctgcccgtttcggaaaggggtgtgccctgaggtgact

SEQ ID NO: 10681 - DNA, 1442 bp, Artificial sequence
  DNA replication origin
ctgaaaagacgggggggcggcgacaaggagtagggaggggggctggaggaagacggcaaagtgaccccggaagggtccaggcgccccaagcccatcgaagacgggaggctctcagtggcgcctggggggactgtgggaaaagcagctcaagaaggggaatctggagcgaggtgggggagaggtcggcatggccttctctaggagcgccagcgccagacagagcggtgacaggccgcaccgggagtaccccgtctatactgaacgggtcaggagtgtgggatcccgtggaggggctgcccttgcagcaggagcgatggccctctcgctcccctccacctgctgccatcgaaaaccttctggaagaggccaggcgcggtggctcacacctgtagtcccagcactgggaggccgaggtgggcggatcacgaggtcaggagttcgagaccagcctggccaacagagtgaaaccccatctgtactaaaaattaaaaaaattagttgggcgtggcggcaggtgcctgtagtcccagctagtcgggaggctgaggcaagagaattgcttgagcctcggaggcggaggttgcagtgagctgacatggcgccactgcactccaatcttggtgcctcaacaaaacaaaacaaaacaaagaaaaccttctggaagaattatcctcctttgaggatctaacccttcttgctcccaatgcttcccagcagggcccgcaccccaggacgggtacttaccgcagtcccccacctccagctctgcacactcgcagcccagtgcccgctcttccccctcagcctcccgacgagactcagctcttcgacctccctgcgagtccctgtgcacccactttgttctgtgcctgtccctgccctgactatgtgggctcaggtagttttgtggggtgtgtggatgttgcgtgggagtgtatgtgtgccccgtgtgtcccatgtgttataaccctgatgctctggagcagaaggcgtggggtcatctgtggataaaggctggtattgaagcagggtcccccacctgtgttaggccaccacatactcttgcgtaaaagtagggtgaggtaaaccccatggccaaagcttggccaaccagagcactgtagcaccctggtcagggatggacatgtgacccacgctggcggacgaaatgcacactggggtcatctggaagcaggagccttggggaggggggaatcctgagcagatcaaagcttgatctcagtatctgacccctggatccaggctggcctaatgctgggttataaaacggcttaagccagttgattgtggttttcgtcaattgtatccaagagtagtgacccatgacgtataccccatgcctgctccaggttttcttttctttttttttttcgagacagagtcttgctctgttgcccaggctggggtacagtggcttgatc

SEQ ID NO: 10682 - DNA, 1261 bp, Artificial sequence
  DNA replication origin
gaagcacagaagagggagtctttgggaagctggggtggacacccggctctggcccttccccgcacgccttgcggccccagcggccgccctgcccccacgcgaggccgaggcctcccggaggtaaacaaggcgcggcgggaaccccctggcagggccctctcctcccgccgcggaggtcaggtggtctggccggcagtgagtcagcgtcccatgaccgctgtcgtaatagggggatccccggcccctgctgccacccatctcagtgacctcttacctggaggctgggctggggagtggctccggggtcaccgtgagtcccctgagcaggaagagcgtgcagcggctggagccagacagacactctcccccttctcgcctctgactccttcccctttcccgatgcagtcccaccccgcaggctccccgcgtccactggccccttcccaccctccagggcccggcgtgcatgcccagggaaggctcggcacctgagccgcgagacccactatggaccagcctctcatttcctcatctttcaaatggggctgaagtggaaggatttgggctgccctcccaggcgatgccccgtgggtgtgcgagttgtttagctgcttttggggctgtaagctggggggtcagggcaggacagagactgcaggggggctgaggtggaagagtggggagggcaggagaggcctgagccaagcgcccagtggtcccaggagaccagccggggcagccacaggggtggtctggttctgtctgttgctgcccagcatgttgtaaccacctcctcagttcccccttcccccctcccaaataatcctatgccttggcagtggtgttcccaggttcgcttcttttctttggggcgtggagtcaagtgtccgcgtgggtgctggggcagccagagacaaggccactgagggattcaggccgcactgctctgggccatctttagggagattgacaatcacaggggacacaggggatgagttcctctacagaggtcctggtctgtgcgggggcctccaggccttctgcgctgcagccactcccttccactcacatgggagggccacagccctcccttgccatcttcctaatcatgccagctcattctacctggtgacttttccctggctctccctctggtccaaaaccctttccactcctgccctacatggcaacttcccaccctaaatgtctcctcctcagcggggccttccttgaccactccctaggaaaaatccccaggcac

SEQ ID NO: 10683 - DNA, 1617 bp, Artificial sequence
  DNA replication origin
accccctcacggcccgccaggcgtcgccgagaagggagggggcagccaccccgcggcaggaggccgtgtccggcctgcgtcaccgcccccgccgctccccggcccgctcaccgcggtagtgcgcctggaagccgccaggccgcagcgcggggaacagggcggccacccggctcagcagccgctcgcagggtcccggacccgccgcagcctcggcttccgcctcaggctcggggctgcagcagaagctgaagcggcgaatctcgcgcgccgcgtcctccttgcccagaaggtaggccttcacggtgagcgacgccatagcgagcggcgagctggcggaaaacgggccgtcccggtcgcagccgccgcgcggcttttgtagcgaacgcggaggccccgccccgcctcgagaggggcggagtctctcgcgccctccccgcccccgccaccgtcgtcgcggcgcgagagccgccctgcagaggccccttcactactctccccttccccgctacccctcgctccaggtctcccggccccctcattgctgacccctctcttcattgccccggtgcaccaaggaccccaggaaaccggccctggcactcatacaggcctgggctccagcctctgcacctgggatcagggtactggcgggggtccagcccctcgcccctcccaggcttgggcctggccatgactcagcaatatcctcagttgggggtacccagtgcagggagagggggacacagcccccatatcaggaggctgctaggtcgcccagtgggcactgctggccagaacaagctggctctcaggttgctgttccgaccctgccatggtcagcctgccgcggtggcagccctcttacagcgcatggcatcctcggtgatgggcagcgcatagcatactcggtgacggaccccgactctggcctgagcaccagagaagttcccagtttagtaggagtggagttgagaggtgctggaggaccagctaaggtctcctgagtgtcagtggtcgccaagtgttcactgtggtccaagtgactccttatgggctcctcaattcagcaggtaatgcccatggccctgtgggggctcaggcccgttggccttgtgggcagccaagggggtcagccaacagcctcctcagctaggaaggaagaaacactgctttatgccaccagagtaacctgtccgccagaactggggcaaggagaggggcaggacgagtggtcaccctctggagcctcccaggcaaggtcctgtgagtaggaggtcagaacctgctgggtccaactcatgccatttcagcccagggcttgcaggagctggagaaacctcccaggggaggaaacccagagggaggcaagagtggctggatggggccagtcaggtgcgaaggtgatgtgtgggtgtgcgcacagcaggggctggtccacaggtgtgaatgatccttcccggagggctccgaagtgggcaaggcttccaccctgcccagagcagccctgtggagagggttcaggcctctccctgcatccggcggtggagagtggaaaatgccccagggcctgctggagccactgccttgcagacaggggcaggggacacagaggggcgt

SEQ ID NO: 10684 - DNA, 1850 bp, Artificial sequence
  DNA replication origin
gaggacgcggcgcgcgagattcgccgcttcagcttctgctgcagccccgagcctgaggcggaagccgaggctgcggcgggtccgggaccctgcgagcggctgctgagccgggtggccgccctgttccccgcgctgcggcctggcggcttccaggcgcactaccgcggtgagcgggccggggagcggcgggggcggtgacgcaggccggacacggcctcctgccgcggggtggctgccccctcccttctcggcgacgcctggcgggccgtgagggggtctgcgctggctgctccctggatggcggtggcctgcatgggtccccagttcggccatgggagccggcctggtgactggagtggtgaccaaggccgggacccgctgctcagcgtcggccccctggggcggtggagccctgccggccgggggctcgagcctgggggcgtcagacgccccgctccaccccccgcgctgttggggattttggcaaggacgcgccggggcgaacgctctggctctccgcgggcactgggtggtcaggcgggcactcgggttacactgacaccttgctgcgccaggtggtgggttcagataatgccctggaggagccgggcgagcgccggcgaggggagggagtgacgcgggtaaacaagcgcgggggtgcgggggactcgcgagcgccgcgacagcgcctgggagaagggcacggatcgccggcggaacgctccgagccaggtcgagtacagatgttttcccattggcaagtggacgagaacgttcttcagaagtgttggtgttggcacagaagccctgtttcctgctgcgctggtgtgaccagtggctgctgggggtggggttagggaggtggttgtggccaggagggcgggaggtggccaaggccggcccctgggagggtgcagtgctaggacctccctctggagcgctgccagcataccaggccctctcctattcttaaaaaaaaaaaaattgtgatgttattgagctgtaactgaaataagggttcacccatttagtgtacaagtcagtggttttcactattttcataggtttgtggaccatattcagtgtgagagcttttcatcaccttataaacgccatacataccttttatcaccctcttatccacatgcccccagcaacctcctttctgtatctattcatcttgcaatcctggacatttcatgtaaatagaatcagacaatgtagtcttgcaagtggtttctttcacttagtgtaatgtgttcagtgttgtggcacatatcagaactagttttttttggaggaataatattctgttgtgtggacaggccatgttttgtttacctgttcattagttgacagacatttgggttgtttgcatctttgggtgcctcacctgtgccctcggtggatggcgtggtttggtctgcacagctgtgctttaaagccatttcagctcatatgtatctgtcacaaatggagactacatacaaatacgtgtctttcagctttgttagggaaggaagcaggcagatgcccttgtcttctcctttactcccaagccactagaagtctaaggcctttgtggggctgggcccctcaggagcaggtcacaggcagggatctcccacagttgaagacggacatgggcctggtcggatggggaatgaggtggcacgtttctgaaaaggcagctggcccaaggctaaataagtgcagcagccaaagctgctgcccctgtgcacaggccctccgccccctgcatgtggctgtggtccagggcccaggtcggagcactcaccttccaggaggtgccagagcaagggggtagtcttgcctctcactcctgccct

SEQ ID NO: 10685 - DNA, 976 bp, Artificial sequence
  DNA replication origin
tgtccctgggtacttgagattagggagtggtgatgactcttaaggagcatgctgccttcaagcatctgtttaacaaagcacatcttgcaccgcccttaatccatttaaccctgagtggacacagcacatgtttcagagagcacggggttgggggtaaggtcacagatcaacaggataagaatttttcttagtacagaacaaaatgaaaagtctcccatgtctacttctttccacacagacacggcaaccatccgatttctcaatcttttccccacctttccccgctttctattccacaaagccgccattgtcatcatggcccgttctcaatgagctgttgggtacacctcccagacggggtggtggccgggcagaggggctcctcacttcccagtaggggcggccgggcagaggcgcccctcacatcccggacggggtggctgccgggcggagggtctcctcacttctcagacggggcggccgggcagagacgctcctcacctcccggatggggtcgcggccaggcagaggcgctcctcacatcccagacagggcggcggggcagaggcgctccccacatctcagacgatgggtggccgggcagagacgctcctcactttccagactgggcagccaggcagaggggctcctcacattccagacgatgggcggccaggcagagacgctcctcacttcccagacggggtggcggccgggcagaggctgcaatctcggcactttgggaggctaaggcaggcagctgggaggtggaggttgtagcgagccgagatcacgccactgcactccagcctgggcaccattgagcactgagtgaaccagactccgtctgcaatcccggcacctcgggaggccgaggctggcggatcactcgtggttaggagctggagaccagcccggccaacacagcgaaaccccgtctccaccaaaaaaacacgaaaaccagtcagtcgtggcg

SEQ ID NO: 10686 - DNA, 1031 bp, Artificial sequence
  DNA replication origin
gtggggaggcctgctgcagcccagggaatcagcttctctagggacacagtcctggggatggagccctacctctgtcagctgacctagccccgccagagttcatggcctctctgggtccctgggctgagcctgacactcaggtgggaggaggtagctgactccccatgcccatagccctggtcatatccccagtcagacccctgctctggaggaggccctatccgcctattgtaggaagcggcaggaaaaccagccacagactccggccacaggctgagtatcttaacatcagtgtggaccaaaagctacttaggcccacagtagggaggtgacaaccctgctggatctagagagtcccaggcagcacctggcctggccatgggcaagtggcagagtcccaggctgttcctgggggctgggggcattccagtccggacaaatacgctatgtaggagggtgggactgcacagagctcagggcagggcagagtgtagccaggaggggccggggcttgaaggccaggctggaggctcagacagtgcctttgtacagaggacccagggaaggggcagggccaggtctgatcagagtcatgggatgcaggcaggtcaaagactgagaggggaaccccagggaaagggcatggtgggcctgggctgaggcagcaggctgaagggaaggggctggatcccagacagaatctgcaagagatgggatgtggggactaaggagggggtggaggggctgggatgaccctggacatttggcgtgactagtgggacatcagctcatccagctgttccagcgggcccagggcaggcctgctccctccagggcatgggggctgcaatgcagctgagcttggagaggtatgaccgggaccacctggtggacatgaaatgcccagctgtgccaccaactggaattgtggtcactggatcttggctctggtttgccctcaggggaagcatctccaaccctacatctgagcggtggccctccagccagcatgctctgcccgcagtgcctgc

SEQ ID NO: 10687 - DNA, 1674 bp, Artificial sequence
  DNA replication origin
ggctcagcgcggcctggtctttcccgggaattgcgaggaaggccacacttgctggccagcactgtctggagtgttcacgaggcttccgcggtggcctaggcctcggcactcagatgcgcttcggcccccaggctccctgatgcgcttttccctcaggccaaggagaagatgaaagaggagtcatggcacatccacttcttcgagtacgggcgtggcgtgtgcatgtaccgcacagccaagacgcgggcactggtcctgaagggtatccctgagagcctccggggagagctgtggctcctcttctccggtgagtggggtgcagccacccccagcctcagctcagccagtcagtccccaagctctccccgtgtgagctcgtctgtcctgagccggcctggagttggccaggcaggagctcccagctctttcacacagccgggagccgggctctgggctctgggctctggcccgggacccaaccagaaggagcatctcgagggacagaggctggggaatgggcactctgctggccgggtggtgccctcccgcccacagcgggagggaaacaggtcccctagaggcctcctttccttgggacaggctctgacagcattcacacccgtggttgctggaagaggcaagtcagccacttgaactttcgggtagagcaccctccccaggagcacaagggaaaccttgcctcgcagcttgtgcttgaccccaagtcccacctctcctctgtggggcacccggtgactccaacctgccctgttactgcccccaaagtaccagaagaaggacagagacagctggcacccgtgtctccccaggggcctggaatgagatggtgactcaccccgggtactatgctgagctggtggagaagtccaccgggaagtacagcctggccacagaggagatcgagcgagacctgcaccgctccatgcccgagcaccctgccttccagaacgagctggggattgctgccctccggcgggtgctgactgcctatgccttccgaaaccccaccatcggctactgccaggtaaggggcctgacaggggcccagagacagcatctgccaccagaggttcacaggagcaggtccctgtggtcccaggcctgtgtggtgaccctgccttgtgtcccaaggaaggagcccagcagaaaaagatgtaatttaaaaacagtattaattgctcatcgcatccccatgccgaatagaagtcgtcgtctttgtacttttgtctgagtcccagcagcatttgattgttgtatgtgtttggtgaaacaggcacatacagaacataaaatgtcccatcttcactgtttttaagcgtgcagctcagtgctctaagcacattcacactgttgcacgcccgtcaccgccatccatccccagacctctcttcatcttgcaaaaccacagctctgtgcccattaaacatgccccgatcaccattagcaaccactgttctactttccattgctatgaatttgactactgtgtctcatataagtgaaataacacagtatttgccttactgtgcctggcttatttcacttagcaagatatcctcaagggtcatccatgtcatatgaatgtgtcagaatttctttctcaggctccatcatattacatagaccacattttcttttcttttcttttctttt

SEQ ID NO: 10688 - DNA, 878 bp, Artificial sequence
  DNA replication origin
agtcagcaggggtgagtgctgggaagagggaaggctgggtggtcccaggggaggcggccactgagctgagacctggtccagccaggtgagtgctggggaagagatgggtgggggcacagcagtcaccctgcagaggggagtaggactgcctgagggaggaagagaaggccagagaagccaggacagtgtgagctgggcagtggtggaggtgagtgtgcactttttttttttttgagacggagtctcgctgtcgcccaggctggagtgcagtggtgcgatctcagctcactgcaagctctgcctcccgggttcacgccattctcctgcctcagcctcccaagtagctgggaccacaggtgcccaccaccacgcccggctaattttttgtatttttagtagagacgggtttcaccatgttagccaggatggtctcgatctcctgacctcgtgacccacccgcctcagcctcccaaagtgctgggattacaggcgtgagccaccgcgcccagtctgagtgtgcactttttatgtctgtgtgtgaacatatccatggggtgtgcctgggcgcaggtctgagagggggagaggcgcacagaaggcctcacaggtcacaggaggcaggtgggagaggcgcacagaaggtctcacaggtcataggaggcaggtgggagaagactctagaggactctaagcagggtgccaacatgctcccactgacatttcgaattttgctggttgctgtgggaggatacgccataaaggggctaagtgtgttaggccgggtgtggcggctcaggcctgtaatcccagcactttggacggctgagggaggatcacttgaatcctgaagtttgagaccagcctgggcaacatgatga

SEQ ID NO: 10689 - DNA, 1279 bp, Artificial sequence
  DNA replication origin
attaagcagtctgtggcaacgctatctttgcttttatattttaggtaatgctatctttgtcagtgtcactatttcctgacaaatcagcaggaaatatatagcttttatcattgtttgattcactaattgaattatcgagcaatctaaaaacctgtttattgtttttacttgaaattttttcttccttttaacgaagtgctgcttttggcatgatctgaaaatattttgttaccatttttcctgttgatgtcagaacaatttttattgctgttattcaactttaacacttttgtttcatagtccattaatacttttttgagatagtctcgctctgtcgcccaaggtggagtgcaatggcgccatctcggctcactgcaaccttgacctcctgggttcaagcgattctcgtgcctcagcctcccgagtagctgggataacaggcgcgtgccaccatgcctggataaattttatatttttagtagagacggggttttgccatgttggccaagctagctattcagattctttaatgaaaagtctaggttggcatgtttttaatagatggcttggataaaaccacatccctgtctgctcctcttcagggaggacagtactcaggaggccacgatgcccatgatggcacagggaaggccctgtcagagggcacagcaggacacaccaaacctagcagtggggagagattgggagagggttcaaagaagggttcccttggggggaccctgggagctcggtcccaggggacacggagagtgaggtggaaaggagaagagcccgcaggaaggaggtgtacagagaccgggctgcacctgcacccgcccgttcaatgagacgacccacataagcctgccgagcacagcacaagtgtttcaagtacaccagcgaatatgacacactggcgcgctgatgacaccctggcgcgctggcggaagaaaaggtgccggtccctcgctttcttcatcgggcttgcagtagcttcgaggttagccacaggggctgccgactgaacagctggatctaggaggcgggtccagaacaggagcccgagatccttgaagcccactgggagggaacccgaagctgaagggaacactgagtgtttctgggaacagaacagtctcttccacatgaagaaacgtggcccaggagaagcctccgtctgcatctggctattagctgctcacactgaaaatcaggatgattcacagaaaatgctcttgataaactggacgacctggcaacactgggaccgcaatcctgt

SEQ ID NO: 10690 - DNA, 1016 bp, Artificial sequence
  DNA replication origin
cccgccccgccccggcccgctccgcacgctccgctccgcacgctccgctccgggacgccgacggcggcgggcgcttccgtctcgcgggcctcggcccggtgcgagcggctccgcgatgtggctgagcccggaggaggtgctggtggccaatgcgctgtgggtgacggagcgggccaaccccttcttcgtgctgcagcgacgccggggccacggcaggggcggcggccttacgggtgagaggcgcgcgggcggccgggcctgtgggcgccgcggctgggctggcggcggggctggcggcgggcggcgggcgggtccggttccggcccggcctcggcgcgtcgcggcggacacgcacgccagcgcgcggcggggcgggggcgcgaggccaggacccgggagccgggcgcggaggggccggggcggggaggcgaggggctggcgggaggcgaatgcgccctcggcgggctctcctcaggtcggcttggggcggccaagtggagaccggcggcggcttctgcccggattcggcgcccgcgagccccgggggccgtgcagcttcccgggatctcaccgccgaaagttggcgagaccgccctgtcctcatcctccacctcagtttccccaggtgcctctaaggggccaggtgacgccagcgcacgttttcttttgccctcttcttcgtgcccatctcaccaaagtatcgcccttttagcaagatcagaggtccctggagctggccgcacccccattcccccagcttctcctcccccacctttcctgctcctggctgctctcagagctgcgcacccaaggctgtgggtagcggcacagggtgttcctgcaagctcgccaaggtggccctttgtgggcccgggtgccaccatcacacaggatgaagctggacaggcacccttggagtcgtgcggcctgtgggatccaggggaggcccacaggccactccctccgcaggtggtgtccggggcccctcatgctccagggcctgcgcccagcactgc

SEQ ID NO: 10691 - DNA, 1860 bp, Artificial sequence
  DNA replication origin
cgccgcccgccgccagccccgccgccagcccagccgcggcgcccacaggcccggccgcccgcgcgcctctcacccgtaaggccgccgcccctgccgtggccccggcgtcgctgcagcacgaagaaggggttggcccgctccgtcacccacagcgcattggccaccagcacctcctccgggctcagccacatcgcggagccgctcgcaccgggccgaggcccgcgagacggaagcgcccgccgccgtcggcgtcccggagcggagcgtgcggagcggagcgtgcggagcgggccggggcggggcggggccgggcgggcggcgccccctggcgggcgtgtggcgctcccgcacgcggcccgagttccgcgccgccccctcagccccggcctcgggcgcgcgccagcctggcctcctggagcggtgcagcccacggcctccggcctgggtccagaacggaacggcccagtccgcagacaggggagccgctgtgcagagcagggcttctggcgttttgaaagctgtgcagtgtgagagaaggatgtcaagaagcagagtttggcggcttttggctggttgcgcgtgcaacccggggcgtgttagcactgcaaagggcgcctggaaagggtttgcagttcctcctaattctcagctttcttttcttttttttttttcgacagagtcttgctgtgtcgcccaggctggagtgcagtggcgcaatctcagctcactgcaacctctgcctcccgggttcaagtgattctcctgccccagcctctttagctgggattacaggctcccgccaacacgcccggctaatttttttgtatttttagtagagacggggtttcaccatgttggccaggctggtctcgaactcctgacctcgggtgatccgcctacattggcctcccaagtcctgggattacaggagtgaaccatcgcgcccggccagttctcagaattctgacactggggccgggagactagaagaatcttccagcgcagggcaggtgccaggaggccctgatacgggctgcatccttggaaatcagtgctgcccctcccctgacagacgggtcacagaggctggccggccctggggatggggtctggactggccctgggcccagtggcggcttctgcgcaagtgtgaggctggctgcaggcgaatgcgggtccctggtctcccagtgttggcctgcaggggcagcgccagtccacacacagccttctgcatgagggggctgtcaactccacctgggacaacgggcctggggcctgtccggggtcgactgggatgtggggtcaccctgctggctggaaccctcaccagggtctggctagagggcaaagggaagggggcagttaaaccatccttggagctggacctgacttccaggtgggtttctgtgattggcactcaagaatcttggtgcgatggatgtaggtacatgcagttgacacccagagtgatctgcagtcttcttcaatgttgctggatataggaatcagctttcaagatgcagaggcgggctttcttcaacaccttggaagtctgaactaatattgtcattgtgctctctagagggaaagaatttggaagaactgcactttttaacaccctgagaggaggtaaagagtcgtcttgttccttaatcccagtggttctcaaattgggtatacattaggatcacctggaaggctgattcaaacaggctgctgtagtcccagccacttgggaggctgaggtggtaggatcacttgaggccaggagttcaaaatcggccagggcaatatagcaagactccatctgaaaacaaaacaaaacaaaaaacagccacacaggttgctgccccctcc

SEQ ID NO: 10692 - DNA, 980 bp, Artificial sequence
  DNA replication origin
gcgcggggccgagcccgagcgcggccctcctggacgccgcggccccgccgctcgccgccctcacgtccactgcccgcctgtggggacgcgcccatgggccctcggcgagggcggcgtctcaggtcgcacgcgggcgtctcttcggggtcccaggagggttgtagaagcgtgccccctccatccccccgggtcggtcccaccgaatgggaggcgcctcgcaaggacgcggcgggggaggggaagggcggcacgggaggaagcgccccgaggagggtcagcggaacacaaagtccctctcgcgcggctgccgcctgaggcgcgtgtccgccgccgccccgcccccccgctggtctagcggcaacgcgcaggcctaaggcgcagtcccgccccgagcgcatgcgtgccagggcctgtccgctcccgcccgcctgcacgagggcccgggcagccgggtcagccgctggtgctggttgtttctctgtcaggcgtgatagccgcagggcgtggagcccgggagatttgcgaggacgtatggaaatgtgtgagaacagactacaaaggaaaaaaagccataactttaaaagaaatgtttaaaattaaatgtcatgagatttaacattcacgtcatgcggttgacatcatggatgggggatgtctctggcccggacctgcagggacacgagtggttgggaaagacctctagggtagccgtccctaaccattttggcactgggggacgggtttccaggaagagagtttttccagggactgagggagttgaagtggtttccggatgaggctgctccacctcagatcatcaggcgttagattctcgtaagaagtgggcaacctaggtcccaagcatgcgcagttcacagccgggttcacgttgctatgagagtctaatgccgccctgatctgacaggaggcggagctcaggcggtgatgctcactcacctcctgctcgcttactggttcct

SEQ ID NO: 10693 - DNA, 878 bp, Artificial sequence
  DNA replication origin
ggggctcagggacctgcaaaagaggaggaggcaggagcagaggaaagatgcatgtcaccttgagtgtgactatgggaagccccggtggccagcagaagcccctctgccccacaccatggttaggagcagagctgtggaggtgacagaccctgcagtccccgcctctccatgctgttgtccatgagcagttgcttagcctttctgagcctctgttccccacttgccaagggggatggtgacagcacctagctggcggggtttgttaggctgtaggtgaagtgctggcctgaggctcggtgtcacggggaagcgtttgagtttccaggtgtgaagtatgagcttccagctgaggcacatcccaaatggggctcttgactgagatcccagctgctcacctccttgacccatgggtgggtgagtcagtggtcgggagctagaaactggggagggcattgctcagagggtgctgtgggtacatgggggcacttccaaggggtgagggggttgcccctcctggagaaccactcaggagccctgcagggttgggagatgcagaggcttgaggtctgatgcctgcctgagggatgtgaaggatgaggggccatgtcagcgtttgtttatctgttcctgagttgttagggaagagactgtgacagtccctggggcagccctactcacacctctgaggttatctggggttctgctctgggggctgcatggactttgcggagggctggatgcggctgggttcccaggctaagttgctggccacgatggagatgcctgctctggtctaatgctggtgacccccacattcccatgttgaagcagaatccccagtgtgagggtattaagaggtggggtcttttggggagtgg

SEQ ID NO: 10694 - DNA, 3358 bp, Artificial sequence
  DNA replication origin
agtgattctgctgcctcagcctcctgagtagctgggattacaggtaggcactacaacgcccggctaatttttgtacttttagtagagacggggtttcaacatgttggttaggctggtctcaaactcttgatcttctgatctgcctgcctctgcctcccaaagtgccgggattataggcgtgagtcactgtgcctggcgagggtgattcttatcatcatccccactttactgaggaaagtgagccagacaggtagatggttctgatttagaattctaaaggtgtccaaactgtgtccggggaggagcctggccccgggggtccttgaggccccagcttggacctcctcaggcccatcctgtactcctggagtggcaatgggccagccagggggatggagccctccttgttccctcccggagccagcccaggtgggcagggtgcatccctaacctactcagagcaggggtcctgaatggtgactgagaggctaccccagagttccgtggcccagtaggcaggagggctgcagggctaccttaccatcctcactgaagatgggggcggtgtacaggtagtgggtgatgctggcgtcttgctcgaagggacactccacttgtttccaggtgatgaactcccccacctgcttggccagctccaggaatttctgccagggtcacagagacacagaatggaggcactccagtgcctggaggtccccatgagggggaggggctggtcctggcagagaccctctcaacacccagtggctttagggctctgaggaggagcagggggcgataaatgagggcgagagcagtcctggcctgcagcctgtgtggagcaagagtgggcctggttttatgtcattgtatttactttgttgttatcctctatgtatggcaagtgatacatgtttgttgatttatgtaattatgcaaatatatttaaataggtatatttaagtaagacttaagtaattcatttaagtgtgattttatttaagtaaaatgtaaacacatgtatttaatttttaaaaaaggtgccaactttaaataaagagcagtgcacagttgtgaatggcagggacccccgctccacgacaccctttgatctgccctggaagccaggtccagtcccttctgcttgctccccaaagctgggaccacacaagcaccttgtagtcttacctgtccctggcctcagctctgaggatcaattcaggaagggctaaggcagggggttcccacgcctggctctgggctggtgtcacctgcggaggaggatcccagttccctgggcccctgcagtgtcttgcctaagtcccatcttgtccacatcacctccagcctgggctaacctaacaaacaggtgaggcagcctgggaccctctaacaaggcctgtgggtagcatgtgacggtctgctggggtgtctgtgaggagggcagctccaggcccaagcgtctggccatgtgctgtggttcccagctgcaggggacactcacagcccacggaggccatgctgcacctctacccccagcccctctctgggctatagatgaagacccatcttacacagggagagactgaggctcagacagagcagtgactggtgactggcccaggacttacggctccttggagttggaagctgggtggggcctcgcacccactgtgtcacccactgctaaggccaacgctagggtggggctggctctcagtgggagaagagccccctccttcctacagactcggggtccagctgctgcatggcatgctctgtctgactcagtgtctgcctagctcacagctacgccgagacacgtgtgctgggtgggcccttttggaggtcaggatacggagcgggtcagcctggcctttcttctcaggagctcagggactcgggtgcagtgactgaggatggatggagggaccaaggatggacggagggaccgaggatggacggagggaccggggatggacggagggaccgtggatggacagagggatccgggatggacggagggaccggggatggacggagggaccggggatggacggagggaccggggatggacggagggatccgggctggacggagggaccggggatggacggagggaccggggatggacggagggatccgggctggacggagggaccggggatggacagagggactggggatggacggagggaccggggatggacggagggatcgaggatggatggagggatctgggctggacggagggaccggggatggacggagggatccaggatggacagagggaccggggatggacggagggacaggggatggacggagggaccgaggatggacggagggaccgaggatggacggagggatccaggatggacggagggaccggggatggacggagggaccggggatggacggagggaccggggatggactgagggatccgggatggacggagggaccggggatggacggagggaccggggatggacggagggatcggggatggatggagggatccgggatggacggagggaccggggatggacggagtgaccggggatggacggagggaccggggatggacggagggatcggggatggacggagggaccggggatggacggagggatccgggatggacggagggaccggggatggacggagggatcggggatggacggagggatcggggatggacggagggatccggggatggacggagtgaccggggatggacggagggaccggggatggatggagggatcggggatggacggagggatcggggatggatggagggatccgggctggacggagggaccggggatggacggagggaccggggatggacggagggattggggatggatggagggaccgaggatggatggagggaccgaggatggatggagggaccgaggatggatggagggatcgaggatagatggagggatcgaggatggatggagggatgcccagcctgctgtgctttgggaggcctgacaggtgggctctctctgcctggcaggtccaggggggcttcctggaggaggagacacttgagctgagagtggtgagtgtctacagagggagcagaattctttcttttctgttcactctggcctcggcctgatagcgtcctcctgctactcaaggctccgcctttgggctggtcctgacccccagggcacagcccctgtcacagcaccttgctggttgtcactgtgggcccacggagctgcctttctcgccagcctggtgctcctcaagggctcagatggaccctgcttcacctgtgctggccgtgcggcgcagcctggatggacatgaccctgagcctcagcatctccac

SEQ ID NO: 10695 - DNA, 1117 bp, Artificial sequence
  DNA replication origin
gtgcgggacgtgggggtcacccacccagcgagggaggaggagtgggccaggaaccaggccgtgggccgcgctgctcgggtgggccaggaccctgggcagggaggagggtggagggccccctggcgcgctccgggaccccgtgcgccttcccggtgcgtttcggtgggcgccggtgccctccagcggccacgcggggaagcgcgggttgctgcccgctgcccgggatgggtaagggaactcctgggtcccggtgctcaggacacagcccacgcacccggatttcgatcccgcccttctgggagcccaaccagcagggtgccggtgcctcccacgggctaaatccaagccagaattgcaaacattgtgccttctgccctcacacctaataaaagtacaaactatgagattgcatttttcacttctcagataagcaaaaatcacctagtaggttagacacattgtggaagacacactccacgtggctgctggggtgaagctggcgcagccactttggaggggagactggcactagcatcgacgctctaaatggactttcttgaccccaattttccatacctacgaatttatcccacagatacacacccatgtacacgaacatgcacggacgaagatatttgggatagacaatgtttattatggccaaacactgggggcagattgccttgtcacccatggggactggattacaaattatgaaacgtctataactagaatggtgtgcagctgtgaaagggaataaggtggacagaacaacctccaagacctatccctccaggcactgagagaaaacggtagagggaagagcaggggcgagagtgtgtgaccatttgggtaacaaaaaaagagggtaacacaaaaccatgtatgttgcctgtgtccgtcagcactctctaggaatgctgactgctctgggaattcggaacaactgtggtgctgggaggcaggaacgggagggagattttttttctttttttgagacggatctcactctgtcgcccaggctggagtgcaggggcgcggtctccgctcactgcaagctccgcctcccgggttcacaccgttctcctgcctcagcctccccaatagctgggactac

SEQ ID NO: 10696 - DNA, 1063 bp, Artificial sequence
  DNA replication origin
cgggcagcgggcagcaacccgcgcttccccgcgtggccgctggagggcaccggcgcccaccgaaacgcaccgggaaggcgcacggggtcccggagcgcgccagggggccctccaccctcctccctgcccagggtcctggcccacccgagcagcgcggcccacggcctggttcctggcccactcctcctccctcgctgggtgggtgacccccacgtcccgcacgtccaggctttccggggactcgggactcggttgtcgtggtgcgcccccgagctggaggggcgtggcggagtgggcagggccccccgagcccacctgtcccactctgggccactccagcgctcgcccagagaaggctcgcgggctccccggagagcggccagtcactgggtgaggctcacttttgggacagcccgtaagagcctcctacctttgtgctggccagagggtccttgttcacaaaggcctggacaaactcctcaggcccgatgtgccgcagccgctcctgcagggaagggtgaagagtgggtaaaagagggaaggtatggggagggggtgtccactggggggcctgccgtggtgccccagcccctagtcctcctcacaacagtcactctgcaactgccctccccactggggcttggagaccctgttttaggttgtcacagagctcagcgccttccctggaggaggcagcccctcctttcccggttcatgggggcagggagcaatgctatgaggcgtgacgcccagggaagccaggctccacgctgggtaactgaagtggcctgcttcctctgcggggtggaggggctggtggctaggagcatggcatctgggtcagaatcaaaccctggctctgtcccttctgctgtgtgactttggcaagtcgcttcacctttctgggccttagtttcctctgtgtacagggcctgcctggccaggtgatggagacatgagcgagcgcacgggagcgcgctgaagagtgcctggagagcagggaggtcgccatcaaccctcagtctcaaagggaagaacccgccccagcctccctctccctggg

SEQ ID NO: 10697 - DNA, 1289 bp, Artificial sequence
  DNA replication origin
ggggtcatttcctcccacactagaataacagctccacagggctgcaaggtctgtgctgccgccgctgtgctatgagagcccagccctgctctgggcacacagtgggtgcgcagtaagtgctcacccccaccagccagctcagacgcacgggctcttgctttgggccacatcatgggctgggtacagggatgaaaggccgtggccacccctcaggggcacctcctctcccaccgtcaaggaaaacctaattatttcccctcggaaacccctatttccaaggaagtgccatcagactggctgggtttgttaaggtagacatcctcatgtcctcaaggggtttggtctaactcagagtgagatgcaaccccctacagccaggagccggcctgggcactggcagaggcagtggtgggagctggagcctggtccccagcgatggcgcaccttgactggacaggctgctgctcccagaggcctcgggaaataacgaagggtggcagtcggcatcatcaggtcacttcagagattgcagggagttttccttcatgcgattttgagacacacagagcctgcagtgagcggtgggcaggtgtggcatctgcatgctggctgtgagggtctgggggctccgattgctctgggggggcctcagccagggccctggggtgctgctactgtctgaggacgctggagccctgtgctctggtggcggggttgggagtcgtctggcactcctatggcagtgggcagctgtggcagagcctcagatgggaggaatgggacaggacgtggcttaaccctaagcctaactctcagagcacgggccaggtgcagaaggcgcccactggttagccgggcagttgtccgactcttctatctgttgcccatggaaggaacgacccctctaaggaaggctgtgtccaaaactgtggtcggcacactgcctcccagggcttcatctgagtgctgggaagatggggagtggggcgcagccactgccagccctggggggcacagtcagtcccccgtgggccctggcccttccactgacctcctgtctctctcccagacaacagcacagctggtcggggaaggccgagctgggcctgggagataacagaggccccattaaagccaagccaaatgccagtcgtctgcccagggcagggcccatgccatgtctcccgcctctctccctttctctggcttcctggccgtgcccaccccactctaccccactgccccagacagctgcccccggcccccgtcaccctccctgatgtgtgctc

SEQ ID NO: 10698 - DNA, 1362 bp, Artificial sequence
  DNA replication origin
ctgggcaacaggaagccaaacgcccacagcagacatcactcaggctctgagggaggcactgcccggggtcacttcacacagcaggcaagtgactcagaactgagcaggcaagttctgaggctcagtgaggtgagagtggtttcctcttcctcctccccacacttctcccctcctctgttctgctcctcatggcctcctctccctcctccgcatcccctaatccatctcgagattgtgacatttggcttaggatgcagcacagaacagggccagggaacagttgatgattggacggggggggtggggacagcggaaacgggatggggtgctggctggccggctgggaagacatttggctacttttatagatgaatgtgggaaagaataggtgactgggtaattggataggcaggtggatgcatggggtaagtggatgtggaaagattaatggaaagaagagagggagaaatgtaggaagggtggacaggtgggtgggtggatgggtgaatgctagaaaggaggaagcaagggtagatgcgtgaattgacagttctgttggggggttgggggtcactgtaaaagaggtgggtgatagcagctgggtgaagagatggggacaggtggatggggatggatgagtgaaagtgaatggtggaccgatgggtaggcaagtggatttgtgagtgggcagatgttagaaggaaggaaggggagaggagtgaactgatggatctggggtgggtcactgtataaaaggggaggtgggtggtagcacgtggctggagaagaggtgagtgtggggatggtgggtgctgggtggatggtctacagggggtgagaccccagtctcctgttttgttctctttgaccaccaagggtcagcagtgaggtctgtcctatgaccaggcagatttgtcctgcccgatgttggagccatgtcttggtggtggggctggggtaagccctggcctggttcccctcgggaaactagtagcacctatccacctggagaacgcacaggtctgtcaccaggctgtgtagtgtggactggaataggagttccccagtcccaacctaggccccggccagtagtgcttccccatgtctctggtgacctcaagttgcccttccacaaaaaagcatgcaccccaaagaggaccttctctgggcactgcctctcctcactgggcgctgctgtggactgtgggttgttcccctcctggcgcagaatggtttgggatggaagagccctggagcagactgatgaggcagggcctgggacccagcttgagcccacccagatccggactgggaaaccacagctgcgtgacctcaagcaaggtgctttgcctctctgagcca

SEQ ID NO: 10699 - DNA, 900 bp, Artificial sequence
  DNA replication origin
gtgctgctaggcagggacctgcaaatcagggccagggaagagtgtctacaggatgaacaaaaaaacagtagcaaggaaaatggccacatctgtccaaacagattttcctgagatcctctctgcctccacgggtaagctgcaaaccttcagggtaggggcagaggaggggacaagacctccccctgcagttaaaccacaccaggtaaacacggcccttgccctcaggaaccccagcggcttgggaggccttaggtgtgctgggcatcaagtgctgctgtggcccacacctgctttgctctcccagctgtgttactctgaggagaacactgaagggtctccaagcctcacttcccttatgggcgaaaggaggacaaaaatcttcacctcccaggattatggagctagacgtctcctggtgtgtttagaaggggcaagtttatcagcatcccagggcgccactgtgggcagcactggtgtagcattacctggaagggggaaacgtgggcgggggcacatgttgaccgtcctggaaggaaatggaacatggcaagctggtagctggtgacatgccgcagagtaggtctggacatggcagaagagctgtgtgtgagaaaagggaaaactgccaagacaggctgggcaacaggaagccaaacgcccacagcagacatcactcaggctctgagggaggcactgcccggggtcacttcacacagcaggcaagtgactcagaactgagcaggcaagttctgaggctcagtgaggtgagagtggtttcctcttcctcctccccacacttctcccctcctctgttctgctcctcatggcctcctctccctcctccgcatcccctaatccatctcgagattgtgacatttggcttaggatgcagcacagaac

SEQ ID NO: 10700 - DNA, 1123 bp, Artificial sequence
  DNA replication origin
ccagaaatgtgtccgtcccccctcctctccccgtgggcgcagagcaggatcgcacccccctcctcctccctggcacagagagggcacgaggccctgcctgccccgggcggccagacccgcaaggacgcgcagtgaggctcacgtgcccacccggcgcccctcacgagcgcggtgcccctcgcttgcccgtaggcccgggtccggaagttcggccccaaactgctgcagctgttggccgagtggaccgagaccttcccaagggacttccaggaagagtcgactatcgggcaccttaaggacgtcgtgggccgcatcgccccctgtgacgaggtgggcagctgggcgggggtcgcgtcaccctgggtccctcccgtcccaggcctgcgcctgttcccggcccgcaccccagggccctcatctccccaccctgcacaccacggcccgtccaaatccagccgctttctggcctatcaaggaatcaggcactgccgagctgggagggaacgcggagtctggtgacctctccctgactgctctcaccaatggcatcagatggcgggtgaggggggacccattcctgggcttttggggccaggtggccaggctgttggcctctgacctactaggcggggctggcagagccctgtcctgggccttggccacggagacctaccccctcctgcccctgccccacttcccgtgcaagaagggctgggctggttgtcagtgctgctaggcagggacctgcaaatcagggccagggaagagtgtctacaggatgaacaaaaaaacagtagcaaggaaaatggccacatctgtccaaacagattttcctgagatcctctctgcctccacgggtaagctgcaaaccttcagggtaggggcagaggaggggacaagacctccccctgcagttaaaccacaccaggtaaacacggcccttgccctcaggaaccccagcggcttgggaggccttaggtgtgctgggcatcaagtgctgctgtggcccacacctgctttgctctcccagctgtgttactctgaggagaacactgaagggtctccaagcctcacttcccttatgggcgaaaggaggacaaaaatcttcacctcccaggattat

SEQ ID NO: 10701 - DNA, 1027 bp, Artificial sequence
  DNA replication origin
ggcgccgggtgggcacgtgagcctcactgcgcgtccttgcgggtctggccgcccggggcaggcagggcctcgtgccctctctgtgccagggaggaggaggggggtgcgatcctgctctgcgcccacggggagaggaggggggacggacacatttctgggcagggccatctcttgctctggcctttctgcggttgacggctccatcctccctggtgagtcttcgcgctgcggggagtggggagtcctcagagcaggggaccctgccccaggggtgggtctaggtctgtgccgaccaatcagagcaggcatacgccatcgtgcacagtgattggctcacaggtggccacgtgacctaggatacgccaatgaggagactcactgggccagtagagaaaaggaattgaggcttccacgtgaccggaaagggtggtaggtgagcctggtgcggtggaggcggccaagcgccacaccagccagcccgagggaggccagccccgggaagcggcagcagagggcgggagggagacaggccacggtgcagtgctgtggtgtgaggcccgagccagcggtccctgagatagggcaggtacacgggccagctaagtccttttggttcaggcgggttgaagttgggtctctcccactagcggtagagccctaccgacgcgtgtgcaatagaggcagcccgcaggacccggccaggactgggaaggtggagcggatgtgctgggggaaggaagcccaccagaggcagcaggccctcccggccacagatgggtcctactgaccgggctccggatactcaggtctgggcttaatgggctcaagggttcccgtcgggcactggaaaactacatggaggttaaaggtcctgttctgctccttctggctctgggcctcagacaaggtggaaacacccggtagccaccttgtcaggaaaacggggacaatcattgcctccccgagaggctgatgcgttgagggcatggcagggcagtgctggtacactctgagaccccctggcctg

SEQ ID NO: 10702 - DNA, 1724 bp, Artificial sequence
  DNA replication origin
tctcccactagcggtagagccctaccgacgcgtgtgcaatagaggcagcccgcaggacccggccaggactgggaaggtggagcggatgtgctgggggaaggaagcccaccagaggcagcaggccctcccggccacagatgggtcctactgaccgggctccggatactcaggtctgggcttaatgggctcaagggttcccgtcgggcactggaaaactacatggaggttaaaggtcctgttctgctccttctggctctgggcctcagacaaggtggaaacacccggtagccaccttgtcaggaaaacggggacaatcattgcctccccgagaggctgatgcgttgagggcatggcagggcagtgctggtacactctgagaccccctggcctgccctccgcctcaccttgtccagcaccggcttgtccagctgctgctgctcgatgcacaggtggcagacccgggccaggagctcccggggctcgatgaagaggcgagagctcagcaggaaggtgaagatgtaggctttctgggggacacacgagaaagagggcacaggctcaggagggcaccaggaggggcatgcttcccagctggccctgtaccctggcccaaggtcacgcccaaccctgatgccccccgtgcgtggtggaggagagcccactctcctgcccgctgggtggatcacccacctcggggtagtagtcggctgtgggcaccaggtgctggatcagtgtttccagggaggctgaggatggcgctccatccaggaggggctgcccagcctgttcgccatctgtgggctcggtggggggtgggctgaggctgcctggggtgaccatgtcggaggcactcagcgtctgtggcatgtctgcctgcaatggcaaggagcagtgaggacctgagtgggggcacacctgagttgggtgcacctgagtgggagctgctggtcccggggctcctggctgggcaggctccccccacagccactttgtgccagcttgagtccagtggtcacttcctgggagtattgtcagggccccttcctcacagcacagccttcattctccgtcttctcatggcctctcaactctcctgcaggacccatctcttgtctactcctcttgccccactcaggggcaggcctcttctagattcttccccccggcacccctccacgaaggttgtttttcacaagcctggataatcagcctaatccccctgcttctggccacaaagattggttcagggattggccccatccaaattaggggggctcagctgcaatcccagaacttatgtggcacttggaggctttctttccccctggagtccttgagctggtggaatgtatgcccgacgctactggggccattgtggcaggaaagtgggcacattcctgagcacagtgtcgctgtgctgagcacagaagctgctccatggacttctccatcacatgtgcctctttaagttggggttctctcaggtacagtcaaaactgctgtcctccttaacctggcattctgggctctttgtgatttggactagctgacctgtccatcctcaccgcctatcacaccccattgctcttggcaccagccacgttctctcctccaaatgccttctccaactctgaaccactgcacatgccgttccctcctgcaggaaggctctcccaccatcttcactcccctatccctccaggtatggctgaaatgcctcgtcc

SEQ ID NO: 10703 - DNA, 987 bp, Artificial sequence
  DNA replication origin
ggccctgggggcactgccatgggtatggagaccctgtcccaaggctcctggccttgcggggaggcagagaagagacaggagaacctcagtcggtgacaggggctgtgagaaagtagccccagcgatgtgatgtggagggacgcccctcccgcaggtgggtctgtgtgacctggcctgagactgtctggcgagctgaatgggggcgggggcgtcagccacgcgcaggagggagggggctcccggcagagatgggcgcgaatgcgcagccacagcggtgttccaggagccgcggggctggggaggcgaggctgcacctgctccccctctcgggctcggcctggcgtcctgcagcgccgccctcacagccccggatcccagtcagtgcagacatctgccctccctgggctggcgtccaggaccacagagctcgcgtcaggtcctcaagacgccacggcgatggccccggccccatcaggtccacacaggtgagccacattctgggcagttcccccctggctgccgtggctcctcgtgtcgccggggctgccgcagggctgcgcggggctagggccagttcttgccacctccgctttccagggaggaaaccacctcagtctccttgcctcggagcccactcacctcccaaaagacactctggaagcggggcggagggagtccctctcctgcccactgcagcccacgtcctcagggcctccctgcaccttcttcctctcccccaaatctgggaaatgtttttctagtctgggggctgtgggggaactttgcgtttatcccaggtacatcaatctccaaggtccagaagaagagtcccatttttctctgctctctgccaccacttcctcccccaggtcctgagcacaggctggcctgtgtgaatggggaaatgggcccctatgtttagtgatgggccccttcccggcctctctttgcacccacaacttccagggctgtgccaaatgcagtcac

SEQ ID NO: 10704 - DNA, 823 bp, Artificial sequence
  DNA replication origin
ctagaaggaaatggccccagggagtgacgtccacatagctgcttctgcttagacagctgtagtcagtgtgggatctgccttccccacctcagggtccccttcatggcctacaccctgggcagccacagaggctttggtctggaaaccgggtggcaggcttaggtggggcagagggagcaggtgacggagacagtgaggtggtggcatccccaggtcgaggggcagcccttggttctggccaacaaacagtaccaggcaggaatgcaggccctgtgtagctggctcttctgagtttttgcaggaaagcagacgcactgattctcctgaaaggccccagtgtgtaaataaggccagtaaattcgcagtctaaaagggcattatgcaacccatgcaggacacccaggcggcttgtcaactgcaggtgacttaactggagcaggcaggagagccaggcagggtgccgcaggtcctgccaggggacagaagggccccaagggctgtgctcagctgccagggtcaggttggggcagaggaaaggaagatgcattgaccctcagggcctcagctggcagactggcaggaaagggcaacccagaagaggatagagcatgggcaaaggcatggaggcgggagcacagggagaggcacagggaggtgaggagcacagggaggcagaggacaagggaggtgagaagcgcagggtggcagggagtacaggaggcagggggcacagagatgaggagcacagaggagcccagggaggtggggagcaggtggcagaggtggcctggcctcccctcttggggagctgggcgtgagagaa

SEQ ID NO: 10705 - DNA, 1005 bp, Artificial sequence
  DNA replication origin
ttagtagagacggggtttcaccatgttggccaggctggtctcgaactcctgacttcaagtgatctgcccgcctcagccccccaaagtgctgggattacaggtgtgagccaccgtgactggctatcccagggctttttatttacagaagcaaatgcgttttctgagtccttaagtctgaggtgggtttctccacttgaaatagaaagaacctaacaccccagctctgaagtgcaccatcaccagctgctgctggctttcatcaccggctttccacgcagcagaccacggcgcagatgtgggcggggtccttattggccatgagaccccggggcgtcactttcctcagacagccttatatgtaaaatgggcctaatgcacccccggctgatatgtggaggggacagctggtctaaaattcaacagcagaagggactggagaatgttcttggggggggaggggcgcaggtgccaaggagcggagtggggaggaagccaaggacagcaaggtctgagggctgaagcaggatgagggaggcccccggccatggggcctggggccgggaggaggcgggtttatgaccatgggatagtcctgcagcgtctctgcctgctgagtgaagaacgggctggggctggagggagagtcgtgggtctggatcgagctggaatcaggggcatgcagcccagtgcctgcattctgcgcagattgggagggtggcgtgcatgggccgtgttgatgtttggatgcaggagggggactgctgacataaagggagcactcagcccccggggtttgtgcgttacccacctgggtgacttgtctgagatgagggaggctgcagggagaagggagtagagggtggtgggaggtaagagcagcaggaagcccagggacaggagggggcttggaagcccagagggcagcatttcaggagagaagggccgatggatgggccagtggtgcacagggagtggagcagcccagggaacccatggtgtgctgag

SEQ ID NO: 10706 - DNA, 1618 bp, Artificial sequence
  DNA replication origin
tgctccggggccgccgccaggcgctcgtgcgggctgcgctgggagccgggcggtcgggcggcggcggcggcggcggcggcggcggcggcggcggcgggcggcgccccggtccgcggcgccgaggctcgcaccgggagctgcccatgggccgggcccggagttccggcgcgccgggagccggtgagtggtgcgcggccgagggacacctggcggtgcgggcaagggcgcgggctcgcgggggctggggagggctgccggcggcgcggcggggtcggcgggaggcgggaggctgcgcgcggcgcgggagcgtgcgccggggtcagcaggggcggggtccgcgcggccgccgggactggaggcgcgggggtagcgggtagggtaccctgagggcacacccccggccacctggcgggagacccagctctgccgcgcgccgccagcccctgctgggcgcgaggagcaagcttctttcagccgctagagtggcaggaagagccagcctagaccaaagcctccacccgcaccggacctcagtttccccgtctatgaaatggggacgggaaagcagacctgccggtgcacgtgcagaagggaaagggccttgcgcctgggggaagagggtgctgtcacccttgaggatgggatcggatttgaggaaaggaccagcgccactatcagagggcctgcgagaacagtggggtctgctgggagtcctgggtgtgtccctcacgcagtgacagcggacggcatcaagggaccacctggtccactcattgtatttagattgggaaagcgatgcttggggggacttggggaagggtgctggcgacgccgccccatgctcagcgtgggcgtgggaaactgtgggaaagacagagctgggaagttggggtgctggtggagctcttccgggcccgtatctcctgcctcctggggctgtgggagagacagaagttctgagccccgggagcctgagaagagtcctgggaagctctgcctgccaggcaggtggagtaactgaggtttagagaggggcgggaccatggagtggcaacgctggggtcccacctctggtaagactggctccaacagccatagtgcagccactgtgcaggcgaccggtggaggggggctagggttgtccactcactggccacattcattgagcgcctactgtgtgccgcctgctgcctgcccccgtaagtgctcactagctggtgtgggaggggacaccaaacaagaaatcaaaggcaaaagcaaggacatggccaagatcttatgcgtgctgggaagaacatgcagtagggtgactggggcagagggagaccagggcgcggcggagccttcgtctggtcagggaggctgtcctgagcggggagcccagcctgtgatggacgggtagcccgggggaacagcgcgggtgagatccctgagggcaggagggggcggagctggagctgagacgctacagggtctggacgtcctgggcagcccccaggcggtttgcaggttgggcgtcgaaaggctgcccgtggcggcgggtgggcgcactgccggggcaggagagggagggcaggcgagagagggacgggctgcggagcccagggcgggactggcg

SEQ ID NO: 10707 - DNA, 1582 bp, Artificial sequence
  DNA replication origin
cttgcccgcaccgccaggtgtccctcggccgcgcaccactcaccggctcccggcgcgccggaactccgggcccggcccatgggcagctcccggtgcgagcctcggcgccgcggaccggggcgccgcccgccgccgccgccgccgccgccgccgccgccgccgccgcccgaccgcccggctcccagcgcagcccgcacgagcgcctggcggcggccccggagcaacgcggcgctgcgccccctcgtggcactcaggcagcgcggagcgggcggggcgcgggggtggagctgcgggagcccgcgggcggcgctgcacaccagggccctccgtgccccggccgcggagccaagcgtcccgccctgcgttcaggcctccgcggcggctggccccccgcgccaggaccacccgctcgggccgtcagacgctgccctcccgcgcgcggaccctggcggactctgcgccccagctgccccagcctacacctcacctggtgggcctctggcgccccaaaacccagttcaccctctctcctcaagactgggcccggcccggttctctggactggccacctaggttgtctgtgtcccccaatgggacatccctgggtggacaccccccctccccaaccttctcggcgctctcccgtggcccccagggagggtggacaccactttgaagacaccggggttctgggaggatggcgatgcatgatttcacttttagaaagggagaggggctctaacaggatccagtggcctccttgaactgggtcttcagtgaaaagttccctggttggtcccagcatagaggtcaggacacctgtcctcctgtgtccgcagtttgtcccttccgctgggttcctggtctggctgacttcaagaatgagccagggaccttggcagtgagtgttacagctcttaaaggtggtgcgacggtgaaaccctgtctgtactaaaaatacaaaaaaattagccaggtttggtggtgggcgcttgtggtcccagctattcgggaggctgaggcaggagaagggcgtgaacccggggaggtggagcttgcagtgagcagagattgcaccactgcactgtagcctgggcgacagagcaagactccatctcaaaaaaaaaaaaaaagaaaagaaaagaaaaaggtggtgcagacccaaagagtgcgtagcagcaaaatgtcttgtgaagagcaagagaacaaagcttccacagcagggaaaaagaccacagccggtcgccgctgttgctggctggcgaggggtgggcgggcagcttttattcccttatttgtccccacccatgtcctgctgattggtccgtttcacggagtgctgattggtgcgtttttacagagtgctgattggtgcatttacaatcctctagctagccagaaaagttctccaagtccccacccgacacggaagttccagctgccttcacctcactctgctttagtcaggacctgcctgatgagatgtggcccaaaactcaacccaaccagcttgagcaaaaagctggtttgtggatcataaaaagccaaggtttactgcttagaggaatggctagatccaggt

SEQ ID NO: 10708 - DNA, 1086 bp, Artificial sequence
  DNA replication origin
ccgggatgcttggcacagccacagcacgtgactcagggaaggggcaccgggcaaggctgctgagcaagttcaccaataaaatcaggaaacactgaggacagaactttgggctctggccaaagcattttattagccgacccgtaactcgtccattcttggtctggtgaaaaccctccaaagttactgcaagggcagagctccaggagaagtcatcctatagtcagccacgggagggggccacatttaatgatcctttacagtccagggctgccaacccactgagcctgggctgggaggagcaagagagagggtgtgtgtgtgtatatggatttgcacatgtgtgcatgcatggtatatgcagtatgtgtatgtgcacttgtgtgaatgtgtggtgtgttctatgcatgtgtatgcagcacatgtgtgtaatgtgtgtgtgttgtatgcttgtgtatgtagcgctgttttgtgcacgtgtgtgtatatatgtgatgctgtgtgcatgagtgtgtggtatatgcatgtgtgtgttgtctgctatgcacatgtgtgtgtgctgtgtgcatgttggtgctgcgtgcatgtatgtatgttgtgtgcatgtgcgtggtgtatgtatgtgttgtgtgcatgtgtgctctgcctatgtgtgtggtgccatgtgcattcttgtgctctatgcatgtgtgtggtgctgtgcatgtgtgtgctgtgtgcatgtgggtgtgctgtatgtgtggtactgtgtgcctatgtgctgtgtgcatgtgtgtggtgtatgcatgtgtgtggtgtatgttttatgctgtgtgcctgtgtgctgtgtgcatgtgtgtggtgtatgttttatgctgtgtgcatgcatgtgctgtgtgcatgtgtgtgttgtgtgcatgtgtgtgtagcgtatgcatgtggtgtgctgtgcatgtgtgtgctatatgcatgtgtgtgctgtattcatgtgtgggcggtttgtgcatgtgtgtgtgtgctgtgtgcatatatgtggtgctgtgtgcatatggtgtgctgtgtgcatgtgtgtgttgtatgcacgtgtcgtatgcacgtgtgtggagggta

SEQ ID NO: 10709 - DNA, 1351 bp, Artificial sequence
  DNA replication origin
ggcggcggcggcggcggcggcggggcggagcggagcggggcgggccggcggcggagccggggccgcggagccaggagtgactagcacgcagcgccgccagtccgcccgcccgccctctccccgtggcgcggcggcggggaggcgaggtgagcccggcgggcgggctaggcctggcggcggctgctcgggccgggcccgcggggaggggcggtgagggaaccgcgcggccgggggcttcggggcgggccgggggctgcggggccctggcagccgcagccgtcgcccctgtgctgggggatgccgcaggcgcccccttccgcccggctgtcagcagccccgggctgcgggcctgctcaccggcctggcccggccgacctgcccgtggggtctgcgggcgccatccctcccggaggtggggcagacagctgcactcctgcgccgggtgcccaggggcccggggtcgcgtccccgcgaccttggccaaggcactgaccctcgctctgccgcggttttgccttcgggaaggtggggaaatgtctcttctggacagggttgttgtcaggctgtgtgaatgtatgcagacgcctgggcaggaccccggtgtgcatctgtggaagactgggcagggtgctggcccgtgctggtgtgagtggtgtaggaaccccctccccacccgcccagcctcccgcctccccgcgcactcctctcttgccttgtcattgcacactcggtgtccagcagtgccagaggggacccagcccgaatcccttaccaccgcgcccctcccccagaagactgctgccccgtcccactcatctcgcccgccttgaacatgccagcccgcatttgccccaggacctttgcatttgctgtttccccgtctttggagttgtctccgtgatcttggcacaagtagctctttctgctccttcctctggtcagatgtctcgttttgggtgaggccctcctcgaccaccctctttcttcccttagtcatgctatttcattatttaaaaaatttccttcctagctctcatctggtttgaaactattctatttatttgcctgcttattttctgtctccccgactaggatgtaactttgtgaaaacaggtagctgtctgatttgtccactgctttatccccagtgcttagaaagcacacaggaagtattcagtagtatcagctcaatgaatgaatgaatgatcaaagaaatggcccagcctgcctgttgtctctgctttatctgttcatttagtgacttctgattagcgtgtgaaacttgtaagcagatggaagcttgttctattttgtgaaacattttggtgtccttgacccctttaattgctaa

SEQ ID NO: 10710 - DNA, 886 bp, Artificial sequence
  DNA replication origin
gagcaggcgcggccaatggcgcctggggggcgggccgatggagggtggcgcgggcggggtcgggggccgggtcgggcgcccgaggtcctgggccggggttccgcgggttcttcgcccccgggcctttcagtggcgcgggccgagtggccatggcgctcgggtgcgcgcagtgcacgcggtgagctggagacgcaggcattgcgcggcccaccggctgagcccgctctccctgcgaggggggcgcagctcggtggagagggtggcccggaggaccgggaaccgggctggaggcgcgcggggctcacaccgcggggtccgcggggagccgggcctcgggctgcaggtgcaggcttgtggcggtgaggcgactggagcggcacgggagcccgcccgtttcggggagagcccggggcgatcgcggggggaggccggcctggcgtccgggagcccggcgtgctagggcccggtaggcggggcgggcctcgcactcggttgctcgctgcggcgccggaggaacgggtctatgggggtgtgggtgaggccagaagccgggtcgaagagggggagggggtgcgaagagatggcggtgtgtagacaggtgacccggtgggtcggtgacgcaggaggagactgcgcttggtggcgggatcacttagttgacaacatctaaaaattaggaggtgcggcagggcgcggtggctcacgcctgtaatcctagaactttgggaggtcgtggcgggtggactacctgaggtgaggagttcgagaccagcctggctaacctggtgaaaccccgtctctattaaaaatacgaagcaatgagctgggcgtggtggcgggcgcctgtaatcccagctactcgggaggctgaggcaggagaatcact

SEQ ID NO: 10711 - DNA, 1435 bp, Artificial sequence
  DNA replication origin
ctatgggggtgtgggtgaggccagaagccgggtcgaagagggggagggggtgcgaagagatggcggtgtgtagacaggtgacccggtgggtcggtgacgcaggaggagactgcgcttggtggcgggatcacttagttgacaacatctaaaaattaggaggtgcggcagggcgcggtggctcacgcctgtaatcctagaactttgggaggtcgtggcgggtggactacctgaggtgaggagttcgagaccagcctggctaacctggtgaaaccccgtctctattaaaaatacgaagcaatgagctgggcgtggtggcgggcgcctgtaatcccagctactcgggaggctgaggcaggagaatcacttaaacctgggaggcggaggttgcagtgagccgggattgcgccattgcactccagcctgggtgacagagtgagactctctcaaaaaaaaaaaaaaaaaaaaaaaaaaaaaaaaaaaaaaaaagggaggtgctcagtcaagcctctgagaggagtggggggcggggcgaggagtctcttgctcagagccccctagggactgggacccgttgactctgagctgcttttgaggctggatcaggtaccagcggcctgggggtcgtacaggatgggagaggccggggcttgggatgttgccagatctacgttgaaaagtgaagcaggaagagaggcactgaggctgggcacatggggaaaaccgtggagagccggcctttggggactagaagagtgggaacaatggttgacaaatggtgagtgtggtgtagaacagcagtaacacaataccaggatccacagagtggccagggccagagtggggagaaggaacaggactctgcagatggggagggtaaggggctgggtggcgtgaagggtggttgcagaatttggggagggcagctagcctgtgacccaggttccaagggcactgaggtctgggccaggccgcttggaggcaccagagcctcagaggaggggtggggtagaggaacggatccagcatggtgtcccccttggccaccagagggagttttctaaatttgagcatggctcatcgctgcttgaaattctacgtcacagtgtggcctgcattgaggagggcccacacctgtcgctacctcagactcacctgccacctgcctcaagtgcatgagagagaacaggaaaccagaaattgtcaggatcgaggattatgggaaaagagtaaaagcctagctgtcagatctgaggttccaccaaggagcactgatgggtgcttctcattaggaaggcggtgcggtggctcacacctgtaatcccagtactttgggacgccgaggtgagtggatcacctgaggccaggagttcgagaccagcctggccaacatggtgaaacgtcatctctattagaaatacaaacattagctgggcgt

SEQ ID NO: 10712 - DNA, 1194 bp, Artificial sequence
  DNA replication origin
acacaggcaaaaaaaaaaaaaaaaaaaaaaaaaaaaaaaatttttagtataaagaatgtattactatgtgaacaattttgttcaaagggctttgcagacacccaggacctgtggaccacatctggagaaccactgacttagacgtcagaattgggtcctgttttgcatggttatgacctggcttaaaggaagaatgcttttctcagaaataaactttcagcaagctgtctcggccagtgtcaggccccgagggcctggaattgaccattctctatgatggcccttccccaactgcctgctctggggtttggccctggctcccagggaagctccagcgtccactctgtctctgggagggcactccccagaagccccatgatgtcctgtccgcagtgagcgttccatgccagcctggggcgaggctcgattcatctccgcctctcaggcctgcacagaagtctctctcctactctggcatgtgagtgactgaaggaggtgagctgctgcttatcttggcaggccagggatagcacatgggacagggcacggcactggttcttaatatatgtggtggatgaatgaagaaaggggaggccacggtccccaaggaggtcatgatttagtgcaacagatattgtatctcaccagctacgacagctgcgactgctgctgcccagcaaacggggaaagtgtggtggggctgccaaggagcgcctggcataggaaggacctggggccatttgctctttctcgagtacttactgagcacctactgtatgcctgccctgtgctggacaccagctgtccagtggcagctctggcagacagagctgtgtgttcacggagccgacatgttagttgggggagacaggccagtcaacaggtgaacagggaatttcaggtcatgaggtgtgttatgaaaaaaataaacaggctaatgtttcacagagtgctggcgtcggggcctctgtgagcatggccagggagggtctcaggaggtgacatttgagctgaggtttgggagatgagaagctgtcggctgtatgcagagcaggaagaagatggttcagcagagtaaagagccagtgcgaaggccctgcggtgagaaagcactgagcactgctgaggaccagggaggcagggaggctgaggaccagggaggcagggaggtggggaggctgaggggcagggagg

SEQ ID NO: 10713 - DNA, 967 bp, Artificial sequence
  DNA replication origin
ctgagcacctactgtatgcctgccctgtgctggacaccagctgtccagtggcagctctggcagacagagctgtgtgttcacggagccgacatgttagttgggggagacaggccagtcaacaggtgaacagggaatttcaggtcatgaggtgtgttatgaaaaaaataaacaggctaatgtttcacagagtgctggcgtcggggcctctgtgagcatggccagggagggtctcaggaggtgacatttgagctgaggtttgggagatgagaagctgtcggctgtatgcagagcaggaagaagatggttcagcagagtaaagagccagtgcgaaggccctgcggtgagaaagcactgagcactgctgaggaccagggaggcagggaggctgaggaccagggaggcagggaggtggggaggctgaggggcagggaggcagggaggcggggaggtggggaggctgaggggcagggaggcagggaggcggggaggctgaggaccagggaggcagggaggctgaggaccagggaggcagggaggcggggaggctgaggaccagggaggcagggaggctgaggaccagggaggcagggaggctgaggaccagggaggcggggaggcagggaggcagggaggcagggaggcagcgcggcagcgcagggggaggtgggggccgagcaggatgaggtcagaggcagcaaggcctccaggagggagttggggaagctaggaagttttaggaggaagaagaaatgaacaacatcctgtacaggtgagagtcaacagagaatggccagcaacagtccactagatctgaaaacatggaaagctgaattctagaacataccaggtaaagatctcaagccacggatgatctcttgcctcctgttttgtagtgaaattcggtcttcagacatcatcaaaccaaacatcaccagagagatgaactgactggtataagcctgtgcac

SEQ ID NO: 10714 - DNA, 1233 bp, Artificial sequence
  DNA replication origin
tgcccaaggcatgcaagtaacaaatggcctggctgatccctctgggccatgctcccttagcaaggccaaaagaaagtaaagtgcttcactcccaaaaagccatccagctaggaaagtacagctaagcaggcccaaagaaacaggcaattttccttctaataaataccctcctggtttccgtaataaaaacctttccaggccgggcgcagtggctcacgcctgtaatcccagcactttgggaggccgaggcgggcggatcacgaagtcaggagatcgagaccatcccggctaaaacagtgaaaccccgtctctactaaaaatacaaaaaattagccgggcgtagtggcgggcgcctgtagtcccagctacttgggaggctgaggcaggagaatggcgtgaacccgggaggcggagcttgcagtgagccgagatcgcgccacagcactccagcctgggcgacagagcaagactccgtctcaaaaaaaaaaaaaaaaaaacctttccagccacacaggcatttccagggctctgatttgagtgggattggatggtgctgatgggacaatggggctgcagggtgttcaagcccctgcacctgatgctctggaggtacccacaggcagggcaggccgtgttctctaggatacgcacactcatgacaccaacatcgcccatgctcccggcctgtctcccatgacctggcacttgtgcgacgagcaaatgaagcaagtgaggggaatgaggggtggccaccataggggaggggctggggagggaccatggcagacacaggagcagagaaggagtctctgagggggtgacatttcaagggagctggaggcaatgaaaaggaaccagtcctatgagaagaacagcgaatgcaggggctgtggcggggcacagtgggacagagggttgagtgtggtggggccaggctttggccccactggggtgtggggtttgtgggctgtggcagggagtttggattttattctaagaacagtaggaaaccattggagggccttgagcagcgggatgatcacaggggctgattcatgttcttagacgtttgctcaggctgccctgtggggtagaggttgtaaggggacagaaatgggtgcagacagagaggctctccttgtagggagaaagtgtacccccaccccccatttactgcagacctgcagacttccacccagaggagaaatgatgcctgagggtgggcatgtgtcc

SEQ ID NO: 10715 - DNA, 1230 bp, Artificial sequence
  DNA replication origin
atcccccacctggctgggtccatcccctgtctcttcaatgtgagaaataagactgctcccaggtttgctaggcctgatgtctgttccctctcagttctgcaaggagatttccaagctaagaagagtaacagaaaggggaaaactttcccccaaagaagtttggtgttatttactgccccgttctcagctcatttaaaatcctgtcgcctgccagtgatgcctttcttacgccgtgggcagccctgggagtggaggctaggaaagagcagtagatcaaggtagaaagtgacagatgccttgaaaaggggacggaaagttggaaaaaggggttcagaggagggaaaagatcttcatctggggtagggggttggagaaggcatcacatgtgcataggcctgggggccccaggggcgcacgcactgggctgagggcaccctgcaggagtgggacccagagggcggaagctgcagggtggcatggggagcaaggcgggctcaggccagacagcaggaggggttgacgtcacgcggtgggcccgcggggcagagaagacgagagagggatgtagctggaacctgccttgccgtggtcaccgaggccctggtggggtgggggctgaacaggaggagaaaggtggagttggaagctggactgtcccgtggtggggcttggctctcagggggcagcacctgtcctggacccatctggtgctaggcgggcatctcctcagaagccagggaccctctgtgtgagctatacctttcttcttgggataggtttctatgctgattgtggggaggtgggggtagaagtggtgagcccaggcttgcaaaaaggcagacctggctgtgaattcctcaagtctttggcagtggagcctccgatgccatctctatccctgggaaccacagtctcttcacacaggatgtcatgaggattagaggaggtgaagctcgggaagggttggcatgcggggagccactgtagatggtggtttacccagcagggttctgggagccttccctaggccctggctcatttgattagaaggctgtcctcatgccagtcctgggatcctcatggtgcatggggccgggggtgttgtgcggggggatgtaagcctctgtgtttgattatcttggggttaaccgagagttctggtggcaccgtgctcccattgtaagggtctggcactcagggacctcctgcctctgtgtccctcttgtcctt

SEQ ID NO: 10716 - DNA, 1361 bp, Artificial sequence
  DNA replication origin
tctcccagtcgcccacaaaggcggccacgcgcaggccggcgcatcccgagtgcggggcgcccatcccgactcagcccgccgcgcccaccgaggagaggagaggcgaccccgccccgccgtccccgcagcccgcccggtcgcccccgctgcgtcagtgcctcaggcagggcctgcgcgtcctcctcgcgaccccaaaggaacgtctggtccctagaagggtcgctgccgcgttaccgcctctttgcgcggggaagaggcagtcactgcccgaacctcggcccgaagccacgagagggagtccggggcggggagcggggccgggcgtccgattcccgcggcgctcccgcgctgtcccgcgtggctgcgggaccgtggggagggcggccgcggcccggagcgcacatctgcaattctttactctcctggctgggccgcctccgctggccgggagagagccgggaacttctgctgggacaaaaggtcactgtgctcttttttttttttttttttttccttgagtaggattcggttacccattccagcctcctgtggctggaggacctggaggaactttcgaagccatgaaaggcctctctctgactttgctgagggccggggtggggtgcgcccgcggtgagccctggccgaggtctgtgcaggcctcttgtctcggaggccagctgctcggcagaagggaacgacctacggcggagcgggcagcgtgcttcgggatgccgcctcacccaggctgaacaggcatccgtggaaattcctgaaccctcagctaaaatctcgtgctcccagacgccattctccatgtgtagagccacctttgggtgtttctgggggcagagatgaggcaaaggtggtagttttgccagatgtccaagccctgatgttccacacctctcagtgtagcattcaagacccttggccaaaactggtggccttggggccagacttgtgcaggagacccttgaaccaggagggtctgcccacagcaccagaggctccccttccccttcctttcagatgctcctctgcccccactgccacccctgcctgtcatcctccttcctactggcatcttgctttttcccaagtctctctgagctttgggggggctctacctcctccagctcacaaaatcacaagtgtttttgttctgcttcttaaagggacacacacgcgttgtctcctagggaaaggttgagctttggggtgtgaccacctgtatcttcagattttctggtactgacttgtggttgtatgtgagaaggagcttgaggtccccaaaggacacccagggctcaggagtggctgcggtccatgggggtgcccactcggagccagaatcaaag

SEQ ID NO: 10717 - DNA, 1548 bp, Artificial sequence
  DNA replication origin
agtgacaggcttgtttcagagctccgcagacctctaagcctggccctcaccctgcgtggagagaacgcccgggcttggcggagagacgagaaaaccgaggctcccggaggcagacaaggactctgccaaaaccggacgccgcggcggtggcagaattcgaccctgggatttgccgcggagcccgagcttgaaggcgagggttccgcaggttgtgaacgaagctggaggcgccccaggaagccccgaccccacccgcgccgagctgccccctccccagatctgcctcgcgctgcaggcccgcgagggacccgggggttcctacgcctggggtcggaatccgaccccccagtgaggcaccaaggcccgcgtttctccgccctggttcccggccgtccctcccgttccccctgcactctgggcccctcgtctcccgaggaaggtcacgagaaccggcccaacgtttgcgcactttgaagtttttttttttcttaaaaaaatcctgaaattctaaacggatcctcctcagtcgtgtaaaaaaaaaaagatttttacatctcgtctagagcatttttctaacataatccctccctagtttcaccgcgactctgcaagccctgggggaaggaggttgtgccattggagggttgggaaaactgaggctccacgacagcgaaggagggggcttgggtgagtcctgttgttgggaaatctcagagcgattcaggagccgcagcgtttgcccccaaccctccactatgcagggtcgctttccttccttccttctctcattcctaagaacccacttcacacctgtcagggtgcaggtgcaagagacttattgatgaatgagaacagatctggccctgccctcctggcacttacaagtgaaggggaagcagacactaagctcgtggttacacagagagctaaaaattccaggtaggatacaaggagggggctgggccagcggtggagagggtgccaggctctgcctgggactgggcagggctgcgctggtgcaggtggtccagagcctagcgaagccaggaaggagggagcagcaggcagtgcaaaggtcccctggatgagggctagaacttgaatgtggagatcaggttgtttggcccagactggcctccactgttgtaactgaggcggggacagggtgatgtcaacaggccctctgatagcaccaagaccccaggagccctggggtcttagcagggtccaaatctgtcctttatcctcctggaggagtcacaggtccacggtgaggaacggcatgagtgcacactaccacccatggggatgtgtctgtagcagctgccggcctagcatcactcctgctttgagaaccctctgagagtcatctgggaggttgatggcctgggcctggccacacagcctgggcagtggttcagaggtcagcatatggcccaggctgggacgttgatgacctgctccagcacatgagggaaaccagcagaaaagatgaacttggcctggtacagtggcttgggtctgtcatcccagcactttgggaggctg

SEQ ID NO: 10718 - DNA, 1333 bp, Artificial sequence
  DNA replication origin
atgggatttcactatgtaggccaggctggtctcgaactcctgacctcatgatccgcccacctcaacctcccaaaatgctgggattacaggcatgagccactgcgccaggccttgagccaccgtgcccagcctgtaaaaaaccttttgtccatcacaaatgtgtaagagtcggcctgggccagtgggagggacgtcagggcagtcagggccaggcggaagggaagtgtgtagggaggggagcccaatgggttgaagtaggaacctcatggggtgctgcaggtggagcccgggagcctagggtgtggggcccacagatagggcgggctgggcagtccttccccatgccctccattgtgggaggctcagcggagggccttacacagaagtgacctggagggacctgcactttaggaagatccctggggcagtgggatgctgggtgggcgggaggcttcaggggagcacaaacggtcccagagctgctggggaggggagggagggaaggaagcgtggcatgccccatggatccagccctggagggcaccaggagcgccgaggctggctttcagaacaaaggcagcagcaggctggggaggtgaggaacatggttgcgcctggttggataggtgccagtggacaccccattctgcagtggagaggtacatgggcacttggatatgtatctggggcttagagaaggagctgggctggaggctggtcagagtcgggggacctggatgggaagaggtggagggcggggacggggaagatgcagaggaacccgtgccaggaggcctgatctgcactcaggtgcctgctcctgctggcctgtgactttgggcaagcccccacatctcctggagccttgatttcctcatctgtaaaacggggctgggaaggcctagctcccaggcagtcatgaggacagaagagaacaggctctgcaaactgcgtggcacagcgtgcatgctcagaggacagtgaggaagcctgcaggcagggcaggggccaggccagagaaggtcccagagccacagctcagggaggggcaggctgtccatggggaggggcagctgcttctggttccctgtgagctaaactcaagtgtccctggtggagtccgatgggtgcggctcaagctggggaaggacgctccgtcagtgggggttctgcagcggggtcactgccaagaacagctgcaaagccaccctggcggtggcattcagagccttcattattttcttcagaacacacagctgggaaataaatgatcactggctgcaaggatgggtgttggccagatggcctttctgtcacccctcccagctaaaag

SEQ ID NO: 10719 - DNA, 1123 bp, Artificial sequence
  DNA replication origin
aggctcctgtaatccctactactacagaggctgaggcatgagaatcgcttgaacctgggaggcagaggttgcagtgagccaagaccatgccattgcattccagcttgggcaacaagagcgaaactctgtcaaaaaagaaaagaaaagagtggaggggctgggcgcagtggctcacacaggtaatcccagcactttgggaggccgaggcaggcggaccacaaggtcaggagatggagaccatcctggctaacacggtgaaacccctgtctctactaaaaaatataaaaaattagctgggcatggtggcgggcgcctgtagtcccagctactcgggagaattgcttgaactcggggcggaggttgcagtgagccgagatcgcgccactgcactcggacctggagacagagtgagactctgtcccctccccccgcccccacaaaaaagagtggagggaggacggtgggggagaagaggtccagaagaagaaggtcgggaagaagaggatggggggagggtgggaagagggagtggggagaacgcggtagggaagaagatgatggggaagaagaaagttggaccgggtgagggagtcgggggaaagatggtggagagatggggtggagaagatagggggaagaagacggtggagggagaaagagaggggaaggtggggaagaaggtggtgaagactacggggaggtggaaagatgaccttgggaggacaacgctggggagacggagtggagagaaggcggtggggaagggcaggtggggtgaggggcggggagaaggctgtggggaagaagacggtggagatggggagaagatggtcgggggggagagaagttgttgggcagaacagagttgggagaaggggaaggacgtgggaagggaagaaaaagacggtggagggaagagaaagaagaggctgagaagagtttggggagagggagtggagaggggacattgtggggagaagattctgggagaacatggtggggaaaaggcggtggggaaagagtgggagttaaggagaggaaataagagggaagtggggaagaacatgattggaagaaaatgcttaacaaattaagtatagaggaaatgtatctcaacacaaaa

SEQ ID NO: 10720 - DNA, 861 bp, Artificial sequence
  DNA replication origin
aagacggccttttgaccttttagggtctagggctgtaaagtgtctcagggttgctgccgagcgagccatgaactgggctggatttttatatttgatgaaaaagagcctaaacgctatctgatttgggataaagaaaaaggagcattaaccttgactatgcctttggctccagccacctttttaagagtaaattgctgggcaggtgggggagggctagtcacggaacgaaactgtaagccagagcaggtgtgaggaggggaggcgatgaaaagattatagggtgcaggagcggaggctgaggaagaattgggacctagctcggcctggtgaggagcagcctggggaggaagggagaggtcagatgggtctgtagaaaaggaacattagaaagactcagcgacgcttggggttgggactgaggggacaggcgggagggaaagaaggaagatttgggacgagttgcattgggcacagagactaggaagggactgatgtgtaaaagaatgcctggacgtcaggcacctcagaccgtttgcccattttacgacgagaattatttagatcttgtaggatggaaaaattgaaagtgccgttttccagctatttggaactactgtcgagcttgtattggagtcaagcggcattgcagaagaaaataaggcatttaggttttaggtcaggtgtgagtggaagaggttttaagtttttgagaacacaggctaaaggagaagaaggaggaatggaaggtggaagcttacccatagtgaaggaggcaagcccagagaaaagagtagagacacggagaaggagggggggggttcttgccctccagaaaagcagagaaggggttggggcacggaa

SEQ ID NO: 10721 - DNA, 1226 bp, Artificial sequence
  DNA replication origin
acactcctcagctcttgggcggtcgatgggaccgcgccccatggagcacggggtggcgctcgtcagggaggctcgggccgagcaggagcccacgggagtgggggtggggtgtgctcaggcacggcgggctgcaggtcccgagccctgccccgcggggaggcagctgaggcccgacgagaattcgagcacagcaccagcaggccggcactgctgggggacccggtgcaccctccgcagctgctggcccgggtgctaagcccctcactgcccggggccggtggcgccggccggctccaagtgtggggcccacccagcccgcgcccacccagaacttctgctggcccgcaagcgccgcacgcagccccggttcctgcccgcgcctctccctccacacctccccgcaagctgagggagccgtccggcctcggccggcccagagaggggctcccacagtgcagcggcgggctgaagggctcctcaagcacagccagagtgggcaccgagaccgaggaggcgccgagagcgagcgagggctgcgagggctgccagcacgctgtcacctctcaatagcttcctgcaggctcaaactgctgggctcaagcaatcctcccacatcagcctcccaaagtgctgagattacaggtgtgagccactgttagcagaacaccagcggttcactctgggacccactgctcaccgcacagagagccaacgactgggacgagtattgccaaggaagaaagctttaatcgggcgctgcagccagagagatgggagctcactctcaactccatctctgacctactaaaactaggggtctgtatattaggaagaaatgtaacaatgttcaagaaaataggaactgggatgaaatgtaacaatgtgtaagaaaacaggaacttgagagggtaagggagcaatcctgatggatgaggggcctggagtctcattgtctggatgtcatgatctggtgagtttcagttcttggatacttttttttgagaggcctgaaggtgtttcccaaggaaggaactcagataaaacaagtgtaaggttcaaaagggtcaatttctatgtttgtccaaacaactatctttgggacaattgggtcagtttcactaccatgcctggtcaaaaatttcagcctgcctaaatgtgacttttcaggccccagttgggaccatactcagctattcccttgtgaggcactgcccacctgccaccaa

SEQ ID NO: 10722 - DNA, 870 bp, Artificial sequence
  DNA replication origin
gaggccggacggctccctcagcttgcggggaggtgtggagggagaggcgcgggcaggaaccggggctgcgtgcggcgcttgcgggccagcagaagttctgggtgggcgcgggctgggtgggccccacacttggagccggccggcgccaccggccccgggcagtgaggggcttagcacccgggccagcagctgcggagggtgcaccgggtcccccagcagtgccggcctgctggtgctgtgctcgaattctcgtcgggcctcagctgcctccccgcggggcagggctcgggacctgcagcccgccgtgcctgagcacaccccacccccactcccgtgggctcctgctcggcccgagcctccctgacgagcgccaccccgtgctccatggggcgcggtcccatcgaccgcccaagagctgaggagtgtgggcacacagcgcgggactggccggcagctccacctgcggcccctgtgcaagatccactaggtcggcagcttcactcccgagccggcgagaccatgaaccatcagaaggaacaaactccggacacactgcttttaagaaccgtaacactcacctcgagggccaccagcttccttcttgaagtcagtgagaccaagaacccaccaattccggacacacgatgatcactgcactccagcctgggtgacacagcaagatcccatctcgacaacaacaaaaatgttcattagtttgagcattcagcgatttgtgaatcaggcagcaccagaccataagcggcagcactccacctgggggctcaggggaaaactttattaaggtgttggccaaaacaagacaaaggagatatttgagctgggtgccgtggctcatgcctgtaaattcca

SEQ ID NO: 10723 - DNA, 1039 bp, Artificial sequence
  DNA replication origin
aagcagtggctctcggagggggaacaaagagcagcgactaaggcggcagaggagcggcggcggtggcggcgctgcagcagcgggcgggactggtatggtggttccacagggcagaccccgctgcactcacagggaggaggaggcggcagcggcggaggaaggcggcgcaccccgagaggtgagcgaggcaggccggaggcccggtcggggcgccgctcctctctccggccgcgcacggaccgccccccgtcggccgggctcggtcgcgggcaactttcgtttcgtgggcggcggtcccgctgctccgcaagctggcggctgttgggggccccttcgacgcgccgcgatcgcgccccgccccgggccgcgcccccgggccgagtccctgggaggggggcgttgattgacggcggcggcggcggcgcgcagaggggagagggtcggcgctgggctcccggatcccggccggtcccggctgccgtcgtcggaggaggcgagtccgtgtcccgggactcgtggccaagatgggtggcaacttttgagaagcgcctctgtgggtggcgcgctgtgtggagtgtggagcttcgcgctccgtggccacaattactgtcaagcgggaaaccaactgcttaccccctcccctaaaatgtttttaaaattcagtttaacgcagattttgagggagaggacggggtggattacaggttaaagaagcacttggcatgcaatgaggatgcttattttatagtattgcgaaggattcggagattgtactggtttctacaagcagttttctctggtaacccaaattgcatccctcctttttgtttttcagcactaatcgctattttctttggaaacttcctttgattctttacctccttcaccttccccgaagagcctgctaaccaacacctgtggccttctgtttttaactgttgttgccattgacagcgttgtgaatggtcatctcgctcgagctctttggatttgttgttactgtgtaagctgatgtgttttagataatctgcttcaattt

SEQ ID NO: 10724 - DNA, 783 bp, Artificial sequence
  DNA replication origin
gtctgggaagtgaggagcgtctcttcccagccgccatcccgtctaggaaatgaggagcgtctctgcccggccgcccatcgtctgagatgcggggagcgcctctgccccgccgccccgtgtgggatgtgaggagcgcctctgcccggccgtgaccccgtctgggaactgaggagtgtctctgcccgaccgctaccccgtctgggaggtgagaagcgtctctgaccggccaccccgtctgagaagtgaggagcccctctgcccggcagccgccccgtctgggaagtgaggagcccctctgcctggcagccgccccggccagccgccccagctgggagggaggtggggggcgcctccgcccagccgcccggtctgggaagtgaggagcccctctgcccggccgccaccccatctgggaggtgtacccaacagctcattgagaacgggccatgatgacaacggcggttttgtcgaatagaaaagggggaaatgtggggaaaagaaagagagatcagattgttactgtgtctgtgtagaaagaagtagacatgggagactccattttgttctgtactaagaaaaattcttctgccttgggatgctgttaatctataaccttacccccaaccccgtgctctctgaaacatgtgctgtgtccactcagggttaaatggattaagggcggtgcaagatgtgctttgttaaacagatgcttgaaggcagcatgctccttaagagtcatcaccactccctaatctcaactacccagggacacaaacactgcgg

SEQ ID NO: 10725 - DNA, 1509 bp, Artificial sequence
  DNA replication origin
atcccaaggcagaagaatttttcttagtacagaacaaaatggagtctcccatgtctacttctttctacacagacacagtaacaatctgatctctctttcttttccccacatttcccccttttctattcgacaaaaccgccgttgtcatcatggcccgttctcaatgagctgttgggtacacctcccagatggggtggcggccgggcagaggggctcctcacttcccagaccgggcggctgggcggaggcgccccccacctccctcccagctggggcggctggccggggcggctgccaggcagaggggctcctcacttcccagacggggcggctgccgggcagaggggctcctcacttctcagacggggtggccggtcagagacgcttctcacctcccagacggggtagcggtcgggcagagacactcctcagttcccagacggggtcacggccgggcagaggcgctcctcacatcccacacggggcggcggggcagaggcgctccccgcatctcagacgatgggcggccgggcagagacgctcctcatttcctagacgggatggcggctgggaagagacgctcctcacttcccagactgggcggccgggctgaggggctcctcacatcccagacgatgggcggccaggcagagacgctcctcacttcccagacggggtggcggccaggcagaggctgcaatctcagcactttgggaggccaaggcaggcggctgggaggtggaggttgtagcgagccgagatcacgccactgcactccagcctgggcaagattgagcactgagtgagcaaaactccgtctgtaatcccggcacctcgggaggccgaggcaggcagatcactcggggtcaggagctggagaccagcccggccaacatggcgaaaccccgtctccaccaaaaaatgcaagaaccagtcaggcgtggcggcgcgtgcctgcaatcccaggcactctgcaggctgaggcaggagaatcaggcagggaggttgcagtgagccgagatggcggcagtacagtccagcctcggctttcacaactttggtggcatgagagggagaccggggagagggagagggacccctcttctgatttctagaatgctggactttattaaaccaagttcagctcagtaagtaggtgtggtcatggagagtgaaatttctcttcttctcacctgtcagatttggctttctgtgccaggggagcccaaagagaaatatgcactaattttgtagttattctcaaagcacagtcagtcaccactcctatttttcccttttaattttttcaggattggcatttgactatatttacctctccttttttcagcccttattagcagtttttgcattacaattcctttgcttgtaaggaagtgtcccctatcttacagcattaggatacgcaagaaagcactcaggtcattgagatacatctctgaggctgaggagattctcctccaccctctcctccttccaccacatgctgtg

SEQ ID NO: 10726 - DNA, 997 bp, Artificial sequence
  DNA replication origin
cccagcctgtcgctgcgctggagtcggcggcggaggccggggccgggaccctggccaaccccctcggcaccctcaacccgctgaagctcctgctgagcagcctgggcatccccgtgaaccacctcatagagggctcccagaagtgtgtggctgagctgggtccccaggccgtgggggccgtgaaggccctgaaggccctgctggtaaagtgggcaccccgggtgcccttcctgcgcgggcatcccttcccggccagcctcaaaactgcaccagaggtgtcccggccctacgtcagggctgtttcccgtcctgcccctccaagccctgtccctgggagaagcccgggtctccgggtgggaactgggtggggcgcatccgagctgcaggggcggggaaggcggagatggccccgcgcgggtgcgcgtcccccggagacgccagcggaaccgccccgctcccgctccccacagagccggccgctgccgcgcccccgcctgagttcttggtggcagggctgggggcactcaagctcggcttctgctttccagggggccctgacagtgtttggctgagccgagactggagcatctacacctgaggacaagacgctgcccacccgcgagggctgaaaaccccgccgcggggaggaccgtccatccccttcccccggcccctctcaataaacgtggttaagagcagctcgagcctggtattttctcatccaaatgctgatccctgtgggggaccgagagtgccaagtcccagattttgtgaggggtgctgcgtgagagagggagagagaggccgcgagagtctgcaggtggcatagagccagcagtgcaaggtgacagagatggggccagtatcagaggtaaaccggatttggaaacaaaactggcaggtctttcttcctgttgtgctctgtaactgtttatgaagcataaaaattatctactccttgaagactggcgagaatgcaaacgcaccaaagccattt

SEQ ID NO: 10727 - DNA, 902 bp, Artificial sequence
  DNA replication origin
cggtctgaccccacgcgcccccctgcagggctgggcccgggtgaggggagcttccctcgcgccagggcaggggcgggggcggcgcagttcctggctccctggtccctgcctctgatcccagaccgtggcaacgtcgggcactgggggtcctcgtgggcgccttctgcgcctggggaggtggaggcgccagggacgatcaggcctcactcccggccgcctccccggccgggccacaggcagccacagtgcaaacagaagtggggcgtttttctgtcttcgaaactagcctcgacgccagtggatgggcctggtttgttcctgagtttctctaaatgtcctcactcgtctgtcacctgcagaagtatgacagatggagagcaaagcacattttgaaaacttttgcaaatgatacataaactaatttgcttttagtccttcttctttcctctattttttgaccccaggcattgagcactgagtgactcacgttttgctgcgtggctgctctcagctaggttggtgcaaagtctctcttttcttttgtaaagtgtagctggcacgcgtgggaaacaggctcccgggtgggaggacctgactcttcaggcagtgtcctggaattccttccctatggctgacagcacgtcttagccctcagccaccccgagctactgcggcctcctccgcacctgcagacacttgtgcctttgccaactgttgtggccaggcacacgcattcacactgtttctgttcacttacacttttccttgactattttgtttgggggatttttgcattataaatctggagtttggttgtgttttgttggtcatcatggaagtaattttaatgggaaatacgttttcttttttaaaaacagtttgaagttaattacttttttggt

SEQ ID NO: 10728 - DNA, 1145 bp, Artificial sequence
  DNA replication origin
gatgtgctctcctctcccgagctgccatggtcaaggcaagccaggactcacctcaggctggcccagcccctcaccccacactggctctgggggccacggctggcgaagcctctgcggtagttggggatcaggcaggccgagggtctggcctgtgccgagacctgcacagctgggtcagcggctgcctctgtattcatttcctgaggctgctgtgacaagtcaccacatacctggtggctgaaaacaacacatttactccgctcgcagttctggagcccagaagtgcagtgtcacgggggtgaaggcgaggcgtcgggggccgctcctcctccagaggctgggccttcccaggagcttatccactcctggcctctccctgcttatgggggctgccagggccccttggctggtgactgcatcactccagtctctgcctcctggtcacatggcctcctcctcttctgtgtgtgtgggtgtgtgtgtgagggtgcgtggggtgtgtgtgtgagggtttgtcggtgtgtgggtgtgtgtgggtgtgtgggtgtgtgtgggggtgtgtgtgggtgtgtgagggttcgtgtgtgggtgtgtgggagtgagagggtatgggtgtgtgtgagggtgtgtgagggtatgtgtgggtgtgtgagtgtgtgtggggtgtgtgtgagggtgtgtatgtgtgggtgtgtatgtgggtgtgtgtgagggttcatgtgtgggtgtgtgtgggtgtggggatgtgtgggggtgtgtgtgtggaggggtgagagtgaatatgcatgcaagtgtgtaagatggacagtgaatgagaatgtgcatgtgaaggagagtgagtgggtgtgagcttgtgggtgtgtttgagtgtgaatgtgtgtacaagtgtgtgtgtggataagcgtgagtcagtctgtgtgggagggagagtgtgggagggagtgtgtgggagggagtgtgtggatatgcatgtgtttgaattgtgtgcaagtgtgtgtgaatgtgtgtgtgagtgtgggtgtgtgtgagtgtgaaaattctgccgccatcttatgagtgtgtgtgttgttgcatttagggctcacctagataacccaggacagtcccctcatctcacaatgacgcccccagtcgggctgccgaga

SEQ ID NO: 10729 - DNA, 1393 bp, Artificial sequence
  DNA replication origin
gtgggaccacagactgcctgtccaggagagggagggctggcacagggtgaggtgagctccttggttggccagccatgtgcccagctgctggtggacctcctgcccccaggggaccctactgaccaccccccaccttaggcatcttggggcaaggaagtggagaagggaggtgaccggcaggcccagtgctccgaaaggaagtggagaagggaggtgaccggcaggcccagtgctccgaaaggaagtggagaagggaggtgaccggcaggcccagtgctccgaaaggaagtggagaagggaggtgaccggcaggcccagtgctccgaaaggaagtggagaagggaggtgaccggcggggcccagtgctccgaaaggaagtggagaagggaggtgaccggcggggcccagtgctccgaaaggaagtggagaagggaggtgaccggcaggcccagtgctccgaaaggaagtggagaagggaggtgaccggcaggcccagtgctccgaaaggaagtggagaagggaggtgaccggcggggcccagtgctccgaaaggaagtggagaagggaggtgaccggcgggcccagtgctccgaaaggaagtggatttcggaagtggagaagggaggtgaccggcaggcccagtgctccgaaaggaagtggagaagggaggtgaccggcgggcccagtgctccgaaaggaagtggagaagggaggtgaccagcgggacccagtgctccgaaaggaagtggagaagggaggtgaccggcgggcccagtgctccgaaaggaagtggagaagggaggtgaccggcggggccccagtgctccgaaagacagtggatttcggaagtggagaagggaggtgaccggcgggcccagtgctccgaaaggaagtggagaagggaggtgaccagcgggacccagtgctccgaaaggaagtggatttcggaagtggagaagggaggtgaccagcggggcccagtgctccgaaaggaagtggagaagggaggtgaccggcggggcccagtgctccgaaaggaagtggatttcggaagtggagatgggagttgaccagcggggcccagtgctccaaaaggaagtggagaagggaggtgaccagcggggcccagtgctccgaaaggaagtggagaagggaggtgaccagcggggccgcagtgctccgattggagcttgttctgattggagcttgtctttgccccgcgccttgctccgtgcggtgggtcctgactcccagggcctgccctatggagcctgagagtgcaaagcattctgtggtgtctgtcctggagatggacccgcttggtgcagtatgtggaactcaggaggcggagtgtcttgtgaatggagctcaggcagggcagcaggtgcctgga

SEQ ID NO: 10730 - DNA, 1067 bp, Artificial sequence
  DNA replication origin
tcccagaggctgaggggcaggagagggtgctctggagtaggatgtgggtgtcccagaggctgaggggcaggagagggtgctctggagtaggatgtgggtgtcccagagtctgaggggcaggagaggggctgacatgcttgttagctgttccctggggctgggtagatggaggccgcggaggaggcgcctcctgagcccacctggctccactgtgtagctgaggacctgtggctgagcccgctgaccatggaagatcttgtctgctacagcttccaggtggccagagggatggagttcctggcttcccgaaaggtgagcttcccccgaaggcccttcagacgggaaaagggtgcatccccaccagtcgccaagaagtgcttggtactggcctcaccctgcaatggctctgtggtccatcagtgtctctcccactttgcagaggaggaaactctgcccaaagcatggagttgacctcccaaggtctcttggctggtcagcagcagagtctgtttgactccacaactttctctgctgtccccacaattccacaagctctctccatgatgagtcctggagatggatgggaatccttccccaaaggagcacagttcaggcagggcatccccatggtccccactgcttgggcaccctggagtttcgggtgtgggtattaccccaggggcctgcactgacagcccccctgccgcctccccgcaccccagtgcatccacagagacctggctgctcggaacattctgctgtcggaaagcgacgtggtgaagatctgtgactttggccttgcccgggacatctacaaagaccccgactacgtccgcaagggcagtgtgagtgcaggccattgaggagagggaacgtggggcggaacaggtgaaggggtgggaccacagactgcctgtccaggagagggagggctggcacagggtgaggtgagctccttggttggccagccatgtgcccagctgctggtggacctcctgcccccaggggaccctactgaccaccccccaccttaggcatcttggggcaaggaagtggagaagggaggt

SEQ ID NO: 10731 - DNA, 1479 bp, Artificial sequence
  DNA replication origin
cgccaggctggatcggaggcggccggggagcagcgacagggtcctcttcgcgcggttctcgaagaccgagggcggagcgaggcgggcttctccagaccaagaaggtgagagcctggcctcttcccttttcctagtgcctgacgggcccggttatatcccgtgatcaggcaccccagcctggggtcctcagcgggggctttcatgggagagtgtggaatgggctctgccttaggaagggaagacacctcggggacaattttcacacagatgttttacgattgactgggtcatcagaggctgaataggaaattgccctgcagacaaggcaggcagtggagggccaagcagcaggtgcccggcccccacagagcaacagtatttactgctctgggagtaggacgtgggtgtcccagaggctgaggggcaggagagggtcctctggagtaggacgtgggtgtcccagaggctgaggagcaggagagggtgctctggagtaggatgtgggtgtcccagaggctgaggggcaggagagggtgctctgggagtaggacgtgggtgtcccagaggctgaggggcaggagagggtgctctggagtaggacgtgggtgtcccagaggctgaggggcaggagagggtgctctgggagtaggacgtgggtgtcccagaggctgaggggcaggagagggtgctctggaataggatgtgggtgtcccagaggctgaggggcaggagagggtgctctggaataggatgtgggtgtcccagaggctgaggggcaggagagggtgctctgggagtaggacgtgggtgtcccagaggctgaggggcaggagagggtgctctggagtaggatgtgggtgtcccagaggctgagtggcaggagagggtactctggaataggatgtgggtgtcccagaggctgaggggcaggagagggtgctctgggagtaggacgtgggtgtcccagaggctgagtggcaggagagggtgctctggaataggacgtgggtgtcccagaggttgaggggcaggagagggtgctctgggagtaggacgtgggtgtcccagaggctgaggggcaggagagggtgctctggaataggacgtgggtgtaccagaggctgaggggcaggagagggtgctctggagtaggacgtgggtgtcccagaggctgaggggcaggagagggtgctctggagtaggacgtgggtgtcccagaggctgaggggcaggagagggtgctctggaataggacgtgggtgtcccagaggctgaggggcaggagagggtgctctggagtaggacgtgggtgtcccagaggctgaggggcaggagagggtgctctggagtaggacgtgggtgtcccagaggctgaggggcaggagagggtgctctggagtaggacgtgggtgtcccagaggctgaggggcaggagagggtgctctggagtaggatgtgggtgtcccagaggctgagggg

SEQ ID NO: 10732 - DNA, 2559 bp, Artificial sequence
  DNA replication origin
cattcccccgccgcccgcggcgccccgcaggccgcccgctcaccgcgcaggggctgaaggcgtcccgcttggcgcgcaggaagttggagaggttgccgtacttgcagaactccacgatcaccatgagggggcctgcggcgggaccgggcggcggccgtgcgttcggaacccggggcgcgctgcgggcgcgctccgcgtttgcacccgcgccccctcccgcccgcggcgccccgcgcccggggtctcgccgtcccagcgggccgcccgctccgtaccctgcggcttggtgcacgccccgaggaggttgaccacgttgaggtggttgccgatgtgaatgaggatcttgagctccgacatcagcgcgcggtgctcgctggccgtggcgccctctggaggggacacgggcctcacaccggccccgaccctggcaggtccccgttccccgccacccggcgcttttgggagggggagggttactaagggcccccaggacatcctgccggccccactgaggcagagggggttcgggtggtccctcggctctgaagcccgcagcctccctgtagaatctcggatgagactggcttccagcctcagtctcccttcccgagttgccgtcccaccggcccaccccgagctgctgctcctcaccagctaggctgccccttccgcccgctgaccccacacctttcagcattttcacggccacggtgtcacagctgctgcccttgtggatgccgaaagcggaggcttccaccaccttcccgaaggcgccgtagccgagcactctccctgtcggggcagggggccagttgcaggtgagctgtacggggtgagcgtggagacaggtgggcggcgggggagccccgtgcagaggtccaggaggacaggcctggcagcaggaggagcgtggggagccacagcgggaagacaaggagaggtggacaggaggccgcgcatcctcccgggtaggtgtgacagatacaccctgctcagggtggcagcaggtgacctcagggagcctgggaactggggaccctggctgaggttctaggtacccacgcccacagggacaggtcaggccaggcggaacttcctggtgcaagttttgaaaatggagggattcaggcactccggcctgcagcaggtgggtcgggcaggaggtgtgggttgggcaggctggtgctggcctcacccaggtgcagccgctctcgggggaattcccactggctggcatcgtaggacaggtattcgcattgctcctccagaggcacctccccggggtccatgatgatggacaggtagcccgtcttgatgtctgcgtgggccggctgcggggaggggacagggaggagtggggcagctcactgatttggccataccactgtggcttgggcagaactttgcccaggacagatggcacttcctgcggggttctcagtcaaggaggggacagaaaaaaagacagacaacctctgcggggttggagcccagcgtgaagggcagggaggcttcccaggaaacaaggctgccaggtgaactagggcgggcaccttattctttatcttaggggcggccagggtggggaaggcctgagagagactccatcaggagcggggagggacactcaccctcctcatgttacagaagatgaggaggaggaggacccagaagaagacagcgatgacgccggtaccgacaaggatcacgatctccatgctgcccttatcctcggagcctgcgtgggcagaaaggggccggcgtgtgtgtgtgtgtgtgtaagagcgtgcacctgcaggcagcaccccttctggtggccacgacttgcccaaggtggccacaagaaagcgttaactggggacgggaagggagttgaggggtgcagcctgaggccagaccttccacggccacgctggcggaggagttgacgcagcccttggcgttgcacacgctgcacagatagcgtcccgcatcctcctcgcgcacgcgctggatgctcagcttctggttggagtccgccaagtcgactcctgcagggggtggggtggaggtgcgggtccacctgggtttgggatcgtcggcctcgcgggcctccggacctgcccttcgccagggccaccctccctaccagacttttcctccagcagcctctcgtctttgtaccacacgatgctgggcgcgtgcgctccggccaccaagcactgcatctccagcgagtcgctcacgttcaccaggaggtcggtcaagttctgcgtgagccgaggggcttccagggctgggggcaggggtcgagagggagctaagtggagctgcacttagcaggaggaccctctttgggctgggagcagaggtagaaaaggatccctggaagctggacttaggggttgtgcgccgggcaggagcgcggcgcgcctccgcagggggcggcggatagtcaggaggggtagctcctgcaggccagggctgtgaatagacctcccaggggcgagccacgccggggcaaaggcagaggcagctactgctagaagagagcgcgtccccgccctccccgcggccagc

SEQ ID NO: 10733 - DNA, 1510 bp, Artificial sequence
  DNA replication origin
gaaatccgtggtggggggaccctgggcacgatggagggcctggtttgcaggcaggaggcatgtcagaggatttctgaggccctggctggcagtgtgggttttgggatgtaggaagatggggagtttttcttttttcttttcttttttttttttttttcctgagacggagtctcgctctgtcccaggctggagtgtagtggcacgatctcagctcactgcaacctctgcctcccaggttcaagcgattctcctgcctcagcctcccgagtagctgggactacaggcacccaccaccgtgcccggctaacttttgtatttttagtagagatggggttcaccatgttggccaggatggtccgcccgcctcagcctcccaaagtgctgggattacaggcatgagccactgtgcccagccagtggggtgtttctgtctcatgatttcgccctgtcgatgctgagagtgagaggggaggagcaccctgaactgtgtgcacccaggaaaatgggggggaggagctcctgtgggggccttgtgctgccagtgttgtgctgtttggaatgcatgctgtctcagggttgggatgcaggacaagaggggagggagcatgcagagaggcggctgcggaccccacgcaccaggacggggcagcaccgggagggcaccaaggggtggggaggaagcagtgggggctttgatgaggctgaaggatgtggatcaagaacaggggaagcagggagagagacgtagaagacaggtgttccgggatggcgcggtctctggtgatgaccaggtccaggatgcgcccacagaactgagtgattcaggaggagaagatgtgagggccgtgcaggggggatctcagaggccagggtgctggtgagtcagccctgtggatggtgaagtcatggagaagggcaggagctggggtgggggggatggtgagccaggagctacggtcagcagagaatgaggggaagtgacgggggggtgcagctgatgacagctttaatggggaagagggcggtgccgccaaagagcaggaccctcagagggactgctgtagggagggcaggtggctgcgaggagttcaggcatgtggggtggagggcagtaaccgcccagggccagtgccgtggccagaaagccaggcttcacataaggcaggaagggacattcggagtggacagtgaggtctacagcaaagtttgccgatcacacagggcacagtggaaggttggtaaaggcagaggggtcactggaataagttatggtatgtcatgaaaaaggagacatgtcatgaaaaagcttgcgtggatgggcaaaagggttggcaagcgcgatggatggtcctgctcagcagtgatgcaggtgcttcctttggtggcacggtgccttcaggaggaagctcctacagactcctctccccatccacccttcacccatccacttacctttcacctgtccacccactcttccacccatccatccattcatccttccacccaccca

SEQ ID NO: 10734 - DNA, 1424 bp, Artificial sequence
  DNA replication origin
aagtcagcctgggggcacagaacaatctggaggcaacagtggctggaggacgtgaatgtgaaggggatgaaccacgagggtgtggagacagggacagggaccaggagtttggattttcttgggagtgcaggggaatccagtgcaccggcgagattgaagcacaagtgtgatcaggcctgtgctttttaaagtgtcactcactgcagggagcggggcccagaggcaggcctggaggacgacaagagcgggccccagaagccactttggggtgcgtgcagctgtgctggccccagtgagagagcaggggcgggccctaaggtgcatccagcctgacaggcttcagtggtctggccaacggatgggctgggagaggatctggggagagggagctatcgagggaggagcctttggtggggctggagggggtgcacgtctgcagtttagcatcggaaacgtagactgcgggttgtctgtggggtgtcccaagtccagtgggcagctggatgcttaaaactgaagttgcaaacagtagtcctggctggagctagagacctgggaggtgtctggactccagagagacggcggtggccagcactgtgtgttgggcagaggggagctggggagaggtaggtcacagatgctgcccaggggagagcatgcgcggctccctatcctgtgtgcccactaggtctgcagcctggaggtcataagagccccgcccagtggctctgtgaagtgaaggagctgcactccattggtggatgaggggagactagcagaggggacagtgaacagctgtggccatgaagggggataggaaaaggggcagtggctggaagagagtgtggaaccaagtaattattttgttttgtttttaagatgggagatgggccaggcatggtggcccacacctgtaatcccagcactttgagaggccgaggcaggtggatcacctgaggtcaggagttcgagactagcctgaccaacatggagaagccccgtctactaaagatacaaaattagctgggcgtgatggcgcatgcctgtaatcccagctacccaggaggttgaggcaggagaatcacttgaacccggaaggtggacgttgcagtgagccgagatcacgccactgcactgcagcctgggcgacgagctaaactccatctcaaaacaaacaaacaaacaaaaacgatgggagatgattgcatagcaaagactggtgattagaagagaaatccgtggtggggggaccctgggcacgatggagggcctggtttgcaggcaggaggcatgtcagaggatttctgaggccctggctggcagtgtgggttttgggatgtaggaagatggggagtttttcttttttcttttcttttttttttttttttcctgagacggagtctcgctctgtcccaggctggagt

SEQ ID NO: 10735 - DNA, 1315 bp, Artificial sequence
  DNA replication origin
atctcgccggtgcactggattcccctgcactcccaagaaaatccaaactcctggtccctgtccctgtctccacaccctcgtggttcatccccttcacattcacgtcctccagccactgttgcctccagattgttctgtgcccccaggctgacttctcacgctaaggactcagcttagacacggcctcctcacccctacaaaatggctccatcctagcctcctggctgcttacggcatctttcctgtcccaacttggaattatttatttatgtgtttgtttgtttaagttatatctgtccatgtcctccaataggcagtaagtttcaatggggtaaggaccaagacagctctttcttaccccaccccatgcttcccacagcacctggcacagagtaaagtctcagtgaacactcgttgaatgaaaaaaatggagggatggaagaagtatggatggatgggtgggtgggtgggtaggtgggtagatgggtgcaagggtagatggatggatgggtaggtaggtggataggtggacgcatggatggatggatgaatggatggatggatgcatgggtgggtggaggagtggatgggtgggtgagtagaaggatggatgggtggatggatggacagacagatgaatggatggatggacaggtagatgagtggatgggtggacggatggatggatggatgaatggatggatggatgcatgggtgggtggaggagtggatgggtgggtgagtagaaggatggatgggtggatggatggacagacagatgaatggatggatggacaggtagatgagtggatgggtggatggatggatggatggacggatggatgagtggataaaaagatggatcaacagatggaaggatgcatggatgggtagattgaacagaaggatggatggacgggcagatggaaggatgaacgaatggctggatggaaggatgaatggatggtggaaaggtgggcatatgggtgaagcatggatgggtggatggttagatggttggatggatggaaagtagatggatggatggctcaacagacctctgaaacctcagagactcttgtcagaccctgttgttccactggaaaagatgcttcctgttttataggatgggctccctgggcagattcaggcctgcagcctgccacgtccagaggctctgtgactgcccagcccccacctgcagccctgaagaaggcgcatccttcctgcctggctgttgtctgtctctgctgtccttcccttcccgcagcaggaagcactgtcatcctggcctctgctgcgctccccctgcctt

SEQ ID NO: 10736 - DNA, 751 bp, Artificial sequence
  DNA replication origin
agcccttgtcttgaactaaagaaccgttaagagcgggtcatggtggctcacgcctgtaatcccagcacttcgggaggccaaggcgggcggatcacaaggttaagagtttgagagcctggccaacacggtgaaaccccatctctactaaaaatacaaaaattagctgcgtgcggtggcaggcgtctgtaatcccaactactcgggaggctgaggcaggagaactgtttgaaactgggaggcggaggttacggtgagccgagaccgtgccactgcactacagcctgggcaacagggcgagactccacttcaaaaaaaaaaaaaacctgttaaaagtggtaatgagccggccgctccacagagctatggaaaagtgcaggagtcctgggtggggagcctcggtgtgagacgctggggaagcagcacagcagctcagacgtcagaggtggggaggggctgttccagatctagggcacgtggaggtctggagccgcaccgggtgggtggcaaggaggccaaggaggcaccagattctgtccataagcagcaaaggggcaggggatggttttaggcaggagagggacttgtgttctagaaagatcatctgacccctgagcaaggactgggccagtgggagacactggtattgccacccggggggagagccattgaggctggccagcagcggggaggggaggagggaaagtggagggacagcacgcctgcaatgcccgggaggggttctgcggccaga

SEQ ID NO: 10737 - DNA, 1139 bp, Artificial sequence
  DNA replication origin
tgctgttccctcatccaccaggcctatggcacagagccagtgtggctgaaggagtcctgagccctcccagagcatagggcccacatggctgggcccagacagggtacgaggtgtgatgtgtggtctgtctggcgaattcttcactgtaacccccagcagtggcaccccgacccagggaaggagcctgcagttctatgcaagaccccagcatagtgcctgttcggggtggcccagggaggacttggacctggccccatcgcacaggggtttcctgtgccttgcagggacacagacatgccatcagacgtgtattgcccagggatgaaagtgttcaggggccctggtgaggcccagctggtggctgtaagctgcacaggaaggcagtgtcacttccagctaagggcttcctggtggggtctgcagaactccaggacagggaattccaagcagagcaaagaaccccatgaagccccagagacaggcaagtccagatggtgaatgtggccaagtgggtggtccggtgaggctggagtctgggaggagtggatgggaggtaggggaaacgaggctggagatgcggcagtgccagcagcaaggaggctggtgtccaggggagacaggaactgcaagtggataacccaggggataaactggggtggaggcaggtagcagctggggatggtggggacagaggaagtcccaggtctctggcttcaaggataatttatcaaagggagaccctgggagaggagcaggaccttgggtggaggtaggcaatgggatttcctcggagacctcagctgatgcacccggccagataaggagggaggaaagttgggagcacttgagtatgatgggacagaggggaatgggggaaccagggaaattaagcgaatcagctgcaaggggaggtgcttctctgtgtctggcttactcccctcctgctgccgtattttcctccacagggcagttttctctccaccaaggcctagcctgtgccccacgtccctctgagatgcccctcggagttgggggtgggcagggagaggggtctggagagcctctcacaccccctagactctgagcaagattcagtcagtgtgtccagctggagccagggattcctgagtttcgatcct

SEQ ID NO: 10738 - DNA, 2575 bp, Artificial sequence
  DNA replication origin
gggacacggtggccctggtgcgcggacgcctgaggggagcacggcgcttggggcgcgggacctcgggatgaggaaggggcgggcggggaccgcagccgggtcagggccagggcggccgggccgcgcctcggcgcaggggtagctctcccggcccctgaatccgcgtctccgtcggtggctccgcgtcctcggagccgggccctgccgggctgcgcgctgagcccggatccttcgcgcccttactcgcttccccgcggggtccccgcgccgcgccgtcccgacccacgcgcgccggagatccatcccggccgggccccggacttgggtgcgcacttcccgacgcccagcgcctccgctcgcggtcggtcccccagagggcgctcgaggcgggcttccccctccccgtggccggcgacggcggggacaggggccggggaccaccgcgcgcccgaggcggacgggtgcaggtgcacgctggcacttgagacgaatcttgaggaggcgaatcgcgggctgtcagcgccgcagaaggggcggaaggccaggggtccccggatttgaggggacaggggcctcgaaggccagctgaggagcagaggcccccgcgggagggtcccctgcacaggagaggcggggttcggtttgtgttgggatgtggctctggcggggagagacgcagacctgaagcggaggcggaggggttggaaagagggactgtgggggatgagcgggcggcagagggagtggatggagatgtcagggaggaagctgagaagatgagctgggagtccccacggagctggtgtccctggaaatcaaagggtgtaagggcggggtcaggggttccagtgtctgaagccctgaagtcagcgacggggacctcaacatttctgcacgccataggaattaaatactggctttacatgcttgtaattctcacagggagtgtcagacccattttacacatggagaagcttagaccaaggacatgtgtcacttccccaaggtccccaggaggcccaaagtaagcctgacaaagcctgcctttgctcaccacctgtatgtccactggctgaagggcagaggacaggagagggggcaggtctggctcaaccaggggaggagggaggagaacatctatctgggcctccgagtcgggcaggccagatcagggcgctgcccttggccctcctggacccagcccaggaccaggctcccacaggtgctcaggatgtatttgtcgagtggctggtagaccttggttggactgcagggctgtagaatgggagacgcttatcctggaggagacatgggacaggcacctgggcgcagtgtctgagctgggctgagtagctggagaggaagagagagacccgggaggggaaccctggaggaggggcccagagggcaagggggcttccagggatccagggaacattctgcaggtataaggagaaccaggagaggccagtgtcctggtgctcccgggtggagcacagagggacgtggggtgaagggtgaggaagctattccctgcagtaagtagtgactcttagtgacccagttatgaagaggagagagggcattagttgggcgccccatggagaggggtgtcctgggctggacctgggtttggctggtggggagatggcaatgaagacagaggtcatccctccgtgagccctgcaccttgctgtaccccctgctaggctgaagaccccgggagcccccagcttgatgggggatgccatggcggaagcacaagccctcagctgcagtcgggtgtcagggcagctggtccggtgggagctgcagtcgggtgtcagggcagctggtccggtgggagcaggccagaagcctgagcatcctgaagctgaccccttaaaagtgtgctattgatcatagaaccagactcttgtcctgcctctgccgtaaagtcctttctgtgtgacctgggccccctcctttcccctccctgcacctcagtttccccaagcatagccatggcacaagcatagccatggcacaagcatagccatggcacaagctggcaagccccgaggttgtgtgggttgtgtgtgcttgggctggactccaagacccagatgcctgctgcagttccacagtcttgccccagtggagagggtaggtcacagatgtctcttggggcttagtctagagagaggccattggcacctctgcactgtggctaccagctcagggacatgcaggagcagggtctgctgggcatctggagtggcctggtctcaggacgtttgcccttgctgtgacctgggtcacaaaggcccagatgtggacagatgtgtggcccagggatgcaagtcactgcaggcaggatgtggggatcaggcccactttacttgggcctggggaccttctgctccagctcagggctctgaggactcgaatgcaggtgctgttccctcatccaccaggcctatggcacagagccagtgtggctgaaggagtcctgagccctcccagagcatagggcccacatggctgggcccagacagggtacgaggtgtgatgtgtggtctgtctggcgaattct

SEQ ID NO: 10739 - DNA, 1117 bp, Artificial sequence
  DNA replication origin
gataaacaaaagcagggaaatgataatgccagggtagtgggcatcttctggggttggtgaggggtttgtgatgggaagtgaggggatgtggggatgtcattctacatcccttggcctggagaatggaaacacaggtatttgttgctttaaaattcaggtttataatatgctgatatattatgtactttccataagtgtgttacatctcataatctttcaaagctaaaaaaaatcaatatatgattgataaatacctaacttcatgtatcgcttggttacctagtttccccaaccttatttgttaaattatctacactatccgcactgatttgtgattccagcttaataatatagccacttcttacctggattggagagagctggtagtggttattgaaaatctactcttgctttttggcgaggatgaaagggctttggggggcgggggtggggggatggaaaatgtgaatgaaacgaaaagcagggaaggaggttgagacagtcatggtcatgggcttcattattaaacaggaaaattctagagacaaactgaaaagagaacggaagtctgtaagagggttgccaagtcagaaagcaaaagcaaagtgtcgctttattaaaaaggtgggggcgggtcctgattgagctgagaacaaaacatctgggggagttctaaagctaggaggccaggcctgcagggagggggtcggtcatcccgggtgtcccgctcacgggtgcggcttccgtcgacactgtccgtcgacactgtgcaggtaaacactgctgaacgggttttgtttttgcttttttttttttttttttggctcccagactggagtgcagtggcgcgatctcggctcactgcaacctccttctcccgggttcaagcgattctcctgcctcagcccccccgagaagctgggattacaggcgcgcacaaccaagctcggcgtattattttatttatttgcttgtttatttttgagactgggtctccctatgttacgccggctggtgccactattttcaaagatgtaacatactatttttacaaggattgctttcttgtttagtctagattttaccgatggaaagaaaggacggaaaagagcgcgtg

SEQ ID NO: 10740 - DNA, 3093 bp, Artificial sequence
  DNA replication origin
ctctactaaaaatacaaaaaaaaaaaaaaaaaaatagggcgtggtggcaggcgcctgtagtcccagctactcaggaggctgaggcaggagaattgcttgaacccaggaggcagagcttgcactgagctgagatcgcgccactgcactccagtctgggcgacaaagcgagactctgtctcaaaaaaaaaaaaaaaaaaaaaaaagaatatgtattctggccagaggcggtggctcatgtctgtaatcccagcactttgggaggttgaggcgggcggatcatgaggtcaggagttcgagaccagcctggccaacatgatgaaaccccgtttctactaaagatacaaaaaattagctgggcgtgatggcatgtgcctgtaatcccagctactcaggaggctgaggcaagagaattgcttgaacctgggaggccactgcactccagcctgggcaacagagcgagactctgtctcaaaaaaaaaaaaaaagtgtattctgcagctgttggatgaaacgttctgtaatatcagttatgtccatttggtctagagtatagatttaactccagtgttctttactgattttctcttgggatcgtctgcccactgctggaagtggggtgttgaagtcccctattatcatcggattgcagtctgtttctccctttagatctattaatatttgctttctacatttgagtgctctggtattgggtacatttatatttgtaattgtgatatcctttttctgaatggactcctttgtcataatataatgaccttgcttgtatctttttacactttctgacttcaagtctattttgtctgatataagtatagctactcttcttctcttttagtttccatttgcatagaatatctttttctaccccttcactttcggtctacctgtgtccttacagctgagctgaggcagcatagaattgagtcttgcctttttatttattcagcccctctacgtctttgagataatttaatccatttatattttaggtcgttattgataggcctgtacttactcctgccattttgttaaattgttttctagttgttttgtagagcttctgttttcctcctctgtggtttgatggctttgtactccggtatggtttggttcttttctttttatcttttgtgcatctattacaggcttttgctttgtgattaccctgaggcttacataaaacatcttataacaagttaatttaagatggtaatagcttaattttgatctcatacagaaactctccatttttactcttcctcctcccaggttttatggttttgatgctgcgcttaatgtcttttaataaaatgtatcctttagcaattattgtagctttatttatttatattattttatttttgagacggagtctcactttgtggcctaggctgggatgcagcggtgcaatgtcggctcactgcaacctctgcctcccgggttcaagcgattctcctgcctcagcttcctgagtagctgggattacaagcacacacaccaccacacccggctaatttttgtatttttagtagagaccgggtttcgccatgttggtcaggctggtctcaaactcctgacctcgtgatccgccctcctcagccttccagattgctgggattacatgcgtgagccaccgctccaggcctatttatttatttatttttagatggagtggcagatcttggctcaccacaacctctgcctcccgggttcaagtgattctcctgcctcagcctcctgagtagctgggactagaggcgcacatgccaccaagccccgccaatttttgtatttttagtagagacggggtttcactatgttggccagcctggtcttgaactcctgacctggtgatctgcccgcctcggcctcccaaagtgctgggattacaggcgtgagccactgcgcccggccttagttattttttaatagatttgacatttgacctttcttttctttttcactgacaggatcttgctctgtcccccaggctggagtgattagtgatgtccaggatctttttcatatgcttgttggctgtatgtcttcttttgaagtgtcttttcatgtcctttgcccacttttaaatggggttgtttgttttttgcttcttaatttaagtttctatttcttattttaaaaattgtggtaaaatactcataaaatttaccatcttaaccgtttttaggtatacaactcagcggcatgaagtatgatcacattgttgtgccgacgtcacccccatccgtgtcttcagagctctttccatcttgcaaaattgaaactctatacccattaaaaataactctaggccatgtggagaggcgtgtgctgcgcgcgccggacagcgggacagagggacagagggacagcgggacagagggacagagggacagagggacagcgggacagagggacagagggacagcgggacagagggacagagggacagagggacagagggacagcgggacagagggacagagggacagcgggacagagggacagcgggacagagggacagagggacagagggacagagggacagcgggacagagggacagcgggacagagggacagagggacagcgggacagagggacagagggacagcgggacagagggacagagggacagagggacagagggacagagggacagcgggacagagggacagcgggacagagggacagagggacagaggcccagcccgggaagccgcgcggctccttccccgcgccctgcctgccgctccgcaggggggtggcctcgtccgtgcgcacagctcacctgtctgtggttttttctaggactgcccgccgcctccgtcctgcacttgattcctctcgccttattgctggacggtggtggaagggcaagaagcaaccgaggacgcctctgggtgttctgtttctgtttccttctcgcagcttgggaagtggagggcgtgggatggaaaagaaccgggacctccctcctcctctccaccttcttatactaaggagcctgctctgcctgcggtaagcccctaatttcccttcctcctttccctctatcgcagtcctcgcccacc

SEQ ID NO: 10741 - DNA, 1351 bp, Artificial sequence
  DNA replication origin
gttgctgtaagtaactggtgcagtgattctagttggtggctagcgattccagttggtggctagtgattccagtgggtgactagtgattccagttggtgactagtgattccggctggtgactagcgattccagctggtgactagcgattctagttggtggctagcgattccagttggtggctagcgattccagttggtgactagcgattccagttggtggctagtgattccagttggtgactagtgattccagctggtgactagcgattccagttggtggctagcgattccagtcggtgactagtgattccagtcggtggctagtgattccagttggtgaatagtgattccagttggtgactagtgattccggctggtgactagtgattccagctggtgactagtgattctagttggtggctagcgattccagttggtgactactgattccagtcggtgactagtgattctagttggtggctagtgattccagttggtgactagttattccagttggtgactagtgattccggctggtgactagtgattccagctggtgactagtgattctagttggtgactgagatttacaggttgaagggggggatcaagtagaagctggaggatggtctgaaagagggagaggggcgttgttcaggcagaagtgggttggatcctgactctaccactcactatgccacctgtcaaagagaaacaaaatcaggctccaattacaggggtaagggaagattttcatcagtaccaactgttgcactggggaagagtccagcctgagctggactgaacttggatttgtagaggtgactttgagtttcaaagggagaatgagggaataaggaaggggttggggggcgctcagcagagtcaggaaggtgacaaattgcaaagggttggttgagtgctgttggccccagtgctgctcccggtctggaaactgtcatcctcccagagggacgggagacagaggccttgtcccaggtgccagccagaacaaactacatcccttgggcagcatccagttttctcaggcaggcaactaaggggcgcccgcgttatctgaggggtgtggcctccagcgctggtaactgttagtgtctgctcaggtctccataggccaaggctgggtggggcctggtggagaacggggctcagaggggcctggctggagtccggtccaggaggttctttgtcaagagagcgagttaaccgggccctgggagcctccgtttttcctcccgcatctgtgaggagcaggagatgacgtgatccaggagcctccccgctccacgagcgcggtcctagcggaggctggtccctgccggttcctcgcc

SEQ ID NO: 10742 - DNA, 907 bp, Artificial sequence
  DNA replication origin
ccacgcctgactggttctcgtatttttttggtggagacggggttttgctgtgttggccgggctggtctccagctcctagccgcgagtgatccgccagcctcggcctcccgaggtgccgggattgcagatggagtctggttcactcagtgctcaatggtgcccaggctggagtgcagtgacgtgatctcggctcgctacaacctccacctcccagccgcctgccttggccccccaaagtgccgagattgcagcctctgcccggccgccaccccgtctgggaagtgaggagcgtctctgccctgcagccacctcgtccaggagggaggtgggggggtcagccccccgtccgggagggaggtggggggtcagccccccgcccggccagccgccccgtctgggaggtgaggggcgcctctgcccggccgcccctactgggaagtgaggagcccctctgcccggccaccaccccgtctgggaggtgtacccaacagctcattgagaaagggccatgatgacaatggcggttttgtggaatagaaaggggggaaaggtgggggaaagattgagaaatcggatggttgctgtgtctgtgtagaaagaggtagacatgggagacttttcattttgttctgtgctaagaaaaattcttctgccttgggatcctgttgatctgtgaccttacccccaaccctgtgctctctgaaacatgtgctgtgtcaactcagggttaaatggattaagggcggtgcaagatgtgctttgttaaacagatgcttgaaggcagcatgctccttaagagtcatcaccactccctaatctcaagtacccagggacacaaacactgcggaaggccgcagggtcctctgcctaggaaaaccagagacctttgttcacttgtttatctgct

SEQ ID NO: 10743 - DNA, 939 bp, Artificial sequence
  DNA replication origin
cttgagattagggagtggtgatgactcttaaggagcatgctgccttcaagcatctgtttaacaaagcacatcttgcaccgcccttaatccatttaaccctgagttgacacagcacatgtttcagagagcacagggttgggggtaaggtcacagatcaacaggatcccaaggcagaagaatttttcttagcacagaacaaaatgaaaagtctcccatgtctacctctttctacacagacacagcaaccatccgatttctcaatctttcccccacctttcccccctttctattccacaaaaccgccattgtcatcatggccctttctcaatgagctgttgggtacacctcccagacggggtggtggccgggcagaggggctcctcacttcccagtaggggcggccgggcagaggcgcccctcacctcccagacggggcggctggccgggcggggggctgaccccccacctccctcccggacggggggctgacccccccacctccctcctggacgaggtggctgcagggcagagacgctcctcacttcccagacggggtggcggccgggcagaggctgcaatctcggcactttggggggccaaggcaggcggctgggaggtggaggttgtagcgagccgagatcacgtcactgcactccagcctgggcaccattgagcactgagtgaaccagactccatctgcaatcccggcacctcgggaggccgaggctggcggatcactcgcggctaggagctggagaccagcccggccaacacagcaaaaccccgtctccaccaaaaaaatacgagaaccagtcaggcgtggcggcgcgcacctgcaatcgcaggcactcggcaggctgaggcaggagaatcaggcagcagtaccgtccagcttcagctcggcatcagagggagaccgtggagagagggagacggaga

SEQ ID NO: 10744 - DNA, 2212 bp, Artificial sequence
  DNA replication origin
cccctgggctgtccctggctcttccctcccactcatctgctttctttcctcaactttgcttcctcccacccgtctagccctctccttaactcttcattctcccttttcctttctttccctgcctgccacctccttttccaggacacacacacataaatatttttcagacaattcagcctttattttagaaaataattctgtagcttccactttctttcatgaaactgaggtcaggcaagaaacaaaaatccaccaagtcctctccatcctgccatggcgtcctggcctgtgaggacatggggcgcctgggagcgggcggggaggctgggcagcactgggccagaggcgtcctggtcactgctccacctggtcactgctccacctcatgctgagaggagcctgtgtgtcaaaccccaggggaaaaagggacaggcagatcgaattctgtcttctaccaagccagcaggagcctcctagagcaacagggagggcactgattttcagaaaggaggggtcagggcatagtccctctctgaggtaaggcaagagagaggttgtcccagcacaaggccttcctccctgcacctctctcctgacagctgggcatgggctgaggagaggtcttgcttgcccccttcaactttccatctcagaactataaactgctaggctgcaaggagagaagggctaagtgggggtcagacaggagagaagggcaggaggcagtgagccccgatgacccaccaactccaccaggccctgacaaggaagcccctttggttagtatcattttggccacaaatatgtccccttctcccataactcagtccccactgggggaaggggagcaggtatagaaggagggctcgtgccctggctggaagagccaggtcagggagaaggggtctggtcaagagagcgaacgttgccaaactctctgcacatgctccaggagaaagctcaggacgtggacatttctggccccaacaagcccagtgccccccaccacacagtggtttcctgcttaataccccgcaacataccctagaatagttcccctgatctgactcccttgagaacgggagaataatcctcttgttatcatttgtgcacttaaatgccactcggaaaaatcaaaaagataaatgcacctaagagggaaacacaggcaggccgatgcagcctggggactgtggtcccacctcagctcatgatgtggcaaggaggggcccaggaaggacaggcaggtgctaattccagctaggatcatagccctcccacgtcagtgggggcgccaggtggacacggcggccccggaactggaaggtgacaataccccggtagccagctctcggaacccccgacttaaggtcatccatgacacccagagccttggcgaaagccttgaagctgtccctgcccgtatactgcacccgcacctcccccagctccttccggtcattggtcctcactttctccacctgcagctggggagcaccgtagacgcgggcgaggaaatctcggtcataggcctcccgctgcaggtaagacaggtccagctgggtgaagtgcacaaactgctggttcagcttgataaacttgaggtgctggtcaaagaactgcccgtggctcacacccttgcggccaaaggtcatcgttcttgagatctcagggcgtatgcaggcccgcccctgccgctgctccggccgccgcatccagtcgtcccagaaggcctttggccacttgggctccagctcagcccagagctcggccaacagcagccagcccaggccagggaaaaagtcggtgcggtagagcagctcaggcctgctggcgtccaccatctgctccttgccgttgtcattccaggccgagacgcaccacagggaggggtcggccttcagcagcggataggtggcccgaaagtactcgaagaagtccggggccacctccaggtcatcctccaccaccacggccgcggggaagcgaaactgccggaagacctggcccagcgcccagcggtagtggcgcgcgatcttgtagtagccctggaacttgcggtggtccggcggcaccgcaatgctgctcaggtcgggctgccggatgtgcgtgaccgcgctgccgtaggaggcgatggcctgggccgtctcctcgtgcccgcagtcctggctaacgatgatggggaagagctcagccgagggccgataatgca

SEQ ID NO: 10745 - DNA, 1592 bp, Artificial sequence
  DNA replication origin
tccttgccgttgtcattccaggccgagacgcaccacagggaggggtcggccttcagcagcggataggtggcccgaaagtactcgaagaagtccggggccacctccaggtcatcctccaccaccacggccgcggggaagcgaaactgccggaagacctggcccagcgcccagcggtagtggcgcgcgatcttgtagtagccctggaacttgcggtggtccggcggcaccgcaatgctgctcaggtcgggctgccggatgtgcgtgaccgcgctgccgtaggaggcgatggcctgggccgtctcctcgtgcccgcagtcctggctaacgatgatggggaagagctcagccgagggccgataatgcagcagcttgtccaggcagcgccgaacagtgctgcggtcacaggcgatgaccaggatgggaatcaccgccggcgcgggggtcacaggcacacgcggctgggcgggaggggccgcggtgggcaccctcccccgctggctcgacagggcatccccgatctgctgcagcagcccacgctgccgctccagctccacctcggcgtcttgggccaggcgaatcacttcccgggtgaggctggcggggtcgccatcgagagcgctgactgagggtggcctgccaggtgctgggcgcgtccagaagaagaggagcagcagggcattccaggccacaaagaggatagcgccccacagcacaagccctgcagactgcttcttcagcatcctggcccccaccggggagggcaggccaggggacggttcaaggctgccctgggcttgcccggctcccttgcccgcagtcctagggatgcctcctctggactatgggattaggaggcagccatgcacctaaagacaggagagagaaagcaaaccgtcacacaaaggctcgtggctccatgccccacaggtagaggaaatgggggcaggaaaaggccaagagtgagggtggaggaaggccaggaggttgactccagagctctctagggagtcaacatatatcctgacccaggaacgtatttttgagggagaggcagagagtgatgctggtggagggagagagaaaaagaaccccaactcccctctttctacctgtcagatttcatttcccctccaggtgggaaggaggaggggaggggcaaggagtgacagcatctgcctaccattcctctaacctaagcgccccaagatgactgatttttaaaatcaaatgtcccacctcagggctacagttaaccccttaccaacagggaagcaccagaggcaccccacgaatgtcaggagcaaaacgaagttgcccatcatctccagggttatttaacattttgctggaggaagcagccaatgcaaatgaaccaagaaaaaaaaattcaaagcagaagtggaaaggaagcaaactatttctattatctttacttgtgagaatatgcctggaaaactcaaaaagaatcaataatgaactgagcaaggaagtgtaatataaaaatcaacatatactaatggatagccttcatatccacaaataactcatgagaagaaaacatggatgagaaaaccctacttacaaaagccaga

SEQ ID NO: 10746 - DNA, 1221 bp, Artificial sequence
  DNA replication origin
agggggcctggcggacgccggccggggggcggggcgcggcggggctgtcggtcacgcccctcagtccgccccgccccgccccgcctgccggggaagggccacgttgcccgcccggccgtccggccccggcgcgccgcagaaagggctggcgagtcgaaaggcgaggcggccgcggcagcgcttgggacgcgcctgggcaccgggctcgctccctgcgccccggagcaggccaagttcggggccaggacgtcgggaggacctggtgagtaggtgtccggggacggaggtcagaccgggggaggcctcgcgggcgccgagagggagcccaagggacgtcgggtcgccccaaagccccggtgcccatgagtgctagcgagagggggcttggctggggagcggcccggtccgacccggtgccagctgcgcgttagtcccttcccgagccgagaggttggaactccgccttctgctttcggaatcccgggcctccagctgttagaggaagggcgggctccgcggactggggaggatgttgtgaaactcggccccgggcgtccgtgcgtgcggggcagggagggggtgggattggggagtggcctttcccccctaacctcactccagcatcctttccccaagttaatagaggctgattctcctcagcagaaaggaaatgttgattcagtgttgaaatatatatataataagttggcaagaaaacttttcttcctgtttgctaacgtgtgtggagtagagagccccgggacgtgcagtgcccgcgtctgataaactctgaagtagagggactgtggctggccggctccctgaaggctgaagcttcactttggttaacccttgctgctgtagtgggtctgccgttttgttttagaacatcactggctgagatgttgcccagctttattttcagtcatttacggtattttttcaggccgtgtagcctttgctcttacgtgctcacatcatccaggatctgccttccatcagcaatcactgcgtcctggtccttcccaattctggggaccattgagctcacccatttccctgcttctgtgtctcattctcactgttagaagcactgcggtatgcctgacctcagtggcctgtgttaacaagggaaactcattactgttcggggcagtagggaaattgtcactgtcgtcagtatccaggcagtgggaccttgtgatgaaccaaatcaaccct

SEQ ID NO: 10747 - DNA, 1178 bp, Artificial sequence
  DNA replication origin
ccctttctgcggcgcgccggggccggacggccgggcgggcaacgtggcccttccccggcaggcggggcggggcggggcggactgaggggcgtgaccgacagccccgccgcgccccgccccccggccggcgtccgccaggccccctcctcctggcccgcctcctttccccgccgcttctcagtcaacccaggacccaagttttcccaggaccccaacttcgggagtcggctttccggctccctggcgcaaccctgagggtggacgcccgaccccacccctgccctcggccctccagcgcagctgcccagcctggagccgcgcctgaagtgggcccgcagtccaggaaaggcgttcaccaaaccctaggccaagggctgggagccagtccccccaccccaacccaggggaggctgaggagcccgggtgggagccccagggtcgcgtggggcagggacagaacaggaaccagggtgcccgacggggggccggggggaaacacctgtgccaaagcaagccggggccagctgtggcttcttcccttttgtttttccttggtgggtggggaatgagagcttcagttctgagtaaagaaagcgaagagagacctaccagcaggggaggcccaccagccctaggcgggaaggactcggtcacaagctttggcggaagcaccatggaaaagcctagaacgggtctgcgcccggctggtgttttaaaggggaggaaggtgcggacctgaagaggaggtggaggtggacccaggcccaccgaggggagggagggacagctcttccatagcaaatacctgtcgctgagccaggagtaaagtctggccgggaggaggacagacgcagaagaccaggggctccagcgcacagagccagtttcgccagcgatcaggtctgaggcctggattccacgaggccggtgcaagccaggagccagccccactccctcgcccagctccctccggcctggccctctgcagaagcctgatgcccacccagctgtctcaccatgggaccccaggcggtgagggtgggtagccgaggactacaggctgctgggtagctgacttccccaagaagggctgctgccatgtgatcaggacccacgcccctgacatcaacccctcccccgtgttccagagcacggagcagcccggaactctgcggcct

SEQ ID NO: 10748 - DNA, 1631 bp, Artificial sequence
  DNA replication origin
tgcgtgcttcttcccgcgcggctccacctgccgcgcgcttccgctgctggccagtctcttctgcccctccccctcctgtacggccgctactctgcgcccggcttccttctcacaacctggttctgcccacacctgttcttcagccctgtgaacagtggctgtagaacagtctcaggccctgcagacccacctccctcgctcccgtggtggcggtggtgacgggctggggacgttgggtagaaaaatgggcgggatgtggaacgctgcgttgccggggcccacttccggaggacgggcggaagtggctgcggtggatggtgggaggggggaaggagtgcgaggggagggccgggccgctgggggtcgagggggtggggcctgggccagcgctggggatcgggcctggggcctggattgcgacccgcggcgggccgcggctcctagccgagacggggcgggcgggaaccaggtaacgacccggcgcagttagagcgagggtcgtccgcagggcggacgggtgggggtcagagtccaggaagggtcgcagtgtcaccctcttctcttgtgaacacggggcacggggttccggggagaagggtgggaggagttaaattcttggagggggtggaggtcatgtggacgccacgcccctacaggaaggaaaggagagagagagtgtgtgtggatggatgtgtgttgagagagagaatggatgtgtgtgtgtttacgaataaacttggaggggagggggcaacaggggtgggttttcgggctgagaaatgggaacactgtggggctgctgcaagcaggacttgggccttaaacattccaggagagtgttctcgggagtagccccgggaaggactttaacagaggttgggaattacatctctggcacagttttgcaagcagagggggagcttagttaaaggagcaaagaatgcaagtggaagatgccagcatctcggtctggaaaggatttattaactagttgaagagggctggtggattaaaacactcagcaccctaagaagcttgggagattcgattattatgttgcgctttagacaggagggcaggagaaagggcgttcttttctcgatttcttagaagagtctccggttacttttctgtggtgagaacgggtacgatccatcttttatcctgaatcatgtatgtttgtacatacatataatatgtttatattatatgtgtttatatatgtaaacactattgatgaggtgactgtgttctggcgtgtgatacgtgagttaagtaggtgctttgtataaccttgcggagtgtttaacgaaggtgttttgatgatagagcctagtatggactcttaggtggggagtggaaactagaaggttttaggactctatttgggtatctagattagagagcgttataatgtttaaatgttctgcaggttaacacagaaatctgcctcctgggccatgccgcttctaaggcctgtttcttctcatgagccccagcacaagacagatgggccagttctcacagtggataacttcccctgcctgagcaagagatgggatagtatctgggatctgtccatcaccagactctgagcttaataaggcagctgaatgaagggaggtaacgga

SEQ ID NO: 10749 - DNA, 779 bp, Artificial sequence
  DNA replication origin
tatgtgtgtgtgtgtgtgcctgtgtgtgtgtgcgtgtgtataaaaaatatttggaaagatatccactagtttaaaagtggttcctttcagcagggtgggatgagagggggacaggagacaaatttttatttacacaactctgtatgacttgttataacaagcacgaaaaatcgaaggtcacttaagtaaaaatggttataattatgaaaatacttagaaatatgtaaagtctctatggtatgattagaaatcataatgcaaaatctgtatactgtgcttatacctatgttcatatatttccatgtgagagaagcccgaaggggaatactctgcggtgaaagtagcttttcaagttcattcattggttcatttattccacaaatgtgtgctgagctgctaccatgggccagccaactgttgcagccaccgggatatagcaatcaaaaatcaaatgtgcctccactcagggaacttaaattctagtagtgggagacagacaatacatggtaaacccggcgagtatttcaggaagtggtgagcgtcctgggaaaagtggagcaggccaagggagactagcagtgctctgggtcaggggcaggtttaaacaggttggtcaggaaaggcctcactgaggtgacatgggaggaaagatttgaaagagctgaagggttcagtcctggaaatgcctggaaggggtgttttacaaatagacaacagccggtgcagaggccaatgcagctaacagaggaaggggagagcaggtcagacagctaggcagg

SEQ ID NO: 10750 - DNA, 1255 bp, Artificial sequence
  DNA replication origin
ccctcccaacccccaccttcatacttcttccacacgcataccaaagaaaataagaatctcaaggttggaaaatcccactttacttcaagtgaagtcactgggttgtccccatgaaatatctccacaatgggtgtgctagacctttactctctgtggcaccaccaagaccccctcaccctgccagagccctctgaagtgtactcagaatggaggggctggaagtggggccagtggtcctggtagtcagcctccccttctgacacaagaattatcgtggaacagcttgtgtgaccgatcaactggtctctccatctttaagccattgtcttgttgactctgttactgcagagtttggggaggtctcatggcttctcgcatcctatttcctgagcttccctgaagccaacttctggccactggtatgtgatgcgagcacagtgcctcctcctgctcctccaggaagcttctgctgattgaacgcaggccagatggcgagatccggagcaaccttcttagatcaagggaagaaaggggcacaagaggggagtaggtaacaagataaaaggagctccctccctgatgactacagagccatcgtggcagccctgggcctccatttcagacgttcatcttgcctaagccaccaccatcagggtctcagtcagtcatcattctcatttactcgggtggctgggtgagggcggaatactaccttccagctgtctgagattaagcctaagccaccaccatcagggtctcagtcagtcatcattctcatttactcgggtggctgggcgagggcggaatactaccttccagctgtctgagattaagcagaacagcagctaaagcagtaacagcaggtctccttcagcagcttgccacagggaagagggtcccgcgtgaaccgaactcaacttccacctgcgcagaggtagctaccatttgcgtagaggtagctgggtctttaaggttagagggaaggcgcagggagggagagacggcgggtgggggttgaacaaagtggagattcacaaaagcagactagggcgggcgacgtgatcagatgacctgtgcgggcggcagcctcctgccctcctccccttcgtgcgccggctggagcgaagagttcttttgacagccgtgagcttccccgccaggaacttactggggctgcatcaccctagaaacgtggctttgggctgtggaaacgctgcctctgtggaagtctctcctcgcgggggtggacgggtcg

SEQ ID NO: 10751 - DNA, 837 bp, Artificial sequence
  DNA replication origin
gattatttgtgtaagttgtaaagttttcatctacatgcatatcatttcctatggtttccaattaatccttccatcactatttttgggaaacacacaggatagtgggctctgttagaggagatagatagctagacatgaacaggagggggagctcctggaaaagggaaagtctgagaaggctcacctggagggaccaccaaaaatgcacatattagtagcatctctagtgctggagtggatgggcacttgtcagttgtgggtaggagtgcgaagaggtacctatgcagaaagaaaaaccctagaactctctttaagatgccccaaccatcattcactctgcaataaaaatgtcagaatattggtagctacatgctgataagaaggacaaaggggacattcttaagagaaacctggcaccctaagtgcagattagggcaaagaaggacattcaaaagagataggcaggcacactgggtacaaacgtgaccgctgtcagcctgcctgggatggcgggaaggaggctggtgccagagtggattcggattgatcaccacacatgtacctcaaccaacagtgaggaggtcccacaagcctaagtgtggcaagtcggggacctaaggcagtagcaggaaaaccagacaaagagaacaggtggagacttgagacagaggcaggaatgtgaagaagtccaaaataaaattccctgcacaggactcctaggatgttttcatgcacgatcagcccactcctccctatttttctacaatgagctctttacactgtatttcttttcaatgaagttgtctcccatttttgtactgcctcttggtgaaaatc

SEQ ID NO: 10752 - DNA, 1180 bp, Artificial sequence
  DNA replication origin
ggtttcaccatgttggccaggctggtctcgaactcctggcctcaagtgatccacccgtctcagcctccccaagtgctgggattgcaggcgtgagccacatcacccagccatataagagcaattttaaaaattaaattaaacccaccaggaggaacaaaaactccagacgcgcaccacctttaagagctgtcactgcgagggtctgtggcttcattcctgaagtcagcgagaccacgaaaccaccaggaggaacaaacaactccagacactccacctttaagagctgtaacactcactgcgaaggtctgcggcttcactcctgaagtcagcaagaccataaacccactggaaggaagagactctggacacatctgaacatctgaaggaataaactctggacacaccatctttaagaactgtaacactcaccgcaagggtcaatagcttcattcttgaagtcagcgagaccaagaacgcaccaaaaggaaccaattccggacacactaggagtggggtgctggtggggcagggcacgggtagaagtgaggtgtgggtaggatcagggtatgcgtaatattgaggtgctgttggagtgggccgtgggtagcatggggtgctggcagggctgggcgtgggtaggagcgaggtttgggtagtggctggtgctgcagtggtgagccatggataggagcggggtgcgagtaggggcggggctcaggtggagtagggtgactgctgggccaggcatgtgtaggatggggtgctggcagggcagggcactgaaaggagcagagtgtgggtaagattggggttctagtggggcaagcatgggtaggatagggtgctgcagggcggatagcagccgggtgctgctgggacaagcacaggtaggagaaaggtccaggtaggagctaggtgctgtgaggtcgaaagcaggtagtgtgtccggaattggttctttttggtgggttcttggtctcgcagacttcaagaatgaagccgcagaccctcgcggttagtgttactgttcttaaagatggtgtgtctggagtttgttccgtcagatgttcagatgtgtccagagtcttttccttctggtgggttcgtgatcttgctgacttcacaggagtaaagctgcagaccttcgcagtgagtgttaacagctctatcaaggtggggc

SEQ ID NO: 10753 - DNA, 1102 bp, Artificial sequence
  DNA replication origin
aacccagggcgctccagagacccggcgtggagggcagggctttctgtgcggcggcctagaacttcccggcgggagccgggcaggggcaccggagcctatgccgggaaatggtcccgccttgccggtccccgcccccgtgcgcaccgggcaggcccagcgtccctcctcgctccgcccgcccgcaccctgggattcgtagtcgggttcctggctgccgcgccccactccgccctcgcggaccccggctcgcggccgccgggcgtgggaggcactaggctcgggctcccaggcggccggccccggaggccagagcgcgtgcgcggcccgagccgccccgccgggacacccgaggctgcgcggcggggcctggcggacgcgcaggcgctgccctgaccgggcggctgcgctcgtctcggagcccgctccccggccgggggtctccagatccccctttggccttttcccctggggcgactccgggggccagttaccagcagtcgctacccagccttggctgcctccgtgaatcaggtgctaatcagaggcctggtctctgggggctcccctgcctgggttttctgagtgcggcagatttaggctgggggatttcctgcggccctgccccatgcaccaagaccgagaagcctcgcctggtggggagaggtgggctacgtgactcaccccggggaggcccgacctccctaccctgggggagcagatggctggatctctgacctcagacctcacggccttagatgatgtgtgtcccttaatgtctgcattgtggttctgtctggaatggatcaatttctaaactgtagcagaattgttttgggtgttctatcaacgttattaaactctgaagtttctctccagcgacagaatccttgagccagtggtttttcttcttaatttatgtatcctcaacaatgtcctgaacatagtaggtgcttaataaatatttgctgaatgagtacatgcgtcaatctgacgtgccctggctcacccctgctgacttcattttatcttcttgctaagcgagttacacacatgctggtctcctgtctgttccttgagcctgtcaggcttgctgggctgtgct

SEQ ID NO: 10754 - DNA, 937 bp, Artificial sequence
  DNA replication origin
ggtgcccctgcccggctcccgccgggaagttctaggccgccgcacagaaagccctgccctccacgccgggtctctggagcgccctgggttgcccggccggtccctgccgctgacttgttgacactgcgagcactcagtccctcccgcgcgcctcctccccgcccgccccgccgctcctcctccctgtaacatgccatagtgcgcctgcgaccacacggccggggcgctagcgttcgccttcagccaccatggggaatgggatgaacaaggtaacgtcttccctcgttcgcgctgggtttgcctccgctccgacgccctgccgtctcgccggcgtcggctgcccgacgactcgagcccggggtgccctttcccgcggtggggacgggcgcggagggaggggcggcgcgcctgggcggcgaccgcggagtcggggttcggaggtgttcccgcccccaccccacccggcttccgggtaggcagcccccagccgcctgccttgccagccggtgcgttttcgtggctgaaacaagccgcgccctttgaaagcgttgacacttgttctgccgagaggtcagctgagctccgaatggatgtggcttcttttttgccctcctcttcgctcccaaactacgctcttgaagccaccaccgccccccccacatcattagtaaacgggtgtcctctgtaatttcctctttctcctcagattctgtgtgtgtgcctgtgagcacagagaagtttttcttgtggacagagaagttaacagagtcctaagtcctgagctgtttctagatagtggggaggagagaaaagattcagagttgattaggttatgtgacttctgcaacaagggcaacctgttgctggctgcttgcgctgatgaggccttctggaaaatctgtgttgctccatttgtcccgtccgtttctgggcccca

SEQ ID NO: 10755 - DNA, 838 bp, Artificial sequence
  DNA replication origin
ccaaaaaggttggggactgctgacttacaggacagcatggtaaggactattacagctgtccctggtgccgtgtatgggggaaaggggtgaaaagacacattccagtttgaggaggtgggaacatttaagggaagtatcttagaaaacgcagtacctaatttaagacctgcagtataagccgtggaatgagctgggcatggcgggaaggaaggagagttcaggtggaggctcagcacgtgggctagccagcaggcatgaaagaccttggggtcaggaacgagagccactgcagaactagagcagcctccccagggctgggcagtgctgggattgtgccagcaaggctgcgagcacagccgaagcctgaccagccaggtttacttcctaggccagcccttggagctaagcaggctgagaggggcagcaccttaccatgttctcagaggtctgactcctgagcttgtaaccttgtaagtggtgcggctgcaattctgcagatggtgggggagtggaggacttgctgaagggtgctgagccagcgggacgcatgatggatgtgcaggcagaaggctcacgcaggtgcccaagtggggtgggactgcatgttggggccagtcaggaggctgctgctaggactatgccggtgagaaaaaacagcagcctgccacgggtcatggtggtggagatgaagaggggcccagcaggcaaatggacttgatggagggtggggaaggacatgcaactattcttggtgactgattgcatattggggagtgagggcccagtgccccgcctgctctctgggaccttggtaacagtgcggtggctcttttgtccc

SEQ ID NO: 10756 - DNA, 1053 bp, Artificial sequence
  DNA replication origin
acactaaaagggggtctgagtggggagtctctgctctcctacacaatgtgctccagaaatgtgctattcggagctttgcctgtgaccccctgcttcggaagcattcctgcccatgtgccccactgatctctgcttttcctggcagcctgtctggagaaccgacccctcccagggaaggtcatctgtgttatgggcgtgggagcatctgctatgaactgtgtcctcgtaagagacccccatgaagagggggtggcctcatctgcggccccattggccgctgtgcccacagcccacagtgagagcaaggttggcaccacacagattgccatgagggaaaggaatatttaatctgggcagcctctgttcggaggaggtggggagagaaggcagtcactctggaatattccatgaacagagtggagcctcgaagcctggagcgcaggcagggaggtgcaccgggcggagaggcccacaggggctgctcggtgggggggggtaccctgggcgaggaggggggtctgggaagaggggtgagggcaccggggcatgaatggcctgcaggtaaaggcccagaactggcatggccttggcatcacacttgcaaacgctgaggacctatcctggggagaccagagactagaaggcaagaagggctggtttccaggtgcctgcccaggaagctcctgtgctgtgggctgtgggcggctgtggaaggccctggggcttgatttaggcctggggatgctgggctggcggctgcgagggaagagcagtcaggagcaggaaccactgcctggactggacgcctcagggacctctccatggaagaattgaacaaatgaggtgacaatgtgggggccatcgccatcatctccttgtgactggctgcggtggcttgggttctccagaagcagaagcagcattaggggtgcagacggcacactggggggtttacacctgtgacaagaggaggaggccgctgggtcctccaactacagctcggtcccacctcctctccaccagccccatgggcgctgccagcagggactgccc

SEQ ID NO: 10757 - DNA, 1062 bp, Artificial sequence
  DNA replication origin
agcgcagatggggtgggagtcggagctccaggacggggcgcgctcccttcccgctccgaagccggggtaccctgcgctgccctggaggtcgaacctctggttcgcgctccgggtcctctctggtatcagcctcacacccctcctcctgcccgactccagcccttacctcgccctggactcggagctgagggcagcggtgggtcccaagatcgagcggtgaaactgagagtgcgaggtgggaaagaggaactttatagaactctctggggcggggcctggggcggggcggggcgccgaggcctgtgggggccgggggttggactggggagagggactttgcaagccgagagccggggccggccgggcgggcgagcctcagggccggcgtgaaggctgggggctgccgcggccggggtggggttcccgcgcccttggcgaccctccgcgcgccgcgcccggagagcgcacctccagccgggcgcgcgccgcttcggggactgtcactggggccgtttcccgcgaagggcgaggtgcgaaatgcgaatctcgcctttgcgccaggacctcaggaggccagtcaatcactaaactgcagcgatgtggccagggcgggaaatggggggcgtgtagtagcgggaatctggtgcgaaggggacttcgctttgcagagcgtgtaacggaagacggaggaatggtccaaagagaactggaggtggaggttgcgggagcaccctcggcaaggccatcaccgggaaccctgcctctccgcggtgtttagagaacatcgcactcactaaaaagaaaataggaaatggcccagctcccttgagctattaagcttgattcaaatactgtctctgcgtgtctgacatgcttacatccttttgcatctattaggctggtgaattgaagtgactcagacaatgccccggccccgaagttttaattatcttagcatgaaagagatgggggcggggagaggctccctaaggatccaagtgcttaatcacttccagacttcagttcaccttaaaatgatgtcgttttaacctcaacctggag

SEQ ID NO: 10758 - DNA, 748 bp, Artificial sequence
  DNA replication origin
ggcacccacacaagacggcacaactgcctgcgagaaacaggcccggccctgtggaccccaatccgaggctccttcccctgctcttcgttcctaaggggcccaagctcacggcggcctccggcgcggtgctcacccgctggcgcaggaggaggaggagctccacatttgggtcgctccgagccttgcgtgcggtggcctagccggcctggcgcggtccctgcctcccaggctccgcagctgtcgtcgccctctcccgcgccctccccgcctccgctctcccgggcctgctccggggtccggcggacgctctgcgcgcggaatcccccgtactggggctgcagcccccgcgtctgcgccacttgtcgtttgcagagcccacttagtgcgcgctagctgggcagggataggggtcctattcggggcgaagggtctggatgcgagcagagaaagcggagggtggaggaacccggggctgcgcccctggaacgcccggccgcaggcgaggtcctccgcgcgtggaggccgccaggggagtggaaactgacagagtcgcggggaaggggcgagaagcgggttgggagtgagcgaaggcaagcgagagctgcgagtgagtgcggaaggagggccaggaggggtggcggctgggtggggagagagggtgcaagacgagcggcgcgtgtcgggagcctttgggctgcgggtgcgttacaggagagcaggcgggtaggagccttcgcgggggccgagc

SEQ ID NO: 10759 - DNA, 1156 bp, Artificial sequence
  DNA replication origin
cccgcagtgcagagcagagcgggcggaggaccccgggcgcgggcgcggacggcacgcggggcatgaacctggagggcggcggccgaggcggagagttcggcatgagcgcggtgagctgcggcaacgggaagctccgccagtggctgatcgaccagatcgacagcggcaagtaccccgggctggtgtgggagaacgaggagaagagcatcttccgcatcccctggaagcacgcgggcaagcaggactacaaccgcgaggaggacgccgcgctcttcaaggtctccggcctcgggagccggcgggggcgcgccggggagggcccagagacagagcccggggtccccggcgccgcctccgaggcgagcccaggggaccgcgcggggcggacgggcgggcggcggaggcatcaggtggcgtcgccggagccgcaggaggaggaaaggaggcctcggctctcagcgggaccgcgggggccgggagccgggtcctgggcgcgtggaggctgcagggaaaccgctgaaggcccggccgggcccggggaagggcggccaaaggcttgaggggttttgcgcgttcgtccgtgcgttctcgtttccacgcaagcctcccgcccttcctccgggctcccgtctgccgcctccgtccgtgggtccccctcgccctctccgtgcgtccgcgcctgtgccggcggctgttttcgtctctcaccgcgtctctgtttctcttttcgctgcttttctctctgagtctctctctctccatgtttttcctgaggtcagcctctcttctcgctcctgctagctctctgcgggtactcccacctctgtctttctctttgtgtgtctctgtctctctctttcccccatcgcagtggaactcagggcctctgtctagagctgtctcccttgccctttgcgcgagtgcacacacgtgtgtcgttgttacgattgttctcccctaaggcagtttacccagagaactacgtgtctgggcccagcccccacctgtgggcagagcaggggaaggggacttcctccgggaatttggtctcaatttgctctcagagtgcctcagctgtgctgccatccagatgtctcctgtgggtgacagctcacaccacagctgtccttagtcctaggcaagctcactcagacac

SEQ ID NO: 10760 - DNA, 1446 bp, Artificial sequence
  DNA replication origin
agctcagtgaaataagccagacacagaaggacaaatactgcaggattccacgcatacaaggtatccagagtagtcagtttcatagagatagaaagtagaatggtgggggctgggggcaaaggggccagggaatggggagatagtgtgggatggagacagggtttcaatttgggaagatgagaaagtcctgcagacagatgctggatatggctgcacagcaatgtgaattacttaatgccactgaactgtatacctaaacatggttaagatggtaaattttatgttatgcatattttccacaaataaaaaagaagaatcaatgttcttatccttcctgtttccaggcaaccccaaatgctgacattagcgtgaggggaaacagcagggccaaaggcaaagagtcagtccctagctgtacagagactgtgatgactgaggaagggcagagactcaggagggtcccagaatgggggtgagagtgagagggaggttctcacatgggggttggaggtgaggaaaggagatcccacaatgggggtgctagggatggagggagatccccacatgggggtgggaggggggaagggaggtcctgagttgggggtgctagtgggggagggaagggaaatcccatattggggtgctagtgggggatggaggtcacacattggggtgctggtgggggagggaggtcccgcatgggggtgctggtgggggagggaggtcccgcatgggggtgctggtgggggatggaggtcccgcatgggggtgctggtgggggagggaggtcccgcatgggggtgctggtgggggagggaggtcccgcatgggggtgctggtgggggatggaggtcccgcatgggggtgctggtgggggagggaggtcccgcatgggggtgctggtgggggatggaggtcccgcatgggttgctggtgggggttggaggtcccacatgggggtgctggtgggggagagaggtcccgcatgggggtgctggtgggggagggaggtcccgcttgggttggggatgagaacgggtggccgagggagtttccgcatgggggagtgggggtgccagagggaagttcacaggctgggggtccctgcatggaggcagctgcagccagaaagctgagagagcgttcatcctcagtgtcatagctcagaggacaaagaagcatcttgggaaagatgaggtgggggaaagcatatcaaggggaaatggtaggaaaagaaattaatggaggcaggactgggagatgggccctgagaccctgagcccctggtcccttcacctcagagctggtcccacccccagagctctggggaccccacaaggcagcttgagaaactggaagcccaccaaaaaatataaagggacgtatcaacttagaaagattacatttgtgcttttctccctttctagtaacaaaatatgtggtctc

SEQ ID NO: 10761 - DNA, 1251 bp, Artificial sequence
  DNA replication origin
gctgcggagggtgtactgggtcccccagcagtgacaaaccaccggcgctgcactcgatttctcgccgggccttagctgccttcccgcgggacagggctcgggatctgcagcccgccatgcctgagtctcccaccctctccgtgggctccagtgcggcccgagcttccccgatgagcgccgccccgtgctccacggcgcccagtcccatcgaccacccaggggctgaggagtgccggctcacagcgcgggattggcaagcagctccgcctgcagccccggtgcgggatccactgggtgaagccagctgggctcctgagtctagtggggacgtggagaacctttatgtctagctaagggattgtaaacacaccaatcggcactctgtatctagctcaaggtttgtaaacacaccagtccgcaccctgtgtctagctcagggtttgtgaatgcaccaatcgacactctgtatctagctcaaggtttgtaaacacatcagtcagcaccctgtgtctagctcggggtttgtgaatgcaccaatcgacactctgtatctagttactctggtggggccttagagaacctttgtgtggacaccgtatctagctaatctggtggggccttggagaacctttacgtctagctcagggattgtaaatacaccaatcggcactctgtatctagctgctctggtggggccttggagaacttttatgtctagcttgggggttgtaaacgcaccaatcagcgccctgtcaaaacagaccattcagctctaccaatcagcaggatgtgggtggggccagataagagaataaaagcaggctgcctgagtcagcggcgacaactccttcgggtcacgttctgcattgtggaacctttgttctttttctctttgcaataaatcttgcttactgctcactcttatgggtccacactggttttattaactgtaacacttatcttgaaggtctgcagcttcatttctgaagccaatgagacaataaccctactgagagggatcgaacaactcctgaagtgcagctttaagagttgcaacactcgcactaaaggtctgcagcttcactcttgagccagtgagaccacaaacccaccacaaggaagaaaccgaatgcatccgatacatcagaagcaacagactctggacatgctgacgttaagaactgtaacactcaccgtgagggcctgtggcttcattcttgaagtcagtgagagcaggaactcaaattccag

SEQ ID NO: 10762 - DNA, 1510 bp, Artificial sequence
  DNA replication origin
tcggctcgccgctgcactgtgggagcccctttctgggctggccaaggccagagccggctccctcagcttgcgcggggaggtgtggaaggagaggcgcaggcgggaacccggactgtgcgcggcgcttgcgggccagcgcgagttccgggtgggcgtgggctcggggggccccgcactcggagtggccagttggcccgcaagtcccgggcagtgacgggcttagcacctgggccagcagctgctgtactcgatttctcgccggaccttagcagcctctccgcagggtagggctcgggacctgcaaccagtcatgcctgagcctctccccaatcccagcggtgggctcctgcacagcccgagcctcccggaggagccccgctccctgctccagggcgccagtcccatcgaccgcccaagggctaaggagcgcgggcgcacagcacggaactggcaggcagctccacctacggcctctctgaaggatccagtgggtgaaaccagctgggctcctgagtctagtggggacttagagaacctttatgtctagctaacggattgtgaatataccaatcggcactctgtatctagctcaaggtttgtaaatgcaccaatcagcactctgtgtctagctcagggtttataaatacaccaatcggcatgctgtatctagctaatctagtggggacctggagaacttttgtttctagctcagggattgtaaacgcatcaatcagcaccctgtcaaaatgggccaatcagctctctgtaaaatggaccaatcagcaggatatggcgggggaggagcagggagagagagccaggtaagggaataaaagcaggctgcaggaaccaaaagtggtaactcactcggggttggttccacatagtaggaagtttgtgctttctttctttgcaataagttttgctgctgctgagtgtttgggtccctactgcttttatgagctgtaacactcaccacaaaggtctgcagcttcattcctgaagtcagtaagatcacaaacccaccagaggcactgccttaagagctgtaacgctcactgtgaaggtctgaagcttcattcttgagccggcgaaactgaactcaccagaagaaagaaactggaaacaggaacatcacttttaagaactgtgacactcctcgcgagggtttgtggtttcgttctagaagtcagtgataaccaggaacccgccaattctggacacacaggtggagggaggatgcctgtgtgcctccagggactgagctgcatcctaaaatcatgggctccattgttccacaatctctgagaaagcctgggggcgggagggcctaaggaaaatgaccataggactttgtttagcattcttgtgttcagtgctgggggtgcctggccatagctggaaaacacttcgctcctgctgttttgaaacttcccttgtgccaagacagaaatgccaagggaagaaaaaacatgaagcgtgtggtcccagacacagaagccatgtccat

SEQ ID NO: 10763 - DNA, 1172 bp, Artificial sequence
  DNA replication origin
tgcgcccgcgctccttagcccttgggcggtcgatgggactggcgccctggagcagggagcggggctcctccgggaggctcgggctgtgcaggagcccaccgctgggattggggagaggctcaggcatgactggttgcaggtcccgagccctaccctgcggagaggctgctaaggtccggcgagaaatcgagtacagcagctgctggcccaggtgctaagcccgtcactgcccgggacttgcgggccaactggccactccgagtgcggggccccccgagcccacgcccacccggaactcgcgctggcccgcaagcgccgcgcacagtccgggttcccgcctgcgcctctccttccacacctccccgcgcaagctgagggagccggctctggccttggccagcccagaaaggggctcccacagtgcagcggcgagccgaagggctcctcaagcacagccagagtggccaccaaggctgaggaggcgccgagagcgagcgagggctgtgaaggctgccagcacggtgtcacttctcacctgggcctggagcggcatcttactcattctgtattctcaggcaccaacaaatagcttgggatgtcacggatgactcagctagatgtgcttaaaaattaaatgcacggtaacggggctaggactgccacccctggctccacttctcaaaggaagggagcaagaattctatcagagatacaaggtggcattttgggggacagaggttaactcaggtggactattttcactgagcatttggatgacatacacttgggataaacattttaccattccaatgagaagaaccctaactgcagagctgggaagtagtacagggaaggagctcagtaccctgcggcccagcaggaatatgccgggcactgtgtgtgcatgctccatccattctttacaaagcggccttgcggtgcctgagacccctatgggcaagctgagcagtggaggaagacacaagaagaggcagcagcccacgaagggcagcaggagggccaccgtgagggacggagcgctgtgactcatctctccaccgacgcccagttttcatctctgcgggcttgatcaactcagctttcacggggaaaacgcccaggtcaaacacagttcttcagttattagaaacactgtggtttcccccagttcc

SEQ ID NO: 10764 - DNA, 1613 bp, Artificial sequence
  DNA replication origin
gaaacccacctgagggtgggccctgagcaggggtgaggtgggaggtgtgttggcagctggagctgcccacagactccacacaagtgtcctgtagtgtaaggcaaggacaggggagtggctgggctgcagaagaggggtacgaatgccctcgagcttctctgacagcgcctccatcacccatgtgccagctcttaagtgtccgcctggaggtgatggggtcacttcctctcacatttcagctgttgaagtcggtaatgtggctgagctttcctgcaaagaagccaggggagtagaactcaccagaaagtttgtgaaacctcatgctttctataaagggaaatcgattttgtcttcagtgatgggaggggcgtgccaaagagtaaagacagtgccactggccgtaaataacgagctgactcctctaggcagctgtagaatgggaagggatgggaggagatgggatggatgggaagggatgggaggggatgggatggagtaggatgggattgaaagggaagagatgggattggaaggtaagggatgggaagagaatagacagtaagggaagagatgggatgggacggaaagggatgatataggatgggaagggatgagacagggtaggaagggatgggatgggatgggatgggatgggatgggatgggatgggatgggatgggatggataggatggatgggatggatgggtgggagaggatggaagggaaggaaatggaagagatggaaaggatgggatggggtggatgggatgggttgaaacggatggaatgggatggatgggatgagatggaagggatggtaaggaatgatatggaatggaatggaatggggtagaatgggatgggaaggatggggtagattgaaagggagaagatggaagagaatggtgggaagggatgggaggggaggggatggcatgggataggatgggaatggaagggatgggaaggcaaaggatgggacaggtggaacgggaagggaagggtgggatgagctgggatgggatgggatgtgatgaaagggatgggatggatggaagggatgggataggattagaaggaaaggggaagggagaggagggcaagggaagggagcggggaggaagggatgggatgcctactccccagacgagcgccagccttaactcccagcctaggagtggcatcctgggctggactatcactctccaagaccctactgacatgcccagccccagcctcaacccgagaagacaaagaccactttctgactggccagaggtttgaataaaggtagttcagcaggcaagtgtgatatgaaaggacctcagcaaagggaacaggatacttcaatgccaaatgtgcctgtgctgccagggccatcacaatgttggccatcacaagattggtcccgtgaaccgcaagtgatagaaatagagatgcacagtgagctgatgcaagggaacgcagcacgctcatgagaaggtgctggatgaatgccaggtacttcattatcgcccaagccataggtggtagattacagagtgttaattactacggaagacttggatcacagctgccttgcacgtggctgcactgactctatcctgttgga

SEQ ID NO: 10765 - DNA, 1119 bp, Artificial sequence
  DNA replication origin
cagacacacagagggaggcccccgcgaggctacagggagaagacaccatctgcaaaccaaggagaggtctccagagaagccagccctgccacacgtggctcaaagccgtctgccctccaggactgtgagagaacaaacgtgtgttgctgaagcccggagtgcacgcccagcgcgtggtgctcgttaaggcaatcagagcaaagtgacccagcacccttctagagaaatggtttcatatcgaagcttggaagtcaccgagccccctgattttataactgaggaaatggaggcaccccgtgttgggtcccacagctcaccagctcagccagtgttccctgagcctggcgctggcgggccctgggcaccgcgatgggtgggggccgggcctgtcctctcgggctgtttggctcaggagtcacacaggccctaagcatggggatgcggttccaggcgccggcaggtgccacagaggaatccagtgggtgtgtgaggacttctcactgatccccagaggcagggaggtggcggctgggaccccagggagcaaggtggagcccagcagaagggagtacgaggaatttccaagtaagggaccactggctcacctggagggaaaggcaggacccagagccccaggaggccgctgcaggctcagatgagaacggagggctgcagccagcacattctggatggactttaaggtagagttaatgaagctggtcaatagattcggtgtgggggcgagagggaaagacaagaggcaagaaggaccccaagagtccaggggaagctgaggctggagacgggaagcctgggcgtggccagcgcggacatggccccaatcccctggcctgcctgagaccctgtgatcgagaactgctgcgatcccaggatgggctctggggcacccaagggatgagttaggaggtgaaaggaactcagagtccaagaaaccgggaggggctgcgtttcgaggagcgagggctcagctacttatttgctgctgaggtcttgagtgacatgggtgagaggtgacagcgtgctcgcagccctccctcgctcttggtaacttctcggcctcggcgcccattctggccacgcttgaggagcccttcagcc

SEQ ID NO: 10766 - DNA, 2297 bp, Artificial sequence
  DNA replication origin
tccatgattagccaggcacctggcttggagtaagcatccagtaatagatttattcagttattagttgattagctaatgccttggtaagggttactcaagccatagatgataggtgaaaatgaacatcaataaaatacgaaatttacccttgggttttttatattaatagttattttcaacagaaagtcaaattgagtcaactattttttattcaataaatgtcaaaaagagaactttggtttattaattaggataaataaccaaaaataacatggacaccccatttacaaagaattcgagaccaggcatggtggttcacacctgtaatcccagcactttgggaggctgaggtaggtgaatcgcttgagcccaggagttagagaccaacctgggcaacatagtgagaccccatccctacaaaaaaacacaaaaattagctgggcatggtggcacatacctgtggtcccagctactcaggaggctgaggtgggaggatcacgtgagcctgggaggtcaaggcgtggtgagccaagatcccatcactgcacaccagcctgggtgacagacagaccctgtctcaggaaaaaaaaaaaaaagaattcaaatgctataaaatactgtaacaccaaagatctcctaaatgtagttctacctttcttcattattctaaagacactttgagccccacagaattttaaggctaccatcatgaacatcatattcctagtgctgtttgttgggacacttttcagaatctgtttttgtctccgagtgtggacagtgactgtcggcactcagtgcgtggtggttttcatctccgagtgtggacggtgagtgtcggcgctcggtgggtggtggttttcgtctccgagtgtggacggtgcgtgtcggtgctcagtgggtggtggttttcatctccgagtgtggacggtgagtattggcagtcagtgggtggttgttttcatctccgagtgtggacagtgagtgtaggcactcggtgggtggttgttttcatgtccgagtgtggacggcgagtgtcggcgctcggtgggtggtggttttcctctccgagtgtggacggcgagtgtcggcgctcggtgggcggttgttttcatctccgagtgtggacggtgagtatcggggctcggtgggtggttgttttcatctccgagtgtggacggtgagtgttggcgctcggtgggtggtgattttcatgtccgagtgtggacggtgagtgttggcgctcggtgggtggtggttttcatctacgagtgtggacggtgattgttggcactcaataggtggtggttttcatctccgagtgtggacggtgagtgttggtgctcggtgggtggtggttttcatgtccgagtgtggacggtgagtgtcggcgctccgtgcgtggttgttttcgtctccgagtgtggacggcgagtgtcggcgctcggtgggtggttgttttcgtctccgagtgtggacggcgagtgtcggcgctcggtgggtggtggttctcgtctccgagtgtggacggcgagtgtcggcgctcggtgggtggtggttctcgtctccgagtgtggacggtgagtgtcggcgctcggtgggtggtggttctcgtctccgagtgtggacggtgagtgtcggcgctcggtgggtggtggttctcgtctccgagtgtggacggtgagtgtcggcgctcggtgggtggtggttctcgtctccgagtgtggacggtgagtgtcggcgctcggtgggtggtggttctcgtctccgagtgtggacggtgagtgtcggcgctcggtgggtggtggttctcgtctccgagtgtggacggtgagtgtcggcgctcggtgggtggtggttctcgtctccgagtgtggacggtgagtgtcggcgctcggtgggtggtggttctcgtctccgagtgtggacggtgagtgtcggcgctcggtgggtggtggttctcgtctccgagtgtggacggtgagtgtcggcgctcggtgggtggtggttctcgtctccgagtgtggacggtgagtgtcggcgctcggtgggtggtggttctcgtctccgagtgtggacggtgagtgtcggcgctcggtgggtggtggttctcgtctccgagtgtggacggtgagtgtcggcgctcggtgggtggtggttctcgtctccgagtgtggacggtgagtgtcggcgctcggtgggtggtggttctcgtctccgagtgtggacggtgagtgtcggcgctcggtgggtggtggttctcgtctccgagtgtggacggtgagtgtcggcgctcg

SEQ ID NO: 10767 - DNA, 1564 bp, Artificial sequence
  DNA replication origin
gccagctccagcgggcggggcctggagtcagccctctgcagcccacgcccctcaccggcgcaggtggggaccgcgggggtgcgaactggcgggggtgggcgcggagcccagcaggcggctgacggcggggatgggggctgcggggctgggaaccgcggggggtcgcggggccccgcaggtgaccgacggcgccagtgggcgcggctgtcccttcaccgctgaggcctggacggacgccgcaggcggccacctccgtgcagctgacgtccatgtcccgctggccttcggccaggccctccagcctcccacacatacctccagccgtcctgccgcagctcacggccggcacagacagggcccggtaggtctcgccgaagactccgcggccgccagccgccggcacctcacttccgcccgccgcgagcgccgagcgtgtagatccgcctggcagtcgagcgccgagtcctcgatgggcggagccttcaggggagggtagaggaggggaggagaccggcgcgggtgctggaggtcagcaggggccgtgggcggtggacgctggaatgccttgggttccgagggacccagctgcctgaatggacacgagtaggaggtttttgctgggcgtctttgcggtggcgggaagcggtgagggagggaaagaaggatacaagctcaaggggcaggccgggtgcaccatccatccccgtgccctcgggtcatctcagggagactgtgggatgatagtgcgtttgtgggccacagttcacaacgatgggccctgcatcgggtcagaggacccctccggaacagggggatgcacaaggtcaagagaatgcatggaatcagagggctgcaccaggtcaggggggctgcaccgagaccagaggaagcatcaggtcaggaggatgcactggagtgtgcatccccagggggccacactgggtaaggaggatgcaccaggttaggaggcagcactgggtcagaaggatgcactggaatcaggggactgtaccaggttggggggcgtgcctcaggtcaggaggaggcactggggtccgggggcaacattgagtcaggggcagccctaggtcaggaggatgcatggggtcagggggctgcaggggtttgagggctgcactgggtcagggcgccataccaggtcaggggatgcgcaggatcgggggagatgcccggggtcgtgggatgctgggggttggggggatgctcggggtcggggagttctcgaggtcgggggatactcggggtcagggggttctcagggttggggggatacttagggtcaggggatgctctaggttgggggaagctcgggttcaggggctatggccagggaggaaggacaatcaggaaagtgggggtagcggattctggaagctaaatagtttcaggaaggaggaattgatagccaatgttcagaagtactgtgaggccaagactccagagacaattgagtttggcatatgccagtcattggcatccttgacaaaagcagtttcaaaggagtgtggggaagctacatctcgtcagagtggactgtgaaaag

SEQ ID NO: 10768 - DNA, 1123 bp, Artificial sequence
  DNA replication origin
cactgtgggagcccctttctaggctggccaaggccggagccggctccctcagcttgtggggaggtgtggagggagaggcgctggtgggaacccgggctgcgtgcggcacttgcgggccagcgcgagttctgggtgggcgtgggctcagcgggccggcactcggagcggccagccaacccgccggccctgggcagtgaggggcttagcacctgggccagcagctgctgtgctcaatttctccccgggccttagctgccttcccgcggggcagggctggggacctgcagcctgcagtgcctgagccaaccccccccgccatgggcttccgtgcgcccgagcctccccgacgagcgctgccccctgcttcacggcccccagtcccatcgaccacccaagggctgaggagtgtgggcgcatggctcgggactggcaggcggctccacctgcggccccggtcgggatccactgggtgaagccagctgggttcctgagtctggtggggacttggagaacctttatgtctagcccagggattataaatacaccaatcggcacactgtatctagctcaaggtttgtaaacacaccagtccgcaccctgtgtctagctcagggtttgtgaatgcaccaatcgacactctgtatctagctactctggtggggacttggagaacctttgtgtccaaaatctgtgtctagctaatctcgtggggaggtggagaacttttgtgtccagctcagggattgtaaacgcaccaatcagcaccctgtcaaaatggaccgatcagctctctgtaaaatggaccaatcggctctctgtaaaatggaccaatcatcagcaggatgtgggtgggggccagataagagaataaacgcagcctgcccgagctggcagtggtagtttgctccggtttctttccacactgtggaagttttatttttttgctctttggggtaaatctggctgctgtttatactttgggtccacactgcctctatgagctgtaactctcgccgcgaaggtctctagcttcactcctgaaccagcgagatcacgaccctaccagaaggaagaaactccgaacacatctgaacatcagaaggagcaaactccagatacgccg

SEQ ID NO: 10769 - DNA, 912 bp, Artificial sequence
  DNA replication origin
ttgtcagcgaggcctttcttgatggccttcctgaaaatgcagacctcccatcctggacgttctcaccttcttaccgccttgccttttttccctgtgttcaacatttacatccttttttcttgtacttattcattttatttcccccactgaaatgtaggccatagtttgtttaatagtttgctcagtgcctggaaaggtgcctgctacgtattaggtgctcaaacaaaggattttggagaaaatggatgaatgacagaattgtgctaaaataaagagaccaccagagatgaaatggtaagcaaaggccctgcagtgcaccctcccgttcagacagacagagggacaagagttggcctcggatgcaggcagggagccactgggccacctgagtggcagatgactgcaggagccccaggacttcagggaggcagggtgtcctctagacacgggagggaggtgctgaagccgtgttggggaggcgggtggggtgtcatgtagacatgggaagggaggtgctgaagccgtgttggggaggcgggtggggtgtcctctagacacggggagggaggtgctgaagccgtgttggggaggcgggtggggtgtcatctagacatggggagggaggtgctgaagccgtgttaggccacaagggcagcgatgtattgcgaatgacatttcagcctctctgactattgagattcttctctctcttgctttcctacatctactacatctgatagaacaaaagatgcattatttttcccagaaagaactataacagagaatgactctgcatccggggcctgtgtgatgggtggaatgttaacaatggaaggctggttgggcgcagtggctcatgcctgtaatcccagcactttgggaggccgaggcgggcggatcacgaggtcagga

SEQ ID NO: 10770 - DNA, 978 bp, Artificial sequence
  DNA replication origin
agacacggggagggaggtgctgaagccgtgttggggaggcgggtggggtgtcatctagacatggggagggaggtgctgaagccgtgttaggccacaagggcagcgatgtattgcgaatgacatttcagcctctctgactattgagattcttctctctcttgctttcctacatctactacatctgatagaacaaaagatgcattatttttcccagaaagaactataacagagaatgactctgcatccggggcctgtgtgatgggtggaatgttaacaatggaaggctggttgggcgcagtggctcatgcctgtaatcccagcactttgggaggccgaggcgggcggatcacgaggtcaggagatcgagaccatcctgactaacacggtgaaaccccgtctctactaaaaatacaaaaaattatccgggcatggtggcgggcgcctgtggtcccagctgctcgggaggctgaggcaggagaatggcgtgaacccgggagacggaggttgcagtgagccgagatcgcgccacagcactcccacctgggcgacagagcgagactccgtctcaaaaaaaaaaaaaaaaaaaagaatggaaggcagtaaagaatggactgacttaaaggcagatggaatttcacatcctcccactgttggttgctacttaacggcacacataactcgcatcagaataggtttttgaatgatttcctttgttaatgctaagcaacactttatgcacggtgtgatgaggaagacacttaacaaggtcaaggaaatgctggtagaaaagaccacacatcgggtacagtgtacattgcttgagtgacgagtgcaccaaaatctcggaaattaccgctaaagaacttatccatgtaacaacaaaccacccttttcccaagaactattgaaacaatcataataatagtaaggcaggtccccaggtctaccattggcaagagcggattatgggcgcagcca

SEQ ID NO: 10771 - DNA, 1456 bp, Artificial sequence
  DNA replication origin
acggaaccaatttttcttctgattaattcaaatttattttaaacgtgtgaaagaatttcaaatactgttacacagatattctaaatgtctaaaatcaactctgaaataaagtccctacctggagcctccctggctcactttctcttccttagctattctctttttctttcttcctgtattttttcattgcaaatcttaaagtcgtggtaagaccgaaaacaagcaaacaattaactgcacaaggtaacccccattagagatagtgctgtgaatacctgcagagggggctgtggaaacagtgacaggctgcacatggggtgggggtgggagtgaggaagacccaggaggggcctggcaggggagccagaagggcaaagagcagcaggagctccgcaggacttagtgggtgagcaggcgggcgagtgagggtcttgcggggtgccgggagcaggcgggcgagcgagggtcttgcggggtgctgggagcccgcaggacttagtgggtgagcaggcgggcgagcgagggtcttgcggggtgctgggagtggatgcgctaaagtctgagaagtggccagggtcctgatcgccggggggtctgtcgtcctcagggaggagctggactttccggccagcacaaagcaaagccctttgatgagatgctttgcttcagaagtcaccttggcagctgcgtcagggaacggatgtagcggctcaagagtgaacccggaaaggctcctaaggaggtccctgcctcagtccaggcaaggctgtggcctagacgaggtggcgggctcgtgtggatgtggagagaggtgggttttaggggtagagctggtccgacttcctgataagtagatacggagtgggaggagtcaggaggtctgttccgggcccgccattgtggagccggaagggaggccacgctgacagggaagctgctgtgaggtgaagaaggttcgctggttttctggcccgtacctgtgcaggggtcccagggcccggtactctgttctttggcgggagctggttgaccttgtctgaggtcattgttcatctacgcatcagggtccttctatgagtcttcgaagccagaactagcgaagagagtcagtccagcccctccacgttcccttcactttcttgaggaagaaggtctgcaacaggaccatgtaaaaccaacgcggaggaggagagagagagagagacggaggggagacagggagagacggagcgagaagggagacagaacgagagagagggagggagagggggagagaagacagggaaggatggcggggagggagagaggaagagatagggagaaagacagggagggagaggaagaggcagagagagaaagggagagagagggaggtgggggagagagacgtttgaacgaagtctacagattagttaatagtgtgatcattgttaacttgctgactttgatcatggct

SEQ ID NO: 10772 - DNA, 1293 bp, Artificial sequence
  DNA replication origin
aaaagtatttattgttgatctgaaattcatatataactgaaggttctgtgttttatctggcaactcaactgtgtacagcaaaaaacactgacatttggatgaggccagaaatattctgggcaagttaagctctcagaggctcgtttttctgtagagtgatccgaaggtgatctaagtggtaaggctgtggtggagactgaatgacaggtcaaagcatgattgtggggctggtgcatagctgacgcttagtagggccacctccagcggatgggcacatcagggtgcaaatgagatgagaggcctggaaagattccggctctgctcactggtgcgcgtccacacgggcagcctggaccgggctcactgctgctgtttgctcctccagagactggaacagatgcagagtgctgtcttccttctcttccctttgtctcttgacctctttccttcctcccttcttccttccacaagtgtctatgtatcaggggctgggatagagtgggtgctgggatagagtgggtgctgggatagagtgggtgctgggatagagcaggtgctgggatagagcgggtgctgggatagagcgggtgctgggatagagtgggtgctgggatagagtgggtgctgggatacagtgggtgctgggatagagcgggtgctgggatagagtgggtgctgggatagagtgggtgctgggatagagcgggtgctgggatacagtgggtgctgggatagagcgggtgctgggatgaagtgggtgctgggatagagcgggtgctgggatgaagtgggtgctgggatagagcgggtgctgggatgaagtgggtgctgggatacagtgggtgctgggatagagcgggtgctgggatacagtgggtgctgggatacagtgggtgctgggatagagcgggtgctgggatagagcgggtgctgggatacagtgggtgctgggatacagtgggtgctgggatagagcgggtgctgggatagagcgggtgctgggatagagtgggtgctgggatacagtgggtgctgggatagagcgggtgctgggatgaagtgggtgctgggatagagcgggtgctgggatagagtgggtgctgggatgaagtgggtgctgggatagagtgggtgctgggatagagtgggtgctgggatgaagtgggtgctgggatacagtgggtgctgggatagagcgggtgctgggatagagtgggtgctgggatacagtggatgccaacggacagggctgttgttttccagctcccacagcctggcgaggggagagggggc

SEQ ID NO: 10773 - DNA, 979 bp, Artificial sequence
  DNA replication origin
gccttgctgtgaaaaggaagacggaaataaagcagtaactggcatggaaggtcgcccaagggggggacttttcctaagtaggagagagtccgaatgttcgtgtgctgtttgaaaagatccaaaacaggaggtgaaaccaatgctgcggcaagagggcagacctcgtcagcgagggtggcccttgctctggaggggagagtggacgacctggcacacagctggagggagcctcctgccagaggagcagaggcggctcacccaacaaggaggggcaaggaggggcttcagtactcgaagcagatgcagggatgagctggctctgtgtccacggcttctgttctctcagccaaataagaaaccagatcatcagctgggagtggggataaggagggactctgtcattgaaaggggggaacggcatgaggcggaggtcccagaagtgcccagttgaaagccttgggtgtaacttggagcagagctgtctcccaggcagatgaggggccagggcagggaaagcttggagctaagctgagctctgggtttttccaggagccttgagggtgtgtgcaaaggcatgctgagagtgcggcgccttgcactctacgccgtgtgggtgtgggggtgtcagtgtgcaggagtcaggaggagcaggggcagtaagtaggctgccggggtgggccatgggggccaggaatggacaatgatgaaatcactggtgatggcaagtctaaggagtcaccgtgcaaagcaaggactggcaggaggtgggtggaaacgcctgtaagtgcagaatcgtccgtgtgtggagaggtcttgcagttgccaggaatgatgccaggagaagaggtgaagaagctgaccatgggaatctacggtgactgcaaggggagccaggccttcggtaggaaactgtagggaacggtaacattcactacaggagaatggtatagtctgaggggtgcaattcaaaggagatggg

SEQ ID NO: 10774 - DNA, 985 bp, Artificial sequence
  DNA replication origin
tcagccttgagcacccgcggaggcgagtccccgaggccgctgcgcccgcagccgccttcccgctcccagcctccggggcagcatctccccgctggcctgccgcggctgcgtctcgcctccaccttcgggccggcccaatataaccctgcggcggctccgcgggggcggggcctgagcgcggacggcaaggggtgggggaacgaggtggccgaggtggtggcggctccccagttccccagctccccaacgggcgcgcaccaggcggaggccacactgcagcgcggcggcaaagtcgctggcgcaggttgtttgttttgggtcggccggccccgccttcctcctcccgccaatggggagcgcgcgcgccgctgtgggtttgcgcgtgtctgtgagtgtgcgtgtgtgcgcgcgcggggccgctccgccagccggctcctccgttcaggtgtgggccccagccccgggcagcccgcgagggctccctgcgccctggagttcggggacgcagtttaggcgagtgcgcctggttggggggacacgccacagttcccctagggggacacctgaagggactgggtctaggggagcagggactttgctcgggcctaagctgcacgcggcgtatgtgcttctgtagtagtgaaaacgatgctgcttacgaaagcaaacccctgtcgtcactgcagaggtgctgaacagaaattgcgcaggacacttgcagtgacctctttcgggagccttgtgctgtgccccttcctatgagctcctttcaaggaccatcttgtcttttcctcttgttttaatgaatgcactcctgggcttgaaattgtatgcgcctttttggatgacctttactcttgctcactaaatgggctccgactttcacttttctttgtcttactttacctttttctttacctggctggtgactcctgcgggaggacagcagcgtcctcctcttcccctggggcggctgtgtctggcg

SEQ ID NO: 10775 - DNA, 1008 bp, Artificial sequence
  DNA replication origin
gcagggagccctcgcgggctgcccggggctggggcccacacctgaacggaggagccggctggcggagcggccccgcgcgcgcacacacgcacactcacagacacgcgcaaacccacagcggcgcgcgcgctccccattggcgggaggaggaaggcggggccggccgacccaaaacaaacaacctgcgccagcgactttgccgccgcgctgcagtgtggcctccgcctggtgcgcgcccgttggggagctggggaactggggagccgccaccacctcggccacctcgttcccccaccccttgccgtccgcgctcaggccccgcccccgcggagccgccgcagggttatattgggccggcccgaaggtggaggcgagacgcagccgcggcaggccagcggggagatgctgccccggaggctgggagcgggaaggcggctgcgggcgcagcggcctcggggactcgcctccgcgggtgctcaaggctgaaggcgccggaccttcccccacggtggcacgcacatcatccggcaccatttccgtgccccgaagacgcccgcgcgggacctgggaccgccagtgaagaacccctcctgggctctttaacgagcagcagatgcgcatgctgcttctctccggcaggaaagccttctaagcccggcgtgctcgggcacccgagggtggaaccgcggcccctgcacacactcaccccaaagtctcaacgtcgaaccgaaggcgacacccacccaactcctccctctccgccccatagtccacccaacacttgcagcccctccagagaaaaagcccagcggaagaggactccggaaaagtgactatctcggaagaccagggtagagctcccgggagaaaaaggcgaagatccccggccccggatcgccatccccttccctggcaccagcttctctaggctgcgcgaaggaagagggtacgacgccggggagggactgggtgcgcgggcatgaagttggaggtgttcgtccctcgcgc

SEQ ID NO: 10776 - DNA, 1861 bp, Artificial sequence
  DNA replication origin
ggagctccgggacaacttacaaatgaagacacagagcccccgtcccttgcttcagagaaccaaataacggaactgaatgatcgtttcttcagcaaagcctaaagacgcttgcgtcccgcggagaggtgcccacgcgcgactcggctgccccctcttcttgcgggtccgggtagggtagggcgggaacgcgggacgtgccctaagcgggccagccgagcgcgagacaggcgatgctgcagaagcctgcccgcctgcgggtcacacaccggccggcctcggctgcaggggttgcggggccacgggtcgcggggcgccgggagccgcgagcaggtgacggccgcgccgggcagccccgcgggccgcgattcccgagagcctggcgccaccccgcggaagccggaggaactgcggcttcttcccgctcccgcgcggaggggagagggaggcgcagcgcggaggggagagggaggcgcagcgcggaggggagagggaggcgcagcgcggaggggagagggaggcgcagcccgcaccgcgcaatcccggggctctggcgggagggaaggtgacttgcgtgggacgactccaagaggccaggcccggccttcgcagttcacccacgaggataccgcgaccaagccaccaaagcactctctggccaggccgagaccccttttcccccgggccccaagagaaaaaagcactttctcctaaaacacgaactccccgcggaggggcccggggctgcctggcacggggcagggtgtgcggctgccgtgcgggcgcgggccagagtcacgtggaggcaggcggagagggcgagggggcccccgtaaatcatcctgagggatttttggcccaagtccctgtttccgaaaggttgcgggacggctttgacgttgattatgtagctgttctcttttcaagtgcgcgcccctccccaccgcagcccgtctggtgtgcgaggattgtgtttgaaagggaggaagcatccttgaagtggtgggtgatggattgtctaaacccttctgggacgttctgggtgggggttttcgaggcagctcatcaataaagacccccctggagagaaggggcggctggagaccagcccccgccgcgcagccccgaggccccaggcctggaacacagtcctcggtgtggggcacagggcgtgaggggaggatgagctccccctgagcagatggagatttctccttgcctgggccgtttgacccccaaagccttgcagactggccgcgtgggtgccatggggcgatttcttgggaaaggagggcagcagaaaggcccgtgggctctcagcgccttggagtcaggggagcaggaaggggagtggaggtgcggacacgcctccagccaccgtgctcccctaggaggatctcccttcagcccctgtagaaccctgcatctcaaccaccctcgtgcatgtggtttaccttggcatagatttccaagccgctacagaaaacctgtccacctcccccaaggtggaggcgggagttgggaggcaggggtgctggaaagggtcacctggctcaagccgaccccaggtctgacgggcggagagcctcgagggccacgccccaggccagtggtgtcctctgaggccgcaaagccgactggcttctggaggagcagcagcctcggcctcagcctcggctgggaaaagacgcagtcggggccctccgtgctccaaacttgaactactctgggtccccacgaggaggaggctgccctggggtcagaaactccgacggaaatgaaggggagggggcgtaggttccctggcacagctcggcctggagaggcagcctgggggcccaaactcatctagggcgcgcccgga

SEQ ID NO: 10777 - DNA, 936 bp, Artificial sequence
  DNA replication origin
gccccatatcctgagctcggcggggaggacgagaggggagttttgatgcgccaggaagttcatctatcgcccaggcgctcaggacccggcgccccgccgagttcgccgccctcggaaatatttatttatttgggggaagggagggcagcggggaggagaccagccagacgggagaagaaagccctgcccgggctgggttgggacctccagggcgcttccccgcgcggccgcagccggccagcctctggtctcggttggagggcatcgcaggcgcggcctggcgacctccgggcgcctttggctggtgtcttccgtagccctcggcgcgcaccctcccgcgtgcagtgcccggagtgacctcttcaggccccgcgggcgcctcctgggtgggccccgcggcccctccaaccctgcccagcgtgtgtgcgcggcctagccatctttctccccagcctgggaaggcgggcgggaggaggggatccgaggccgggggccgcggagcaaaaggcacgcggacccctaaacgacccccgagcgttgccacagccgggagggcggagggaaggtgtgcagagctcgggggtctcccaggacgcagcttggctcctaccggtttccaaggcatctgcaagctctgtcctgcgacctaaagcatggggacgtcccttccagcagcatcagtgggcgaaaagttaacatgctgagggccaccggcacccacacttgcttccaggaatacttgcggtacaggcttcctgacttattttctttagccgctgggtgcccccccttcttcccccgttgggagacgcagaccgactctgttccaacctaagccccttctctctgccttttggacaaagcgggccgcctctgctctccactcactccccgcaaccccgcaactcgccacccctaaacgcagcgggctgtagg

SEQ ID NO: 10778 - DNA, 1350 bp, Artificial sequence
  DNA replication origin
cacagccgggagggcggagggaaggtgtgcagagctcgggggtctcccaggacgcagcttggctcctaccggtttccaaggcatctgcaagctctgtcctgcgacctaaagcatggggacgtcccttccagcagcatcagtgggcgaaaagttaacatgctgagggccaccggcacccacacttgcttccaggaatacttgcggtacaggcttcctgacttattttctttagccgctgggtgcccccccttcttcccccgttgggagacgcagaccgactctgttccaacctaagccccttctctctgccttttggacaaagcgggccgcctctgctctccactcactccccgcaaccccgcaactcgccacccctaaacgcagcgggctgtaggcgaagtcgaagaggtgctccgcctggtaccgcggcctgcgcactgggatcggggcctgcaggccgctgggctggctcctgggatcatcccaaggttttggtctcgcaaccgaggggacccgcgcccggcaatttgggaagtgcggaaatggggtgaggccggtcttcgcttgagggtctcgtagattggacccctttttcccccttcaagcaccctcagacctggccagtgggtcatcgagtcgtgcccaccgcccaggccaggagatctggggctactgggagatctctcatgaaggtggctataaaaagagccctgaccgggacacaagcctttggagagcggaagactctatccaaataaacactgggaactgggtggctggtgttcaggcccggaggtctgggggtttctggacctaggaaggagagcagactccaggagaggtgtgaaattcccactcccggccaccttgctctctccaacccccgcctccgcgcgtcctcctattgctgttcccgtccgcatcttctgctgttatgtgaagtttctaaagaggcctctgcagcgtgcaggctggtgctcttccagcatttcctcaatcacgctgacacccccaggccccagcactgagttctcgccgtccacatttagaaaggcctcgcaggagttcgagaatcctctacacgacttaactttgcgcctaaatacagagcgaaaacaggggtcagtctcattttgaattgggaagaggcttccctcctcccgggcccaggcggaaggcagggaggggtgcgtcttagatggccgcaaacagtgcggtgcggatgcgtctctcctgtcggtgactggtttagtctaagccatttcatgtgaaacccacgaagcagaggaagcatgctaagaacacagaatttaaaccgcaataatgaggagatttcctagaataaaacgc

SEQ ID NO: 10779 - DNA, 1549 bp, Artificial sequence
  DNA replication origin
agtccgaccagggataggagctgggagagggaggaggagagcaggaggccggagctggcggggcctcccaagggctgaagggggaggcccagaaagaaggtgctgcagaccagcggaccaaacaggaggtagagctgggcaccccgctgcgtctaggctgaaaggaccgaggtgcacgggtgtgcctgctggggagcctggggagttgcaggaggcaggagaaagggaggttgtgcagtaatcaggaggaagacaccaggcaaagagccttcacagccgcacagcctaggcaggccccctggggcggcaggagccctgtgtgcccctggagtgccgggggactgctcctggctgagtgtgctggtggggctgtagatgcagagagggcgggtggggaggggaggggtatgtgggaggggggtgggccggggctggccccagacagtgacctgaggttgagtggaagcaggctttttccatcaaaccctgcctggataccacacacagagaccgagtgtcagtttactgccctgagccggctccttctccctaagctccacagtaattagacaaagaaaacctaaattagctgaacaggcgtcgacagcttcctccagagcacccctggtacctacatgggaatgtgtccgaaaatggcttgattgtagccgagagtcagctaagaaaacaccgccaaaccgaactcagtttaccactcatttccaatagaaaaaagaaacaagtcgctcttttccgggtgggatgttttgattgggttggggtagggcttcgcagttgtttccactttctaagaatttctgactgactgctgagcgtttttggggggtgcgtccccatatatttcatggtatttttttctcttgccctcatttgtcattttgtgtggaataacttaaaaatacataactaaatatgaaagtaaatataatgtgttcactaaaccaatgctctaagtgcctaaaatataattattttcataaaatagaagctggagtggggaggacagataggatcttaaaggagctctactgacatagagttcagtgtgtgtgtgtgtgtgtgtgtgtgtgtgtgtgtgctttaaatggaaagagcccaggggagaagcttgtgggggaaaaggacaattatctcatttgtaggtgggggcggtgggcaacgggctttggaaacattcagtactcattgtcacttagccatggactctctctgattctctgtgcctgaaaattatatgtatttggatctcagggaatacagatccaacttgttaagagcaggccttaaaaggttttaggacccggagactgaagaataaaaggcgctaaccttaaaatccaggcaggaccagtgataaccttctatactagtagctcccagttttggggttatggggtcatcctctgagaatacgatggaagctatggagccagtttccagaaaaatacttccaacttgcctgagattttaggaagtccacaggtactcattaaaacaaacaaggaaacaagcaaaaaaccccagattc

SEQ ID NO: 10780 - DNA, 1432 bp, Artificial sequence
  DNA replication origin
cccgacgtctcccttcaggagcgctcctcgctctgtctctcggacttcctccctccctcgccctccccggccgccctcctcgctccctccctccctccctccccccccaccccgccctgccccctcctcgctccgcgccgccgcgctcactcctccccctcccgacctggcggccgcctccctctcttatctcgctccccgctctccagggtctcctcgctcttcattcctctcgcggcctcctcccctttccctcactcaccctctttccaattgagggatcacagactcactccggttctgccagggggacgacccccacccctcgcaaaactcgaccacctctgacttcatgaaatattctttctgtttgccccccgcagcaagccccgcgtcccatcccaggacccagccccgcccctccgcgcccccttcctcctcctggcccgccgggccgagtggtgctgctgcgggtgcggctgctcggagcctccctggccgccctccccagggccgatactgactccatctgtcaacttcgtttagactttgccgccctcagccacacgccggggtgccagacgcccaaaggtaacgtgccaatcctctctctttctggcagggcctgcaggctccccgacaattgttagggcgactgggggccgccgcagggttgcgggccgctggcgatcgtggacgttttcggaactttgagcagagggatttacactgagaaacctaggccaagtttcaaagactctggaaacctggatctcatgggacttagggttgcatttgcttccacttcttccccccacccccgcaccccagttagtgttctgtaagaaaaaagtgcaaaagaaaaaggaaggaaggaagaaaagaaagaaagagaaagaaaaagaaagaccctgagataagcgagatggctatatttatagtcagtcctgaaggggtgtgcagctgtcactaggtttacatcctccgtcttaacattgcccacccaaaactgtgccaggtctcagctaactcctgtccgagaacacttctccccagttgtggctaattcctccctaagtaagagtcaggctctgagagagatgtgccctcgggagcaatcacttccaatgagacccgacagttagttattggattacacgtgcagggaaatgtagtccgaccagggataggagctgggagagggaggaggagagcaggaggccggagctggcggggcctcccaagggctgaagggggaggcccagaaagaaggtgctgcagaccagcggaccaaacaggaggtagagctgggcaccccgctgcgtctaggctgaaaggaccgaggtgcacgggtgtgcctgctggggagcctggggagttgcaggaggcaggagaaagggaggttgtgcagtaatcaggaggaagacaccag

SEQ ID NO: 10781 - DNA, 782 bp, Artificial sequence
  DNA replication origin
tctttctttttctttctctttctttcttttcttccttccttcctttttcttttgcacttttttcttacagaacactaactggggtgcgggggtggggggaagaagtggaagcaaatgcaaccctaagtcccatgagatccaggtttccagagtctttgaaacttggcctaggtttctcagtgtaaatccctctgctcaaagttccgaaaacgtccacgatcgccagcggcccgcaaccctgcggcggcccccagtcgccctaacaattgtcggggagcctgcaggccctgccagaaagagagaggattggcacgttacctttgggcgtctggcaccccggcgtgtggctgagggcggcaaagtctaaacgaagttgacagatggagtcagtatcggccctggggagggcggccagggaggctccgagcagccgcacccgcagcagcaccactcggcccggcgggccaggaggaggaagggggcgcggaggggcggggctgggtcctgggatgggacgcggggcttgctgcggggggcaaacagaaagaatatttcatgaagtcagaggtggtcgagttttgcgaggggtgggggtcgtccccctggcagaaccggagtgagtctgtgatccctcaattggaaagagggtgagtgagggaaaggggaggaggccgcgagaggaatgaagagcgaggagaccctggagagcggggagcgagataagagagggaggcggccgccaggtcgggagggggaggagtgagcgcggcggcgcggagcga

SEQ ID NO: 10782 - DNA, 2064 bp, Artificial sequence
  DNA replication origin
agaactccagggcagcccctgcgccggcaggggcacatggaccatggccaccaggcccaggagcggagggcgcggcccttggggtgtgctgggggagggagggtcgtgctgggtgtgtgcgcgtagacatgtgctgatctgtgtgccggggagactgccttggccacccccgcgcctcgccgggcccccaggcctcagtgggcggcgcgctcccaactaggccccgcggggtcccggtgcatccggccggctcctccgaagcctccaccgctggcgctccagggagatggcaacagggccgggtgggtatcctatagggacgggagcaagacagcgaggaaggaagggcagagggtccctgtcgggcgtcaggcccgagctattgtctcccccgggcgttcccagactcggtcgggggttctgcgaggctcccagggaaggccggccgcgggaggccgctgggtaggggcacagaggccggcttgctttgctgggcagttttcaccccctccaagacagtaatgtatccagattccgaagttttgggagcttgtgcctgcgcccagtgttatgaggtggggcgagagcagccttgaggaagggtcaggagtctctttcctgtgtgcttttttttcttcctagagtacggtttctccaaggctgctaagcctcagagtccgggttcaagttgagtggatctgccgggagaggagaagaaggggagcagggagggcagctggcaggctgggagaggagcaggcaggcggggaagggaaggggccagtgcaccgaggggtgtgtgtgtgtgtgtgtgtgtgtgtgtgtgtgtgtgtgtgtgattgacagccggtccaagggaatacaaaaataagaggggaaggccgcctgtattggttacttgttgaaattcccataaaattgaacaagactctgttctcagtgggttaagtcaggctaaaatcctctccggtgtggtcctgccgagactgtctttgtttggttaacctctgagacccacatttaaaaggcctatttgggaaatttcaccgtccagggaaccaacatcttttgcccatttctgggctttccttctccccgggtgctcccgctgcacaccggctcaggaacacataaagcatgcatcaccctccaagccactgtctcattgctgtgggaggccagtgtgagagagtagcttggggccttgcctttgactggcaggcccatgggattttaatctgcagccctaggtgctccgagcgaggggttaatgtaagggtttatctctgttcttcacattaacctggtcaaatattcaaattccctcttccatccctaccgtcccctcccacctttcaccgccttcagcaagtcaataatttttcataatctgcaaccagaacaatgtaaaccagccacactacaagtggcatccacagggcaggcgcatttctcaggggagtcctagcagggtccttcaggtcctgccacccaggacctgtatcatcaatgtgggtccattgttgggcggggggggaggcagggaaggggaggagtctccaacagtttggtgaccccctccactggcaaatgtccctttagtgaaagatcctgggatccagctctgtccctcccaccccctcctcttaacacttgcccagctgcaaacatctcgctgcagacaccccaacatacagaacatatctgattctgacatttacttcgggacagaagtacagcaaaatgaacgcaaggaaaaaaagggacaaaaggaactagacacagcttcctgaccaagttccccaaaggccagatgccttctctccaagctaagtgagactctgaacgggagacctgcagtctcctgcacagggatccccaaagagcccaggaaggcaggggactttacaccacgctcacagcagccagacaattctgaagcttcggctgctggccagggatactgggaggacagtaagaccctgatccctgctcccacgaataagatgccggctttccccagcatctgcttttcccagtgccctcagacctcctagcttcggg

SEQ ID NO: 10783 - DNA, 1131 bp, Artificial sequence
  DNA replication origin
aggtcacagtggagctcagggctttggatcagggccagtgagggctcggggtcgtggtgctctgcggggttgtgggaggatcaggcttttgcatggaagatcaggagtttaattctggacgtgcttcatctagggtaatctatgggacaggaacagaggtgccaggtaggcaggtgattaaggcgttgggggagagcaacacgtttgggagtgattagcatagcgactgttttgaaaggcaggagctgggtgggatgagaggagagaggcttggtgcgctctagtgcttattgattaatgagaggaaacagcaggggagacctgagggacgaggagcaagcgaggagaggtgagtcctggaggccagaaaggaggggtctctaggagggagttgccgagagcctgcatcaggtgccctgagaaatcaaaggagctgaggactcagaatggaaaggggcggaggtggggtgggggtgggggtggggtggggggactgcctttttatttagatgggagaagttgccagaatgtgtgtgtgtgtgtgtgttgatgggaatggagacccgaagggcagccccggtgtgaggcacccagcacggcccgagctctgacactggcagcccctgggctctgagattctttccaacctgtgctcatttttccaggcccaagacaccgtgccagagacagcacgagaaacaatgaagtccttcagaggcacaaactccctgcccaactgagatcactgcctctctccacctgcagcccccacatgcgcggtcctagacacccaggcccacactgcacctaatgtcctcactttccccccggggatagttcttacaatttaaggggaagatggttctggggccggtgcagactgcgggctgcgtctccacctgttgccctgcagcttgccgtgtggccaggccagagtggatgctccagagcctttgctgagtgaatccaagacttgctttaaaaacagactttcttcatttaagctctgatttggacaaatacatccaagaaacagcacactatcaaaacgaatttccacacagcaatgtaaaaacacagcacagaaaaatgacaacagcctgaggccagaacaaagactcctagaaacat

SEQ ID NO: 10784 - DNA, 905 bp, Artificial sequence
  DNA replication origin
tctctgtggatgaagattccatcacaggccaggtgcagtggatgcaggagtgaagaaaaccagcaaaagtgcgtgcctggagggaacttactggaataagaggacggggtacatgtggcgggaaaggtaaaggtggaggggttaggggatcaggcagacgctgcacaccagagggctgggtacatgcagggtaaaggctgggtggggggagcaggtggctgctctgaggcatgcaggtgggaggcagggagcctggcacacggggataaggggcccggccagtgggaagtttgctgtagcagcccagggaggagcaggagaagggagggaagagggcagagaggtgacgcccagagggctgcagtagggtgctccagggcagctcaggctagtccccgtaggtaaaaccaggcccctagggttcccctgagtgagacgggaggcccctggaggggccgaagccgggacgagaggatgtgtagccaccggaggctgggagacctggaggaggctgcagccctgaccccggcttggccagggtggtgggcgtgctggagaagcatgtttggacagaggtctgttctgatggatcagaggtggtgtgtgagagaaggaggtcacagtggagctcagggctttggatcagggccagtgagggctcggggtcgtggtgctctgcggggttgtgggaggatcaggcttttgcatggaagatcaggagtttaattctggacgtgcttcatctagggtaatctatgggacaggaacagaggtgccaggtaggcaggtgattaaggcgttgggggagagcaacacgtttgggagtgattagcatagcgactgttttgaaaggcaggagctgggtgggatgagaggagagaggcttggtgcgctctagtgcttat

SEQ ID NO: 10785 - DNA, 1023 bp, Artificial sequence
  DNA replication origin
atttagtaaatataaagcctgggtgggctgacttctacacgcgaactttttgtccttgcttttaacctgaggtttctgcttcaaacattgagggtagtgttttggtcatggtggtgatggtggtgatggtagtggtggtgttggtgatggtggtgatattggtgatgatagtggtgatggtggtggtggtggtgacattggtggtgatggtggtgattgtaacgatggtggtgatggtggtggtgatagtgatgatggtggtattgtgatgtggtggtggtgatggtggtggtggtggtgatattggtgataatagtggtgatattggtgatgatagtggtgatggtggtggtggtggtgacattggtggtgatggtggtgattgtaacgatggtggtgatggtggtggtggtgatagtgatgatggtggtattgtgatgtggtggtggtggtggtgatggtggtggtggtggtgatagtgatgatggtggtattgtgatgtggtggtggtgatggtggtggtggtggtgatattggtgataatagtggtgatattggtgatgatagtggtgacggtggtgtggtggtggtgatgacagtggtggtgatggtggtgactgtaacaatggtggtaatggtggtggtgatagtgatgatgtattgtaatgtggtggtgatggtattgtggtggtagtggtgatgatagtggtgatgatagtgatggtgctaatggtgctaatagttacggtggtggtggtggtgaaggtagtgttgtggtgatggtgatgatggtgatgacagtgttgtcatagtggtggtagagatggtgatggtagtggtgatagtagtgatggtgatggtgatgggcaatggtgacggttgtagtggtgtttgtggcagtggtggtggtgctagcagttatgatgttggtggtggcagtggttgtggtgaaggtggtattgtggtggtgatagtcatgatggtgcaggtggaggtagtggtggtgtgcatccacatattagt

SEQ ID NO: 10786 - DNA, 1435 bp, Artificial sequence
  DNA replication origin
cagccactctcgggctgccccgaagtgatgtcctggtggtccgtggagcacacaggaaagtccagcagacaaacatcatcaaggtcgggcattctgtcagctgcataaacccattttctctaaaatacttaatgttaacttaggaaaaaagaaaaaaaaaaaaaaccagaaaagctgcttcaagccagccaacgttccaagtctcgcagaagcgtgtgaaaatccccacgctcagtcgccctctccctgcacacgccccgagtccgcgtctccctcctgtgtgaatgcagggaaagcgggagcgcggcgaggggtctggtgcggaccagcccccgagccacagagtgcggggcccgagctccggaagcccagcctgggccgcgacggccccaattccagcaacgctagagggcgcccgtgccaagcgcccgctcccggcaagccgcgtgctcccgggtggccgcaaccgcgggccgagggggcggagtcatggaaacacgtgccacggcctggatgaacctgcagggccgaacgctcagtgaaaccagccaatcaccagagcacaactgccgcggcactccgctgaccacccacctacctgccgttctgttccgcgttgccacagaaaaataccatagactgtagcttataaatgacggaaattcagttctcattgttccggatgctgagaagtatgagatcaaggcaccggcagatgcggtgcctggcgcaggtcctcttcctggttcttgccgtcttttcagggcaccctcacatggtgggaggggccgaggatccctccgggtctcttttataagtccatcaatcccattcaggaggactctgccccaccacctgtttgtattgtctcccaaaggccccacctcctaagactatcactttgggggtcaggatgtcaacatgtgactttgtggaaaagggggtgcggcatgaacattcagtccgttgcactgcagtagtcagactcgtggagacaggaggtagaatggtggtgacgggctgcaggaagggggaatggggagctagtgtttcctggggacagagtttcagttttgcaagatgaaatgttctgaatatggatggtggtgacggctgtgcaccattgtgagtatacttaatgccacactgaactgcacacttaaaaatgtttaagggctgggtgcggtggctcacgcctgtaatcccaacactctgggaggctggggctgggggtggatcacttgaggtcaggagtttgggaccagcctggtcaacatggtgaaaccccgtctctactaaaaatacaaaaattagctgggtgtggtggcacaagcctgtaatcctggctactgcggaagctgaggcacgagaatcacttgaacccaagaggcggaggttgcaatgaggtgagattgcaccacagcactccagcctg

SEQ ID NO: 10787 - DNA, 1018 bp, Artificial sequence
  DNA replication origin
tatttgtcctccccgtttcccttaacattttatattggatgtgttttatataagatgtgactttataattaggtctacgggttataagatatcaagggaggattatgactgaactcgaatgaacaccaggacagaatctagaacatagaacctccgtgacagcaggatgcagtggctcatggcacttccccattttgggaagaaagtgagttccatgttttactgcagggggaatcattgccatttggaagtgtacgtatgagaagagaggagtgcatgggagttgagtaaccaggtggaggactgtgatgggaactgcggattgagtcaccagcaaccatgctgacatcatcctagcatgccttcatgtattgtaggagctgggacgctggagtttttactatatttccccaactcccttgcatctagggttctacggtgatttagattccactattcaggagaattagtgcgagattaggaaggcatgtttctaatattctgctgacaagcaccattgtgaaggtacctggtttcgctctgaaagcgggaggagaggtctcagtgtctacttactggctttgtggagtattaaaaagcactgcccagggaacctatttgctggtgtgggttatgccaggggtgtcacggttttagagttggcagcactagcagtagctttcggcttgggggagtttcttgactatatcaattgcctgtcatggtggtttccgacccgggcaggtggcatggttctggggctagcagctgtggccaccgtttccctacgccactggtgtctgctgaattcgaggaggggcattagattctttagttcttcagggtggctttgggtcgtgttcttaaaagatcagtctggaatctgatccttcagtcttcccaaagagtctgtaaaccacttaatatcctgccgcaaatccctttctgcttaaactaactagattgaattccgttctctgcaagccagcctgggcgatagaccacagaaccctctgcg

SEQ ID NO: 10788 - DNA, 1371 bp, Artificial sequence
  DNA replication origin
taggtgagaaaatgatggatgggccgggtgggcgacggcaggaacggcctggagaaggcttcctcctcccatctgctcaggaaggacctcagcgccagactaaacacaggccggcgcggctgcggtgtgcgagctcgcgcgccggccgccggcctttaaaagcaccttcctgcgcacgacggggagacaccgggagaccaggcgccccgacccatcggctggtcttgaggagaagcaggaccgccccagactgtcgccgcggccggcagggccgggcgctccgcggggaatctgggccgcggtgccctgtgccccactccggcaggactgggcttccccggctcttcgagggaagaccgcacagagaagaccctgggcacccctgtggcgggccggaccccgggaaagtagggcccctgctgccccgcgcacttggtggccaaacacctccggagcctgaggtcttgggcctcctctggctctgcgtccggggttctcttctctcccccaagggttggcctttgggtcaatcgtccagacccaagccaagcttgtgttgggcaagggaggaattcctggaaaaggaaaaagcccctgccaccctccgcccttcattcatcttccctgccacccactctctccttttccctgctcctaccccaaccctgaccctcaaggcctacctggccaaagacaacagctgcgttagtcgctaggccttggtgggactgaaggcggaggagcctgggcatctgctgggggaaggccgcactagactgcaagtcctgggtagaagccctccccatcttgggccagctctcttctgagagcctcagtttccctctctatgatgccaagggcttgactttggtgacttctggacagccccggcatggtgtcctggaggtgagctacaacctgaaacccacctcctgctgcccatccctcctccagcctcctctggctgacgtctgccatgggtccgagaggaactgctcctgcttcctcagtgttctgaggctcctggcctgcctgcctgcctgcccatctgtctggagctgtgggtaagagcgggcccaccattgaggcaggggcagaaaagagcctctctgctttatttgctgtgttttctggagaatcttccttggggaaactaaatgaagggaaaagcaggagaggagccaccagatagcatccaggaggagagaacaatgcattcaccagcaggtcctttattcgtttatacagaatgtctgtgtccaaatatataccatttttctgtgcatgcgcgtataccagtttctcctcatagcactggcgtgagcatctctagaagagtatggaagtgtgcagataaaccagaccagtgca

SEQ ID NO: 10789 - DNA, 1678 bp, Artificial sequence
  DNA replication origin
cggggccggtgtttgcacctctcaggacagggacaaggccgacacccggctcggtgcagccggcctcccccgaggacctgagggccgacgcctccgggaaccgctggtcctcgcgagtgggtcggcgcctggcagcgcgcgccggtgacctggtggtccgtctgctcccaggccgcccctcacaggcttcccgccgcttccccgcgagcgtcagcagaaaaagggacgatgtggaagcccggaggccccttggccgacccaggctggggctctcaggctgggggcacctcaccccggcaggtcccgcgcctcgggaacccggggccaggcagccgtcctgggcgcccgcaccgcgcactgcgcgtgctacgagcgccccctgccgtcggaggcgttgtctccgcggcgcctctgcccgcgccgggctccaagggccggctccgcctgtccccgcacagcgtcccctgggaaccgggtctccagagaaggaggcctggggaagaccgcgccgcccgcgtgggaccccgcagggcctggcacctggttttctaggctgcaactctcatccctcagggtccgggcgggaacagccccatcggggagaccctctcagacttccaggcacagaccacggacgcttttgttcctggagtggagggaggtgacccgagactggggctttcagccaccgctacgcattccttccaggcggcccttttaattgacgtacacgttacagaaaaagcaaggccgctccatccagtgaattacattgtgggagatgccaaggaatgtatttactggcagccaggtttgccaataaaagttgcaaataaagactgctggtttccaggaaaatgtacttctgttttttaaacactccttagtcttaattaccaaaaactgagcctccaaagaaccggtttcgagaacaggaccagtgagtggcggtgctggcgaggcctcacacccccacgtgcaatcacacaccccgatgtcgcctatgggaacaaggaccatgcacacctatggctttgcccacagagaggctcgcccgtatttacatacgcagcagacacagacacaggcgaaacgttggcacacagagaggtatgcgctcggattagggctgtttagtttggaagtgaagaaataagaaaagacaaactatggcaaacaggcgaatttccacagaaataaatgtctgcgaggaaaggaggcacttgctctgtagtgtttagttatggtcgccctggtagttctttttagtccgaccgggttgactataaatgaaggcagcagagaaatgcagaatttacatttactaaaggtccgctttggcttggggtcacaaggaccccagtgggaattagaaaatctccccactcactagatggagcagcacctccccccacaaaaaaaggggtttggggcagagtgtgcacgctaatgagaggcaaatttattccatgtttctccaatcttaaacacggacactcataaccacaattataaagactggtaggatgcacagaacacttagtatgcggtcatcctgctgtgtgctttaaacactcctttcacctaatcctcacaaggacgctgacatggatattatgatctacatcttacacatgaggaaactgagcttaaagaaaagagagagctttcccaagat

SEQ ID NO: 10790 - DNA, 1589 bp, Artificial sequence
  DNA replication origin
ccgaccgcgccttacccgcaggaggcccggcggtgcgtccgcgttggtgccactccccggccggggtgagggacgtcggaaggaaggtcccagggcgcagggttccgcgaagggagcactcggaaggaaggctggctgcggccccggcgcctgggtccgctgcggcgccgggccggagacctgggaacagccagccacctgcaaggttgcagcccacctcaccccgccggcggctccggggctgtctgtgggtctgtctcacggggcaaagcctttcttcccacacccacagccaaggcgcgtccgtgcaggggcacacgccttctgctccagccccaggaaggcgctttcgccctgcagtcctccgacggccggctcccgccgcaccgcgcaccctggctccggcagactctggggcctggggactcgcccaccctgcgcggcgcgccccccacatgagccgaggttgggaggctgcggggcctctgtcctcccaggccgtggagtgcggcggccgctctgagtccgctggggacctggatggagagaaactggggctcgttcgcgcacacatgcaccatttgttctttccgatcatctatccctttacgaattttatttttattccggattgttaatgcaagacgacagtttgaatctccatttacctctgcctgaacacaagaagccctgagtcttttgaagccgggcaccaaagttaaagattcacttcccgcattccccatggccccctcttgcagcttagctcggctctgagcccccgaaacgcccttcgaggcgggggctttcctgccaaggggcgataggtgggccatcccgaggcgggaacgatcaggtaggtgttggctggctttctcctgggtgagtagttaggggaaccgcccctccaggggacttagatgacattaaattatcccatcacacaaacttcccgtggaggtctgcccccaggagggcaactatcggattaatccaaccatgtagacaggcaatatggatcactttgtctttaaaacaatcgaaaaccaaacgctcttttcgtttattgtagaaatttttctactaaggacggggctgaattggagggactgtgctgacaaatcctctacttgaaaatcccccagctaaggagtatctgcccaaggtcgcggccacccagatgttcggtccccactccttcctccgctgaaaagtcgcaccgatgactaacgttgcctgccggcctggtggtttgaaaacgaatgccgggcattgatgcaaggatatcctcccctacccctgggattctggtctaagcaaaggaggccgaatggagaactaagacaattatctaagtaatctaaaaagctcaaagacatccccaagcggaccttgctccagtggtctgtgatggcagcctagtggacagttttctagtggccctctggggttaattgccttaatcttccactctgtctgccccagcaaagggaaagatgctaaagcagctgtggacttgcagcctccctcctgtgtgtgcagagcccccaggaatcactgccccagtgcagcaggagaagcgccttccc

SEQ ID NO: 10791 - DNA, 1055 bp, Artificial sequence
  DNA replication origin
gacgccagcgctggggttgccccagcctctcctccccgccgcctctcccctcccgcagccccttccctcccttctccaacgccagtctcactcgggtcactgacgtctccggcttttctccacttggaggttctcctgtcctgaactcggctacaaaggacatgattttgagggctcggtcacagccaggccctgctcgcggtggggaagaaggttcgtcgcccatctggcccccctccatgacccctccccagccgaaatgaaggcaaggggtgcggggccctgctgggagtttccgacggccgttcacccgcgaaggatgagcccgccccgctgcgggccgccctgcttctcgcccccctccccggggggccggcccttggcggcctgagggtgcgggcggcgagggctgccggagcccggctgctgccccgcgctcccctgcccgcccgcgagggtcccaccggctcgccgcgccgccgccccctctgatcccgtcaggcccgtttcggctcagatgaggggtcaggctgcgggctcggtgacattagcaggtgtgatgacaagaagcaaataaatatgtctaagagcttaacgcttccccaggccagtctccatctccacatgcgcggggctgccggctcgcagagacaacgggtgtgtctgggggaacgtccagggtcgcacctagagggcggttcaaggattctggggggacacgcacggaagggcccccgctcgttgtgcacacgcctgagattcgccgtcgctgggtggttggaatgggacaggaagaagagaaatgagggaaagaaacgaaggagcgggaaagagccaggcctccctcccccggcacggcgattctgcattttagcgacttgaggagagaccctcccggaggctgaatcccaagtcgttcactagaagctgggggaagtggcgagctcaggagactgcgaagaagcgtgcgtgacgcatttaacagctccgctgcccctgatttccgaccatctattaaatccaaggacatgttcgggaccccttttgtctccccg

SEQ ID NO: 10792 - DNA, 931 bp, Artificial sequence
  DNA replication origin
gaggtctggctgcagggggagctgtagagggagctctggccgggcgagtaggcgccgagcgccagcgggggtgcgatccccgcgcgcgaggacgcggccgccgaggccagaaggccggagctgagctccgcggccgcgctctgcggcgacccccgcagcgacgtcatgatgttgtccacgctgaagccctggctatggtgcggcggcggggcggagggcgcgggcggcggcggcgcggaatccgcaccgtccaggctgagcggccgcgccgacggcaggctgcccggggggctgctcccgctggacaggctgctgctgctgctgtcggggctctcgatcttgggcaccgcggcggcgctgccgctgcccagggcggcggccggggacaggggctggggcggcgaggggcacgtaccgttctcggtcttgatgtcctggatgcgcacgggcggcggctgcggaccgggcgcgttgccgtcggcctgctccggcggcgcgggcgggggctggcggccgggcgggggcggctccttgaggtgcagcctgtccttctcctccttgtccttcaccgcgtccttcttcttgaagcgccgccgccgccgcaggaagctgccgttctcgaacatgttgtaggagtccgggtccagcgtccagtagctgcccttgcccggcttcttgtcgtcgcgcggcaccttgacgaagcactcgttgagcgagaggttgtggcggatgctgttctgccagccctgcttgttgtcccggtagaaggggaagcggtccatgatgaactggtagatgccgttcagggtgatcttcttgtccggggcgttctggatggccatggtgatgagcgcgatgtagctatagggcggcttcaccatgtccttgggctgcggctgcggcgtgtagggcccgtaggcgcgggccatgc

SEQ ID NO: 10793 - DNA, 1055 bp, Artificial sequence
  DNA replication origin
ctccggccttctggcctcggcggccgcgtcctcgcgcgcggggatcgcacccccgctggcgctcggcgcctactcgcccggccagagctccctctacagctccccctgcagccagacctccagcgcgggcagctcgggcggcggcggcggcggcgcgggggccgcggggggcgcgggcggcgccgggacctaccactgcaacctgcaagccatgagcctgtacgcggccggcgagcgcgggggccacttgcagggcgcgcccgggggcgcgggcggctcggccgtggacgaccccctgcccgactactctctgcctccggtcaccagcagcagctcgtcgtccctgagtcacggcggcggcggcggcggcggcgggggaggccaggaggccggccaccaccctgcggcccaccaaggccgcctcacctcgtggtacctgaaccaggcgggcggagacctgggccacttggcgagcgcggcggcggcggcggcggccgcaggctacccgggccagcagcagaacttccactcggtgcgggagatgttcgagtcacagaggatcggcttgaacaactctccagtgaacgggaatagtagctgtcaaatggccttcccttccagccagtctctgtaccgcacgtccggagctttcgtctacgactgtagcaagttttgacacaccctcaaagccgaactaaatcgaaccccaaagcaggaaaagctaaaggaacccatcaaggcaaaatcgaaactaaaaaaaaaaaatccaattaaaaaaaacccctgagaatattcaccacaccagcgaacagaatatccctccaaaaattcagctcaccagcaccagcacgaagaaaactctattttcttaaccgattaattcagagccacctccactttgccttgtctaaataaacaaacccgtaaactgttttatacagagacagcaaaatcttggtttattaaaggacagtgttactccagataacacgtaagtttcttcttgcttttcagagacctgctttcccctcctcccgtctcccctctcttgcctt

SEQ ID NO: 10794 - DNA, 1088 bp, Artificial sequence
  DNA replication origin
cctgccgtcggggctcctccccgcagcagcaaaggggtcccagtgcccgtggcagtgcatgccccagcggacacgctggctcccaaattcagagatcagaggggcggctgagaacggggcgtccgctgtgtgtgacccctgaccgtggaggaagggcgggagccgggagtaggcggtggggcccggggtcaggccgcggtcgtcggctcccggcaaaggcgctctggccggggaagggggcgagggtgggcggccggcctctgccgtcgtagtcatacctgggacgttgaaatgggctttggggatagagctcactcccagcgcgccccacaggagaagcccgcagctcaggcctgggccgtgcagaccgctgggcgggctcggggcccgaggagagcaacacggcgcgaggtccagtcgcgagtaataaccccgacagcacggcccctcgaagacgtgttccgggcaccggggttgtgagcgggggagcctcgggccttgggcccgcttggcacggggcgggggcgcctcctccaactcctggagatcaggcccagaccccgggtgttctcaggggacacactgtggacggtggaccagttcctagcgccgttttgtcccccattgcccctgctgcttgttaaaagtattagcgacccccgtgatggcaatccacaatttttggagggtgcgggtggcatgtacggacgtgaaggtctctttgtgaggcacgtccacgcacacacagggacactcattttgtaaaacctagatgggcgctgccaccacccctccatgccacccgcgtaccaatcaaggatgcaggttgtagaaaacacctggacgtgtgtgggctgcaccttaaaacagaattcacccagtaggcactcccaaatccaaataaagtgcgtagggtgctttgagacttggggggaggggtgttaaaaagttacttgtaaacaatacatttaaggttattttcaagtgaatgtttaaagtgctgcctgctccaagctctaataacacattagtgcgataataacactccttgcatctgccaggagccctccaactggctgccagaggtt

SEQ ID NO: 10795 - DNA, 961 bp, Artificial sequence
  DNA replication origin
tactcgcccctgaggctgccctgactgcgccttaagaatgatatcccatcgcagtgtctttgcgcattttcctaactatctcctcctgcctgcacttcgagtatgtctaagattcttcttctgcactctgagttctgactctttatatagcgtaactgtgaaaactattgttattgttatgctagagctttggaatttatagagagttttatctgtcttgccctttgaaattttaccttttatttcagtaatattaaattatcaaacttgttttatcattctcatagctcattttctttcctactggtttttgtgtttttgtgttgatgtttgtatatttgacatttagatttctcattagtttactcactgtcttcattcactcagcaaatactgtgccaaggcgtgcttccggcatgggagacactgcggagaacaagatgaaacccagctctcatggagcttaccttttaattggggagatagatcataaataagtaaacagataaaagtttaaagttaacgtgaaatgaagcaggataaagacgggtggataaggatagaatggcaaggacgggatgtttttagcgagggaggcagggcagtggtgaggggcacagcatacagaggggtcagcagcgtgaaggctccaggcaggaccagctgacgccagactaggacagcagggtggccggagaggctgcatcgtcgtagtgggggataagtgtggtaggttatgaggtcaagtgccagggtgccaggtgggggaggactcaaattgaactagttagaggttcctgcagtggttcccatgaaaggtgatgccagactaaattaaggtgtgggctaagtggtgggaactggttaaatttcagtgaactgtgcagggaaggaagtgttagggaagatttctaggttttgcttggaatgggtgctatttacagacagggaggggccatgg

SEQ ID NO: 10796 - DNA, 1317 bp, Artificial sequence
  DNA replication origin
cctcccgcgcggtggccgtcggcggaggggcggggcctgctacagcgtcgccggctgacgcgaatgacgctgcgccagtcaggccgcagccccgctgcttggcccgtcgggcccgccttggccggctcggcccgcccccggccctccctgcacggcctcccgtgcgcccctgtcagactgtggcggccggtcgcgcggtgcgctctccctccctgcccgcagcctggagaggcgcttcgtgctgcacacccccgcgttcctgccggcaccgcgcctgccctctgccgcgctccgccctgccgccgaccgcacgcccgccgcgggacatggcacacgcaccggcacgctgccccagcgcccggggctccggggacggcgagatgggcaagcccaggaacgtggcgctcatcaccggtatcacaggccaggtgagtgcgggggcgggggcgcgccggccgaggcagcctgggcacgcgtgctctccctacgcgccgctactcgtgggctgcggtctctccaggaacagccctctcggcgtcccggaaggggtctgctgccgggaggtgggacggaaggtacggtgcagttagtgtgttgcgtgtggggtgtgcgggatacatcgagcgcctctggtctttctctgggggctgtgagcgtgtgtgccgcgcgggatgtcgcgctcacacccgggcaggaccgcccgctctcacctgcccctcaggtgaccgcagcgtctcttcctccaagcccatgtcgtgcttcgcagctcctagtgccggaaagggaaaagaaccggtgatcaatgaacttgcgggtgaggtcttcttgatgtgtctcggctcaaggggcgcttacctgctaacgtttgggaagcaagaaaaagggtgctttgctggtttcgtcccctatcaccggatttccagatagaaaagagaacatgaaagaaagtaatgctgtggagtcacctactaggacatgtttaggaaaaagaacttaaaaaactttttaaaatcacgccaacttctgagattcaggttgacacatttggaagtgtatccgaggcacactggtccaaaagtgcggctagttccattttcaaaggaataagttcgtcgagtaaggtaatcaagaggaggtcttcggaatgtctcaggctaagcatggctggtttgtgagggtcgcctcttagaggtgttgcagtaggtgggatccgaccgctgtgtcttaccaagctgtgctgttttagattcagtggtcatgaagtaatcgtgcccacatattgctgtagaaagaatgtgatgtgtgtgctcctgggta

SEQ ID NO: 10797 - DNA, 1575 bp, Artificial sequence
  DNA replication origin
ctgtgataccggtgatgagcgccacgttcctgggcttgcccatctcgccgtccccggagccccgggcgctggggcagcgtgccggtgcgtgtgccatgtcccgcggcgggcgtgcggtcggcggcagggcggagcgcggcagagggcaggcgcggtgccggcaggaacgcgggggtgtgcagcacgaagcgcctctccaggctgcgggcagggagggagagcgcaccgcgcgaccggccgccacagtctgacaggggcgcacgggaggccgtgcagggagggccgggggcgggccgagccggccaaggcgggcccgacgggccaagcagcggggctgcggcctgactggcgcagcgtcattcgcgtcagccggcgacgctgtagcaggccccgcccctccgccgacggccaccgcgcgggaggggcggggcctgccgccgccaccgcctcagggaagaggaaggaggccgcggcttcgcgtcccgcctctcgcctggctggccgtggggggcctggacgcagtggcctcccgaatctcccaggaccctaatatcgcccgaggatgctgggaggaacgctgagccgacctctccgttaggctgaaggtctgaattttcaaacccaggggtcacagggccggggtcatggactttgataaataattcctggaaacctgttgcagtgccctttgagaagcccggtttatggtacctgaagggcagtagcgtacaaggcccgtaaacgggggtcacagatgtgggagtgactaactaggctggctctcgctcttctggcctttcctgaggctcggaaccagtaacgaggttccaaatagctgaattcaaagttttctcttctgaggactgccagtgcacaagaaagtccctagccccacccgtatgcggcataaggaaatgttgaaaagactgcccgggtcaataaacctggacgtggcagatttcaaagaaagtaattcaaacacaggtggggtcccggcttacatctgttggatttggctgccatttggcagctgctcgttggacagggagaggagaggaggtgactcagagccgggagggcagcaggtgtgtgtgcctaagcagttggctgcaatccaggacacagacggaaacttcccggtctccgttgctctgcttctctgtccacattcctctccctaatcgataacttcagatcatcatttcaaatcacagagttactagggctgtgcccaatataacgtgcaagagtatgtatagcagacctggaaccccaaaatcagaaaagctcaggattacatttaaaacctccctctcgcgctcctcgaggtccgttaggaatatttcttagctatagatagactggtctggtttcacacctggcctctcctctgcgttctatgaggagaatggctcaacaaacatctgatggtgcctctgagtgatgaagagaccctgaagctgaggagagggaacacttccattgagaggaacatgctataagctagaaatgtctgtgaaatatacgggaatatgctaaaactatactcattttcatgtaaatacgctttaaatt

SEQ ID NO: 10798 - DNA, 930 bp, Artificial sequence
  DNA replication origin
tttagccaaggctgtttgccaaggagtttgcatccaccccactgctatttgaggccatgcttgctgtgagtttctccgattcctctccctgcttcacccactccttctgaaaaacacagctaattgatggtcaatttggccacagaagcctagtattggaattgttggaatacaggaggatttgtggactagatttttttttcttcttcaagaatgacaagctaaccccaaattatggcaagaattcttcaggttcaataattaaaagcaaaaggcagtccccacggagaaaaaacagtgtggtctggaagatatctttcaaattgaagcagactgtgtaactcccaaatattatggatacaaattagctatatttgatcactggatcttatttaccctaattgtcttcatttctgtggtttcctcatacattgtgtttacagcacacttggtttcccagctcagtgtcggagtctgggctgcagggatggtgagatcgagcttcagagttgagaagaggggagggtagacagagagagaaaggggagagagagagtgtgggagtctgggctgcaggggtggtgagatcgagcttcagagttgaggagaggggagggtagacagggagaggaaggggagagagagagagtcggagtctgggctgcaggggtggtgagatccagcttcagagttgaggagaggggagggtagacagagagaggaaggggagagagagagacagagagaggagaatgggagacagagagggaagggagggagggaagggagagtataagagagaaacagagacacagaggaagggaatgagaaagggaagacagagacataaggacagtgagacacagagaaagggagggagaaagagagggagcgagagagggagagagggagagagggagagagagggag

SEQ ID NO: 10799 - DNA, 1207 bp, Artificial sequence
  DNA replication origin
aaggtgggggcgagagagggagtgagagagagggagtgagagagggagagggagagagagagggagcgagagagagccaggggggccttttttgggagatatgcttttcctcaaagacacagaagtcttacacattcagaccaaagatacgctaaaagccagcacattgtgttatgtgaaatgtttcgcttgtctcttggaatgattgatgtgaacctgagaagaatttgaaatttgagcagccaagcaaccaggaattaagaccttatctaaaatttaggcaaaaaatccagaccactgtagttaagaaatcgggttagaaatctcctgagaagtgactttcccacaagatttctgctgctttctagttctgaatggatgagaaatatgacaaaaatgtaccattgcttttagtatcgcctgtccctttttctggtttggggtaaaagtaggaaaccaagagatgcaaacaaacggataaacaagtgtccctccagggagtcactctggtgtttgggactgcactggtttggatttcgggaatgtcaaaggggttctcttctccaagctttcttttctgttcccagaacctcagcctgcagcggatgtggcactattgtcacagtggatgcgacggttgggcacttgctcccctagggtgacttgacttaaacttctggctggttcagagggaaaacaagactggtggtcttgatggacccagtttttgtgggcatctgtttacgcggcccttgcatgcatagcctgccctgcagagctggtgggcatcccagcaaagtcccagagcagaatggagggatcccagtgggtgctgcggggaggctggcagtggccttgctgtactcacctttgcccacagctggaaattagtgcttcatgtgtgaggagcatgtgttttcacttcccctgcaccaggagtctccacacacctgggcgtgcatttatgctgtgggacgtgggagcagtggggaccatgtggacagagccacacctgtacctgggcaggaagcagagcggggaatgtgcttgggagtctgtgcatccatgcatgtgtgcgtgcatgtgcgtgcatgtgtgcatgtctgtgcatgcctgtggacgtgtgtgtgtgcatgtctgtgcctgcatgtggacgtgtgtgtacgtgtgcatgtgtgtgtgcaaaatggggctgtggtgatctact

SEQ ID NO: 10800 - DNA, 1820 bp, Artificial sequence
  DNA replication origin
ggagttccaggctcttccaacagggggcgccgcccaacagggacgtcaggacccagctgcggtctgaaggacaaggagaggtaggtgggagttaactcagcaaagccaggaagacatgtctgcccaggcagggagaccaacatgtaagacggggtgtgtcagagggtgggtggtaaggctgcatggtgagggtgagggtctgctgaggctgggagcagcagagtgagggggtgctggaggcactggtggggccacccctgccagggtctcagacaccatatgaacagcgcattctcctaaggacaggaggaagccattgatggctttttgtgcttttccccaactttattgaggtataactgacaaatgaaaattgtatatgctttcagtacaccacgtaatgttatgatatatgaatacattgtgaaataattagcacaatctattgatgtgttgcaagtttcatttttatcaagattaatctggctgcagagtcagaactcatttggaatgggcagcagagggtttggcagagctgactaaaggctacacactggtccaagacaaagaccctgatggcctggactggggaaggagggtgctgagaatgtgcagtgacgggggagtgaggagggttgagtgggggggaggaaggatgggggagggtaaggaagggtgaggagtgagtgaggtgtggatgaggaggggtgaagaggggtgaggaagagacgaggaggggtgagcagaggtgaggaggagatgaggagaggatgaggagcagtgaggaggggtaaagacaagatgaggaggggtgtagaagggatgaggaggagatggggaggggtggggaggagatgaggaggggtgaggaggagttgaggagggatgaggaggagatgaggagggtgaggaggagatgggtgaggaggagatgaggaggggtgaggaggagatgaggaggggtgaggagatgaaggatgaggaggggtgaggaagagatgaggagatgaaggatgaggaggggtgaggaggtgatgaggaagagtgaggaagagatgaggggtgtggaggagatgaggaggggtgtggaggagatgaggggggctgagaagtggggaggggtaaggaagagatgaagggggtgaggaggagatgaggaggggtgaggaggagatgaggaggggtgaggaggagatgagaaggggtaaggaggggtgaggaggggtgaggagtgagtgaagacgaggtgggaactggtaggaaaagggaggaggttgctcacttttaccctctggaactgggtcctgggcttcagagacagaatgagctggacatccactggcttccatgggaaaccccaagtgtggttttgaagtgtggaaattgagctgctctgtgtatctcagaggaaatgtgaagtgggcagtagggtatgcaggccccagtctcggaggggagtccaggccggggtagccatggatgagtcacataacctgatagaggttaagcatcttttgtaactcctgttactaaccttgctagtatttacacatacagcactgggagtaaaatgtaaataataaaaacatctggacacttctgttatcaatcactctttgacaccattcctcccctcttctctcccctccaggcttgacgcttcatcataactcccacaggcccttcattccacagttgaaattcttctgggaaatctatttgactctgcatttcacacgtcaaaatcattttcttccttcctggttgggaaacagcaattaaggttcttcagtttagcaaaagttacaatatgtcgatgt

SEQ ID NO: 10801 - DNA, 1284 bp, Artificial sequence
  DNA replication origin
gctccagaatagctgacaatatggacaacatttcagactggaaggaaaagtaaaaaaggaatgaaacactttcatttttgaatgaacagattgattttcaaacataaatgatagataaagtcaagctcacagacacgtctacaatgagtaattatctggtagacattgacctagcctgggaaaaagctgggatattatgttagctcaaatgtgcttccttgccttccacttggaatggtggcctttcatgacaggtgcaaggcagtggcaggttgtgagtgtgtgtgtgtgtgtttaaacaattttccatctttaagccaactttactggattccagtattttacctatgaactcatgattatttagcttaacctttatttacattttctctgagagtgaaacactgtgtgtgtgcatgtgtgtgtgtgtctgtatagtgggtgggtgtatgtgtgtgtgtagtggatgggtgggcataggtgtgagtggatgtgtgtgtggtgggtgggtgtatgtgttcatgtgtgtgtgtagtgggtgggtgagtgtagatgcacgtgggtgtgtgtgtagtggatgggtgggcataggtgtgagtggatgtgcatgtgtagtgggagggtgggcgtaggtgtgtgtgggtgtgtgtgtagtgggtgggtgggtgtacatgtgcacatgtgtgtgtagtgggtgggtgagtgtaggtgcacgtgggtgtgtgtttagtggatgggtgggcttagatgtgagtgtgtgtgtgtagtggatgggtgggcttagatgtgagtgtgtgtagtgtgtgggtgtgtataggtgtgcatgggtgtaggtgtatgtgagtttacagagaatagaaaataatagcagggagcatagacataaggagattgtctgatgccataagcgccactttggtgctggctgcttttgtgaccacagctaccattgctgcagtgacatgggtcagaggagcaactttccagtaacctctaagcagaggcatttttcacaatagagagattttcaaaatttctcaaatgatctctttcacacggtctttcctgtgccccacagtttcgatggcattctcaccaggtcagcgcccacaggctgcaggtatgcctgtgaacagacattggaggagagaaatggaatggcttttgggttagaaagttcttagggtaaatctcaacttggctgctttctcactgaataaacttagctgtaacacttagctgtaaaagactgtttccttatctagaaagttggtattacagcag

SEQ ID NO: 10802 - DNA, 1036 bp, Artificial sequence
  DNA replication origin
tgcgcacgcggaggccttcgatgccctccgctaggccccgcgccgcgagaccctcgctcggggaaccagcaggacgctcgcgggccggaggagggcgccgctcatgcctcacgtccgcagctcccgcgtccgcccgccctcggccggccgctggcagcgcctcacgcggcgtgtcgggaagtgtagttcgtggccgtttgccccggcggcggaggcgcctcgcgcggcatgtaagtaagtgtagtccgtggccgtttgccccaatcaccgccgagaatacctcgcgcggcacttcgggaagtgtagtccgcggccattcgccccagctgccgtgcgtccatttccgactctgagaacagcctttgcgggggcgggggaggggcgggggggggggttgcgaggcgagcgtggtgcgcgtgcgcgaggttgcgcggtggcggacgcagccctccgcccaggcctgcgagtcgcgcgagggcagggaggagccacggactgcgcgaggttgttggagcggcgagcgccgctttcccggccttccgtgctgggctgttgaatgggcctgtggggacaagcaggaggcggccgcagcgggtcgtttgtaacgaaagggaaatgggggaaaaaacccaaaagcctccaatagaaaaccagtgttctattggacgtgaacagcagaaaaaatacaaacaagtacgcgagtgaaagaaatgctcacctcagtagtggtcagggaaatgaaaataaagcgtccctcgcccccttttagatgtgttggcgtttaagtcaagggcggttcacctacagcgcgcttcgagccaagagatgcttctcgcgggccgctgtgtaatagtggcaaatcggaaacaccagccttctgtctccttagcaaccaaatgatgggaggcgcccgtgtgcaattacgtcctagacggatagaaatggaaagaatatcagattaaaacaagtgtggtagtctgcatctttgaatgaattaccatgttattttttgcttttgtctaagtctcccgtttta

SEQ ID NO: 10803 - DNA, 1056 bp, Artificial sequence
  DNA replication origin
ggcggggcacgcggagcccgcggccgggtcgcaccgcgccggggagcgggccaaggggccctcgccgcccggcgccaagaggcggcggctgtcggagagctcggcgctgaagcagccagccaccccgacggcagccgagagcagcgagggcgagggtgaggagggcgacgacggcggcgagaccgagagccgcgagagctacgacgcgccgcccacacccagcggcgcccgccttatccccgacttcccggtggcccgctccagcagccccgggaggaaggggtcggggaagaggccggcggccgccgccgcggcggggagcgcgtctccgcgcagctgggacgaggcggaggcgcaggaggaggaggaggccgtgggcgacggcgatggcgacggggacgcggacgcggacggcgaggacgacccggggcactgggacgcggacgctgccgaagccgccaccgccttcggggccagtggcgggggccgcccgcacccccgggcgctggctgccgaggagatccgacagatgctacagggcaagccgctggccgacacgatgcgtcctgacacgctgcaggattacttcgggcagagcaaggccgtgggccaggataccctgctgcgctcgctcctggagaccaacgaaatcccctcgcttatcctgtgggggccgccgggctgcggcaaggtgagtgcggccttggccgttgggcttccgtagttatctcggcggtggatgcagctgatggtcggagagccgggtgtgctgccctcgaaagaagccgcctgcctctcctggataagggggtgcagacttgggctgggctggggcagtgcctggtccacaggtggagtctgtgatgggtgtgaaaagggcacacacccccagattggtaaggcaggcttgccgggtttgcaaaaggacgatgtctgtgaatccatagttttacaagatgtggactcttagatttgatctgcctttatcttccatcggtctccccgccccctccccagactttgatttagtaaccgaattcgcaaggaatcagcatg

SEQ ID NO: 10804 - DNA, 1479 bp, Artificial sequence
  DNA replication origin
gggcttgctgcctagggctgcctcaagtctctgcccccccaccccccacattctggtgcagcactctttggccaccatcccacgtgtggcttatgcaggcccttgtcaggccacccttcctgtaagccttggcagagtccacgtgatgctaactctgcaggtgcacagagtgcatgaactgtggagacacagccacctccacctagattttgaaggatgtgttggggaccctgggggcccagtctgagaattgtcactgaggtgaggctgctgcagaaaaccctcactagggcaatgtttagtggagcagtgggattggggccactgcagagagccccaaatagagtaatatctagtggagctgtgggaacagggctgtccctgagaacccagaactgtccagccaccagcatgcaagtctatcctgggagagcctagacctcaacctgtgagagctgctgcatgggttgcacctggcaaatccatgggagtggatcccctggacactaggggacccagtctccacccccctgtgctcggaatgggggacacagcatcaaagaagattattctgaagccccaagatttaatgctgtttgccttgttgggtttggacttacttgggaccagatactcctttcttcttgcctgcttctccctttgggaatgggaatgtacgtcctatgcctgtctcatcactgtattttgaaggcctgtaacctatttgatttcacgggctcatagctggaggggaatttcacttaggatgaattgtactttgaatcttatgcctttctaatttagaagatatttaggtgagactttggacttacattttaaagttgatactggaactttggaggccactgggatacaatgcatgcattttgcatgtgagaggggtatgaatttggagggcaggggcagaatgctatgctttgaatgtctgtgttccctgcaaaattcatgctgaaacaatcctcaatgcaatactaacaggtggtgcctttaggaggtgactggattatgagggcaccttcctcatgaatgggattggccccttatacgagagacttcacatgagatttggccccttttgcccttccactttccaccattgaggacgcagcagcaagctgtcatcttggaaacagagagcaggtgtttggaactggttctgtttcatctgattctgggggcccctctttttccctgtgcaagatccccaaatttgcttccttctctcaaagaaagctcccaatatagatgggactcaaagggagtcatttgccctctaagaggtgtcacaatatgtcgtctcagtcattcacaccttagtaagaaaaagcttttcaggtccttgccagagattcggggaaaggctttgaactgagaaagaagccgcgcccctgaggagggcgctgcccggaagccacgctcacttctgcttgcacttaggcgacctcgggagctcggact

SEQ ID NO: 10805 - DNA, 1022 bp, Artificial sequence
  DNA replication origin
gtcatcaccgcgtcagcactgatgagtcatgttgatggcatggaccctgaatatgacacaatgagatgtcactttacctctgtggcctttcccagaaaaaaccataaccccagtctaaccatgagaaaaatataagacaatggtgcaggcagggcatttcaggagagggtcaggtaaaggggagggggtcccaggagagggtcaggggaggggacttcaggagagggacagggagaggggagggggctccaggagagggtcagggaaaggggagggggtcccaggagagggtcagggaaaggggaggggggtcccaggtgagggtcaggggaggggacttcaggagagggacagggagaggggagggggctccaggagagggtcagggaaaggggaggggacttcaggtgagggtcagggaaaggcgagggggtcccaggacagggtcaggggaggggacttcaggagagggacagggaggggggaggggggctccaggagagggtcagggataggggaggggggtcccaggagaggatcaggggaaggggtggggcttcaggagagggtctgagaacacacaggcaggcaacaccttaaaatcccatctcagtcagcaatgactcctcatagggccaccacgagcttaaatgtcacttaaatgtccctatttgccagcctggacttcggtgtggtgatatcatggtgcattcccaggagggaagtgcttggtcaagacttctgcttgggttcgactgtcggttctggtttcacatgcactgtgtgaacacgcttcatacagagggtcagcaccgcactgtgtgaacatgcttcatgcagagagcctgtactgcaccaggtgaacacacttcatacagagagtcagcaccgcaccgtgtgaacatgcttcatacagagagtcagcaccgcactgtgtgaacacgcttcatacagagagtcagcaccgcaccgtgtgaacacacttcatacagagagtcagtactgcaccgtgtgaacatgct

SEQ ID NO: 10806 - DNA, 1008 bp, Artificial sequence
  DNA replication origin
tggagttgttaattcactcctggtggcctcatggtttcactgtgcttaggagtgaagttgcagatcttcaccgtgactgttacagctcacaaaagcagtgtagacccaaaacgagcaacagtaagatttattgcaaagcgagagaaaagaggaagggagggggaggaagggagaggaaagagagaagaagagaaggagaagggggaagaaaagaaaagaaaagaaaagagaaagaagaagaagaagaagaagaagaaaaagctgccacagtctggaaggagatctgagcaggttgtcaatgctggctcgggcagcctgctttcattctcttatctggccccacccacatcctgctgattggtagagcctagtggcctgttttgtcagggcgctgattggtgcgtttacaatccctgagctagatacaaaggttctccacgtccccatcagattagttagatacagagtttggacacacaggttctccaaggccccaccagagcagctagatacagagtgtcaattggtgcattcacaaaccttgagttaaacacagggtgctaattggtgtgtttacaaaccttgagctagatacagagtgccgactggtgtatttacaatccctgagctagacataaaggttctccacatccccaccagagcagctagatacagagtgttgattggtgcattcacaaaccttgagctaaacacagggtgctgattggtgtatttacaatccctgagctagacataaaggttctccaaggccccaccagagcagctagatgcagagtgtcgattggtgcactcacaaaccttgagctagacacagggtgctgattggtgtgtttacaatccctgagctagatataaagactctccacatccccaccagactcaggagcccagttggcttcacccagtggaccccacactgggggtgcaggtggagctgcctgccagtcccgcaccgtgcgctcgcattcctcagcccttgggtggtcg

SEQ ID NO: 10807 - DNA, 1655 bp, Artificial sequence
  DNA replication origin
gggtgacttctatttatttatttatttatttgagccgctctagtcgcccaggccggagtgcaatggcgggatctcggctcactgcagcctctcccgggttcaagcgattctcctgcctcagcctccggagtagctgggattgcagactcgtgccaccacgcccagctaatttttgtatttttgggagagacacggtttcgccatgttggccaggctggtcgcactcccgacctcaggtgatccgcccgcctccgcctcccaaagtgctggtattgcaggcgcgagcaaccgcgcctggcccgggtgtgtctccttcccgaacctccgggcggcgaacggggaagggcgagcggcttggcggtggggacgagctcccccagggtcctgcgccgaagggaggctggaggagggcccgaggacttggggacaggagccgctgccctggggctgccctggcgtctccagcctgcctcgcccgaagcctcctagccggattagcgcaccggcccggggcctgccctgaccccggaagagcagaacccttagctggaaggcttaggagggagagggggccagaccattgctttgggtttaggtcacctccgtagaccattgctttgggtttaggtcacctccgctgcgtgtctccccagggatctctgggaccctaaatgcattttgcctttgggggagggcagggaaagaccaatgggtctaggaatacagtgtgtgcctaagattagacaataacgatacagagtgtctaactggatgtgaaactgggtgtgtaaatacaggtgaaccagcggggacggctcatcggtgtccattgtcttaggggcgtggctcgattcctgtttattgagcccagtcgccagagagaacccccgagtagaagctgggagggctgggatggggaggccatgagagccacgatgtgatgtcctggcatgagcagtgactttgatactgaagatatgtcaccttgggggaagactgactgatgggccagcctttcacaaatatgcaccagtatggcctcactggccgtgttatcaccaacgtttcttctaactggccagtgcccaggatacttttactctagggctcccctctgtgaccccctcccatctcctaggaggcaccctttcctgagttggagcatcccaagacacaagctgaagatgacagcccagagttgggtccccaggggagagcctgtgtctctctggccaaagcctggggaagcggagccctcagccaggcatcagctcatcaaagccatccaggaggaccaggatggaggccagggctgggaggaacacaggtcctggacagacaaggatgaggagaaattctgggcttacctaaggcaaagagaagaagggcctgggcatggaaagaggcccgctggggtttgccagagaccctggtctgagaatgctctgccagggcatgagcacacctctgctctagaatgtccccaccgagtggcctggaattccagaaatcaagatcccctgggagtgttttgatgatagttgtcatgctacctaacgtctacctgacatcagcatggctgagaggtggcatagcagttaggtgtgtgagttctgtagccagagggcttgtgtttggccctcattctgccactt

SEQ ID NO: 10808 - DNA, 939 bp, Artificial sequence
  DNA replication origin
gggctgcgggaaggaaagggggcggcgtccttcacagggagggtgcagctgacctccctccccttgtgcagactggaaaagaatggcccagatcctctggactcctcagatgagcggattcagagagaagcttttgagagcgtgctggcggagacatttttcacaaaagagcccttgcggtgctggtgtccgtggcgtgcctgggtgagagagggcagcttttccaccaggccaccgggagtcctccccacctgtagcctaggccggcaccccccgggctcagagcgagttgggggggtaagggggggatgggggggtggggggccccctgcggcgcccgccgcccacggtcccctgcccaccccggccgcccgcccacgcgcaccccgcgcccgcgctgccccgcgggggaaaccgagcgctgcaggcgcttcctcttgtgtttttcaaacacgaatgcgccccaactgctcggaggcttctggggaggcggcctgggggagggagcgggtagctgggatctccgaagcgggacgtctcctaggaggggtgcatcctggggcagcaccccgcagcattgcgggtggggaacgcctggagttcagccaggttcggacaggggtgacttctatttatttatttatttatttgagccgctctagtcgcccaggccggagtgcaatggcgggatctcggctcactgcagcctctcccgggttcaagcgattctcctgcctcagcctccggagtagctgggattgcagactcgtgccaccacgcccagctaatttttgtatttttgggagagacacggtttcgccatgttggccaggctggtcgcactcccgacctcaggtgatccgcccgcctccgcctcccaaagtgctggtattgcaggcgcgagcaaccgcgcctggcccgggtgtgtctccttcccga

SEQ ID NO: 10809 - DNA, 1326 bp, Artificial sequence
  DNA replication origin
tgcaatcccagctactccggaggctgaggcaggagaatcgcttgaacccgggagaggctgcagtgagccgagatcccgccattgcactccggcctgggcgactagagcggctcaaataaataaataaataaatagaagtcacccctgtccgaacctggctgaactccaggcgttccccacccgcaatgctgcggggtgctgccccaggatgcacccctcctaggagacgtcccgcttcggagatcccagctacccgctccctcccccaggccgcctccccagaagcctccgagcagttggggcgcattcgtgtttgaaaaacacaagaggaagcgcctgcagcgctcggtttcccccgcggggcagcgcgggcgcggggtgcgcgtgggcgggcggccggggtgggcaggggaccgtgggcggcgggcgccgcagggggccccccacccccccatcccccccttacccccccaactcgctctgagcccggggggtgccggcctaggctacaggtggggaggactcccggtggcctggtggaaaagctgccctctctcacccaggcacgccacggacaccagcaccgcaagggctcttttgtgaaaaatgtctccgccagcacgctctcaaaagcttctctctgaatccgctcatctgaggagtccagaggatctgggccattcttttccagtctgcacaaggggagggaggtcagctgcaccctccctgtgaaggacgccgccccctttccttcccgcagccctcgccagaactctctcgggctgcctggcaagcgacagctgtacagtgagcctcgagtgaccttcagaggccaggcgcccacagcatccaacctgacacactgctgaccaatgaacttggttctgccccagtcagagcaccagagttcaatgttttattgacagaaccactagaagctgccttttcccagcctttacaaaactcaggactcggcctctcagcatatttctcaatgaacagctgactgtgccctggaatgtcaggtcaatcgccttggctttgttctttctgttatgacacatccattgtatgggtgtttgtggcgaaactgaaacagaaagattctcactttaacatcctgttgtgaggatttcaggatcatggcacacgggaggtaggactagattgccactctgaccagagcagcatgcagaggctcccactgtgaattttagctccagatccactgcaagaacaaacccgcaatcctgagagggcccacagaccctccgaaggaagcagactgctcctgcaggacccgggagacaccccaaatactgagtg

SEQ ID NO: 10810 - DNA, 1451 bp, Artificial sequence
  DNA replication origin
ccagcactttgggaggccaaggcggtcggatccttggagatcaggagttcgagaccagtctggcaaacgtggtgaaaaccggtctctactaaaaatacagaaattagccgggcatggtggcccacgcctgtaataatgtcagctatgtgctgaggcaggaaaatcacttcaactcgggaggcagaggttgcagtgagctgggattgcgccactgcactccagcctggcagacagagtgagacttcgtctcaaaacaaaaaaaagaaaaacacaaaaaaaccaccaccaacaacaacaaaaaaataaagccaccagtctcggagtttcaaatctgagcactcttatccatcttaattctttcaataattcagctaaacgaatggggtcctgagaatctgcagagccaggctcagcgctcgcctgcagagcctgcggtctgtggggaccaccagcaagatgaggaatcaccttcgggaggaagggtcgtgctggggagggtcgcgccggcggggtcaagagaacctcctccagggtgggaatcagagcctccgggccgcggtgtttgagggtgagtggaattaatgccgtgatggacatggggccttctaagggggaccaacagtgtttgtgaagagttgactttgggaggggttcaggatggccagaggtggaggctgtgacctcagtgagtctggatcaagggagggggcaggtgggtaagacaccgttttaacaaggtggctttgagcggccacctttgaggggcctaagggcccctgggagatttaggaggaaggacaagaggattaagacaccgctttctgaggtgccgtgtggctgtggcgtgggggtggctgggggagtgggttgtgttcattgtccaaggctctccagcgctttgcgtggcgttttggggagcacagatgaggtgtcccgacagtggggagtggctctagggagaccagaggctcgggagggggcctgggcattagaccaggcacagaatccgaagtgggaagaaatgtgggcgtagagggcaggccttggggatgggtgtgggggaggagggggagatggaaaggagtcagggaggtctcccaggctcacctggaggagtcagggtctcatttccaagtgcactgggaactgcagcctgggggtgggggttcatttggtttcaggcctgtggccaagagacccaccccctcacattcacactttggtctccagtggcttcacaggcaccacctccttgttctcgcctgttttactcctcaccttgggctgtttcttgcctttccattctggcgttctgcagggatcagatccttcctctcacgcacaatctacactcatggcttttgctgggagtaatgagtaaagctcccaaatagatgtttctgagttaggaagcacattaaaaacaaaacaaaacgaagcaaaaccacaca

SEQ ID NO: 10811 - DNA, 1284 bp, Artificial sequence
  DNA replication origin
ctcttggctgagcgacctctcctgtcctccggtcccatcactcggtggcagccggtggacctgaagctcgccactcccgtcccctaccccagccgtgcgcggggacgccctcacctgccacctagtccagcgctgccgccgtctccgtgccgcgctccgagcctggacgccgacccccgaggcgcaggacccggccctgctgctgcgctcgccgcggactcccgctagggcctctgcaggcaccgcttttataccgcagggtcgggcgcctcccacgctttctgcgtttaggcggagcctggcgggaccagcgggggcgccgcgcgtggtggccgaggtcagagctgggagcagggtcaggtcagggtccccccagtccgccccgcccggggcgatgtccgccaatgctcccgccagcctgaggccggccaggttcccaaggcgcgcgctcggcctcacccacccccggcgccagggcctcttcaggaccgggttcagaacctgacagcccagagaagtaggttgggagcctgcggcgtccagggcctccgcgcgaagaaacaaggcgtctgcgggaaaggagacggagcctggaaccctgggcttttgtacttaaggaagcgaaggtcgggtgacagccaagctccgtgttccagtgggaaggtcccatgggtctgtgttccacgcctcttgtcatgaatatgggggattcacttagaaccaaagcatttgttccaggtcccaccactaactagtactagtcctgggcccagaaccaggcgtcctcactcctagtacccaagcccttctctagccacaggtgtttgggctgcggtgtggtgtaagcagccccattttcccgcaaagtgatgggaagagacactgagtcacacgggctcaggacactccttgtgtcctctatcagggggtccagaggcagggactcgggggagttgatgcagcagttcgtgatgtcatcagatatccccccacccccttccatctcaggctggactcaattggaagcatttcatgttggcacggtgacgtccagaggaagggaacagacaaatggctctctctggagcacggagcgtcgcccagaagccgtgccctcctgtttcaaattgaccagaattagagctttctcctgagggcctgaattagggagaagcaaggcaggtgcctaaggcacaaaatttcaggagggccacacgcataggtgccaaccctgcatttgcgcggccctgagaatcagagcctccttcaatttgacaccctagg

SEQ ID NO: 10812 - DNA, 1087 bp, Artificial sequence
  DNA replication origin
ggatggcctgcctgcatgccggtgcctgctggtgcatcccattcctctcaacttccagccgctcgtgtgttcctccactgatgtactcctctcgatatgcagccacctgtgtgtctgcctgctagcgtctcagggttttacaggcacagggtaggggcgtggcaggccagggtggtcttgagaagtgcaacattggggcaggaaaacaaaaatgcctgtcctcaactaggtccgtgggcacaggcccagggttggagccctagccagggaccacgcccttcccccccccgccatgttatttaaagagagcacacccttccatatcagtggaatggctaaaacaagctaattcccatacgcattacctcatctattttttttgtgatgagaatgtcagagtaggcggttagacgtgagcagggcatgcacgggcccccaagaatgttggacatttgtcaagccacagtcacaattataaatctgtccctctgaaataatgagcaagacaaggaagggaccccagagctgtctggttctcattgggaccgggattgaagggcataaaactatccctctagggtaataagtggccatggctggcgctgggaataacaggagtcttgcaacagacagaagacacctggagttagcaaggcagtcccagacaaggttttgagcatgtgcagtaatagaaaggtgtgaaatttacccggtgtatgactttcctctaggggcgctcgaccagtaagggagaattgcatctaatgggcatgcgcacaacttcagtaaccatccagcgcctactgggagggctactgggcatgcaatacttgagggccagcccgggaggtgaagaacaaagagtggagacagcctggaaaagagtaaggggtataaaaactgtaagcaggcctggggtggtggctcacgcctgtagttccagcactttgggaggctgaggcaggtggatcatgaagtcaggagatcaagaccatcctggtttacatggtgaaaccctgtctctactaaaaatacaaaaaatcagccaggcgtggtggcaagcacctgtagtcccagctactcggga

SEQ ID NO: 10813 - DNA, 1396 bp, Artificial sequence
  DNA replication origin
gaagtctcctgcttgaccctcttccaagcctactttctccaatgaactttcacattgcttaaaataaatgttcccttgcctgtctctcatttgaattctttccttttaaaagtacaaagtgagaagtgacagcatgctggcagtcctcacagccctcggtcgctctgggtgcctcctctgcctgggctcccactttggcggcacttgaggagcccttcagcccgccgctgcactgttggagtccgtttctgggctggccacgcaaggccggagccggcttcctcagcttgcagggaggtgtgcagagagaggcgccagcgggaactggggctgtgcgcggcgcttgcgggccagctggagttccgggtgggcgtgggcttggcgggccccgcactcggagcagccggccggccatgccggcctcgggcaatgaggggtttagcacccgggccagtggctgcagagggtgtactgggttcccccatagtgccagcccaccagcgctgcgccctatttctcactgggccttagctgccttcccgcggggcaggacttgggacctgcagcccgccatgcccgagcctccctgatgaacaccaccccctactccatggctcccagtcccatcgaccacccaagggctgaagagtgtgggcgcatggcgtgggagtggcaggcagctccacctgcagccccagtacaggatccactgggtgaagccagctgggctcctgagtctggtggggaccatggagaacatttgtgtctggcccagcgattgtaaatacaccaatcggcactctgtatctagctcaaggtttgtaaacacaccaatcagcatcctgcatctagctcaaggtttagtgaatgcaccaattgacactctatatctagctactctggtggggccttggagaacctttatgtctagctcagggattgtaaacgcaccaatcagcgccctgtcaaaacagaccacttggttctaccaatcagcaggatgtgggtggggccagataaaagaataaaagcaggctgccggagcttgtagtggtaacccgttggggttttctgtgctgtgataaggtttgttcgtttgcatttggcgtctgcgttgcctttatgagctgtagcgctcactgcgaaaattgtcactttatttctgaagtgggtgagatgacgagcccggcaggaggaacgaaacactcatctgtgaaagttgcaacttcatttctgaagtaggtgagacgactctgtgaaagttgcaacttcatttctgaagtgggtgagacgacgagcccattaggaggaacggaacactcactgcgaaagttgcaatttcatttctatagtgggtgagacgacgagcccagtgagagtgaacgaacaactccag

SEQ ID NO: 10814 - DNA, 1351 bp, Artificial sequence
  DNA replication origin
gtctggcttgggagccgctcggacacgctggcttgggtttgtcgctccaaagtcgggaaagccgggggcgcgagcggggaggggggcagggtgggggtcgcgcggggccgggaacgcgcgtgggtcgacggcgcgcggggacgctggagccccgagaatggggcgtggccgcgcggggctgtgaccccagcagtcccagcggggcgggggcccgggcgagcgtccggcttgggttcccttccggagcctcgcagcggcagagaacggcgacgcggccgggtgagtcgtgcgtggccgcgagcccggccggtgacgccgcggacccgaggaccccgggcgcccaggcccagcgcccacggaagaggcggccggcgcgggatgggggcggcgcagagcctcccgggccacaggtgaccccggtcggccccgcggcctcggtgacccctcgcccgctccgcgacccggaggacgcgtgctcagtcttggggcgccgggtgttaggagccgggcgggaggcggagagaggccgaggggttcggcgccaaacggtgccatccgggccccctgcgtgtgttcactggactggccgtgctgggcttggccaatccgcagcactttcaggtcgcccagacctgtggagacgatcgtgtggaccagcccggatctccttaccgctctgtgtttgaattaaactccctacaggcaaactattacaggctttgatgtcttcaaggcaaagaggaaactttaactacaaattggcatttaagttattttcttccttttttttttttttttttttgtcctaaagattggcttcggaaaactgaggtacagaaaattaataattaatgttcacatgctgtcaggaatactcagatgcgagggggcatctgagtccattttttgggcacttttgctttctgggatgctctcgtgcctaatgacagccctgcagctgcctgcatcctttctggtgggggtcaggcctgatgcgatgagatctgatgtgttcagtgaccttctagttaaggtcctgggccggccttgtattgctggggcttttatgtgtgctgggattaacaccagtgactgctgttatcagcatagatggcgtttgttctcatttcaggaccgtatctgagtaattgcatccattgtgatgtgccaccaaagagaaaagtactttggtcatactcgactatgtaaactaagtattttaagttaaggccaattccaatgcattttattacaattcagcatgaaacagttaacacggaccagtaacagtagagtgaaattagcatgaatagaaccaacattcttttccacatatgtaataataagggca

SEQ ID NO: 10815 - DNA, 915 bp, Artificial sequence
  DNA replication origin
atcacgaggtcagcagttcaagaccagcctggccaacatggcaaaacctcatctctgctaaaaatacaaaaattagctgggcgtggtgacatgcgcctgtaatcccagctactcaggaggctgaggcaggagaatcacttgaacccgggaggcaaagattgcagtgagccgagatcgtgccattgcactctagcctgggcaacacagcaagactctgactggaaaaaaaaaaaaaaaaaaaggaggatagacagggcttggggattggtggatgggtagataaggaaggaggagtctagcatgactctcagactactgacttggaccagcaggggaatggctgtgacaataaataagattgggaaaacaagaaggtgagcaaatttagaggagaaaatgaatttcatttttggcatggtgtggaaggctcgggagagaggtctaggcaccagatgtcaacgtgaggtgaaatggatatagctgaagtcaagggtgtggtgaggttttgcagggagagcagggacctccagcaaggccagtgcataagggagaatagagaaaaaaagaaccagaaaaagacaaggagaggccagagaggtgtggaaagaaccagggaagacagttattcacaacaaacaaaagagggcagagttttagagaaggaactgagcagtttggggctccaggtggggcaggagtgggtggccacggttgaggggcagtggccttcaaattggtctgggtaggttctaatgggtcagattggtcagtcctttccaggacactgaaggctgcagaggtgtgactggatgctggtggagggatgcatggcggggaagctgagtcagatcctgaaatcctccaagcatgcgcctgaaatgaccaagggaaatgaaggcggaggctgctgtcgcc

SEQ ID NO: 10816 - DNA, 1223 bp, Artificial sequence
  DNA replication origin
tggatgttcttgggagggcagtgattgtgaagaacaagctactagtctagtccctggaggtcactccttaaagcctcccgatgaggcaagtttacaggatccatgctccctgagccagcagtgacacccacacttggcagtgagaagtggggctgtaacttacagggtgagccaaaatgggatttatcttaaaggaaatttaagggatcttaaaggaaaaagagaggagagtgaatgacctcatcattagctgggaggctctgcagtgccctggtagacagtcactgcctggaggtgactttgtagaaagcaaactttggctgtcacagcgcatagggaggcctgggaaagcccagggaagcaggagtctggtcggtgaggccgaggaggagggcccttctcctgaccccacgggcgtggcttggccaggcagctcaggacttgcttctccccacggcttggcccccttctcaggtcgctctcaatctatggggaacctagagggaaggaggctgcccatggcgcacaccgtggagggaccctgaggacagcggagagcaggtctaaggtgaggcaggtgctctcaggttaaagataggggaagaatctgaagcactattgcagacgggcccccaggagggttaaaggtcaaggtggaggcgaaactaagattggaaggtgagtatgcagcccagagtcatggaggttccagagcgggtgatggtttctgagaagctccaggctcttcacgagttctttgaaagccgctggcgttgactccattactagcaatgagtgggacacatttcctaacccatacacacgtttgttcagctggacccctcctggcaggagggctcatctctgggcaggtgctggggccacaagacagatacgaatggaactttgtactcttcggggacggtacggggggcgggcaagaaacaataaacaagccggcaaagaaagcgccacaaaattccaggtggcggtaagtaccaaaaactatggtacctaatagtgataagcaaataaagtactctagcggatcaaacagcaggggaatgtttgctattttagataagtggtaccggaaggtgtctcattgcagggacagtgaatggtgacctagaacctccggggaggctgcaggagggaactgcctctcccaagtccctcggtctccggtaggagatcactcaccctccagccagcgccggccg

SEQ ID NO: 10817 - DNA, 929 bp, Artificial sequence
  DNA replication origin
taaaaataccaaaattagtctgggcgtagtggggagcgcctgtagtcccagctactcgggaggccgaggcaggagaattgcttgaacccaggaggcggaggttgcagtaagccgagatcgtaccattacacttcagcctgaactgcagtgagactccatctcaaaaaaaaaaaaaaaaaaaaaaggagtgctgggactctgtgcggggaggagggacgctcctgctctatgccaacccccgccccatccctggcagatatccaggttacagaatgagagtctgtagtgcgacaaaaagaatgagccactggtactccacacccatcagcctgctggatctcccggggagttacgctggtgagcgaaaccaatcccaaagatcacagacgggggatcaatttctccaaaggacagaggagagaaatgcaggactcattagctgtgcccaggagttagggaggcggcgggtgtgtggctataaaaacgcaacccggggggtgcctgtgaaggaaatctgcgtcccgcagaacgcaacacgccgttgggatactggaccgtcctttgtgagatgccaccattgggggaaaccggatatgcatggctccaaggaaaaagttcgattaaaggaaagtggtttaaggacaaggaaatggctagaaaatggaaagtcttggaaacagagccagttgggggttgggagggcggtggggggaaaagcaagatagatcagattgttactgtgtctgtgtagaaagaagtagacataggagactccattttgtgctgtactaagaaaaattcttctgccttgagattctgttaatctatgacgttacccccaaccccgtgctctctgaaacatgtgcgtgtcaaactcagggttaaatggattaagggcggtgcaagatgtgctttgttaaacaaatgct

SEQ ID NO: 10818 - DNA, 1271 bp, Artificial sequence
  DNA replication origin
cctctcctgtcttcaggtcccatctttcggtggcagccggtggacctgaagctcgccactcccgtgctccaccccggccgtgcgcggggacgtcctcacctgccacctagtctccgtgtcgcgctccgagcctggacgccgactcccgaggcgcaggaccgggccctgctgctgcgctcgccgcggactcccactcggccccggcgggcaccgccttttatatagtagcttgtgacgccacggagcttttcccacacttgacgagcagtctaactggggctccgcctgccgggactagccggggaggcgcgcgcgttcgcgcggcggcggagggcagggctaggcgcagaggcagatccgtctacccccagtccgccccgcccagggcgatgtccgccaatgctcccgccagcctgaggccggccaggttcccaaggcgcgcgctcggcctcacccacccccggcgccagggcctcttcaggaccgggttcagaacctgacagcccagagaagtaggttgggagcctgcggcgtccagggcctccgcgcgaagaaacaaggcgtctgcgggaaaggagacggagcctggaaccctgggcttttctacttaaggaagcgaaggtcgggtgacagccaagctccctgttccagtgggaaggccccatgggtctgtgttccacgcctcttgtcatgaatatgggggattcacttagaaccaaagcatttgttccaggtcccaccactaactagtactagtcctgggcccagaaccaggcgtcctcactcctagtacccaagcccttctctagccacaggtgtttgggctgcggtgtggtgtaagcagccccattttcccgcaaagtgatgggaagagacactgagtcacacgggctcaggacactccttgtgtcctctatcaggggatccagaggcagggactcgggggagttgatgcagcagttcgtgatgtcatcagatatccccccacccccttccatctcaggctggactcaattggaagcatttcatgttggcacggtgacgtccagaggaagggaacagacaaatggctctctctggagcacggagcgtcgcccagaagccgtgccctcctgtttcaaattgaccagaattagagctttctcctgagggcctgaattagggagaagcaagccaggtgcctaaggcacaaaatttcaggagggccacacgcataggtgccaaccctgcatttgcgcggccctgagaatcagagcctccttcaatttgac

SEQ ID NO: 10819 - DNA, 883 bp, Artificial sequence
  DNA replication origin
gccaccgaaagatgggacctgaagacaggagaggtcgctcagccaagagccccggggaggcggtggtgtctcggcggggtcagcaacggtctgtggggggtcccctgcagcgcgcagccggtttccgcctccgcagctcccagccagcgcggacgccgccctccccggcgcctcctcgctgcccttccctggccgaagccctcccctgcagcctcctccccacctgccggccctgtgttctcactgctcctctctgctctgggatccgcaggatgacgtctgtcctggttcttcttctgtctttcaaagtcactagtctccagttctaaatccgagcactcttacccattctaattctttcagtaactcagcgaaacggatggggcccttccttccccggagcactcctccagggactgagaatctgcagagccaggctcagcgctcgcctgcagagcctgcggtctgtgggacccgccagcaagatgaggaatcactttcgggaggaagggtcgtgctggggagggtcgcgccggcggggtcaagagaacctcctctagggtgggaatcagagcctccgggccgcggtgtttgagggtgagtggaattaatcccgtgatggacgtggggccttctaagggggaccaggagtttgcgaagaggtgactttgggaggggttcaggatggccagaggtggaggctgtgacctcagtgaggctggatcaagggaggggcaggtggagaagaaaccgttttaacgaggtggctttaagcggatcctaagggccccaggagatttaggaggaaggacaagaggattaagacaccgctttctggtcgggtgcggtggctcacgcctgtaatcccagcactctgggaggc

SEQ ID NO: 10820 - DNA, 1393 bp, Artificial sequence
  DNA replication origin
ggccagaggtggaggctgtgacctcagtgaggctggatcaagggaggggcaggtggagaagaaaccgttttaacgaggtggctttaagcggatcctaagggccccaggagatttaggaggaaggacaagaggattaagacaccgctttctggtcgggtgcggtggctcacgcctgtaatcccagcactctgggaggccgaggcgggcggatcacgaggtcaggagatggagaccatcctggctaacactgtgaaaccccgtctctactaaaaaaaagaaaaaaaagaatacaaaaaaatagccgggcgtggtggcgggcgcctgtagtcccagctactcgggaggctgaggcaggagaatggcgtgaacccgggaggcggagcttgcagtgagctgagatcgcgccactgcactccagcactccagcctgggcgacagagccagactccgtctcaaaaaaaaaaaaaaaaaaaaaaaaaaagacacggctttctgaggtgccgtgcggctgtggcgggggtggctgggggtgcgggttgtgttcattgtccaaggctctccagtgctttgcgtggcgttttggggagcacagatgaggtgtcccgacagtggggagtggctctagggagaccagaggctcgggagggggcctgggcattagaccaggcacaggatccaaagtgggaagaaatgtgggcgtagagggcaggccttggagatgggtgtgggggaggagggggagatggaaaggagtcagggaggtctcccaggctcacctggaggagtcagggtctcatttccaagtgcactgggaactgcagcctgggggtgggggttcatttggtttcaggcctgtggccaagagacctaccccctcatattcacactttggcctccacgggcttcagagatagtaccagctctttgttctcgctggttttctttcctcaccttgggctgtttcttgccttttccattctggtgttctgcaaggaccagttccttcatctcatgcacagtctacactcatggcttttgctgggagtaatgagtaaagctcccaaatagatgtttctgagttaaaacactgaacacaaaatgaagcaaaaacaacgcatttccaacctcccaaggtcacatgatgtctagaggacagtgatgggcaataactttttgtcttccccattagaatgcaagctccacgaatggaacgtggagttttttattttttattgttttttgagacggagtctggctctgtcacccaggctggagcaatcttggctcactgcaacctccgccttctgggttcaagcaattctcccgcctcagcctcctgagtagctgggtctacaggcatgcaccaccacgcccagctaatttttgtattttt

SEQ ID NO: 10821 - DNA, 963 bp, Artificial sequence
  DNA replication origin
ggcctccacgcaagcacccgagcgttactttcgtttccgcggcaaacgtctggaggcccgggtgagggaagaagcggcggcggagggttggggattactccgacgccgcggcagccttgcccgggcgtgctgggggagggcgcgcgaaccccgaccaggggggtcaccgggactgagcccggcggcctccggaatgttccccgcgcggtgccagtccgctcaccgcgcccttctccgtggccgcgccgtccagccaagtcctgccgcgctccgtcggccccgcccggatggccgcgctctggcgccccagctgtgggtcccctggagtcgccgcgctccggcagctggcccgccgtccgcgtcgagcgcgcccggctggagggcgtggactgttcgcgctgcctcctccccctgccccggcccttgccggggaggaggaccgcgagagcgccgccccgccgctcgtgggacctcgcgcccggggtctgagtcccggagctctcttgcgggctagaggatcgcggactttgttttcaagcgagtggggcggcctacgtaaaagaggaaaccgaaacctccgcgcgcacgagagggagaagggtctggagggaagcactgggtggattacagcgggggcgctatccggaggattcagagctctgcgggttagcataggcaagttagcattcctctaccttcatctgtaaagtggggctgttgaggaggaaatgtgattattttgcagccctttaaaatggtaattgtgaagtctcgagcaaagttggaactgcatgctattcatgtatattaaaaatcaaataataaaattatatgcacatcaggccgggcgcggttgttcacgcctgtaatcccagcactttgggaagccaaggcgggcggatcacttgaggtcagcagttcgagaccagcctggccaacatggtgaaaccccatctctactaa

SEQ ID NO: 10822 - DNA, 1326 bp, Artificial sequence
  DNA replication origin
gcccgggcaaggctgccgcggcgtcggagtaatccccaaccctccgccgccgcttcttccctcacccgggcctccagacgtttgccgcggaaacgaaagtaacgctcgggtgcttgcgtggaggccggggcggccgcgggcttcccggaaggagagggactctgcccggggtgcgcgcggcgggcgggccccgccggtaccggaagtcgggcggtgggcggggccgcgggcgctcccggaagtcaggggtgctccgctaggtgtctctgcttatccggagtccgctggccgcctctgtgccagaggtcggggcgctggactggtagcgggcggagacctgcctttgggccgcggttaccgcgtgagggtggaataggcagtcccacacgccattaatgttgttttggtggagaaggtgggctcctagtgccctatcattaagaaaaaacagtttgggctcttcccttaccagccctttgaaagggccttttactgttgcgcttgaggccgcagcaggttccaaaaacaaaagcatttctgcgtgatcttagacgactgaggggacgaatgtggtaaccctagcaggcttctgtcactggcaggtgcttttgtgaagtgctgcggaccctcttgagggttgggaagaggataggctgcatcctccttccctaagcatttgacaaagcctcacagggatgcgggggttgcgggggcagggggaggtctggggttgttagttctttctctcttgctgaccatttggctctcccttaatcagagctcttttttattttgggcaaagcaggaggctgttccaatgattaattcttccctgacttacacttgaagaagccaaggcaggaagtgaactttgaaatgtgcaatgtcttagtactcatctgcattctgtgactgctaggaagatggactgagtcaagaggaaattgtcttgttagaaatgtggaatactgcgtcgggcacggtggctcactcctgtaatccgagcacttcggaggccgaggtgggaggatcacctgaggtcaggagttcgagaccagcctggccaacatggcaaaaccctgtctctactaaaaatacaaaaattagccaggtgtggtggcgggtccctgtaatcccagctacgcgggaggctgaggcaggagaatggcttgaacccaggaggcggtagttgcagtgagccgagattgccacttacactctatcctgggcgacagagggagactctgtatcaaaaaaaaaaataaataaagaaatggggaatactgcagctcttctattcacaaaaagtgaagactaggcttgttt

SEQ ID NO: 10823 - DNA, 1236 bp, Artificial sequence
  DNA replication origin
gagtgctggttcaggttggagtgctggttccggctggagtgctggtttgggtcggagtgctggtttgggtcgagtgctggtttgggttggagtgctggttcgggttggagtgctggttccagctggagtgctggtttgggtcggagtgctggtttgggtcgagtgctggttcggggtggagtgctggttcgggtccgagtgctggttcgggtggagtgctggttcgggttggagtgctggttcggggtggagtgctgatgtgggttggagtgctggttccggttggagtgctggttcgggtcggagtgctggttcgggttggagtgctggttcggggtggagtgctggttcggggtggagtgctggttcggggtggagtgctggtgtgggttggagtgctggttctggttggagtgctgattcgggtcggagtgctggttcgggtcggagtgctggttcgggtcgagtgctggttcgggttggagtgctggttcgggtcagagtgctggttcggggtggagtgctggtgtgggttggagtgctggttccagttgagtgctgatttgggtcggagtgctggtttgggttgagtgctggtttgggtcggagtgctggtttgggtcggagtgctggttcgggttggagtgctggttccagctggagtgctggtttggggtggagtgctggtgtgggtcggagtgctggtttgggtcgagtgctggtttgggtcgggagtgctggttcggggtggagtactggtttgggttcggggtggagtgctggttcagggtggagtgctggttcgggtcggagtgctggttcggggtggagtgctggtgtggtttggagtgctggttccagttgagtgctgatttgggtcggagtgctggtttgggttgagtgctggtttgggtcggagtgctggtttgggtcagagtgctggtttgggtcgagtgctggtttgggtcggagtgctggttcgggttggagtgctggttccggctggagtgctggtttgggtcggagtgctggtttgggtcggagtgctggtttgggcgagtgctggttcgggttggagtgctcctttggtcaccatgtgctggatgtaatatttctgtactactgttacctcttgtgtgaaatgagcatgacaatacctatcatctcaagatagtttttgaggaatgaatgaggaggtatttgtacatttggacttaaatttaagacttaacacac

SEQ ID NO: 10824 - DNA, 2172 bp, Artificial sequence
  DNA replication origin
gggatcataataaagtaagaagtaagtttagctcatctgaggctattgattgaggaagaggatagggttagaaaacttaattggttctgaaatacatacatttttaagaggcattctctttatactcaactacaattaaacaggcaaggtgaaggcagtgtgaccagcagagaaggtggcctcagcatctgtctagctctggtcataacctgtgcttttggcccctggctctttgaagtcctttcaagttgcctatagcctatgaagcctggcttgaagcttttccttgctctttcttccttccagtctgaggctgctctgcaatgggagggctgcagcagccctctgcaggctggcgttgatctgtgagccatgaccacccatggactgcatggagctaggccaggactcagggctgccgtggacacagtgtcaccttggcactgaacactaagaactgtgctttgcagggctgttaggaagaaggtgtgtcatttggccagttcccagtgatcatgactacataccgaacacgaagttgtctggtctgaagatctggccgaagggtccagacctgacagagtccatggtgccaggctccagatccaccaggatggcccgaggtacatatttgttacctgcaggaaataagaactgactcaggcctgtgcttggggagggactcacagcagcattcaattccagcatctgagacaaaaggagaacaggagattttctgcttttaagaaaaaggaggtcctgagtgtgcttagccgtggcaaacaggcaggaatcttaggaaaccataaaacatgtttttccagcagttggcatttgaaatgaatatgcaagaagcatgcctttgtcacgtgcatgttcctgggacgtttcatctcccacatcatggaaagcaaggattcctgggcacacacatcccgctactcaccagcagcctcattgtagtacacgttgattctctccagctgcaagtcactgtctccatggtaactgcctgtggggtcgatcccatgctcatcgctgatgacctcccaaaactgaaatgaaaaaagaaccacaccatggctctgcatcctgaatgtcactaaggatggccttgtcctcctcccatgtccttggaacaggggcttttgtggtcagacagttagtaagtgctagacagagagcaaagagctgcaccccctatttcctgcagcagccgctgctgaggggcttgaaaatccgcagagcatcggccatattatggggatagactgaaaggctgggaggggccctggaggaggaggggacacagcagatgcccttctagggagagggtggggagagtagagaagtggagaaggggtacagggaggctgtgtcaccccaggcagggctgaatgccattgcatccgggatgattgatgggtcgtggcaggccaaggacagggggacccactctgtggctgcctccagggatcaagctctcttggcacagatcccaggcactcctgcaacagtgcaggtttaagccaccgatctacatgctggcactgaccaccggagggactgggcgaagggcagcaggagcctgggagggcacctgggcggcagtggaaggagctggccatcgtgagggcgctggctgcattgtgaatttgcggcggggaggctgggtgggcaacatggcggttctcaaagagaccacgtccttgtactggcgcccgcccccacccatgcaccagacccgctgctgcctcccacacagcggtcggtaattgcagcccccacccagcgcagtcacctgccgcctcggggactggcagcaagactatcgcgttgtatgtcatcatgtcaagacagtgcccgagcaagggaatttatctaacacccttgcctgtacgacccaaagggacgcctctgttacatctgccagtccagtgacactgcatgttttcattcaaaccgtagagaaaaatatacaaattaaattcacatgaagctagcgcaataaatatgaccgtacccccgacccaagtttctgagacaaatacacccaggggaatgccaaccgcgtcccgcagaagggctgtgtcccagggaaatcgaaaggcccccgattaaacgcacacacagctgcggcgctgcgggcatcctggcgggtcatgcagcctc

SEQ ID NO: 10825 - DNA, 1690 bp, Artificial sequence
  DNA replication origin
ttgccgcactggcccgcctggatgtgcacgatctcgcgcatggtgccggctgcggagcgggtggcgctggccctcggagcggtgcgcggcgtggaccggcgggctgggctgcgcagagacctgccgccgcccccccagctcggtcttttatacccggggacccgccctgcccggtgacgtcatgacgggcggggctgtggccgcgggggcggtgcggctgggactgcggcaccgcgagggggagccggggcgcggtgcgaggtgtgggggcgctcgccctattgctgctgccgctgggtctagggtgggcggccggcctcgcggtccggcggtgagtgcggtgcccgggcctcgggcccagccgcagccccctgcccgatccacgggcacgggcgacccctggcgctgggtcctccgctcacgccgcgatccccaccccgagccgcccactctggacccccgaggggggctggggaccgggggccccggaaccagggggaggggctgcctcggaacagggtcctcgcctcctaaggacgggaagaggcgtcgagtaccctttggagtagggggccggaaattgaagacccatttgcagtgggctctccagcgggtggcaaaggtttcccgcatcctgggcagggtcctggacgccgtttgtgggggtggggtgggcagcgtggagaggagtggggggccgcggggagccgacgggcagctgcctgaaaggaatgccaggatggcggggtgggcggcctttcgcccctgcaggggaggaagatggcttggtcgggggcgggggttgggggggctatcaaagggctggatttgtcacatgtccgctttgggctcctgcgtccttgtaaaggccttttaaatgtggaaaattctgcgggtgtgtgtgtgtgtgtgtgtgtgtgtgtgtgtgtgtgtcagagaggaaagacaggaggaatatatctgccacgttgatgtgtcagctgatggccctgccccttacaccccttaggtcgcctgatcctcacagaagctgtcggagctaggctggccagttcggtagaccctaggcacggtggctgccgagcattgaaacgtaggtaatctgaactgagatgggctgttaagtgtgaagaacacactggcttttatgggctcagtaagttaaaataatgtgaaatatttcattactgattcttaaatattgatggtctatcaaaataatagtgttttggatacattgtgttaaatgacttgttttgaaattagaaaatgtaaaattacatacttggtttccatttgctgctcacttacgcatatttttgttgactaccaccggcttctggtaagcattattactaccccaatttcatagctccgaaagcgaggttgaaagacctgaccagccacaaagctaggaagggaaggaatctaaagcctttgtataaataaaaagcccaggtgagttttaaaggcttgggtgggctgtggtaaggacctgacttaattattcacaaagatggccctgcacggtggactaggtaacaggggcttggggactgcctttggttcccagcacattccaactatataatgatgataattacaggtgccttggagctggctttgtggtaggagatgagaagccatatatgaaagcacattgagtttatggagtaaaaatgccttggta

SEQ ID NO: 10826 - DNA, 1085 bp, Artificial sequence
  DNA replication origin
tggggcggggcggggcggggcggggcgggcagggcctccggggggcacagccccgccctccccctgcgccgcggcccctggaccccggtgcctctcccgcccgcaggaggccccgccccgccgcgccgcgctctcaccgcggggagggggcgaagctcagcctttcccgaactaccgtttgcctagagcgtgaaacggagcgggtcgcgcgccccggcgctccggacggaaggagaaggcagcgtggcggccccaccccgagtccctggcagcccagacctggcgaagggtgaagaagcctggctccagaactaggtggtcagggggtcaggtagtaggaagccacggagccggctctcccgggtgcctcgcgcctcccggcgccgcccagcgccctctgccctggacctgcagactcgacgtctgggtgggggcaagagtgttccgatggcgcctcggctcgcgcttagcgatcctgcgctcgctcactctgcagcgccagcctcgggattaggggagaggagtgtagtgcggagctgtatgcagaagagcgtgcggccagcggagaccgcagtctcgccgcatgggagcctcgcaagtggctctggagttgagtcctgattccagaagagctccagggagggaggggaaggagggagaaaaaaagggagggagggagggagtggggggaggacgggattaacccgttataatagctaatatttatataacactgtggggcaggtggtattgtgagtgctttcacatattcattcagtctttatcacaaccccaggaagcgggtactattattactgtcactttacagatgaggcaactaaggcagagagaggttaagtaacttgccgaggtcacacagctaagaagtgacagtgaggatttgcacccagtccatcaactctaggccctgtgcttttcaacagtcagggaacgcggcaggagggcactgagtcctctaaacggccttagtcatgggaagcagagatgagtttgctctgtagataattcggtatgctctggacacctcagattatggggagaatgacagttgggagtaggttaca

SEQ ID NO: 10827 - DNA, 2380 bp, Artificial sequence
  DNA replication origin
gagaaatcgagcatagcgccggtgggttggcactgctgggggacccagtacaccctctgcagccgctggccctggtgctaagcccctcattgcctggggccggcagggccggctggctgctccgagtgcggggcccaccaagcccacgcccacctggaactctagctggcccgcaagcgccgcctacagccccggttcccgctcgcgcctctcactccacacctccccgcaagctgacagagccagctctggccttggccagcccacaaaggggctcccacagtgcagcggcgggctgaagggctcctcaagtgccgccaaagtgggagcccaggcagaggaggcgcccagagcgagcgagggctgtaaggactgccagcacgctgtcacctctcaatcggacgccttttgatgccccttgcagtgaatgactccagcttcctttggaagtaaagcggccatgagcagagtttttattaaagaggcattaatgatgcaggaccttgcgtagtgagaaaacctctttcagcccatataactgcatggtggtgcagaatatggaaggcatatttagagtcagtataaatattaatgcgtagtccctttgcaagagtgagggcccgagttaaggcaactagttcggcttgctgagaggtagtggaggggggcagagcggtagcctcaatgatagatgtggaagatactattgcatagcctgcctttgctggtgagtggcgattaggcctggtggaaccgccatcaataaaccaaatgtgatcagggtgaggaacagggaagaaggaaatatggggaaatggggtgaatgtcaggtggatcagagaggcagtcatgagggtcaggtgtggtatctggaataatgttggaggccggattgaagtccaggctaggaacaatggtaactgtgggagactcaacagagtgagtatagctgaaggagctggggagcagaaagtatatggtcaggtgtgaggaagaaaatagattttggaagttatgagagctgtagagagtgagttgagcatagtttgtgattttgagggcctctaaaagtattagggcagcaggagccgctgcacggagacatgatggccagcctaaaacattgaggtcaagttgtttggacaaaaaggctgcaggacgtgatcccagtccttgtgtaagaattccgactgcacagccctgcacttaggctgtgtgtaatgaaaagggttgggatgagtcagggagagctagagtgggggcagtctctaaagctgtcttcaaggaacggaaagaggagtgggaaaaggatttaagatctatggggtcaactaggtttccttttgtgagtttatataatggttttggtaggatggcaaaaccaggtatccaaagttgaaagtatccaaccatgcctaggaaggaaaggagttgctgttttgtagaaggggttggggtttgagagatcagtaggacatgattggcagggagagcagtgtgtttttatgaagaattatgccaaggtaggtaacagatggagaagaaattcgagctttggagggggataccagatatcctttggagaataaatgctgaaggagcagaagggtgtcttgttgagaagattcaaaggaggggctacaaagaagaaggtcatcaatatattgaataaggtgagaagcgggggagtggaaagaaagtaaatcatgagaaacagcttggctgaagtaatgaaggctgtccctgaaaccttgcggcagcacagcccaggtaagctgctgggactgatgggtgccagggtcagtccaggtgaaagcaaagagaggctgggacgaggggtgcaggggaatagtgaaaaaagcatctttaagatcaagaacggaatagtgagttgtggaggaaggtattgagaacgaaagagtgtacgggttgggcaccacaggatggatggcaaaacaatttgattgatgaggcgcagatcctgaactaatctgtaagacttgtccggtttttggacaggtaaaatgggggaattgtaaggagagtttgtaggttttagaagcccatactgtaacaggcgagtgataataggctttaatccttttaaaaagtgctgtgggatgggatattggtgttgagcagggtaacggtgattaggttttactaggatggtgatggtcatgtgattggttgccagggagggggtagagatgtcctatacttgtgggttaaggtcgggggatacgagaggaagacgcaaaggaggctttgggttgggaagaagggtggcaatgagatgcagctgtagtccaggaatagtcaggaaagcagataatttggttaaaatatctcggcctaataagggaactgggcaggtggg

SEQ ID NO: 10828 - DNA, 895 bp, Artificial sequence
  DNA replication origin
caaatgcagaccttcctggccgctttgtgccgccgagtgtggcctgggctaggaggtgactttcgcggacggagggggcacctctctttctttctgctgtaactcatttggagtccccgtcaccccctcggcctccctccgcgctggctgcttggcaggcacgcgtgcctggagaagacgagggtgtgtccgcgaggctgtgcgcggcgctccgcgcgaggggctgggacaccaggaggattaattgtactcgcttgaaccggagtcgagctgccgggggaggggaggagagcgattgtcttgcggtctcaggacgtgctttgaatctaaaaccgcggtcctttagctcctttgcgttcctctttccccgcccacccgctcctggcgggctgcagtccctgtgccctcgcctcctgccgcagcctggggctgcgaccagtgcgccaagctccgccactgcccggctttggctggtccttaccccctcgacccctacctccccccgcgagcggcagctgtttgcctgggaaacgcccagtttcaactttctgaacctgcaaaatacaagccccgcggctgtgcccgggtcacgacgccctttaaagcttcaagctcctgaaatgttgggttgtcggaactgagtcggggacatttcattgtgagccttggcgtttctgggggcatcgttcatggctaaatgcagcctttctgtctcagttttgggaggtcatcagtgatgagcatgggattgaccccactggcagttaccatggagacagtgatttgcagctggagagaatcaatgtttactacaatgaagccactggtaatcacccttgccccacccccactcccttcagtttttccaccttctcccctttcccttgcgtgggac

SEQ ID NO: 10829 - DNA, 1352 bp, Artificial sequence
  DNA replication origin
ggcggcacaaagcggccaggaaggtctgcatttggcgatccccaggccttcccaggaccgcgcctggggaccccgaggggctctcggcccaggttcgcgcccccattggaccccctccgctgcggcgcgcccaccttggcgccgatctggttgccgcactggcccgcctggatgtgcacgatctcacgcatggtgcctcgtcagcgtcctcctggtccggcggcgtctgggtctgtccgtcctcccctcacacacccactgcggggtcaccgggaaggcgctcgggaaccgacgggctgagagcgccggccccgcgggctccggcttttatgcaaggagggtggggcggccggcacaggccgcgcccccagcccgagccccccagtccccttcgcgctggcgctctccaggcccggctgacgtaatgctccgagccctagggaccgtccggggggctggaccaccggcccgcggccaatcagagcgggcgtgccgaccgggagaggggtgggggctaccgggagtatggtgggggcgtgcgcattgtctggggctgtggtgggggtctgggtatggggatatgggggaacagtgaagaaaaggagggtgagagggcggcgaggcgagggccaccagcgcgtcctgaccggggtgggggcagagctggcaccggatgggaacgatggaggactggagcatgtggagaagccgtcaggtgctccagtgccggcaggtgggagggctgaggtggcacaggctgctccgccacctcggactgcggctcctactcggccactggccagagtccctccagccaactgcccctggtgagaccaccgtctttttcctcaaccctggaggccagcgactgcccaggcggcgctccgtctcacagaggcctgggggaggacaggtggccccagaaggaagtcgtgcttgatggcaaccgggacacctgcggcccatgaacaccagcgcggcctccgcccccgccccagcgtgggcctgctttctcctttgtctgtcttgggctggtagctcctctcactgcgccgcagcatctaggggtgaagcgacctcggagcccctcagccctgcccgaccctctccgggagtgcataacgcccctgctggtacccaggagccctctgccccgggggttgacttttgttgctcgctagtgatggagtgggagtggccggtggcgctgcactgaccgtccggagggcagaaagagggtggggtcccgggggcggggctgtcggcggaacaaagggctctcagaaacgtgggatacgctgtgtaacccagtatttaaaaccacacgacaggcgccccacccccccaccccg

SEQ ID NO: 10830 - DNA, 1932 bp, Artificial sequence
  DNA replication origin
agcggagagcggcgggctcggcagccggcgcccgggccgcggaactgatgagccgcggcggctgagggcccggccggcctctgcccgcctctgcccggcgcccgagcggggccgcagcgcccggggcgcggggtccggcgggtgacatgggggcggcctgacgcacccggagccgccgagcgctctctctcgagccgcgggccctcctcggcggcagcggctgcaggcgcctggcccggcgcgctgtgcccggggcgcccgcggagcctccgccgcgctctatgcgcctctgcgggagccgcgggcccgggccatggccatagaccggcggcgcgaggcggcgggcggcgggcctgggcggcagccggccccggccgaggagaacggctccctgccgcccggggacgcggcggcctcggcgcccctcgggggacgcgcgggccccggcggcggcgcggagatccagccgctgcccccactgcatcctggaggcggcccgcacccgagctgctgctccgcggctgcggccccgagcctcttgttgctggactatgacgggtcggtgctgcccttcctcgggggcctgggcgggggctatcagaagaccctcgtgctgctcacctggatcccggcgctgttcatcggcttcagccagttctcggactcgttcctcctggaccagcccaacttctggtgccgcggggccggcaaaggcaccgagctggcaggggtcaccaccacaggccggggcggggacatgggcaactggaccagcctccccaccacccccttcgccactgccccctgggaggctgcgggcaaccggagcaacagcagcggcgcggacggaggcgacacaccacccctgccatcccctccggacaagggggacaacgcctccaactgtgactgccgcgcatgggactacggcatccgcgccggcctcgtccagaacgtggtcagcaaggtaagggccgcagccgcccagtccctccaaccctctccctgcagaccgaggtccaagcccgagccagcgggagaaccgaagtccccaaagtggtggtgctagagtgtgtgtagggcattccgcattggcttaatctccttccgtcccccaaaccacatgcctttacttgggtgtaaagggagcaccatagcctttactagtttgcacccaaactcctgtcccagtacgcggatggaaagcgcgcccttcccccaccctcggggcgaggcagctgacctgtcaccagccccctctggaggagtcggactggcgtcgttcaaggtctgctgggggagtcgggaccacagccctgttctgcccggctagttgtccctgggtctcccacaaagcaatagtcttccatctcgcacttgattttgacacaggtaaagcctactaaagaactggagagccagagaagcaaagactcctgcaaatccccaacccgcagccgatgcttagtcctccccaaagatatctgactttaggctttgctaccccagtgtctcctcccatgttttctcagcacttcagtaaacatcactacagtataggaaggacgcggagaatatgtcatttgggtgttccccggccgtcaccgctcttacacagcagctgctttgggctgaggcactgagaacgggggtgtgctttagctgaaacatgcaccttgtcctctgagtcctgtagctaaagctcccttgcagaggtattgcgtggtgtgaaatgtagcagaagggagttgtgagacaagtgtgaaggcctaaacacagagtgggcaatggtggacactcaatgcccctagacagctgtaattttattcttaacatataagagatatcaagacatttgtagttttgctccttgtgtctaaactaattaattcacattttaaagtaaatacagactctcctccaccccacccg

SEQ ID NO: 10831 - DNA, 1139 bp, Artificial sequence
  DNA replication origin
gcccgcgcccttgccggcggttcagggccctgcgggcggcggtgcgggcaaaggctgctgctcccggggtggccgcgctgtatttctccgacttcgggcgcctcccggaagccgcgagctctggacccagcctgccgagccggccgcgctctccagctcctggagccggccccactcctcctcctcctcctcctcctccccctcctccctgccccccggcccgccccctctccccccgccgaggtggaggtaaccgcggcacctgctgcgctcggctcctgctcgcgagcgccccctccagcccggacgcgcggccgccgccgcccgggatccacgggaggggggcgggggaaacgggacaccccgggcccgcctggctggaggatcccctgcccgttgcccgtttcgcgccgggcggggcgggggaggaggagacgcgcgtagcaggggtcgccggccggcgacgggtcccggcaaagtcggcgtgcgctgagaacgtgtgggccgggtcttctctgaggctgggctcccgcagccgcgcgggccccccacccactccgcgcgcgccaggtctccgtgacctctgtctcttcagaggtgcccggcggtcccgctgcccgcgccccgctcccagtcccaagcccgagggtcttcagccttcgggaacaaccctctgcgctttttccaggagcgaataaggttgatttttgtgtccgtggagcagggtcaaggaggcgcctttgccaatttcaggtcgccagtcccccgcagtgtctggccacctgcgacccgccgcacccactcccaaatcgccatttcttcccccactcctaagtgcatgcgatgtaagcacgatgctgggatatatctccaacacaagttataatacacacagtataaacgtgatggcattccccaccccctccctaagatcttgtattcacgtttggaacgccgtgtgcacaggcgcacacatctatactctcacacaagaagacaaacctctccctcctctcctgctccagcgccaaccttgcccagccagcgctgtataaataacaccagccctgcggcaaacggctacattagcatatttcctcctgcacccagcgcacgcaccaaagagaattatccggcac

SEQ ID NO: 10832 - DNA, 1035 bp, Artificial sequence
  DNA replication origin
ggagtggggagatgatgaagagcgggggagatgatggggagggggggagatgttggggagcaggggaggtgatggagagtggggctgatgatggggagtgggggagatgttggggagcgggggagatgatggggagcgggggagatgatggagagtgggggagatgatggggagtggggagatgatggagagtgggggagatgatggagagtgggggagatgatggagagtgggggagatgatggggagtgggggagatgacggggagccagggagatgacggggagccggggagatgatggggaggggggagatgatggagagtggggagatgatggggagtggggagatgacgaagagtgggggagatgatggggagtggggagatgagagcaggggagatgatggggagcaggggagatgatggggagtgggggagatgatggggagcgggaagatgatggagagtgggggagatgatggggagtgggggagatgacggggagccaaggagatgatggggagccggggagatgatggggaggggggagatgatggagagtgggtagatgatggggagtggggagatgatgaagagttggggagatgatggggagtggggagatgagagcgggggagatgatggggagcgggggagatgatggggagcagaggagatgatggagagtgggggagatgatagggagcagggaagatgatagggagcgggggagatgatggagactggggggagacgatggggagcgggggagatcatggggagcagggaagatgatagggagtccgaggcactgactttaaagctgggaaatcacaggactgtgacctcaaagctgagtcaccttagtggcagtctgctcatttatgcagcctgtgtcccaatctccactgtcaaaccttgaacagaccaggagagagagctcccctcctctgggatccgcccttccatctgacagagctctaattgatcaaacatctatacaggtcagagcagactccctgtgccttctcagc

SEQ ID NO: 10833 - DNA, 995 bp, Artificial sequence
  DNA replication origin
tttctatagtttcaggctttgtgatgtctgagccaaccaggtcaccactgcagcaacagattgtgttcccgagtagtcaggtgatctttcattcttagtagctgtacaatcaacattttgcttttacattcattccatcaaatatctgcatagtgcctaccacatgtgtaggtgatggtggcacagcagtgaacaagagaccaagaacatccctgccctcatgattcttatattctggttgggagaaatccaatagtaacaagataaacaagtaacaaatacattagatagtgatacatgttcaaaaggaaaaataagtaagcaaagaaaggggctccgacttacaggagcagggggaggggttttgcgtttagacagggtgatcgaggacaagtgacttttgaagagagacatgaaggaaagcggggatcatgccattgggtgcctggggaagtcgattctaggcagtggaagagcaggtgcaaaggccctgaggctggcatgtgcctggtgggtttggggagtgaggaggtacggtggctggtgtggagactgttggtcaggaagggagagaggaaggtcgtggtcacatttgggcttttattcagagagggctctgagcagagaggtgatttggcctgactcaaactcgggctgctgtgctgggaaagagcaggggaggcgtggaggcaggtgctgggggctggtgcagcagagcaggtgggagaagtgggcaaacgctgatgtgcattgagggagagccacaggggcactgcaaggccagacatggggtgtggagtagtgtgcagatgaccccagagttttcagcctgaggtgcaggactggcaggattgccatttgctgccatgggggagtcggcaggaggagttgacatgggggagggggtggctcaggagggcagcttgggaggcggcattttagcgttttctcttagtaaggccatgatcacaagcccgccagcccatgtggtgcta

SEQ ID NO: 10834 - DNA, 1184 bp, Artificial sequence
  DNA replication origin
tcctcctctaagcagagacctcctgaaagcttggggccaagttactgaagcagaaggtggcccgtccaagtctccccagcctcctatctggctgcgttcttgagataacctgtgctttcccctggcgatggccccaaccccagtgtgagaattacgtggataattagcttagttctcatgacacatcttttggaagggctcccacagccagcgagttggggccctgagcgagaaggcccgcctttcaggcctccctctgctccccagagcctcacatttatagctgttctccagacagttgggtgttatttcaagcatggaagcagttttccttggatttgctgtttgttatgatattttaaatttaacaaatcaatgcccaaatcaggaaagcatcgtgaaggaacagcggtttattcaatgacctttcctggaacgaggcttaaatacactggagtccctgagcttcactgtggtcaggcgtctgagctccgtgaccccaggcaggctggttggagcgggatccccgtggggctccccacctgtaactttgtgcttgtggtctctgacgtttgtgaggactgaaaggcatggtagagggtctaacaagagcaggttctccataaatgccagttgtcattgttaccgtcccatcagctgcttctggctggggttgggccagacggtggaaagagggcgtggtttcagttgcatccacgctggtggaaatacctcacctggagcaggagggaggggcgtgccctgcacacaccctggctccgcctcttttgctgtcgccctagttgtgctgggtctgttacgcggtcacaagctgtgtggacacgcaggagtggctcaaaagagtgaagaaaggttgaagacgcgagcgattaccgtggagaaaaggctcagaagggatatgatagctacctccaagtacctcaaggggaacagaaatcagaaataggggtcagaatgatggtggcagggctggtgggcggtgagtgtgaggtccagcggctgggtgtaaaggactttctcacagcacaccgtggaactgttggagctgctctctctgctggggacagtctggcacaccctggagggggtgaagaggggagcctgggaccagaaccgggaccataagccctgccttcattctagtccttggttttctgaggggc

SEQ ID NO: 10835 - DNA, 1262 bp, Artificial sequence
  DNA replication origin
cacttggaccccgcgcccgcagacgaggggtgcccgggcggcggggttagggggacggggagccagcctgcccagcctgggggcgcccccggcggaggagccaaatggggcgggaaaggggccgaggccggcagggcgggcgccggactctccctgaggacgagtcacttccgaggagggcgggggcgcccggggctgagcggctcacagggtcggcccggccctagccccctgcccggtacctcccgagggccggcgggcgggcgcactgggaaagcgtctgggagcagttaactgcagggtccgagccgggggtcgcgtcgggtctggccgccgccccgagttctccccgcggagggcgcgcccctggtcttcgagcgcgaggtgccacgcagcccttccgtccctcctcggagcggccgccccgcccgcggctgccgcggacagccagggcccccccgcacccccgccagggctggtccccattcgcgtttgatcagctgcgccgcctcctccccggcctcgtgaccgtcctggctcgcgggaattcttgttttcagaaaccgcggtggcttcccttttcctaccgctctgcccgatctttcttttggaggccaggctgagggggtggaagccgggaggacgcaagagagagggactggaattgagacgggaagaattgcggggtggagggggcaggccgaggagaggggccgcctgggagggccgggaggggagaaggggcgggaagactggaggacttccgagcaggtcccacccccctccatgggtgaccacctgtagctcggaacattgggacagtggcccagcagccttcttttctgcagtcctcctctaagcagagacctcctgaaagcttggggccaagttactgaagcagaaggtggcccgtccaagtctccccagcctcctatctggctgcgttcttgagataacctgtgctttcccctggcgatggccccaaccccagtgtgagaattacgtggataattagcttagttctcatgacacatcttttggaagggctcccacagccagcgagttggggccctgagcgagaaggcccgcctttcaggcctccctctgctccccagagcctcacatttatagctgttctccagacagttgggtgttatttcaagcatggaagcagttttccttggatttgctgtttgttatgatattttaaatttaacaaatcaatgcccaaatcaggaaagcatcgtgaaggaacagcggtt

SEQ ID NO: 10836 - DNA, 1109 bp, Artificial sequence
  DNA replication origin
ccctcggagaagtgggaagaggggagaaaacagtggcgaaaagaaggtctcctgggaaggagcgccctgggaagctggacgcggtgggtgctcttgaggggcctcaggagtggacttggggaaaccgcccgccctgaaaactgactcagcggcgcgttactgaggccgttcctagttggaagagaattaatagcacttgtttgagaattacaagttagttccagaaatgaatcgagtgacctcacagcccgtaggcaggggtgggagagccagggtgagcccctcacctcaccccgcccccgccccggcagcgctctggaaagcctcaaagcccagcgctgcgcggaaatgttagaggcccaaggcaggtggcctgtctggactcagacccgacccagatgtccccccaggtccctaccactcagtcccacctgcctcgactcagtcccgacccagatgaccaccccccccccgcccccaccacgaccaacttttattccgactgcgccagtgacttgcagatagcatagcttcaaatttcctcacctggtctggggcggtgaacaggtcaagatggagagtgtcaagagagacttttgctttgtctatgatgtttttatatacacttgctaattaaatgaacgcatatgtttcctgtgtaattttgtataggggaataggggccgtgggaactggaagtaaacagccagtgtgccagcagctcttgactctaggtggtgggaataagtgccgttgtaaccacagtaccagcccaaacggggcttactctgtttgtaacaatgttgagttaccttgcaggtataacagagccaaaaactcttaagtcacaaagcccaggcatgcaccatagaaaaagatttgatctctaacaaacatccagaaccaactattcgtctccttggaacgaagaagactgggacatgactggaacccgaacattcgaactctcagaagggaagggtctcttggcccagaagataggggctaaaatccacctcaacataccgtaccataaatggccaaatttgaaggccttcaaacagatcctgcccagccaacatttctaagtcctttcctttgccctctgc

SEQ ID NO: 10837 - DNA, 868 bp, Artificial sequence
  DNA replication origin
ggcgtaggctcggcggaccccgcactcggagcggccagcaggtcccgccggccgggcactgaggggcttagcacctgggccagcagctgctgtgctcaacttctcgccgggctttagctgtctccccgcgaggcagggctcgggccctgcagcccgccatgcctgagcctcccccacgccgtgggctcctgcactgccccagcctccccgacgagcgccgcgccctgctctacggcgcccagtcccatcgaccacccaagggctgacaagtgtgggcacacaggcgcgggactggcaggcagctccacctgcggcccagatgcgagatccactgggtgaagccagctgggctcctgagtctggtgcggacttggagaacctttatgtctagttaagggattgtaaatacaccaatcggcactctgtatctagctcaaggtttgtaaacacaccaatcagcaccctgtgtctagctcagggtttgtgaatgcaccaatcaacactctgtgtctagctaatctagtggggacatggagaactttttgtgtccacactctgtatctagctaatctagtggggacgtggagaacctttgtgtctagctcaggggttgtaaaggcaccaatcagcaccctgtcaaaaaggacctcagctctgtaaaacagaccaatcggctttccataaaatggaccaaacagcagggatgtgggtggggccagataagagaataaaagcaggctgctccggtgtcctatccactctgtggaagctttgttcttttggtgtttgtaatcagtcttggtgctgcacactctttgggtccatgccgtctttatgagctgtaacactcaccgtgaaggtctgcagc

SEQ ID NO: 10838 - DNA, 1028 bp, Artificial sequence
  DNA replication origin
ctgctgattggtccattttacagagagccgactggtctgttttacagagagctgattggtccattttgactattttgagcctcggggaggctcgggaggcgcaggagcccacggcgtgggggaggctgaggcatggcgggctgcaggtcccgaaccctgctccgcagggaggcagctaaggcccagcgagaagtcgagcacagcagctgctggcccaggtgctaagcccttcacttccccgggccggcggggctgtcggggccggctggtcgctccgagtgcggggcccgccgagtccacgcccacccggaactcgcgccggtccataagcgccgcgagcagccccggttcccgcccgtgcctctccctccacacctccccgcaagctgagggagccggctccggccttggccagcccaggaatgggcttccacagtgcagcggcgggctgaagggctcctcaagcgcggccagagtgggtgccaaggccgaggaggcgccaagagcgagcgagggctgtgagggctgccatgccggtacactgtcacttctcagaaggacgcagggcagagtttcaggctggctctgtcacccatgctggagtgcagtggcatgatcttggctcactgcaacgtctgacccctctgagttcaagcgattctcctgtctcagcctcctgagtagctgggactataggcgcccgccaccatggccagctaatttttgtatttttagtagagacggggtttcaccatattggtcaggctggtctcaaactcctgaccttaggacccgcctggcatatctaggaggagtggactagagaatgtaggaatgtgagggatgagatggaagactggggggacggcgtcaggcgtaggccatgtagaggccttgcaggtcaggcgaaggttttggagtttaactcttgagtcaggaagcgttggagggaagccatttccaacccacatttagtaactgaatgcacttcgatggtgtgcttatccatggaccaattttcctctgct

SEQ ID NO: 10839 - DNA, 1286 bp, Artificial sequence
  DNA replication origin
agccggctccctcggcttgcggggaagtgtggagggagaggcacgggcgggaactgggactgcgcgcggcgcttgcgggccagctagagttccgggtgggcgtgggctttgcgggcccgcactcggagcggctggctggcccgcaagccccgggcagtgaggggcttagcacctgggccagcagctgctgtgctcgactactcgccgggccttagcgccctccccgcggggcagggctcaggacctgcagcccgccatgcctgagtccccgccccgccgcgggctcccgcgtggcctgaacctccccgacgagcaccgcaccctgctccacggtgcccggtcccaccgaccgcccaagggctgagggagtgtgggcgcacggcgcgggactggagggcagctccacctgcgccccggtgcgagatccactgggtgaggccagctgggctcctgagtctagtagggacttggagaacctttgtgtctagctaagggattgtgagtgcaccaatcagcactctgtgtctagctcaaggtttgtgaacacaccaatcagcaccctgtgtctagctcagggtttgtggatgcacgagtcggcactctgtatctagctaatctggtggggacttggagaatctttatgtctagctagggattgtgaatacaccaatcagcactctgtgtctagctcaaggtttgtgaatgcaccaatcagcactctgtgtctagctcagggtttgtgaatgcaccaattgacactgtatctagctaatctagtggggaggtggcgaacttttgtgtctagctcagggattgtaaaggcaccaatcagcaccctgtcaagacggaccaatcagctctctgtaaaacagaccaatcggctctcagtaaaatgggccaatcagcaggatgtgggtggggccagataagagaataaaagcaggctgccggagctgctagttgtgagtctccttggtgttatgtatgcagtgtggtggctttgttattttgctgtttgtaataagttcttgctgcttactttctgtggctatactgcttttatgaggtatgatacccaccatgaaaatctgtagctttatatttgatgccagggagcttactaaacccaccaggaagaacaactgcagacatgttccctttaagagctgtggtactcatgcgtaaatgtgtgcagctttgctcctgagtcagggagaccacgaacccaccagaaggaaaaaactgtccaacacatctgaatgttagaaggaacaaactccagatac

SEQ ID NO: 10840 - DNA, 992 bp, Artificial sequence
  DNA replication origin
gctgctctgggtgacaggctggctcttgtcccagaagctgtggactgccactggagtgtttcaagcaagggagtggcttgatctgtgttgtaggaacagcaccttttctcaacttaaaagtgtggcttgaagagaggaagacgggagactgattaggagatggatgtatccaggcgaggatgagggtgggtgaatggagccaggggtagaggtcctcaggggagctgacctgagacccctgtgagtctcgggtcctggcaatggggcggcggtgagtggtgagggggaggcattgaggacagcgcccggggtccccggctggggcacatacgtgtagggcagtggtcaagggccctagccttgcagtcagacacccctggcgggctgtgtggcttagacatgctcctccacttccctaagcctagttgtttcatgtctagcataaagattccgtgtggcaggaagaacacacccccgggagtgattctgagattgaaatgagtgctggtgcttttcacctaaacaaggaaaacagggagagaagcagtatgtggggtgggagggagaaggagaggagtctgtctgggcgtggggagttggacgtgcctctggacacccatggacaaatatcctgaggccatctgatgttttccgggggccacgggagtcggggaggggaaggtggggtggagacacagacttgggcattaccagcaggcagggggctgctaccgccatgaagagtgggcagtgccaggatcagagggccggggtaaagcctgcattgttcccacatttcagaagaggctgggaaggaggtcaagcaagagcagcaggaggaggagaaagcaggaggatgtggagggacggcaggcggggaggaggaattccaggagggagtggctggggtgactgttctgaaagcatggactggaagccacagcacatttgggctgcaaggaacccgagagatcttctagtctaatcctctt

SEQ ID NO: 10841 - DNA, 1114 bp, Artificial sequence
  DNA replication origin
agccccgcgggggaggccgggcggggcgcagggacagggcctgaggcttgttgtcctcccctggcggccccgtgcgtcccgcgggcccggcggccgggtgacccccgagaggctccgcgcctgggcggccggcggcgaccccgcggcccgcgaatacgcgtggaccttgtggaacgccgggcctccccgggcgcccccgctctctggtagttgccgggagacccggccggtggggaagcccgcggagccgcagccccggccccggaaggtctctctgggccccgggcccgactcccacccctgcgccggcccgcgggcttcgcaggccctgcactgccgaccgggctgcgctcaaggccgccagccgcccgccgccctctttgtccccccgctgcaggaaggccgcggcagagggggcgccctccaagccgtcagccacgcacgcggaggcgctcgggcctcggggcggcgcaccgggagagcacgccggggaggacacgtgggccttcgcgcggtgggttgagagccccggccccggggaatcccgcagccccctcctgctacccctggaactgggctccccacccagtccggccacagctcaggaggaaaaggggattcctcttcacgggggccttgcggctcccttgagacacgcgccttcaagcactctggcccctaaagctcctgtcccccaactcgcagtccccaaggcgtcctttgtccccagggccgtccttcaggtgcggtggccttttccaggagctggatgccctccttcttgacacacacccggtggccccaggcagcgccacctgctcagcaaccgccttcctcctgcattcagacctagtgtctggcatgcacacactcgtggaccaataaccggtgttggctgaaaacctacctaaactaaatctcctatttcttcatacacttttctgtaggagacaatcaattgtaaacgattagcagatagaccgattactgcggtggctttaatttgtgattcttggccgggtgcagtggatcacgcctgtaatcccagcactttgggagactgaggcaggtggatcacgaggtcaggagttcaagaccagcctggccaacatgg

SEQ ID NO: 10842 - DNA, 1460 bp, Artificial sequence
  DNA replication origin
tccaacggcggcgaccttcgcctggacagcggtatcctgcgggcgaccatgggccgaacggccgggactccaagcttacctcggacacgaacgccgcgccagtctccaagccaagtacgccatcgccatcccttgggcggctctagggctgcgggggctcgggggtggggccgggtctcgggggcggggcctagctcggtctgcgggggctcgggggtggggccgggtctcgggggtggagccgggactcgggggcggggcctaggctcccgggctgcgggggctcgggggtggggccggggcttgggtgcggggcggggccgagagcagagcccaggcaggagcctggggcatgggcggggccagggttggggcggggccaggctgagagcgtagccacgccgcattcgccatcgctagcccgtggcctcctctggggctgcgggggctcgggggtggggccgggggggtcggtgcgtgggcggggcgggagctctaggcggttaggagtcggggctcagatgcgggggcggggccggagcgaggccgggtatcacccgggagtggaggaagtgcggggggttcgcggcgcggggagggtgatcccgggaggacttgcgcggcgcgtggggcggggcacagatgctccccggcctggctccgagtaactgcgagctggaggcgcggctgctctctcgggcggacctcagctctgcgaaccctgtggctgccggagcactgagcgccctgcccggagtcccgcggagcctggcgaggaggggtcgctgcatcccgagggccagccctgagccgggaggtggggtaacaattgagggcgtatgcttaaaagctgctaggtcatgcatccccaaatcgaaggtttgcagacctggtaggacgcctgggggtcagaagtgatttttggagtacccaagtttttagtgtcagtgaagagtttgtggatatttttgagttctgctgaggcatttgcaaagtattttctttggggaagaattcttaagagttggaagggccttggctgtgtcaccttgtccagttcccagagaaccaaaaaacaaaacagaacaaaacgaaacaaaaccacccctctaaattctgtgcccaagttgtcccatccaagcatgcctaggagttttagatttatgtagctgacacctgtggactacctatagtgagccaggctaattgtaagtctttggacaaccctgtaaggaaaatgatattgccctgttgagctgatgtggaaattgccctgttgagcatattgccctgttgagctgatgtggaaactgagacccagaaagattaatcaggtgaattccccaaagacaggaggcttgcaggtgggcagagtccaagtctcaagtaactttatcattaagtttcatcaggtagatctgggtaatagtgtagatggggcaacaccaaaagtcaaatag

SEQ ID NO: 10843 - DNA, 1385 bp, Artificial sequence
  DNA replication origin
caaagtcctgcctggtaggcgtgtggggtaacaaaagggcctggcacaccattctaagaacaggtactttcctgagggtgttgaggaggatgtggggtgcagggggtggttagaacggtgtctttcaaagattccctgcagatggcaccttggccaggacacccaggagacccttgggtgcttgagaagaagtgctgtccagttaggtggagccctaggtgactggagccaggaaaagccccagataagggaagccaggaaccctaggtagatgcagtcccacctgatggagccccagttaagtggagtggtggtgaaggctcatgtgggtggagtcccacagggtggacacagccccaggtgggtggatccccaggtgatggagcccccaggtgggtggagctccaggtgggtggagccccaggtgggggattccagatgggtagatccccaggtgggtggagccccaagtgggtggagccccaggtgggtggagccccaggtggtggagtcccacatgctggagccccagatggtggaaccaacctgagcccacggcctctccctctgcactttatgaaatcgggagaaccaagctgattgtcctttgagaaatgccacattcatgcttcctggctgagtcaacacggctcttctcgatggcttttcctccctgagtagcctttcctgattgtttgccctcacagaatgtggtacgcatgcctggccttgagtacgggctcaagggtcacctgggtttgtcctttttgaagttcttgtgctgaggttccatgcggctctagagcgtctccgtgtttctggggcagctgggttgggcccctgtgagcttcaaggcaggatttctggactgcacaaggctgagctttctcctgcagccgtgccgcgtcttggtctccttgggccttcctgagttctctgcctgagtggcagctggtttgtcctgattttcttaaggggcgaggagagtggggttctttggtgcgtttcaggcggtgctccggggaccccgcaagccccagtgcgccccggaaaccactggccaggccggcacagccgggcgtctgttctcttcttactgtgtccctctctcagggatcccagagctgccatctcagttattgtttggcaaagttttccataatgctgcacgcaaatccaaaccgcattaatattatgacaaataaaaaaatacagatttccagcagaagtccacatggagcactaatgcaaacaggtcagtttagagcctaaaagttaaagcatggacgttcttgggtgaacaggggagaatgagaatccgaatggcaggcccaactggagaattgacatgagagtcagtgtagctcttatttcccagtgccaga

SEQ ID NO: 10844 - DNA, 1130 bp, Artificial sequence
  DNA replication origin
gtgaagaatgtagctcacacgggacacataagccacagtaagtgatagctctgaatccttgtggctgagacagggctagaatctgaggcccagcccaccttccaggccagcatgcacccaccgtgccactgcttttgttctctggggtccctgtgtcttgcggtccagcttccactggacactgcacctctgaaggaagacagataacaaggctgatcacaggtgtctgaatgatgggctggggttcctgagttgggtccagagccttcatatgctgacatgtggcattgtttgcagctcagccctggggggataactgcagtaaagtggtgccttctctagaaagtcagcaagtcaggggttcttggaatatccatggtgctcctccctggtggggaaccagctcccgagctgggggtggggggctgggtgagggggcagtgtgggaggaaagctttgaaggctgcaggagataggcctggtcacatcctgcaggtggccagacaacatggggacactcatgcactgtactccacctcttgcagcctcatgttttctcccgcaaagcagcagtgacagtgacaaatatctgcagtgtggctgtgaagaggcaggtagcacgtgcgcagtgcctggagctttgagggctgggtgagggctgagtggggatgtgtggtctcttgctacccccaaatgtgggctgggagtacttggacgtggattcctcttgtgacaacgtggaatgtaggatgctgcatttgtggggcctagaagttcttgtgtgaccctgctttgggctcattatgagtgtttgtgggtgcgtggaaatgagagttctttgcgggctttgtggatgagaaaaaactcaacagagaaggcaggacaggacctgggccttgaaggacagatgggtgtgcacatgggaagaggaaccaaagggggagagggatggctgagcaaatgctctgaggatggaatgtgttgcgttttcagtgtttgatgaggaaaccagccaagtgcaaagagtttacccacacaaatggggagaagatcccagtgccatctttcctttttgtcgtcatcatcatcatcgttatcatcatcatcatcatcatcatcatcacatttca

SEQ ID NO: 10845 - DNA, 999 bp, Artificial sequence
  DNA replication origin
gctaatgtgtgtttgttgaattaaattcttgcgagcgtccaaatggagctcaaagagctttggggagtcagagaaatgagaccttctgagggattattttggccaggggaatggggatagatttcatgaaagggaaaaaacctgaggtaggccttgaagaataactggggagtggggatgaagttggatttgagagagcaggttgcaaaggcacaaggcagcaaggatgaggtgtgtttggggagtggggtgatgctggtttgcctgggtctgtggacgattagaggggaggagttacactgaggtagaattgaggaggtccctactactgctacgaacagggacagtggacttcatctcgtaggcgattaagaaggcaaattatgttgaaatagaggcatgcctgggttaaatactggcctggcggcagaatataggctgggctgagcaaatgattggctggagccaggggaatgagttaggggccggtacaggaggtctaggcaggtggtgaaaaggatcagatacacagagttgggagggaagacagaaagcaagaagcaagtgatgatccaagaaagaaaaagcaggtgttggctatagagtgagttgagggctgcgggtggggaccgagatgacctaggttttcaagatccaatgacgaggagaatgaatggaaaaacagctggtgtgtggggcggataatgagctgtttcccacttgctgggttgaggtgctggtgggacgtgggtggaaacatctgcagctccctgggaatttggagagagattggggctggtgcaacagattcaggagacaagggctagaagggagccctggatgtggattgtccccagagggaagagtgtgaagcaggaaacagagaagatggtattgggcaaaggtccatgcttaggaagacggaaaaagaagatggcatgagccagaatcaaaggatcatagacaattttgtcagtctgtagatgaagaaatctggtt

SEQ ID NO: 10846 - DNA, 1621 bp, Artificial sequence
  DNA replication origin
tactagctcaatatctggatatgtttgttgtggatgtctatgttcctttctttccctctcctgggcaacaatggcagttttggagactccttggagaccacagtaccattacgcacatggtggagccccttgtgaatgcctaagcttgtggatgttctgaagggggcaataattggagtaatggtcatggcgagaagtgcttgtatttgtattggtccatcattgcataataggcttatatgttatatgtatctatttcctattgaggatctcttttttacagttgatttttcttgagggattttaaactatcacctgccagtatttgagcgcttgccgaagtgtgcactcaatgctttgagatttcccaaatgtataaaatcctagtccttgccttcaaggaacttacaacttttgttgataaattggtaaacctagagagaaggcaacaatgaaatgcagcatataatggaaatgctaagtgagaggaaagaggcgctgtttggaggagggagagggaattggctgggccatcagggaaagaggcagagcttgaggcgccttgaccagttgatgaagtggtggctttaatttgcgattcttgtgcaaacatttgataatgggaattggatgtgtaggtattgggctttctcgtggacactgaaattccattcattgaacaacaccttatttcctgtatagagaatggtgctaggggccagcgtcaaatttgaagatgaagtctgactgaaggtcatcgtttggagttggggtggggtgaagagtagacaaaccttaaaatacagagacgagtgctgcagtgagcacgcgtgagtgcttaggcagcgcttgaagagggagttaccgatttggccctggaagtcaggaaggctatccttttaaggtgatccctgagctgggagtttgtttcaaacggtggggaccgcaggtagaagcaccgcttaaggggaacggcgattcgactcgcagtgacttaagggttggcgtggtgcttgttcctgggcgtggggaggacaggaaaccgcggggtctgtgagacgccccgtggttgttgaaacgctgttggggggcacaaacgaatagggctttaggaagaaaactggtgggaggagccttgtggctccaaggtaggttaggaactggagcgagatggagcacggaggagtgaggcggcccgaaggatgcccggggagacatggaggaactggcgagggcttcccgatgcagggcctgggggagagggtgaactaatgcctctgcagtgccccgtggggaagttccgcatactcggccagagtgatcggagttggcggctgtctgggggagttgggtcaggaagccccttctttcgccaccgatggggcacgtccagggcccggcaggtgtgccctggcagtagatcttccctgggaagtggagcgcgggccagccctcgctgttctgagcgagggcctgtcgtgtagtccacaccgttccgcgaaaggaaccaccattgacagcctcgttcgattagaacccggacctccctggaatccagactcggtcccttcccagctgcgcttcggaggaggcggacgctccgagaggaacccagaggcct

SEQ ID NO: 10847 - DNA, 1072 bp, Artificial sequence
  DNA replication origin
cgcggggcgcccagggcgcgttgcgtagctgctcctgcgcacaaccccgccgcgccgccggcccgcactggccgcggagtgcaagaggctcgtccgtgcccagcgcccggccggccgcgggagcaggaagcgcaggccacgcaggacccaactgaaacaaagtgtcggccgcccggcgccggcgcccgccccgaccctgcccctcccgcccgcaactccgccgcccaccatggcttccgaggagctgtacgaggtacctcccctccccccggcctcgggccgccccccgcccgccgcccctcccggcccggccgcgccgcccgacggccccgctcgccgcccgcgcccgccgcgtcccctcccccgccgcggccgcagtttgctggacgggaaatgtgtgtgaggggagcccgagcctccgttccgaggggccccggccggggggtcctgaagttgccgggcgtggggtgggggggggggtcccagccgtggggaagtggtgctgacacaagtgacttgctcggactgagctcaaagtgctcttggcgtgggtcgtggaagtggtgcctccgttgccgctcggcggggaccgtgggcggtacggggggtggggtgtgggggggtttctggatcatttgataaagcatttgggagagggttttgcccctggtcggggggtggcggggagaagaccggtgcaaacgctttcgactttgctgttcgccaaagcgatgcaaaatctcgcaccgaaaatgctaaacgttgaccacatgctttaattaggttagcattgtggccagagccaggaaatttaaatttaacgctgatacaccgtcattcatttgcgccgcagcgttgcaaatgagaagggcatagccagaactgtaagttctggtcgatgggtttaaaccagcttcaagtttgagagttaccaatttggatctttagacatgttttgtatgtctccatgtaacttcttttgacgtatttcaaagtagacttcctgggagtacagaagtttggaaggctttctgttcttctggataaatgattctcttgtttcacatgtatt

SEQ ID NO: 10848 - DNA, 801 bp, Artificial sequence
  DNA replication origin
ctgggacagtgaatttacagcttcagacatccaccaaagagcggctgcgtgggctcctaagaagtctaagaactgctcagaaatccagcgccgccatccccactccaccgccgccaggggcgcacagcagcgggtatgcggccggagggaaggggcggggcgggaggaaggggcggggcgtgccccgccagcggaggccgggaggaccaggaacccaggagagcatggccacgctgcgccggcttcgggaggcgccgcggcacttactggtttgcgagaaatccaacttcggcaaccacaagtcgcgccaccggcatcttgtgcagacgcactactataactacagggtgagtccggctgtcctcggcttttcgggccgtgctcagtccccgcgtgcgagagaggtttggggagagtgctaggcttcgcggggcggggccgccggcggtacgcggaggggcggggccctcgcccggcttgctgggagttgtagtctcttaactgctctaagccagtggcttgcagggctacaggactacaactcccaggatgcgccgggcgtgggggcggtacccagtctggagggagctgttgtcaggggcgttctggctgctcactcgtgtcaacccgccgaactgggagtgagtccagggagggattcgaggttcagggccgggaccagggagttaggctgtggggcagccacgtgcacctcgctttttccccaaatcagggcgggtctcgcgcctcctccccaccactgcctcctccccagcttgaatccctctcccacctgcgtac

SEQ ID NO: 10849 - DNA, 840 bp, Artificial sequence
  DNA replication origin
tggatgtatccaggtgaggatgagggtgggtgaacggagccagggatagaggtcctcaggggagctgacctgagacccctgtgagtctcgggtcctggcaatggggcggcggtgagtggtgagggggaggcattgaggacagcgcccggggtccccggctggggcacatgctggggtgtagggcagtggtcaagggccctagccttgcagtcagacacccctggcgggctgtgtggcttagacatgctcctccacttccctaagcctagttgtttcatgtctagcataaagattccgtgtggcaggaagaacacacccccgggagtgattctgagattgaaatgagtgctggtgcttttcacctaaacaaggaaaacggggagagaagcagtatgtggggtgggagggagaagagtctgtctgggcgtggggatttggacgtgcctctggacacccatggacaaatatcctgaggccatctgatgttttccgggggccacgggagtgggggaggggaaggtggggcggagacacagacttgggcattaccagcaggcagggggctgctaccgccatgaagagtgggcagtgccaggatcagagggccggggtaaagcctgcggaattcccacatttcagaagaggctgggaaggaggtcaaggaagagcagcaggaggaggagaaagcaggagggtgtggagggacgggaggcggggaggaggaattccaggagggagtggccggggtgactgttctgaaagcatggactggaagccacagcacatttgggctgcaaggaacccgagagatcttctagtctaatcctctttcagtctcca

SEQ ID NO: 10850 - DNA, 924 bp, Artificial sequence
  DNA replication origin
ccgtctgagaagtgaggagcccctccgtccggcagccaccccgtctgggaagtgaggagcgtctccgcccggcagccaccccgtccgggagggaggtggggggcggtcagccccccgcccggccagcggccccgtccgggaggtgaggggcgcctttgcccggccgcccctactgggaagtgaggagcccctctgcccggccagccgccccgtccgggaggggggagggggggtcagccccctgcccggccagccgccccgtccgggaggtgaggggcgcctctgcccggccgcccctactgggaagtgaggagcccctctgcccggccagccgccccgtccgggagggaggtgggggggtcagccccctgcccggccggccgccccgtccgggagggaggtggggggatcagccccccgcccggccagccgccccgtccgggaggtgaggggcgcctctgcccggccgcccctactgggaagtgaggagcccctctgcccggccaggaccccgtctgggaggtgtgcccagcggctcattggggatgggccatgatgacaatggcggttttgtggaatagaaaggcgggaagggtggggaaaaaattgagaaatcggatggttgccgggtctgtgtggatagaagtagacatgggagacttttcattttgttctgtactaagaaaaattcttctgccttgggatcctgttgatctgtgaccttatccccaaccctgtgctctctgaaacatgtgctgtgtccactcagggttaaatggattaagggcggtgcaagatgtgctttgttaaacagatgcttgaaggcagcatgctcgttaagagtcatcgccactccctaatctcaagtacccagggacacaaacactgcggaaggccgcagggtcctctgcctaggaaaaccag

SEQ ID NO: 10851 - DNA, 1358 bp, Artificial sequence
  DNA replication origin
catcatggcccatccccaatgagccgctgggcacacctcccagacggggtcctggccgggcagaggggctcctcacttcccagtaggggcggccgggcagaggcgcccctcacctcccggacggggcggctggccgggcggggggctgatccccccacctccctcccggacggggcggccggccgggcagggggctgacccccccacctccctcccggacggggcggctggccgggcagaggggctcctcacttcccagtaggggcggccgggcagaggcgcccctcacctcccggacggggcggctggccgggcagggggctgaccccccctcccccctcccggacggggcggctggccgggcagaggggctcctcacttcccagtaggggcggccgggcaaaggcgcccctcacctcccggacggggccgctggccgggcggggggctgaccgccccccacctccctcccggacggggtggctgccgggcggagacgctcctcacttcccagacggggtggctgccggacggaggggctcctcacttctcagacggggcggttgccaggcagagggtttcctcacttctcagacggggcggccgggcagagacgctcctcacctcccagacagggttgcggcccagcagaggcgctcctcacatcccagacagggaggcggggcagaggtgctccccacatctcagacgatgggcggccgggcagagacgctcctcacttcctagatgggatggcggctgggaagaggcgctcctcacttcctagatgggatggcggccgggcagagatgctcctcacttcctagatgggatggcggcggggaagaggcgctcctcgcttcctagatgggatggcggccgggcagagacgctcctcaccttccagactgggcagccaggcagagaggctccccgtatcccagacgatggggggccaggcagagacgctccccacttcccagacggggtggcggctgggcagaggctgcaatctcggcactttgggaggccaaggcaggcggctgggaggtggaggttgtagcgagccgagatcacgccactgcactccagcctgggcaccattgagcaccgagtgaacgagactccgtccgcaatcccggcacctcgggaggccgaggctggcggatcactggcagttaggagctggagaccagcccggccaacacagcaaaaccccgtctccaccaaaaaaaaaccgaaaaccagtcaggcgtggcggtgtgcgcaggcacccggcaggctgaggcaggagaatcaggcagggaggctgcagcgagccgagatggcagcagcaccgtccagccttggctcggcat

SEQ ID NO: 10852 - DNA, 1253 bp, Artificial sequence
  DNA replication origin
gctcctgctttccccaaacttcagggcgccccgggttccaatcccactcggaagcctgactcggtcaggcgcgctccgctctgctcttccgaaagccgggaggcaggagccgccgcccccatctgcccagtggcggcgcggggtgggctgcggccagactggggcggggaccgtgtggggacgcgccggggagcggccatggcccgcagccgagagcggccggaggccattcgcgccaggcccgggagcacgtcccgcccctccccctgtcccgcccgacgcgcccgcgagtccgcgccccgggatcccgcagggagggcggagagggggccccgtggggccggcgcccacgcggcacgcaccacctcccaccgcaaccggacgccagcgccccaagcaccctccccgcccaccgggagtgggggcgtggcccgcgccggactgcgctgtcaccgccctgctgctccggccttgccaggggccaaggcccgaacctgaggccggggaggggtggggaagcgcgtcgtggtacctagggattgggggaacgtctaaaagtggtgtttttcttgttttggttttaaggccaccctgagggccatctaagtcagtgattctacttcagcatgcacggacatcactcgggggcccgttgtcacatcacagggccccactcccagagtttccttctttctaactttttcgagataggggtcttgctatgctgcccaggttggtctcaaattcccggcctcaagcagtcctcccgcctcagcctctaaggtagctgggattacaggcgccccccactgctcccagctccctagcgtttgtgactcagtgggcttgggctggggcctggaagtatttctaacaaggggatgctgatgctgggctctggggaccgtatttaaacctatgtggatgtgtattcagttacttatatagaaagttggggattctagaaacagaaccactaattaagaaacgtaattaattggggcttcataactaaaacatgtcatggtttggcagaactgaaaggggccagggttttagccatgttggcagagggcaggcaaaagagatggtgggtgaggagcgtgttaagagcttacattgattgactgagcacctacaggatgtcctgtccatgaaataggaatcacatcattcctgcctacatataggacacaacactgcagaaagatttctcatcgccaaggccccacagggtggctttcatgggattt

SEQ ID NO: 10853 - DNA, 915 bp, Artificial sequence
  DNA replication origin
ccctaggtaccacgacgcgcttccccacccctccccggcctcaggttcgggccttggcccctggcaaggccggagcagcagggcggtgacagcgcagtccggcgcgggccacgcccccactcccggtgggcggggagggtgcttggggcgctggcgtccggttgcggtgggaggtggtgcgtgccgcgtgggcgccggccccacggggccccctctccgccctccctgcgggatcccggggcgcggactcgcgggcgcgtcgggcgggacagggggaggggcgggacgtgctcccgggcctggcgcgaatggcctccggccgctctcggctgcgggccatggccgctccccggcgcgtccccacacggtccccgccccagtctggccgcagcccaccccgcgccgccactgggcagatgggggcggcggctcctgcctcccggctttcggaagagcagagcggagcgcgcctgaccgagtcaggcttccgagtgggattggaacccggggcgccctgaagtttggggaaagcaggagcagaagggaagggatgcgctccccgctctccggcggcgcggaatgggcctccttccagcctctgcgtaggcaagatttccccagttgcgcgctgcaccggggactccccagcccgtgaggcagccaagaggagagcgctcagtgaccctctgggggcagagccgtcaggccaagttcatgggcaggaagactttgtgcacgtgggggtctctgaaggttgagcgcgagctctgcacccccacttcgaggcactcaagaagcggaacagacgcgagccccgccgggggtgcgggtgagggctgcagggagcccgcgaacgacagaaagtcgccccccgcattccaccggagcactcgggaacacggcttccaggtgtcc

SEQ ID NO: 10854 - DNA, 1614 bp, Artificial sequence
  DNA replication origin
ggaggacgcacagctcggcccgggcggctgctgcgccaagtgcaagaagcgggtgcagttcgcggacacgctggggctaagcctggccagcgtgaagcacttcagcgaggcggaggagccgcaggtgccgcccgccgtgctctcgcgcctccgaagcttccctatgcgtgccgaggacctggagcagctcggggggctgctggccgcggcggcagtggccgcgcccctttcagcgccgccttcccggctccggccgctcttccagctcccggggccgagcgccgcggccgagcgtctgcagcggcagcgcgtgtgcctggagcgcgtgcagtgctcgacggcctcgggcgctgaggtgaagggctccggccgggtgctcagctgccctgggcccagggccgtgaccgtgcgctacacctttaccgagtggcgctccttcctggacgtgccggctgagctgcagcccgagccgctggagccacagcagccagaggcaccgtctggggcctccgagccagggtccggggatgccaagaaagagccaggcgccgagtgcttccacttctcgctgtgcctgcccccgggcctgcagcctgaggacgaagaggacgccgacgagcgcggcgtcgcggtccacttcgctgtctgctaccgctgcgcgcagggcgagtactgggacaacaacgcgggcgccaactacacgctgcgctacgcgcgccctgcggacgcgctctgagcctggagagtttcgaagagccgtggggcggggttgattagcacgtggagctcgggctgccgcctcaaggaacttgctgggacgctttgctgagcgtggcgagtctggcgtgaggggcgcgtggagggaaaggagggagactttgaaccgtcgactcgcacccccgcagacaagtgagcgagcttagagagcccgggcaatgctccgaaagcctctgacctcagtcttctcgtccgtttgaccttcctacaaggcctctagaattcccagcctgcgtcagaataggaagaaacttccaaggcccggagcagctgcctccaagaaaaaggctcccaactcccgggcatggttctaaggccttgggattggtttttaactctaaatatcatattgtagcccttgcagtttgctggagacccctagggaaagaacaaagcgtcctgccacggtgcaccagaggaaggtgccacggactgtgggtgcacgcgtgggacctttacaccccaacctatttctcagagaaaacccttcggggctgggccaggccacccttttcttttgactgagatgtgggtaatgtgtgcccagacttgacgttgtttattgtgcgacattgtgtacaaatgtcctttataaaagtaaaggccactcgcacccccttttacgctgtactctgaattttggctttcgtgagtttggggaggcattggcagtcggccgatctttgtcagctgatgatgtgcgcactttaacaatccttaaacaacagcctacaaattcctccccttcgttccttcctctctactgcgaaagggcccaaacttcccatgtgctttaaaatgttctgtagaaagtgttccgtccccctccgaattaag

SEQ ID NO: 10855 - DNA, 748 bp, Artificial sequence
  DNA replication origin
atgcaccactgtgcgagtcctcttgctccttgcattgtcagttgcatttctgtatcatatatctggactcccaattataggcccagtgctatttttctttattatctccagtgtttggcacagtgctagtcatgaaatacactttccgaatatgtttgttgaaggaaggagggaaggaaggaaggagggagggagggagggaaagaaggaaggaaggaaggaaggaaggaaggaaggaaggaaggaaggaaagaaggaaagaaggagcaaccctcctggggataatgctgcctgtgctccctgaagttcatgaggctatgaataaagaatgaggatcccctgttccccaccctcctagcctcgtggtggtggctgggtgtgcaggaatggaggctgtgtcttttgcaaagtgtcctccacccaaggacataaactacatcataagtcaaaaccagtaggggggcctcccgagccatcggtgcaggtagctccatgcagtgctctgtgaatgtgcttgtggatgtgtgcaggtgcatgcgatggaatccattcatgctatgaagggtggtaatatttgaaaaggggttaaggggaaggagaaggaacacctgtggtgtgtgtgtggtgagttcagttcagatggctgtgagtatttggtgggactggggttactggagggaggaggcagagagaggggaaggaaggtgcagtacagaggtataaagaggccagaggtgttcagaactgc

SEQ ID NO: 10856 - DNA, 778 bp, Artificial sequence
  DNA replication origin
tccgggaggtgaggggcgcctctgcccggccgcccctactgggaagtgaggagcccctctgcccagccagccgccccgtccgggagggaggtgggggggtcagccgccccatctgggagggaggtgggggggtcagccgccccgtccgggagggaggtgggggggtcagccccccacccggccagccaccccgtccgggaggtgaggggcgcctctgcccggccgcccctactgggaagtgaggagcccctctgcccggccgcccctactgggaagtgaggagcccctctgcccggccagccgcccagtctgggagggaggtgggggggtcagccccccgcccggccagccgccccgtccgggaggtgaggggcgcctctgcccggctgcccctactgggaagtgaggagcccctctgcccggccaccaccccgtctgggaggtgtactcaaccgctcattgagaacgggccatgatgacaatggcggttttgtggaatagaaaggggggaaaggtggggaaaagattgagaaatcggatggttgccgtgtctgtgtagaaagaggtagacatgggagacttttcattttgttctgtactaagaaaaattcttctgccttgggatcctgttgatctgtgaccttacccccaaccctgtgctctctgaaacatgtgctgtgtccactcagggttgaatggattaagggtggtgcaagatgtgctttgttaaacagatgcttgaaggcagcatgcttgttaagagtcatcaccactccct

SEQ ID NO: 10857 - DNA, 1019 bp, Artificial sequence
  DNA replication origin
gcagccgggcagaggcgcccctcacctcccggacggggcggctggccgggcggggggctgacccccccacctccctcccagactgggcggctggccgggcagaggggctcctcacttcccagtaggggcggccgggcagaggggctcctcacttcccagtaggggcggccgggcagaggcgcccctcacctcccggacggggtggctggccgggtggggggctgacccccccacctccctcccggacggggcggctgacccccccacctccctcccagatggggcggctgacccccccacctccctcccggacggggcggctggctgggcagaggggctcctcacttcccagtaggggcggccgggcagaggcgcccctcacctcccggacggggcggctggccgggcggggggctgaccaccccacctccctcccggacggggcggctgccgggcggagacgctccccacttctcagacggggcggttgccaggcagagggtctcctcacttctcagacggggcggccgggcagagacgctcctcacatcccagacggggcggcggggcagaggcgctcctcacatcccagacggggcggcggggcagaggcgctccccacatcccagatgatgggcggccgggcagagacactcctcacttcccagatgggatggcggccgggcagagacgctcctcactttccagactgggcagccaggcagaggggctcctcacatcccagacgatgggcggccaggcagagacgctcctcacttcccagacggggtggcggccgggcagaggctgcactctccgcactttggggggccaaggcaggcggctgggaggtggaggttgtagcgagccgagatcacgccactgcactccagcctgggcagcattgagcactgagtgaacgcgactccatctgccatcccggcaccccgggaggccgaggctggcagatcactcgcagttaggagctgcagaccagccccgccaacacagcgaaaccc

SEQ ID NO: 10858 - DNA, 1179 bp, Artificial sequence
  DNA replication origin
acctgctcgcaggtttgacgagaggcaaacatttggttccatttatcggggtagctcagggccactgcttcctaggtatgatttcacttagtccttcacacaaaccgtgaggttgacatcatgttcacccccataacacagatgagaaaaccaagggttagaggacaggcagtgaggggcaggcaaagccagggctcagatctgttcaggcttcagagcctggcctctctctcacaaatagaatattttcttctaaaagtcatagcactgtctttggggtggggtgggggcacggattttctttttgaaaaagatctagagctctcatatggaaatgggtccacaggggcaaggagcctggccaggagttggaacactgatggatggacacttttggaaggtgctgggaatgggcacactgtcaaagtcaccggccactgctcttacctgtatatggtattgagtactggtccatgtacccagccaattacctcacaagtccgcaagagtgggcacatgcctggagaatgaggatggggcggggagggtgaggagggaaaattggggcataatgcaggctcctacctgggggattggatattgattgggaactccctgggcaagtgaggcaggtaagggcagatgaggcaggtaagactaggtgagggcaggtgaggacagatgaggctaggtgagaccaggtgaggacaggtgagacaggtgagggcagatgaggttaggtgagactaggtgggggcaggtgacggcaatgagactgggtgagggcaggtgagagcagatgaggctaggtgagggcagctgagggcatatgaggctaggtgagactgggtgagggcaggtgaggcgaggtgaaggcaggtggggcaggtgaggcaggtgaggacaaacgagactggctgagagcaggtgaagcaggtgaggtcaggtgaaactgaatgagggcaggtgaggcaggtgagggcggaaaggtaaggacctgggctttactcgagatgcagaaaggcaaggacaaccctgaagagcgaatggagacttgctgagcctaaggatatccaaccacatgctttccccagagttcctttgtttcctgctccagcctcagacgacgctcctcctcccacccaacctgcctccgcagacacaaaggtgccatgtgct

SEQ ID NO: 10859 - DNA, 1625 bp, Artificial sequence
  DNA replication origin
gcggcccggggctcctggccccagctcaggactccctgcagagagcaggcagggataaaagctgagcggcgggaggaggaggaggaggaggaaacacaggccgcacgaaggtccaagccccaagcccccaagcccccggcctctggacggccaaaccccgaggcgcgggactggaaggacaggtaccaggctgcgggcgcgcggctgtggccatctctttccgccctgaggccgacgaacccggctggaagctgagtgcctagcggcccaaagcagcccgggcgccgggagggcgccagagaagcacagcgttagggcggggaagaaagggtgaatctcagaatcgaaatccgcactggcgcccacgaccctgggcgccggcctggtcctcggcagctttctggcggctgcgcttgtgtgtgaatgtgtcccgggaggaccggacacctcaatcccccggcccccaacgcgggcgcctgtccgcgagcgccgggccagacgccgaagaggaaggtgaccgaacccgtagcagcttccgagagcgtacccgtttgcaaattgctgcaggaagagcgaggcgggccttgcgctttttaatccggaacgggaagcactggggaagggaccgaggttaacttcgacctccgctggggcagatacgtaaaccttctcaaacctccgagttcaccttacagcgaacattaaatacccttgcgactacaatactaacaaatcgaacactgacgtaaaatcttaagaataaacgaatctttgttctgatagagctcgttcaaaatggaaatacactccacacatcttcctctataacgcatgtcacaaatacagctttgcagagaagaaacgaaataaaataaagtccaatctccccgtccacgtctctccccaccccttgcctacacccccaaaactcagtggcgaaagaagcccctaaaatgcattgacattttttaaggggaattggggctcgccgggggcgggagcgctcttgtcacgttatcttcccaggcgctgctggagaagaccctgcacaccgcgcatgtgtgagtgtgtgctgtgtaaaataagtcgtgaacatttctgtcttttaaaactgtgactccttggactctagccttctctgggaggccgggaggctgcgcgcgggacggattttgcaggcgcacgcgtcccagcaggtcgcagcccgtgggtccctcgctgtccttcctgaaccccgcttaggcgagactctagcgggtgaccctggctccttccctgtcctctctgccgtccccttcttgtgcggtttccatccgttcattcattcgttcgacctctcattcattccgaacttcctcctgctgcgtcttctttcgtgttcaccacactcttctacctccccgcccctcccaacccccacttttcttgccaaatgtcaatgatttgggacagctcccagccgtgaattaataaagaccgaggttctgttgcaggaaagggcagacattagggaacaaatacgttcaatttcaattccacagtcaacaaatagtcatttttggaccgaggttaatgtgttcaaaacgcgtccctcaggcacgaccaccgtcttttttttccctcca

SEQ ID NO: 10860 - DNA, 960 bp, Artificial sequence
  DNA replication origin
ggatgccctggaggccacagggagaggggggggggggtggggcttttaagcagtgctgggagaggctcaggtttatatttcagatattactttggcagcaaggcaggggctagactgagggaaggagggcctgaggaggtgaggtggaattgggaagctagagcaagtatttttccaggagaaaactaatcatagcccaaactaatagcagtagtatggcaggaataacagaattactagtaataggggaaacttttattggacacttattatgtgtcaggcactatattaagagttgtacacaccagataatatttaatttttaggctacagagctggaggggaggggatgcattcgagaacaatttcagaggggacatttagaggatttgttgcttaactcattcttaagtagctaaatttgagtggatggtggttctcttcaccagagtagggggagtgggagaaacggacctgaggtgagggagagagtgagaggtgtcatttgggaagttccgtgtcaggtttctgtaggacatttaggtaaagtcccggtggagacacagacatggggtgatggtacatatgtgaacattaacaccagctatgtgggaagaacatcaggtgggtgggaatggagcccaaggatagatgcctagaatgaaatggaatttgaaaagggtgaagaaaggggaaaagcttatagtcaaaaagaggtaggaaaagagggtcaggcaggagggggtggaaccaggagaaagtaacattgtagaaacaaagaaaagacagaattgcaagcaaagggagtgaacaacagcaccaggaagtataggaaggtcaagtaagctgaagtctgcaaaatgtttcttccctgtgacaattgggtggtcttggcaaccttgagaacaacttcaaggaagtgctggtagcagaaatcaggacagagtgtgcgcggaagga

SEQ ID NO: 10861 - DNA, 1668 bp, Artificial sequence
  DNA replication origin
gaggtgcccttcagcctgccgttgcactgtgggagcccctttctgggctggccaaggccggagcccgctccctcagcttgcggggtggtgtggagggagaggcgtaagcgggaacccgggctgcgcgcggcgcttgcgggccagcgcgagttccgggtgggcgtgggctcagcgggccccgcaagtgctgcaggtccgcccgcaagccccgggtagtgaggggcttagcacctgggccagtagctgctgtgctcaatttctcgccgggccttagcttcctccccgcgtggcagggctagggacctgcagcccgccatgcctgagcctccccccgctccgtgggctcctgtgccgcccaagcctccccgacgagcgccgccccctgctacacggcgccccggtcccatcgaccacccaagggctgaggagtgcgggtgcgcggtgtgggactggcaggcagctccacctgccgcccaggtgcaggatccagtgggtgaagccagctgggatcctgagtctgggggggacttggagaacctttatgtctacctaagggattgtaaatacaccaatcagcaccctgtgtctagctcagggtttgtgaatgcaccaatcgacactctgtgtttagctactctggtggggccttggagaacctttgcgtccacactctgtatctagctaatctagtggggaggtggagagcctttgtgtctagctcagggattgtaaacgcaccaatcagtgccctgtcaaaatggaccactcggccttctctgtaaaatggaccaatcagcaggatgtgggtggggccagatgagaataaaagcaggctgcccgcgctagcagcagtaacctgcttgagtagtattacgtgctgtggaagttttgttcttttgcttttcgcagtaaattttgctggtggtcgctctttgggtccacgcttcttttatgagttataacccatactgtgaaggtctgcagcttcattcctgaagccagcgagactaagaacccaccgcgagaaacgaagagctccagatgcccccttaagagctgtaacattcaccgggaaagtcagccagcgagaccacgaaccccaccaaaaggaagaaactgaacacatcccagcatcagaaagaataagttctggacacactgccttttaagaactgtaacactcaccgcgaggttccgcggcttcattctttaagtccgtgagatgaagaacccatcaattccagacacagtagaacatagcgaaaacattggaatgttgcttctgagatgaggctgcaatgtcatgagactatgacagctgtcatgcgctttctcccactccgtgggaagcacgttgccatgttatggggtagcgttgtggggagaccccccatggcaaggcactgatctctggctaatagctattgaagacttgaactccagtaacagccctgtgagtgggcatgaaagcggatctttggaggtctgttcattgcgatgtactcacatgagtttggaagcagctgctcccccagccaagcctagaattgactacttcatcaccttttcccagagacccccaactaaaccacacccaaattcctgccccagaggaaaaaaactgtgaggtgaggtgataatgcttattgtttttaactgccaaatttt

SEQ ID NO: 10862 - DNA, 1130 bp, Artificial sequence
  DNA replication origin
ggtggggacatcctctgctagctgctgaaggtctaggatgggcactgaggcgagcctcagcggtgctccccgggcttgcctcccaggagggaccctgcaggaaggtgtccagatgcagagccccaactcctcccccagagacttggattcagtagaactgggatagggtccaaaatctgtatcattaggacactctcagagtatacttgtcatcaggcaaagcctggagaaatagcaaaaagaaccgttagccccagggagagcccactggaggctggaaacgggaagtattggggaatcacttagtatcctttatcacagactctgctgcccagaaccctgggggagaaagctgacaggggaaggagtgtgtagccacgtgggatgtacccaggaggggaaggtatctccaggagggtagagtccatccaggagggtgaggtctagttggggggatggggtctacccagaggggtgaggtctggctggaggggggatggggacagtccaggagggagaagtctagctgggatgatggggtctgtccagaggatcaggtctagctgggtagaaggggtctacccaggagagttctggttggggagatgcatctacccaagagggtgaggtctagctggggggatgggatctgtccaggaggatgaagtctagctagggggatggggtttactcaggagggtgagttctggttggggagatgggtctacccagaggatgaggtctagctggggggagagggtctgtccaggagggtaaggtctctccatagggtgctttgggaggtctggggcttggggttcctgtgatcacagcccaaatatatgacttggacccacacttggcagagaccaaggtgaagacaagacaggactgatggactctgaggaaagagcgtggcgggagcagggtcaagagcgagaggccagagtgcaaggaagtgggagggtctgaggtgggatcccagagtgggagctggggagctggagtgctggaaatgcttctcatgctggagaggccaatcctagggcttggttagactaagtgcgtttaactggggcagcagttttacacatgtatttcaggaggagatgattttatcataaacacat

SEQ ID NO: 10863 - DNA, 1073 bp, Artificial sequence
  DNA replication origin
cgcctccccggccttggcgcccactctggcagagcttgaggagcccttcagcccgccgctgcactgtgggagcccctttctgggctggccgaggccggagccggctccctcagcttgcggggaggtgtggagggagaggcgcgagcgggaaccggggctgcgcgcggcgcttgcgggccagcgcaagttccgggtgggcgtgggctccgcggccccgcactccgagcggcggaccggcccgcaagccccgggcactgagcggcttagtgcctgggccagcagctgctgtgctcgatttctcgccgggccttagctgcttccccacagggcagggctcgggacctgcagcccaccatgcctgagcctccccccacaccgccgtgggctcctgcatagcccaagcctccccgacaagcgccgctccctgctccacggcgcccagtcccatcgaccacccaagggctgaggagtgcgggcacagggcgcggcactggcaggcagctccacttgcggccccggtgtgggatccactgagtgaagcctgctgggctcctgaatctgctggggacttggaaaatgtttagtctagctacgggattgtaaatacaccaatcagcactctgtatctagctcaaggtttgtaaacacaccaatcagcaccctgtgtctagctcagggtttgtgaatgcaccaattggcactctgtatctagctcaaggtttgtaaatacaccaatccacactctgtatctagctaatctagtggggacgtggagaactttcgtgtctagctcagggcttgtaaacgcaccaatcagcaccctgtcaaaacggaccaatcggctctctgtaaaatggaccaatcagcaggacgtgggtggggccagataagggaataaaagcaggctgccgcgctagcaattataacctggtcggttttcttttgtggtgtgtgtttatattgtgcgagttctgttcttttgttctgcggtaaatcttgttgttgtttgctgtttaggtctatgttccctttatgagctgtaacgcacaccatgaaggtctgcggcttggcta

SEQ ID NO: 10864 - DNA, 1647 bp, Artificial sequence
  DNA replication origin
gtggagctgcctgccagtgccgcgccctgtgcccgcactcctcagcccttgggtggtcgatgggactgggcgccgtggagcagggagcggcgcttgtcggggaggcttgggctatgcaggagcccacggcggtgtggggggaggctcaggcatggtgggctgcaggtcccgagccctgccctgtggggaagcagctaaggcccggcgagaaatcgagcacagcagctgctggcccaggcactaagccgctcagtgcccggggcttgcgggccggtccgccgctcggagtgcggggccgcggagcccacgcccacccggaacttgcgctggcccgcaagcgccgcgcgcagccccggttcccgctcgcgcctctccctccacacctccccgcaagctgagggagccggctccggcctcggccagcccagaaaggggctcccacagtgcagcggcgggctgaagggctcctcaagctctgccagagtgggcgccaaggccggggaggcgcggagagtgtgtaagggcggccaggacgctgtcacctgtcaatttcaggggcttagaggaaggcttcacctcccctgcagctgaatgaaagctgccacgtcccacttaccctctggggtcggatctagagagtccccggggctgctctaccacaccatattccctagatctttctgatcactgcatgtcccctgcgagggggtctgcacatctgcctgctgggggctgggagtgaccgagagccccagctcccaaactaagacctaatcctgagtgtgcagaatggcaggtctcagatgcagagccaccgctggcacagagtaacatggaaaatgcctggccatggcaaaagtgcattctgctcggagtatctggcaggaatcgtaatcagggcagaggcaactgcatttgtggggagaaagtttggggcgatgcaatgtcctgagcagcttcctgacccccgtcatcgccgtccttgctttgtgccaccacccttgaagatacccctttttgtggttctgtgggagctgctgcagataaggacggggtgtcggtgtctgtttctcctcagccgctctcagcgaggtcactgggtgccagaaatggaaacataaatggcagctgctgtcctgaaagcaggtggctgctctgaccggggagggaaatggcttggggacttactcatgcagcctgagagccacagagtaggaataagcatgcaactggtgtgtgtgggcacgattgtgtatgcctatttctgcatgtaagttccagagctgtgagctcacacacacaggcacacagatacacacaggaacacacagacacatgcacatgcatgcacagacacacacagacacgcagagacatagacatatacacacagacacagagacatacacacatatagacagatgcacacatacagacatacacacagacatgcacagacacagacacacacataagcacacacagacatacccagagacacagacacacgcacacacagacactgacacacacaaacacacgcaacacagatacaaacacacagagatacagaggcacacatatatttatatatacacagacacacacatacacatgcttactcacatagcacacacatacacagag

SEQ ID NO: 10865 - DNA, 874 bp, Artificial sequence
  DNA replication origin
ctctcaaacgccgcgcgcagccccggttcccgctcgcgcctctccctccacacctccctgcaagctgagggagccagctccagccttggccagcccagaaaggggctcccaaagtgcagcggtgggctgacgggctccttaagtgctgccaaagtgggagcccaggcagaggaggcgccgagagggagcgagggctgtgaggactgccagcacgctgtcacctctcaaaacttatgtaaacaatatgggaaaatattttgcacagaaaaagaaaaaatatgctgggaactaaaataaatcaatttttaaagtactgattaaaagcaaagacaatcgtaggagtcagggatacatcagaagttcctgctttttacattctggaagagaaaaacaaaacacaagtacagaactcatcaataagatatatttgtagagtgatgatcttaagaaaatttacaaagggctatggggaaagggtctgctttagtttgggtgttgagggaagaactctcacagaaaatgcgaacaatgagaagccccaagataggagtgggcttggcatggtggaggaatgggcacaggttggagtgcagtgagcagggagagtgtggtagaaggtgtgtttggagaggccccgggaagaagcaagggacaggtgcaagggtggagggagagaccagagtaccccgctagggccagatgtgcaggatagagcatgggctagggtggcaaccatggagatggattcaggtaattttttgagggtagaactggcatgaattgctgatgaaccagatttggggtggaggagagatgggaatactgaatcaaaagagaagaatctcttatgactcctagatttttggcctcaaca

SEQ ID NO: 10866 - DNA, 1113 bp, Artificial sequence
  DNA replication origin
tgcgcctcctcggccttggcgcccactctggccgcgcttaaggagcccctcagcccgccgctgcactgtgagagcccctttctgggctggccaaggccagagccggctccctcagcttgcaggaaggtgtggaggggagaggcgcgggcaggaaccggggctgcgcgcggtgcttgcaggccagcacgagttcctggtgggtgtgggctctgcgggccccgcactcggagcggccggccgacccggccggcccccggcaatgagaggcttagtacccggggcagcggctgcagagggtgtgttgggtcccccaacaataccggcccaccggcgctgcgctcgatttctcgccaggccttagctgcctccctgcagggcagggttaaggacctgcagtccatgcctgagccacccccttcccccgtgggctcctgtgcagcccgagcctccccgtcgagcgccggcctctgctccacggcgcccagtcccatccgccacccaacgactaaggagtgcgggcccacagctcgggactagctggtagctccacctgcggccccagtacagaatccactgggtgaagctagctaggctcctgactctggtgggggacttaggagaacctttatgtctagctaagggattgtaaaataccaatcggcactctgtatctagctcaaggtttgtaagcacaccaatcaacaccctgtgtctagctcagggtttgtgaatgcaccaatggacactctgtatctagctactctggtggggacttggagaacctttgtgtctagctcagggattgtaaacgcaccaatcagcaccctgtcaaaacagaccactcggctctctgtataatggaccaatcagcaggatatgggtggggccagataagagcataaaagcaggctgccccagccagcagtggcaactcgctcagatctccttcttacgctgatggatgtttgttctttaaaattttgcagctggttattctgggtccacacttcccttaagagttgcgatacttaccgtgaacggtccctaacttcgttcttgagctagtaacatcacgaactctgctagaaagaagaaactaaatacatccgaaca

SEQ ID NO: 10867 - DNA, 1198 bp, Artificial sequence
  DNA replication origin
ccccgcgccaccgggccgggccgggggctgcgcggcgccttgcgggcagactggaggtgcggcccagtggggaagggactgggctggggctgcggaagtggcacagcctctcgggggacaggagttggggggcgcacccacgcgccccgaggcttgaaaaatacgcccgggccccgcgccgcgcacgcaccccgcagccccacaccagccaggccctcgactgccgctgggctccgcgcgaggaagggggcggaaggatggcggcggaaccatggaaactgtgctcggtggataaataaggagagggccgcgctaggccgtcccgggctgccagcatctcggaaggcggatgcagcgcccgggggaagcgcggcccagttcgcacaagttgttcttcccgagccgccgcagggctgctgccctaccgcccggctccgcgccgcagccgccctcgggggacgccgcctggagaggcaggccccagcctggaaggaggccgccggcgggggctacgaggtgtggggcagaggagagtgtgaaggtgaccccggggtcatcaggtgtttgttccgggtcttaaggaccgcgcaaagccctgccggtctcgctagtcccaggtgcgcgtcccggaaggtgaattcatgtagttcagacattctgaagcttcagtggggctaaatccagaagtacagggaacctgggacggcctgggatggtaccccatgtccccgaagttctgcccacaccccttcagggcggctcccgggagtcggattggcaacagggaagcaggatgtaaactgggaggctctggccaggcccgggcgctcaaccgcacccattccctgcaagcaaacttagcctccaaccttcctccccagagctcttcatctgactcactgccgagttactgatgctctccggccaagcctattgcctgtaaagctagagatttcaatggtggtgttatgaagttgagtcacttcagggtgtggggatcttcagacgcaaaggggttatttcaagcgaaagtaaactacctgcgcggagaagcctggcaaccagctgaacgatttaattacatgccatcttaatttaaagagatttgcatgttcatgaggccagctggacagttacattgtgatgtgtacctggaaattactttttaactggataaggtcaatttatttcacaccac

SEQ ID NO: 10868 - DNA, 1482 bp, Artificial sequence
  DNA replication origin
ccctgcgcccgcgaggagcccaggtttccagcggagttgggctgggggcgggcgcaccccatctccccgctccgcctcgggggaggcgggtgatgcgtggagggggtggttaggatcccctctaccgagtcgccgcttgcctgcggcgcttttgcactttcctaagctgagcagctgtgcaggcgtcgcccgccggcccctgcgccctcctagcaaagcggggtttgcagaacgggaactgggcggtcttcccattccctcccgcaaggaattttgctgtgagggtggagagggggcggcggggggctcggcttggggctgaggttgccaacaggtgctcgcgggtccatgtgaccgaggagggagcgcgcagggaagccgggggtgggggtgggggcgggggcaggctccctcggcgtcccccccgtagtgcccgacgccgggtgcacccagccggcagctgtctggggagtgctcgcggatggctcctcggagcgctggcgccctcgcggcctgtctgggaggaggaggaagaggagggggagggaggggacgcgaaagtgggtcaggaatgtaactggatgctgcataccccccacgcacacccccgctgtggccgaccgaggcggccagctccagccttggaaagcgagtcatttgctgttgtggttccccagcattatcggtggacggttaccaggggatcccgagggatgtgtttccctgtgaccctttgggaaggaaaacttggttgcctcagtaaccgagtttggcttggatgcaatgatgcagtgagtgttctaggtgagcctggccgagaaagaggctgcagttgcactagggggtggattaacttttcttattaccgaaccaagacgtgaaaggaaagctggggaggaggtggagttttgctctgtgtttgtttttttactatttcagagaatacgaactaaacgtttttgcgttagggtttgtcttccaaatgcacgcccgggctgccatacatttaccaaagttttactactcaccacttagttcatacaaaggtttgaagctgatatcctagagttggaaggagcaggggacagtgacagttttgtatttgaggaaggcctgagaaacaaacgtgaaaaggcctttattaaaagaagaagaaaaaaaaaaaacgaccctcctcaaagcagaaggagagcagcccagttccctcatgagcacagtggcatctcacaccccaggcacgtgatgatttggaaagggaggaatggagatttaaaagggatgggctttgggtttgaatgctagcgagacaagcaaaatcaagaaaaaaaaaaaaaaagatgagactgcaaagggaaatttagctgtgtgagtgtatagcccaaactcttcttgagcaccctacctggtttttgtcccatttttttgcatccggttttgtccagtggaccttagtcacaaggtgtaggcagggctgctgaacca

SEQ ID NO: 10869 - DNA, 906 bp, Artificial sequence
  DNA replication origin
cccgggcaggcacccccggataccttagggcggcggcgggagggcgggcgccgtcatctccgcgcttcccggcccgagaaggactcgaaagtatgtaggagaaaagtttcccctcccacatgggggggaggatgtcgagggagagagggcggaagatggagagcagcgctgggaagatgtttctggccggcggtgcgcgcaccatccgagtcccggcggtgctggttaaaaataaactcggcggcgcgggtcgggccggattcctgcgctcggacggctaatatggatgcgcatcaggtcctgctggcggggcgctgcggcggctcgcgctgggagctggttggcagagccggcggctcgggaaagggaaaagagcggaggaaggggaggaggaggaggaggaggaggaatggcccggcgcgcagcccgaggggagagggctgccccgctcatccctggccgccccgccggcccgagcgcacgctgcgcggagtggggcgtgcgggtccccggctccgggacacaccgagtttcaaaagtacaacgcgctctgcagacttcaccctccccatccccaaagttctttaaaaggtcgctccggctgtgccccagacttctcgctgccgccggcgtaccgcgagtcggaatccggggcacgtacttacggccgggcaggacgcttggctccctggcatgatgcgttggggaccggtgggcttcagggagagaccgaggagagatgcaaacttgttccggaaaaggaatcaaaatggcgtttctggatgtgcaaagttcatcaactccgcagtcacttcccctcctcctcttctcccacagggagggaggtgggcgaggagctggcgaccccggcgccccagccgtcgtcccggcccccgtctcggcccc

SEQ ID NO: 10870 - DNA, 1405 bp, Artificial sequence
  DNA replication origin
cccgctccgccgcccagctgtggagcgcgctcggaaacttttgtccgccgcccgctggaccagtttttcacgagttctggggcttcccttcctcctcccatcccggcccccggcgtctagctgggtggggggagggggcctgttgctgccccccccgcccccaacttcccgcacaagccttgggccgggccccccgcgccccctccccgctcgcggtctcttaggaaactgcgaccttaatggttgctaaggagcaggggaggtccttcccgtcgccgaccccctccctgggaagcggcgtgttttctggaccgggccaagggcgcgtcgaggatgtgacctgctccgcggccgcgcgtgagtgcggggcgcgtcggccgagcccaccgatgggcgaggccacctttctctccgggcggggcggggagctgggggacgcggggaccccacggggtgcgggcccgggccgcttgacaggcgccgcgtgcagctcgcgcccctcggccgccgtgcatccgtgatgggttataaaagaggaggaaagtatttctccttgctcagcagatttgccctccctcgctccttactggttaggagatagaacgtgagcccagatccggacgagcagttcacattccattacgaaattctacacggcttcagagccagcagcagcacacattcggggcactttggaggggttttcttcgtttgaggatgctcctgctgctgctgcttgtgatggtggtggatgtggagagagacaaaagggtgaataaaaaaatataacgttttggtatgttgaaaaacctgtccgggggttttcattagtagaaaattgaaccctcttagagtttagatttaagcttagctctttaaaagccagtggaaataaagtttgcctgttgaatggtgttgctggaaatagcgaggaatttctgtcttaagaagaaatgatttctgcaaaggcagagttgctagtgcatctccattatttttgatattttttttcccctttatatatgtagtggaccctgcatgtgtgcgagttgattctgaaataagtttaattgaagtggaaggtggggaaaagagaactgccaagaaaagaatgtggtttagttttgttttttcacacccatgaaaatcatcctctagatttggtgctttttcaagtaggcaggtatagtttctaagacatatttcaacccggaagtctgagttagatagaggccaaagtgttggctaaaacctctttgaaaaacaaacgttgagttttgtgctatcttcaagagtccacagaacttctgaaggaatgggttcgagctactctacaagtaatttatacaaagacagaatcactaattttaggggtggtgtgtgtgtgtgtgtgtatgtgtttacc

SEQ ID NO: 10871 - DNA, 1927 bp, Artificial sequence
  DNA replication origin
ttgaggtgcttcttgcgcaggtgccgctcgcagttggctttgacagtgaaggggtagtggcagatcttgcaaatgtagggccgctccccactgtgcgtgcgcaggtggcggatgagcgcggccttgtcggcggcgatgtagtcgcagatgttgcactggtatggcgagatgcccaggtgggagcgcacgtgggcacgcaagacccccgagaaggcaaacacctggttgcagaagcggcaggggtagagcaccttgcgcatggcgggcgtcttcttgccgccgggcgctgtcatgaaggccttgagttccccctctgtgatctcctgcttgatcttggcctccatgctcagcggcagcagggcctcgatgatgctgtcctgctccagctgcgtcttcatctcaggctggcccggcagctccgcccgcggctgctgcagggagagccgcgtggccgcgtggggctgggtcccggacttggactgcagcaggtgggcgttggaggccgcctccactgagcctttgaggagcttcaggggcggtggcggcaggctggggctgatacagcccggggaagcctgctgggcgttgatgagaggcgggggcgtggaggtggccaccaccgtccgtggtgtgaccaggggctttggcttcagagggggcatgtgcttgaagatcgcctgcagtggggcggcaggggccttggagaagggcggaagactgatctgagggggagccgaggctgccatcttcagaatttgctggatgtctgccagctcgatggccgactcgccagagatgggcttgaccacaatgctgctgtcaggctggatgatgaagcccttctggaagggctgcagggacaggtgctttatgctgtccttggtcgcggggagaactgtgagagaaccgcctagggaagcagcttcgaaaggtgacaggctcagcaggttggtgcagccggggtcctgaggtagctgacacttgagtgtctggagctgaattgcctggttgtcatccggcaggggctcctcggcgggggcaggcctgacgtctttggtgtgctgcaggccaagcaaggccaggaagcccttctggtccagggcgtcaccaggcaggggcgtggcctgcggcttttcttgaccctggtctgccgccacatgggtctgcttgtgcagagccagtgagcagagcatggggaacgccttgtcacaggtgtcgcagacaaaacggtgttgctcgctgatgcacctccgcaggtttgtttcgcaccaggcctatatagaacccaccggtaaaagcaagggaacacatgtgaagattgaaaaaataatcactaaacggagatgcacaaagtatttgttgtacatttatcccagtacacagcctttccccataacataaagagttcccagcctgggcaatatagcaagatcccgtatctctacaaaaaataaaaaaaaattagccaggtgtgttggctcatgcctctagtcccagctactccagagactgaggcgggaggatcacttgaggccaggagtttgtgactagcctgggcaacatagcaagaccttgtctctataaaaaaaaataagaaaattagccagatgtggtggtacatgcctgtgtcctagctattgggaggctaaggcaggaaaagcacctgagcttaaggaggttgagtctgaagtgacacatgattatgccacactgcactttagcctgggcaacagaacaagactctgccttaaaaaaaaaaaaaaaaaaaaaaaaaagttgaccttctcctgcttgctaacacactggactgaataaggaaatccacaaagcatcttaagaatcatgtttgcgtgataactgatatcaacccacagggtatctcactagagattctgaagtatagttaagtaacaataccacaagggta

SEQ ID NO: 10872 - DNA, 966 bp, Artificial sequence
  DNA replication origin
tggaccagggccaggcccttctgcgagaagtccaggggctcattgaagtccaccgcaaagctactggcgggctccaacttgatcgagacatggggaggtggaggctgggtggggcccctgtgaagaaagccgttctggggttccaggaaggcagtgaggggcttgcagtcaccaagggcagcgcagccactgtcctccccgcgccccgacgcctcagcggccggcgcctctgcggggcccaggccgtcggcggccagcacgtagctctcgatgtcctgctcgggcacgtgcaggtgctgcttgaggatgtggtggatgcagttgcgcttggccgcgaacgcggcgctgcactccttgcactcgaagggcttgcggcccttgtggcccccgcccaggccgcggccgcagtgcgtgcgcatgtggatgcgcagggcacgatagtgcttgaggtcctcgccgcacagccggcacacggtgtccggggcgcagaaggcgtccaccagctcggccgcgctgctactcacatactcgatgttcttctcgatatccttgcgggtggccttgaggtgcttcttgcgcaggtgccgctcgcagttggctttgacagtgaaggggtagtggcagatcttgcaaatgtagggccgctccccactgtgcgtgcgcaggtggcggatgagcgcggccttgtcggcggcgatgtagtcgcagatgttgcactggtatggcgagatgcccaggtgggagcgcacgtgggcacgcaagacccccgagaaggcaaacacctggttgcagaagcggcaggggtagagcaccttgcgcatggcgggcgtcttcttgccgccgggcgctgtcatgaaggccttgagttccccctctgtgatctcctgcttgatcttggcctccatgctcagcggcagcagggcctcgatgatgctgtcctgctccagctgcgtcttcatctcaggc

SEQ ID NO: 10873 - DNA, 1308 bp, Artificial sequence
  DNA replication origin
actgcctgggagcccggtggccctcttaccagtgtgtgtgagcatgtgcctctgtagggagctggcccaagggaaaacccggggacagtggggacaggtgatcttctgcaggcagttggtgtacgagttccgcttggccctcagcagcttgtcttctgggggactgccctgctcttcatcactgggcccatggtggtcggcaggggctccggccacctcatcctgagtgttgtcctccgctgtctgcagaaacggactgaacttgttggtgtctgtggtggccagcatcttctcgatgctggcaaactccccgctggagtccaggtccaccccgccgctgttggcgcggggtcggctcctcatcccccttttccggcccctcttcttcgacgtgcccgctgggccctgctcggtgggagaggcagcctctgggctgctggctggagcgggaggctcactagactcttttgggctggtggtggcagcgggggtggcggtggtggcggctttggggacagaacctcctaagctgtctgaagccgtggtgttactgccagtgcttgcgggccctgggtccgccaccttggttttcagcagggtgggggccgaggatacagatgagatgatctgggcaatggaggccagcgggggcagctcttctgtcacggggggctttggcaaaagcagcgggggcttgggccgcagtggacgcagcaaggctgtgccactcaggagggctgagctgcccacgagtggagggctgctgaccagggctgaggagtagattgggaccgccagctgaacagggccctgcaggggctgtgctgggggttccggggtggccgccggagcaggggccatggggctttccaggattccgctgggccccaaagttacaggaagagaagggccgggtgctgggcagggagagggctgctcgctgctccccgcctcctcctcaggcttcttggcttcgctgggagtggccaaatccttgtcccctttcctgaagttcttggggatggacaggtcgatgggctccatggagcagtcataggggaccagggaagaagggctcagaaaggagatgttttcctgcttcacttggaccagggccaggcccttctgcgagaagtccaggggctcattgaagtccaccgcaaagctactggcgggctccaacttgatcgagacatggggaggtggaggctgggtggggcccctgtgaagaaagccgttctggggttccaggaaggcagtgaggggcttgcagtcaccaagggcagcgcagccactgtcctccccgcg

SEQ ID NO: 10874 - DNA, 1292 bp, Artificial sequence
  DNA replication origin
ggaatcctggaaagccccatggcccctgctccggcggccaccccggaacccccagcacagcccctgcagggccctgttcagctggcggtcccaatctactcctcagccctggtcagcagccctccactcgtgggcagctcagccctcctgagtggcacagccttgctgcgtccactgcggcccaagcccccgctgcttttgccaaagccccccgtgacagaagagctgcccccgctggcctccattgcccagatcatctcatctgtatcctcggcccccaccctgctgaaaaccaaggtggcggacccagggcccgcaagcactggcagtaacaccacggcttcagacagcttaggaggttctgtccccaaagccgccaccaccgccacccccgctgccaccaccagcccaaaagagtctagtgagcctcccgctccagccagcagcccagaggctgcctctcccaccgagcagggcccagcgggcacgtcgaagaagaggggccggaaaagggggatgaggagccgaccccgcgccaacagcggcggggtggacctggactccagcggggagtttgccagcatcgagaagatgctggccaccacagacaccaacaagttcagtccgtttctgcagacagcggaggacaacactcaggatgaggtggccggagcccctgccgaccaccatgggcccagtgatgaagagcagggcagtcccccagaagacaagctgctgagggccaagcggaactcgtacaccaactgcctgcagaagatcacctgtccccactgtccccgggttttcccttgggccagctccctacagaggcacatgctcacacacactggtaagagggccaccgggctcccaggcagtgagtcctacttcctggtagggggagccacgagtgggggtcaaaagcgagacccatctcccacagttccagttattcctagcttggcttcttccccggtctccgaagccccgagcttgtctggtggtgctgtatttcctatgtgctctcagtacccacatggcctttgtgcaggggccgagccctccaagggcagcattctactaagtgttcatccggggcgttttgaggtgaaagtggtcacaggccctcagatcactcatggcgtcgcctcatcccttccggaggtggtagccagattatctgctgggttaaacagggaggcggctccacagacgtgagactttgtattaaggtattggggcataatgagctcggtgctttgacattccattccagtgtcctcaatgcagct

SEQ ID NO: 10875 - DNA, 1085 bp, Artificial sequence
  DNA replication origin
cggggccgactccaccacctctgccggggtctcggggggcttctcctcctgttcaggggcgggctggggcccctcctctgcagtgctggcgccatctcccttctcgtccttgggctcctggcggccgtgcgccttccggtggcggctcagggtgcccaggaacttgaagctcttcccacaggtgtcgcaggcgagcttctgctcctgcgaggccgcgcccccggcgcctgcctcgccgtcgccctccgccagcttgaagtccatgagcttggtggcgaagtccaggtccaggctctggttgctcgacgcgtcctcttccgcgccgtcggcgtccccagtgctctcctcagtgccatgctcctcctccggctcatggctctccccacgcccgtgctcttcccggtgcaccggcgaggccgtttccgccgtggcctgctccacaggcgcatcccctgcgacctggcggagctcagtggcgccctccgacggctgctctctgtcccgtgaggtgaggtctagcacttcgcccgcggcggctgcagtctccgcatccgactgactgtctgtggggcaagcacagcggggagggctcagaggggcaccaccaggtacgcccatgccagggatgtcgccgggaatgggctagacccacgccagcagcctgaaccccaaaccagtgaggacttctttcggcccaaatcctcaccacctgttacatcccccaggaggaccaagatgaccctggggacgtgaagaaaggcaaaagcagcctccacatcacctcaggtgtgttcccagggctggctgtgcccctgaacccctggcttccactgcccccgcccccaggaaggtgtgagtgactcaggcagggcagacaggggctgcgagataggagaggggtgcattccagagactcgcagcgctagggaagttgaggaagcttgagttataagttatttttccagtgcaaagagatcatacaaacatgcaacatacacaggaccacccctacccctaatcctccaaagcatggtcttgatgagtttcacaggaaacgaccccaagcctgcgttgtgtgtgtatgg

SEQ ID NO: 10876 - DNA, 2426 bp, Artificial sequence
  DNA replication origin
gtacctggtggtgcccctctgagccctccccgctgtgcttgccccacagacagtcagtcggatgcggagactgcagccgccgcgggcgaagtgctagacctcacctcacgggacagagagcagccgtcggagggcgccactgagctccgccaggtcgcaggggatgcgcctgtggagcaggccacggcggaaacggcctcgccggtgcaccgggaagagcacgggcgtggggagagccatgagccggaggaggagcatggcactgaggagagcactggggacgccgacggcgcggaagaggacgcgtcgagcaaccagagcctggacctggacttcgccaccaagctcatggacttcaagctggcggagggcgacggcgaggcaggcgccgggggcgcggcctcgcaggagcagaagctcgcctgcgacacctgtgggaagagcttcaagttcctgggcaccctgagccgccaccggaaggcgcacggccgccaggagcccaaggacgagaagggagatggcgccagcactgcagaggaggggccccagcccgcccctgaacaggaggagaagccccccgagaccccggcagaggtggtggagtcggccccgggtgccggggaggccccggcggaaaagctcgcggaggagacggagggcccctccgacggggagagcgcggccgagaaaaggtcctcagagaagagcgacgatgacaagaaaccaaagacagactcccccaaaagcgtggccagcaaggcagacaagaggaagaaggtctgcagcgtgtgcaacaagcggttctggtcgctgcaggacctgacccggcacatgcgctcccacacaggtaaccagggcaggccaggtccccggcccaacaagaggaggcgagccgggcacctctcctaggagctcccctgaagcggcgctggaggccaccgagagaacgtttgcttacgttgccggtgtgccctttaagcccgtgaactaggagttttaaggagttgtactctcagcccttgaagacggtgcaggcctcctgcagccaggcaggagagggtccttggccgttgtgtttttgagaacgctgtgatccgcctttagctctgctgcctccgcctccccatctgtagagtgggggtaacagctgccctgtttcatagaggtatctaggagagggtgcttgtgctgggcatttgggccacttagtcctgtctagtcctgtggcctggacgacaggcactgccccaggccgctgtggggcaggcaccctgggtgatccattagggtcaggagggccttttcctttcttagccgtgcagttcggctgagatgactgggacaggacccttagccactgcccttcacaccgttctagagttcacccaccacctgcagggtggaggctgcagaccccagagcaggggcgcttactttgacacaaagacctgaatatgctcatggagtccagagatatatccttcttctttccaaaataacctgtccctcctctcagccgcagcttccctccctgtcacagctgcagcccgcagtgaacacatgtgccccgacccagcgcagtcggctctgccctgcgcttgcccgtgtgaagggccagggtccttggctctcagaagagggatattcttgggctcccaacaagcgtggtgggccctgccctgggcctggcgtgtgagccatcaggaaagcccccgctgcaccacatcgcaatgcagagggtaactggtgcccccgacctaggtgctgctgtccatacagatccctgagagggtccactcctgtccccctctagattccttcccagtctctggtcgaggccagtctgcacatctcctgaggcttctgcttctgggacctgggttttctggatcagtatgtagagtgcctgggctgagagaggaaggagaggaaaggtctcagactgacagcttgaaccagcaaacagagcttgtccgtcctcagtttgctggttcaaggaagaggcctctggctgagtaggacggagtcctggccccccgcacatagcctgggagcctcattcttcctgtgcagagcagggtgcagtgggtactggtgccttttggttaatggaaattctttcttccattgttccaggggaaaggccatacaaatgtcagacctgcgagcgaaccttcaccttgaagcacagcctggttcgccaccagcggatccaccagaaagccaggcatgccaaacaccacgggaaggacagcgacaaggaagagcggggtgaggaggacagcgagaatgagtccacccacagcggcaacaacgccgtctcagagaacgaggctgagctggctcccaatgccagcaaccacatggctgtcacccggagccggaaggagggcttggccagtgccaccaaggactgcagccacagg

SEQ ID NO: 10877 - DNA, 1323 bp, Artificial sequence
  DNA replication origin
agagcttccagttccgtcttaggacattttcaaagatgagcgtcctcaggaggggcggtggagggggcatgtctggagggacctgaggcacggggagcgctcggtgcccaggccgagcagtgccacacgtgcgcacgagttatgcctgcaaacacgggttacgcctgtgagaccagtgggctccttccagccgggctgcctgaggccactgtctgtgtgttggtgcccattgtgggctccggggcgctcttcccttgtgctgacgtgagtggagttgaattgccctgaatcagattagactgaaataaactgaattgaaaggcctacaaataagtatgaatctcttgctgagtgccaggctctggggagtcacagctgagtaagacagccgctgcctgtcttcacactagccgggcccataactaatattatggacttgcagcaagaacatattgggggtggtgggtgggagtggggaggggggcgagaggcttcaggaggaggagatctttgagctgagcctttgagaatgggagtggggattttggaaaaaggtgaaggtaagaaggacacaggggacctgggaggcaacaggagcagaggtgcgctgcatctgaggcgaacacaggagagggcggagacgcagtgctcacttgccacctgacagaggcacacacgtgcacacagagtcacaggcagagagaggcatcgcacactcagcctgtgagccacacgcatcagaaccacccagaacacacacacatacctactccagcagaatctcagggagccgacccaggaagctgcattttaaaacaagctctacatgggaattcagagattgacagtgtgtgtgttgggggcgggtggtaagcctctgtcagccagcgggggtgcgggggcattcagtgatttgcaggctgggcctgccaggatttgcccctggcacatgagtaattgttgcacttcaccacacagcacagttgcctgcaggacttgtccacacacagactgctgggctccacccccgaaattctgagtcagtcggcctggaattgggcccagaattgcttgctgatcagttccctgatgggtgatgctggtacaggggcctctgagaaaaagatggattggagagagatgaggcatcagccagactgaaggaagccctcactggctctcctgagactgaggtgccgggacagtcgcaatatttgcagcactttgatttgaccagatgtgcctttctcttctgtgtgcccatccttggtttcaagcccggcctgtgacagtagtatggtattctggacatatgacagacac

SEQ ID NO: 10878 - DNA, 927 bp, Artificial sequence
  DNA replication origin
gcaggtgaaagaaaacaagcccaggcattgctgtggaacatggcagaagaggacacgtgccccagaccaggagcatggtgccgtgagcgggtaccaggaaaggccccgagggtgctgtgtcttttaaaatgggccttgcagccaggtgcagtggctcatgcctctcatcccagcactttgggaggctgaggcaggtggatcacctgaggtcaggagttcgagaccagcctggccaacatggtgaaaccctgtctctactaaaatacaaaaattagctgggcatggtggtgggcacctgtaatgccagctattcggggggtggggggtggtagggatggtggcagcaggggtctcaggcaggagaatcgcttgaacccaggaggcagagtttgcagtgagccgagattgcaccactacactccagcctaggcaacaaggccagagtccttctacaaaaaaaaaagaaaagaaacaaagggccttggattcggttcaaagggctttcagcaggtgaggttgcaatggagagtgttctactgagaagaaacaggtagggaaacatgagattgtgtgtagggagtactgaccgtatattttggtcaaggcgctccatctgtggccggaaaggtgtttgagcttgcggcatagaaatcctgggctgggcttgctgacggaaggctgtcaggacggatctaggttggcttagaatggggagatactggaagtggggagaccagtttgcagggttttgcaatgatgcagggaagaggtaaggtgcccttggattgggtggggatgctggtattggaaagaggagggtgtaaagggaccagggacatagagtcaacaggctttgataactagaggtagggctaagcgggtagggaggtagtccaaggccatcctgaaatttttgagcttggggtg

SEQ ID NO: 10879 - DNA, 1042 bp, Artificial sequence
  DNA replication origin
ggccggcgcggagaaagcggagggggccaaggataggcggacggccggggaaccgggcgggagtgcggaaggctcgcgaggtcgctgctcgctacctgggccctcccgaggccgctgcgagcgcggagacggcgacgggccgggggcaggagcgggaggaaagctgtggctcggagggcggcaagggcgcagaggagctgcgtcggagctgggtgttggtgttggtcggcggcggagcgagtctcctccccgctggcactgggcgcctaggccacacctggccggtttcttcccagggtggggtgcggccgccgcgccttccccgcccccccgcgggtgtcaccgacgcgctccggccgcccctccccacctgcgcccgccgcccgcgactccgccctgcgccaccgaggcctgagtaacaccgggcggggcgggggcggggtccccgagacccaagcgccctgggcgaagccaccgcggggaggacctgcgctcgcgggggctgctgcgctctgcgctggggcctctcgggctgggaatgcgtggcccggcttttgaggatttcctcggtccccgggcggaaatagctggaatggaggggcctctcgattggagacttactggtcaaatatttacttttgttgatcactggaaacgctacctaccacgcattgactaggaccacagtgaggagggaacgctttagatgatagagttttgtttgggggcttttttttgttttgttttattccaggaattcaggaaattgccccagaagtccgatttctgatgtgtaaaacctttttttacagaaaaccacgacttcctggaaaagtcttcaccgtaaatattaatctctttggcatgaagaggaaaacactgcagctaatttttcatgggataacaaaaatataaactgcaatttcttttattttttccctttcgatggtctttttaaacgaggagtaaagatttcaacgccaggtccattttccaaattttgtaccagaaccttgaggatgcttgtctctcgcgcgcttct

SEQ ID NO: 10880 - DNA, 1075 bp, Artificial sequence
  DNA replication origin
cggggcgtcggagggggagaggcagcagtcctggccccacgaagcagccagctcgtcccagcgtcggcagccgcccccgggcgccgcgcacccgctcaaccgcaagagccttctggcccccggatctggcagcggcggcgcgtccccactgaccagcgcgcaggacagcgccttcctcaacgacgcggacatggtcatgagctttgtgaacctgggtaaggatttggggtaacgtaatgacgagaacatttcccccttttcagtgtcccgggcccaggggatggagtgagggggtggaggagctcccggcgcgcgggtcccgcctggtgcgccagagaacgcggggacaggcaggctgtgctcccgccacctgcgcggcggtgggcggcacatgcgctcccccgcgccgcgggcagggctgcgcgccgaggcccccagaggcggctggccggccgggccgcggggctccgggagcgctgtccccagcgggcgtgtatttgcggactccctgagcacgttccgcgctttttttcacttctgcccagctctggccaggttaactcaactgcagcaggagagtccagcccgagtgtggccatcctgggaagagggctcttcagtacgattttcccctctaaactgccgccttttgccccctaacttggagtgcagttttcccaccgagacttttagggaatccgacagcggctgggaactttgaaaacttggcatgagtatgtttagaggtatccacggcactaggggaggttgcagagggaagtcccaaaaggaccgcggaaggcgctcggatcccggccgggcggggctcgcttctgtttggggcgggatgaaagctcaactggggtaatccatcctgtgccccggctcacatgcccttggccattgtccccaaaggctgaacctttgatcaatgcagcccaagctgcacgggcagagaaagggtgcggggtaggggccggggttgggcgctgagctcctctgaaccggttgccaggcaacagaatggaaattcacgggcggctaaatggagctccgccacaaatgttctgtggca

SEQ ID NO: 10881 - DNA, 1126 bp, Artificial sequence
  DNA replication origin
caaaaggaccgcggaaggcgctcggatcccggccgggcggggctcgcttctgtttggggcgggatgaaagctcaactggggtaatccatcctgtgccccggctcacatgcccttggccattgtccccaaaggctgaacctttgatcaatgcagcccaagctgcacgggcagagaaagggtgcggggtaggggccggggttgggcgctgagctcctctgaaccggttgccaggcaacagaatggaaattcacgggcggctaaatggagctccgccacaaatgttctgtggcaaacccggacccagtcacatcgccctttctcccccctcccaccccactgagttttctcatctgtaaatgagaagggtgcagagaagactcttttcttcggagtcagtgcctccggtttgcactgcttttcattcataagctgacttagtttagcgcagacataggatggagggacgcgctgtcagcggacagatcatgggtgcactggctacgcccgggatggttgcagctgcgcggcggggtggggcttcacgggcctccttcccatgtgagacggtggttgtgcccaggccctgaagtgggtgagcagacactcgccaaaggagcacacgggtctcccagccacgtcaaagacgctcatcttttaacggcattacttactggaatgattcccgcgtagactatctgggtgatttctttaccagcctatctatgattcccaactccactgagctttgagggagagaacatggggggtaagagccaagggagggtgtggaggcagggcgattggcatccaagtggtgcagaaatcctcctgggaaattcgtgaaacagaatctcacaggagtccaggctcagggcctgccaatctggctgcttgcactgcccggggttctgattggacaagaattttcacaatttattggaaccaaatccaaggttgagccacctccaggaagcattctaaggaaattctcatgccagtcaataaaatttgtagtgggtgggggccagggtggcagaggaccagcgctgttccttattctaacttttctgctgcttctgacttagtaaattcctccccttgctctcttcctctcctctccttccac

SEQ ID NO: 10882 - DNA, 1101 bp, Artificial sequence
  DNA replication origin
ggcgcggggctcggggctcaggggtgcggggtgtaatactgggggcgcggggccgggagcgcggggaccctgcgggttcggggctccggctggcggggagcggggggcgcgggcgccgcggctcggggccgggagccggggactgcaggggaccgagggcttggggctccgggtcgggaggcgtgagctcagcgggccgggcactggcggctgacgtggcgctcggcggccggggcggtgcgggaggagggggcggacccctaggggacagccgggaaaagcccgccctgcgccgcgctcctgaattcaaccgcctcttgcacctcggcaccgagggaggggaaggtggggtcgtcgccctttcgggcagccgggagtccaaatgtcaccccgcggtccctgcccagcgccccaaacttcctgtgccggccggacgcgcggcctgcccgtgggccacgtgcactcaccagagcggccttgctgctgccgcggccaccggggtcggctgggacagactgcgggcacgtccccttccagaggctttaactgaaaaatagaacccaggaaggtgtggtttcccactttgtgcgtcttttgtgggataggaaggagtggtccgggcagaggagggttgctgagctaccccgggaagaccaaggtagtgcgaattctggaacccctccgcccccctgcagctcagggtggatgtaatctctgaacggagcccactggtcctcaactccaggctgtcctgtcacctccctgctgctctctcgggtccaggtcacttgttatgtgtgagatcggaaaagcccctccgttgagcagatggtccctcttgctttggttctctgggcgaggctttggtgtgggcctcgctgctgacctgagagaccctaccctggcactcatcccacggaagagcttcctgtcattcacacaagcatgtgcacagctttcctgccagtgccgggatgccccgaggaagggaagtgaccacaggccagagcagaaagccataattttaggacacaagacctttgagaggttggaatagcctgcaggttcttgttgcagaacttggtattcttccccagagct

SEQ ID NO: 10883 - DNA, 1260 bp, Artificial sequence
  DNA replication origin
gtgcggggcagggcgccggcctgcgcggcgttaccagggcgcgaagaacatgacgaagtgcgcggcgctctggatcccgtgcgtgaacatgtcggccgtgtacaggtgcttgctgtgcgggtcctgtccgtcctcgccgtctgccgcggggggcccgtccgccgccgccgccgccgcctcctgggcccgggcgccccagcgcccgccgccgccatggcccagcagcagcagcagcagcgcagtcagggccgccggccgggccagcagcgggaggaggcgtcctgggcgcgcgggcatcgcggcggggctgggcgcgctctcgccgcggcctccggtcccctcgcagcgcccgccccgcgccccgccccggagaggccgcgccccttcctctccccgcccgcccgcgccggcgcgcgaccgctacccgcccgagccccggctccgcgcaccggcagggaagggctggagcgagggaccgagtctgggagagccttccgagtccggcctcctgccttcccgccatgggacggctcgccccaatcccgcgaggctcctgcgcctccgcaacccaggcccgcacccctttccccaggggcccgctctgctcagagcggcggtgaacacacgaagtaacgatgaggccagcgggaagccacggaggggcaggtcagcctcggctaatctcagctcacacaagcaccccgcgatttcaggccaaaggaaggagagagctgctgtcagcagaatataggaaatcgggcaaaagacggtggggtttgcacctgaattagttagattcttggccagagctcaactgtgattctcgacctgggctcagaggggtgatgaaacccgcttcccaagtgaaccccttgctggttacccctgcccggcctcaactcagggatgaagaggaaagaaagtcaaagcggcctcttctagacaagaaggcacctagcaggactgactggggtcctactgtgccctcatttatgccggttactaaaatgaatgacagcacgcctgctatggctgaactcagcctgtggaatggcccgaaggcatccctgcccagcgactcataactcgcacctgcacacacaccttacagcagatggtaatcgaaagctccagccctaccccggggatctgaagctaaattagaatcaccgggttgctctccgggatcctgcctgctctttgattatcctcaatccaggaagccccaggtagttaactcctggcttggcaacaggggac

SEQ ID NO: 10884 - DNA, 787 bp, Artificial sequence
  DNA replication origin
tactgaaggttttgtaggatttggaaggagcaatggggaaccaggaaggcatcagctttacttcctggctctgagggactccaggtgtgaaagaatgagcagccaacacttgagagagctcctagaactgtgtttcagttaaaaacgaaagacactgatgctgtaagagtgtatggcgatgcttgtgggaatttcccaacagcaccgtggaagggtttgggaggtttgaggtgttggagaacacagggattagagtttggcaataacagttattggagagaatccctggatttctagtgttgagtgagtttcacagggacacaaagcatgatgcaaccacatcacggaaggccttgaatggctgccccaggcatgactatttcaccccatcggccaaggccatggggacagtggtggcgttttggtccaagtttaagcagcaaactgtcttggtcaaaggcaggctttaggaaaattaattttccagccatgtgaatgaaagagactcttagaaagctactgcaataggccaggcttagtctccgttcagggtatgaacactgagaatgctggaaggaaatcatggttacaggaaatgcggttgaattttgagacacacgggaaaagagcgagcaatacaagatgcctcccatgtttcaagcttaagtggctggaagaacagactttggagggagattgatggttttggtgtttggcaacccatggttaaaggttcataagtggctgggcctaaggcgggagcagaataatgacaggtgagacagtg

SEQ ID NO: 10885 - DNA, 1251 bp, Artificial sequence
  DNA replication origin
ctatttccttgctttttccagcatctagagctgcttttcctggctcttggccccttcatcttccaaaccagcagtttaacatcttcaaatctctttctgcttttgttacgtcgcctccggctgtgtagtcaaatttcctactgcccctctgttatgaggacacttgtgatcacatttaggacccaccgagataatccagggtaatctctccagctcacgacccttaatttaatcacacctgcaaagccttctgccatataaagaaacaatcagatgtttcaggaattaggacctggttatccgtgaggggcattattctggaggactgggctttgctaggcagggatatactgacttgctcctttgtgggcagagggaaaggcgcctgtgcaggggtgtgtagatttggcgggggagggataagggagctcatgcttttggcttcatttttctcagaaacatgagataaagctggcagctgagaggatggcgactgacagggtggggtggggagaggagaggaggagcagtgtcagtggaagtatggaagcatctcagagagtggggcagcacactgcctaggcagaggtagtcagttttagggcaggggtgaggaggaatttaaggcttatttttaccagtgtgaaggagacatgcggcttgactgtgcgatttttctccagcagagtctggctacctggttgaaggcacagggaacccagagagacaaagctcaccagcatctgtggggagaatgtggcagggcaggaagtgaagggtgagactccatgggctgtaacttggccaagaggcaagagaagacatagcagtctgttgggctgcgaggggattgtagaagatggtggggtgggtagctcagaggtcatgatgagaaagaagcattgcagaaatgggtttcttgagcaaacagtcgaggaggtgctgggcagagtggatgccttcagattttggagatggtgcagatgctggtgatgacaagtgctagggtctcccttttgggtgtgagttactgagggaaaggtagatggagcatccacctggatgctgaagatgccaggaatgaaagacaggaaaggggtggccaggaacactgtgagccaggaaccaaagtcttcactgaaccaggaagagtgatgtggaagaatgacaggaactggcagggaagagggtgccatgcccagtggcatcaatttaaggagtactgaaggttttgtaggatttggaaggagc

SEQ ID NO: 10886 - DNA, 1587 bp, Artificial sequence
  DNA replication origin
acatatatatataatgagtatatatacaaatgatggtatacaaatatatattacaaatatatacaaatatgtacaaatatatacaattgtgtatatatacgaatgagaacatatataatgaagccatttttataaataagaaaataaacgtgtatctgtatacagatgttagccattatgtctctattaactaattatttattaattctaatgtatatttacaacaaatatgtattataattgtcttcttaagaaacaatatgtgtatatatatgtgtgtgtgtgtgtgtatatatatatagtttttttttaatattgttgtggtggtgggcagaataatggttctctaaagatgtctatgtcctgatccaaggaacctgtgactgtgatgtggtgtgttcacagcaaagcaaaattaagaatgtggatagggctgtggttgttaatcagctgaccttaaaatattatcctggataggtgcaatataatcacatgagttcttaaaaggagaagcagaggattagagaaggacatgagaaggactcacttgttgtattagcctgttttcacactgctataaataactgcctgagactgggcaatttataaaggaaagaggtttaactgaatcacagttcagcatggctggggaggcctcaggaaacttacaatcgtagtggaaggcaaaggggaagcaaggcaccttcttcacaaagcagcaggaaggagaagtgccaagtgaaaagggaagagaccctcataaaaccatcagatctcgtgagaactcactcactattaagagaacagcatcgggaaacttcccccatgattcaattacctctacctggtctctcccttgacatgtgggaatcagggggattataggaattgcaattcaaataagacttggatggggacacaaagcctaactatatcacctgccttcactggctttgaagttggaaaaaggaagccacaagccaaagaatgcagtggtttctaaaagctggtaacgcccctcaattaatagccagcaaggaaatggagacctcagttttacaaccacaaggaactgagttctgtgaacaaccccaggaaagagcaaacaaattctcctctggagcctctaagagaggaacggagtcagcctacacctcgattttagtccagtgagatccgtgtggggcttctgacctacagaactcagatgataagtttgtcttggtttaggcctctacatttgtgatcctttgttatggcggcaagagacaactaacaccatcagaaagggtttggaaatgcagagagaacaaggagaattaatttcacaaatgaggaagactcagtagaaatacaccatatatgagagattcaataggatcaaaggttaatagaagggaaagagacaaagatggaaagatccagattacagaaagccagaggcacaaatctggatgataaggaagtcagagaagatcgaggtggtgcatgtcagtgagaggtgacagcgtgctcacctctgagggctgcgctctgagggcagtcctcagagccctcgctcgctttcggcgcctcctctgcctgggc

SEQ ID NO: 10887 - DNA, 1502 bp, Artificial sequence
  DNA replication origin
cttgctagtcttctggggcgacaaaacctccgcaagctattacaagcctagaaaggtaaataacttggtgtggtggaaggatattcacgcaccatggaaacttgcaatggaagggactcctatggtctaagggactcctatggtctgaggtgggagcatcccacaaaaagtgcatgaagttccttttaagtctagtcgtgaagaatgacaaggctagacgtgctctgcaagcagatggaaatgagtgagctatgctccctccctgaggaggaggaaaatgtccacagctggggcatggaaagggaatggaagctcagctctcccagtcactgagctctccatagggagcgccttgtacaccacagaaaaaaatttcaatcgtgtcccaaggacactggggaagcactaaagacgagttttaaacaggtgcattcaagactcagatttctgttgtctacagggctctctggttggggtgtggagatcagagagaggtaagatggggaatgggggattcatcaggcagcccctgcagagatctagtgagaaatgatggcaacctggacgggagtggccaccgtggggatgggaggaagtggagggttttccatggggatagagggatgtgggcaggttttccgtggggatagagggacgtgggggttttccgtggggatggagggatgtgggcaggttttcggtggggatggcgggacgtgggcagttttccgtggggatggcgggacgtgggcagttttccgtggggatggcgggacgtgggcggttttccatggagatgacgggacgtgggcggttttccttggggatggcgggacgtgggcggttttccgtggagatgacgggacgtgggcggttttccgtagggatggtgggacgtgggtgagttttccgtggggatggagggacgtggagtgttttccatggggatggaggaacgtgggcggttttccgtggggatggagggatgtggcgggttttccgtggggatggagggacgtgggcggttttccgtggggatggagggacgtgggcggggtttcgaggcattcagaaggtgttaagagaagacgaaggaaaaatgaatggtggaactctcctgaagaacaactaagatttgtttcttcagtatttcaggcgttcaatcctgctttgtctagtgactttaagcccaagaaatctgaaacttaatgagtttgggaaaagtaaattaggggtgaaactgtggcacgcactactgctgactgaaacaagacccagctgaggacattttcttaactaatatctctctctctccctctctctctgtctctctccctccctccctccctccctctgtatcatgaaattgcacactcgcccattcgcacctatttggaaccaaaagagacttgaggcagcaatccgatttactttacaatcccgacctacacccaccccacctcttacccaaataaaggagcattgcactcgcctgccacaca

SEQ ID NO: 10888 - DNA, 1003 bp, Artificial sequence
  DNA replication origin
cagtctcccagttgtctaaattattgaatagcgatgtgcatatttcaacgggagaaggtggctaggttagagacccacggtcggcacgaggaacgccacagtgtggtatatttgggctgggaaaggctcccgtgcaaagaattttaacacattcttctctgggcggccgaggaggccacgctaacctgacagctctggagcaaacggttagagaaaatggatcgctttcctcggcccaggatcccccacagccccaccccgtcccggcccggggcggcgtgtccctcggtaaggctgaccgcgacgccacacaccccgcctaggctgcagagggcggcgggcagggcctgggtggtgcagcctctgggcggggcctgcgcagcaggcggtgctgattccgcggtgcccagcccaggcgggaatatccacccgcgacgtggctgggagcgtgggtagctgagctgagtctggggtttgcttcgtcagcagggcccagggtgctcagtccccgagggaggcgccgggggagtcggcctttgttctggcactttcagggcctaggagttaggcaactctggggaggtgcgaggggacgctccgtcgggcgggggaggcctgtacagtgagggccgcgctctgaactcgaggcacggctaggggagaacgtgcaggaacctggcagctcttggggatttactgaagcagagtgtggtaaagtaagtggaaactgagggaactttgcagtatctcactttaaatctaaaaggaaacatttgaaaataaacaataatctgttctctcattctctcttcatctttgtctttttctctgagctcttccttgtccctctaatgccgtttctcctctatttctgtctattctcaactttacagcccatctctccagtgtatcttttttttctccctccctttctccgcccctctctctgcctttataaatatgctaaagaggaaaacaacctcggcaattcatgctcgtagcc

SEQ ID NO: 10889 - DNA, 1240 bp, Artificial sequence
  DNA replication origin
attcacaatactgataaaaatgttgtcatcatcttttggctttttttttttttttaagtatggctacaatctgaactgaagtatgtaagggaaggtggtgactcagtcccatgaagcgcatataattttttttattttcactttttttttagaaaaaagtttttaatttttgttgttgttgttgctgttgttgatttgttgttttgtttaaaaaaaaaagggttcacaaacttggcagaacttttctctgctggcttcacggcctgttctgttctcttaggctccacatgagggcacaggggtgtgggagcgggtggggaggtcgaggcgggtgcagagtcggagaggctgccccactgacagtcgagagggcagtcccggagactcggggggacccaagggcagcggcggcggcggcggcggcagcagcagcagcagtagcagcagcaggaagggttgctgatcccggagctgtcacccgccggagggtgggcgcgcggggggctggtgaggcgtgggaggggcggggcgggaggagagcctcactttctgtgcttctcctctttgtcactgcttttggcgttgttgtccgtgtggctgttggggttgttgctgaggtacattttgtccatggccttgagggcctcggtgagatagttctgcagggccgtgaccgcggcacacaccgcggggctgccgaagccgtgggagatgaggttgaagtgggtcaagcagctctggatgccgggctccaggatggggttgggccgtgagttccccaggggagatcggtcctgagccagcaggtcggtgaactctttgcatatctgtctgcagcacaagtggagcagagagagagacataaggctccactatgggcagcactagcagcaaagagaaaacctccctccctgcagctacctctgccgggatccagccggtacctgacatgacccaagaccccagagacagacagtgtggccacatgttgggagatccagccacctttcagtgaccactaaaccatctctctttacttcctaccttcacaaatgactctctctctctttcctctcagatatggtaaacttttattcccacctttctccctcacacaaaacatcctagacataggaaaccatttcacacattggaagagaaagaaaggagtcacgcagaccggaagtcagaaacagtagcatcttgcgaacattatgctgcagccatcagccttcctatt

SEQ ID NO: 10890 - DNA, 958 bp, Artificial sequence
  DNA replication origin
tcactctccgcctccgaataaaatgtttttataaggaaatactagggagaacccgggcccaccgactgtatgttccaggtatcctttctggggtaggtaagtagggggctgtgttccctcccgcgctggttgcgcggcctcttaccgggacctcctcgatggcgtgaggtaaggagtggatcgagaggtctccgagtcctgagctgagcgcgtgtgggccgtgcaggaggtcctcgtgccgcctgtagtccctgcgaggatccaggcccgacagctggtgaggcagcccccggtgcgtgtgcaggagcccagactcctggctctgcctctggccgggccagcctgggtgctgcggctgcggctgggcgtgcagggggttcaggctgtaggggtcgttgacgtgggagtaaggatcttgcgactgggggtagataggctggtagggtggggggaagtatgggggctggaagtcggcattgggggtgtgggacagcggcggggcgctcgtgtagggagattgacctacagtgcccagctggggcaaccgtgccgtcccgttgctggtgccgtcgtgacggtcctagaagagagcgagaggaaaggtaaagaacaaggaatcaggcgtcgagctacaactatccacacaaaatccacttgacaagtctgcgtgggaaatcgcccgttcccgttggctggccgccgggaaaaaatcagctctaagttcttttcaggaaataccctcaagtgaaacagaccgaacaacgcagagaaactgtatatggagggggcacaagagactatttaggggtttctttcaaagagaggaaaagatagaaaagggtctcctggaacacagcccattaaactgcagcgtgaaatctctcttaagcaaaattaaaattcctcctaaatactaaacagcagaagcggccttttcttttcccccgatttgaacctg

SEQ ID NO: 10891 - DNA, 939 bp, Artificial sequence
  DNA replication origin
gccactgcgttattgtttattctcttccatttatttggagagaaaaaaatcataaacgttcaaagactgttaccgtttcatgactacttaaatagaaacatatttcgcagaggggctgtaacaaaaacacacgtttaaattaccagcttaaagaaggttttaactgcaggatcggggtctgtctttttcgcttcctctgttaggagcctttttctcgacagagtcgatttatggtttggatagggaaagggggacgtcaagtcaaggtttaaaatagaaagattcagccttattgggtttaaaagagagaggtgcaccccggggctgtggccccccccccccgccccttccaccccagccccaaagggcagaagaaacgcctgactttaggtttctctattgcaattcccttgcaaaacaagcgaagagagttgattccagagaccgcgaaccctcggcggttcggccgcaggtcccgagggtagggggcacaccgcgctgcacttttcctgcagacagtttaagcatcaaatgttgagaacatctcggggacaagtgaagactcaaggaaatcaagatgaacgtggggagaaacacgccttgggaagccgcggcgaggtaggtctgcgtgctcggagaggtcgagcgggggctggggtagggggtaatgcactcgatttagggatggaaaagagcgagagaaaggcggaaggtggggtgggggatgcaaatggagagggtgtcctgaaggaaagctgggcgtgaaacccgaggtttcgggcagctccacggcaccaggtttccagaatccaattcctaaagaaacagcaacgggggtggggatgggactcaccatggctgaaaaactgtgaactaacatctgcgaagagtctggggtaacgagtcagggtggaaaaaaacaagcaagcctggagcgcc

SEQ ID NO: 10892 - DNA, 1457 bp, Artificial sequence
  DNA replication origin
ttcattctttcttccccccacccccacttctaaagcggttcccttctcggctttagagacggcccccccacacttcgctgtgagctgggctgcatcttcctgtaagcgggttcaacttaagaccactgatcccagctgcggggctcgctccagatcctctgtgcttcacgaagttctaagtagcttctccctctgagctacaggatcgacgcaccccacgggggtgtgtgggggtggggtggggagatgtgctgcgccgagcctgctggccgctgggtgcgggagcaccagcttctgcaccagcccagaacgaccgtgggaatccttgcgcggctgcagaccacctctggtgccgcaagcccgctgggccgacagagcgcgccgctttggaacccattttaaaacgcagagtcccctgagctcgccttcttgaggcagcaagggagaccctagcgcgacctgtccacccgcaggaggcgctgggaacggttacaaccaacactgtaatgagcaatgagtccgagagaggggttggggtgtgtagggctggagattacctaaataaataggtggcagtcccaacttttgctgttttttttttttttcttttttggcatttgcagctgagaatgttaggcaggaggtgtgtgtgcaggcgcaggggcggagatcttgacttcactcgaaaccagaaattgggtttatgtgaacgatgtgtcacccgctccctcctcccttttctttctgaagattattttaaatcgttctcctttcaggccccccaccccggtagatggggacggggtgacatcccacgggtactggctcttccctgggggggtcctgtcgcgctagaggaggggcgcagggaccccacgtcagaccagtcgctttgttttcgaggctgggggcgagctttgcgggcaggtaggaatgaagccgaacccctcagtctcataggacaattcatactgtactggtctgggctttggccggaggcttgggcatttcactttcgcagaggccgaaacccagctccaggtgtgggcgccctcggcgggcggggtccgaacctccgtgcggctctaggtgccgactggatggggtgggtggctaggtgggggatgaacttgcacccctagagggatcctgtgggggcaagtgtgaatgcgtgtgtaagcgaggcaaaaaaagatgagagagagaggagaataaagtcaaagctgtttccacaactttggccgtggtgggcaagcgccggagcggggatttcgggtttcggagctggcttggggcagtctgattgtgccggggctctgtagggacacgcaggaggcgaggtgccgcttgttctgacaacctggcgggtagactggcaaaggcagcacgccgggagagctagtcgtgtcatctgggggggcgtcaggcgggagtggcccagccagtcggacgggttt

SEQ ID NO: 10893 - DNA, 1470 bp, Artificial sequence
  DNA replication origin
gcagtggtttgaagtcaggatctgggctgccaggagcaccgacaccctcccagcagcggccatagcctgagcaggccaaaccctaggcctgagagcatgggtttttacactccgtagacgtcgccgcggtgtgcttaagggaactccaagtttcgctttcttgccctctgcgggcttggaaaggccgccctccatcctctgccaccccatttcaacccccgtttccacctccccgctgccccgcgcccaacagatctccggctccgcacccgctggggctgctaaactgttgttgtattcccgccgagggcgccattgaggtgcagattgggacctgccggctctggactgccgcccccggtgtaggcgctgatgaaaggcccgggcgagcgccagggtcgcctctggagccagccgagctgcatttatgccagcgtcattaccacgctaagtcgcttcattgcatgtcaatgctccggcggggccagaaccccgggacagcagcgccaggcctggggttggaggtcggagatccaggcctgacgtggggggcataaaaagggcgtcgcggggaagagggagtatttgtgtgagagacagagtcacaaagagaaagagacagtgaggggccagaacgactctcttttctccgattgtcaatgcccagtgggagccgggagcccaacaggcccagcccatcagattcggcccctccgggccccaaatccgctcgccccacccgagatccaggcctccagccacttgcctaactgtgagcccgcaagagccaggcccgcggctccctccttcctcctcctgcggcagtctcgcggctttcaaaccttagtcgaacccacagaaggcccagtcccaggccaaacctactcaacaggcaccttctcacggcctaggaattctgcagcgaaattcactggaatttgaggagaaaacccaaagactgctccgaaaggactcccccagtcttcagcctccaaataagagagttaggaagggcctttagcccacagggtcaggaagggaaaggtgtggattcccgggatttgtctctggtatgggatttgcatccttaaaccacgaggtttgtctaaacttgcggatgaaataccatttagtgaggcttaactagggagaagaatataaaagagctcactcttgataaaagtaataaatccaagggaaaaaagtacagaacgcaaaaggcctttctttctccaactccaggtagcttagtgaagactgcacttctcagaactttacttttaatggcctaaatctgaaacaagagaaagaactcgaccaggagtagcaaggcctcagatttttggggggaagttcagggcattagattcgaattgtcccctgggcttttgggcacacagaatctcaccctcaccaggcctcttggttggggcgaaaacagggcctcgcggttctgatgatgaaatcggc

SEQ ID NO: 10894 - DNA, 1097 bp, Artificial sequence
  DNA replication origin
gctacaggactttcatcccaatgcccatcctttagttgatttaaaactttctgggacctgccttagaatcttggtcaaggctgggggtttctgtgggtagtttttttggtttgttttgttttgctgagaatttaaataaattagatgaagtttttaactcctaagtgcatcttccctggctttttccagacggtggaaatagggcggtgactaacttttcagagtggaagacacgcacgaagggcgcacctgcagctctccgggattcaggcgggggtcgctgtgctctcttaaaagtgagcggcggtttcagcctgccaccgcttcgcctcgccagctcggaggaaactctggctggaggcgacctcgggcccagccggacgggccgggccgagcctaggaggggctggcagacgtgtcccagggccagggtggggcgtagggagcgccgtctccaccctcagtacttttggggtgggggacctgagcgtgcggagagcgggaggcagagctgagagcggggttaagcgcgaagctaaggcgccgcatagggttgggtgggaatggacagggtgagctggaagcgaagcaccccagccaggccttaggagagaggaccgtcggcatctgtgcacatcctagcgggcggatgatgtgggagagaggcggagggaggtgaaatgcgggagctagaatttagctttgcagtgaggtcacttggggtctgcattcagctccgatatatacatgtaggggctgtgtgatcctggggaagttaccgaccttgtctgaactcctgtttcctggtttgtaaagtggctaattggtgggaattcaataggagaatgtgcgcaaaacgcttagcacagcgcctggccaacaatgcgctctcaagaaaggctgctgagccttgtccaggacggtctacaccgccccacgtccaagatgagttcacagcgcccaagacctgttcaatttaagatgatgtaaactgcattgcccttcttagacacgcagcagccaggagctggtcatctgcacctcccgcgatttcctcctcagaaccccagtcctgccagatttgcgtccttccctgg

SEQ ID NO: 10895 - DNA, 1007 bp, Artificial sequence
  DNA replication origin
ccgcgatttcctcctcagaaccccagtcctgccagatttgcgtccttccctggctcctcaaacacctgctgcaccgctcagagcctttccccaccccgacctcctccgcagctccgcaccagcgagactgcgccccgtggcacctcgggggtgccacgattggcgggggatgggggatgcctcccagcttcatccgctctccgggttccagacaaccattccggagagccagctgctctcagtgcgggcaggcccaaggccactaactgcacttggcgacccacctccgttcccaagaggcctcggaaagtgcggcctcgggtctcttttgaaacagagacccgcggcaccccgcttctccccctgggataggagagggagagccgcgggagttccgcagccactcctggcgctgccaccacgaagcaggttcactagctaacagggcctgggacactgagccgtgtcgcaaacttttctgtgccccactcaatgagggaagcctgagctgcggtgaggggcgggatgacctggtgttgggttgagcggagctcccagcttcaggtaatgctgagctcaggctctctgaggcctgtggtgtcagaaactgcggtggaacccattctccgccaacaaccctcctcccagcgccatcagccccaaagtttctgagggagtaatctctgagttagggttaagccctgcttgagcctcattttcactccactccttcacttaccatcaggcaccatacccctagcgatttcacccaacgttctctaaatgaacttggatatctggacccaagtctgagcaatgggttcattcgggtgatgacctcggctttgcttttccgctggggagttgaagatccctgggcaggtggagtgacctctggcttcacgtctttcctcttcccctgtctcccacagtggctgctattccctgcccttggcagagcaaacctaatttaaactttgtttccttcttggtcccccttggcgtgg

SEQ ID NO: 10896 - DNA, 1067 bp, Artificial sequence
  DNA replication origin
tcagcctgccgctgcactgtaggagcccctccctgggctggctgaggcctgagcctgctccctgtgtttgccaggaggtgtggcttgcgagatgtggagagagaggcgctgggcgggaaccggggctgctcacggcgctcgcgggccagtgcgagttcccagcgggcgcgggttccgcactgggaggggccgtcagcgctgccggccccaggcagtgaggggtttagcacccaggccagcagctgcagagggggcgccgggtcccccagcaccgctggcccgctctcgccgcgctcgaattctctccgggcttcagccacctcccgcggggcagggcttgggacctgcagcccgccacgcccgagtcccccgcagtggactcccaggcggcccaagcctcccctaacgggcgcccccctcctccgccggcacccggtctcattaactgcccaagggctgaggagtgtgggcgcacaccgccggactggagggcagctccgcccacggccctgatggtggattcactaggtgaagccagctggcttcctcagtagagttgggactcggagaacttttatgtctagccggaggattgtatatgtgccaatcagcactctgtctaccttggggttcatgggtgcaccaatcagcactctgtatctagctaatctggtggagatttggagaacttttctgtctagctaaacgattataaatgcactaatcagcgctcggtgtctagctcaagtttgtaaacacacccatcagcaccctgtacctagctcaaggtttgtaaatgcaccaatcagcgctctgtgtttagctcatctagtgggaacttggagaacttttgtgtctagctaaaggttgtaaatgcaccaatcagcaccctgtgtctagctcaaggtttgtaagcgcaccaatcagtgctctgtgtctagttaatctggggaggacttggagaacttttatgtctagctagaggattgcaaatacaccaatcagcactatgtgtctagctcagggattgtacatgcaccaaacagcaccctgtcaaaatggacaaa

SEQ ID NO: 10897 - DNA, 1663 bp, Artificial sequence
  DNA replication origin
tcagggccgtgggcggagctgccctccagtccggcggtgtgcgcccacactcctcagcccttgggcagttaatgagaccgggtgccggcggaggaggggggcgcccgttaggggaggcttgggccgcctgggagtccactgcgggggactcgggcgtggcgggctgcaggtcccaagccctgccccgcgggaggtggctgaagcccggagagaattcgagcgcggcgagagcgggccagcggtgctgggggacccggcgccccctctgcagctgctggcctgggtgctaaacccctcactgcctggggccggcagcgctgacggcccctcccagtgcggaacccgcgcccgctgggaactcgcactggcccgcgagcgccgtgagcagccccggttcccgcccagcgcctctctctccacatctcgcaagccacacctcctggcaaacacagggagcaggctcaggcctcagccagcccagggaggggctcctacagtgcagcggcaggctgaagggctcctcaatcttggccagagcggacaccaaggccgagcaggtgctgagagcgagccagggctgctagcacgttgtcacctctcagcatggtggcacgcacctgtggtctcagctatttggaaggatcacttgagcccaggaattagaggttgcagtgagctgggatggcaccactgcaccgcagcttgggtgtcagagcagcaagactctgtctctgaaaaaagataaaaataaaagagacagatgaattgtgcccaatggccctagatgtagggcctccactataccacatatgggatgggggcgtgagtcacagaatagcatcctttctggagtgtcctggcggagacacatgttctcatagtgtagcagcagagttacctattcctcacttccagcttttgatggttttgctatttttcatgtctgtttttctaatggttctagcacagctcttactaagtcaagttgagaagctggccgagtggcttccatcccttcgccctttctccccacctggcagctccgtggggcagtcaggggcatgggcctgggagctgccctggctgacgtgaaaacaggctccttccagtgtgaaatggggccagtaatccttgccgcccctgctcttaggagggttgtgtgcagtggctgttccctccaggttttccaaagtgcccacggagagtgaaacggtgaatgaatgaatctaagccaaggcatcatgtaggagtcagtggctcacaataatttgtggtgaggtgtgcctgaagatacaaaatgtgtcattaaaacacacacaggggcaccgtggctcacatctataatcccagcactttggtaggccgaggtgggcagattaccttaggtcaggagttcgagaccagcctggccaacatagtgaaaccccatctctactaaaaatacaaaaattaggcgtggtggcacatgcctgtaattccagctacttttgttgggtgggggggcggcgctgaggcaggagaattgcttgaacccaggaggcggaggttgcagtgagccgagattgtgcattccaggcattctagcccgggtgacagagtgagactcgatctcaaaacaaaaaacaaaaaaaaaactagctccaccaattttaatggcttacta

SEQ ID NO: 10898 - DNA, 1005 bp, Artificial sequence
  DNA replication origin
ccctcagcctgctgggaggtgtggagggagaggcacggaaaggaactggagctgcgcgcggcgcttgccggccagctagagttccgggtgggcgtgggcttggctggccccgcactcggagcggccgggcgaccccgccggccttgggcagtgaggggcttagcccccaggccagtagatgtggagggtgcacggggtcccccagcagtgccggcccaccgaggctgcgctcgatttctcgccaggccttagctgcctccccgcggggcagggctcaggacctgcagcccgccatgcgtgagcctcccctgccccacgctgtcggctcctgcaaggcccgagcctccccgacgagcgtggctctctgctccgaggcgcccagtcccattgaggacccaagagcagaggagtgcgggcgcagggagcgagactggcaggcagctccacctgcggccccagtgcgggatccactgggtgaagctagctgggctacccagtctagtggggacttggagaacctctatgtctagtcaagggagggtaaacacaccaatcagcactctgtgtctagctcggggtttgtggatgcaccagtgggcactctgtatttagctaatctggtggggacttggagaatctttatgtctagctaagggattgtgaatacagcaattggcactctgtatctagctcaaggtttgtaaatgcaccaatcagcaccctgtgtctatttcaaggtttgtaaatgcaccaatctgcactctgtgtctagctgatctggtggggacttggagaacctttatgcctagctaagggattgtgaatgcaccaatcagcactctgtgtctagctcggggtttgtaaatgcaccactcagcaccctgtgtctagctcaaggtttgtaaatgcaccagtcagtgctctgtgtctagctaatctagtggggacttagagaacttttgtgtctagctcaaggtttgtaaacgcaccaatcagcaccctgtc

SEQ ID NO: 10899 - DNA, 1419 bp, Artificial sequence
  DNA replication origin
cgtgggtgtgggtgggggtaaccggcgcgggcgccgagatagcgccgggcagagggacccggctaccctggacagcgcatcgccgcccgcccgggtcgccgcgccacagccgctgcggatcatggtgagtggggccgcgcgccgccaccgacaccgccgcgctttctttctctcctggacccacgcaccgggcgggaaagggccgagcgggcgccggcgcgggcgctgcgggttcgccgctggaacccgctaccctcggaggggccgggtccgcgcgggcctggggagcgggagctgagcgtttgggccgggggcgcgcgggtcggcccgaggcccgcgggtctcgggaactttgtctcggtcccctctccccggtcccgccccggcacctcgaggcgcccgctcgcgcccagtcccctgttgcatgcacggggccgggcgcccgggatgcccgaggaagccgcccctccttcgcggcggccattcccgcgcgcagcccaccctccgaccctccggacccccgaacctgctctcgccaccgcccgccgacgcctggagcggagaacggcgtttcccgcgcgcggcacacaccctgcctcgggagttctggggttcgggccctaacggtcaagctcttgcccctctcctcccttcaccgcgcctgcaccccgggggtgtgtctgtgcactcgtgggtgcctcctgggtttgcagattggcttgggaagcggctgggtttctatcagtgtctgggctcggaggggcttctggtgtgttctttccgacaactcctctctctgcccgatttcccaggccagtcctccactctggattagtaacgcttctttctcctcggcagtaagctgtgtgtgtgtgtgtgtgtgttcacccgtgtccgatgaactgcctgacagtaagctgtgtgtgtgtgtgtgtgtgtgtgtgtgttcacccgtgtccgatgaactgcctgacagttttagtagcagagcctggttctttggttacaaagggagaacatctgttgtgccatcctcaaaggactggtctttaggcaaaatgtgaaatccgcgtttgtcttcagtggtccatattcagtgtttgcctcacccccttcccgtagggttttctctccacttcaggacttgttaaaataagcgcacttcctttctcttccccactccatctgattttgctctggctacccttttaggcacgtaccatctgcctgattatgtgtgaccacttaatcttaaaattccaacctttcctaccccgcccaccacagtgtatattccccttgcctgcttcatttgtcttctcttgagcatgtattagttagcgtactgcatattttgtttctttagcttgtttcttgaacgtctcctctaccagaatataggtttcaggaagacacaga

SEQ ID NO: 10900 - DNA, 1219 bp, Artificial sequence
  DNA replication origin
aggagagaaagaaagcgcggcggtgtcggtggcggcgcgcggccccactcaccatgatccgcagcggctgtggcgcggcgacccgggcgggcggcgatgcgctgtccagggtagccgggtccctctgcccggcgctatctcggcgcccgcgccggttacccccacccacacccacgcccggcgcgcgcacacccgcccgcgcctccccgccccctcgggctcgcgccgccgccgcgcggcgctccgagcctcggggccgtttcgtccccgccccctctcccacaggggcctcgccggccgccgcgccaggagggcgcgcgggggaggggcgcagggcaagtgaggcggcgccccccgcccctgcggcctcgcgcgccccctcctgggcgaccgacctcgccctcgcgtccgcggcgtcccctgccggccgggcggcgatttgcaggtccagccggcgccggtttcgcgcggcggctcaacgtccacggagccccaggaatacccacccgctgcccagatcggcagccgctgctgcggggagaagcagtatcgtgcagggcgggcacgctggtcttgcttacagttgggcttcggtgggtttgaagcacacattagggggaaatggctctgttcctgcaggtttgcgcagtctgggtttcttaggtttagggggttgggtgggtttctctgggggtgcggtgggaagcggatcagttcggataacggccctgagcaagagtctctgtcccgctcccggcctgacgcggggcttccagcggacacgaccaacggtgagcgcaccctcttcactgtgaacagaacggtggcctcctagagcctgcgcttctagttactttagttgtgtgtgtggcccaagtgaaagacgtcgaaaaaattggacttgcctgagtattacatgaactttcttccatttctccctcaagcatgggaagttggcgggcgtggtggttccctcctgtaatcccagcactttgggaggctgaggcaggcgaatcacttgaggtcaggagttcgggaccagcctgggcaacatggcgaaaccccgcctcttaaataaaaaatacaaaaattagctgggtgtggtggcctgcgcctgtgatcccagccactcgggaggctgaggtgaaggatggcttgagccctggaggtggaggctgcagtgagccgagatcacgccactgcactccagcctgggcga

SEQ ID NO: 10901 - DNA, 1118 bp, Artificial sequence
  DNA replication origin
aaacactgctggcccacccgcgccacgctcgaattctcaccgggtttcagccgcctcccagaggggcagggctcggggcctgcagcccgccattcccgagccccccccatggtgggctcccgcgcggcccgagcctccgcaacgggcaccgccccctgctccgtggcgccgggtcccactgaccgcccaagggctgagaagcgcaggtgcggtgcggcagtggtaggcagctgcgcccgtgacccggccaagggatccactaggtggagcctaggcaaagccagttgggctcttgagtcaagtcctgacttgaaaaactttcatgtctagctggaggattgtatatgcaccaatcagcactctgtgtctagctaatctggtggagacttggagaacttttgtgtctacctaacggattgtaaatgcaccaatcagcactctgtgtctagctcaatgttcgtaaatgcaccaatcaatgctctgtgtctagctaatctagtagggacttggagaacttttgtgtttagctaaaggattgtaaacgcaccaatcagcactctgtgtctagctcagggattgtaaatgcaccaatcagcaccctgtcaaaacagaccaatcagctctctgtaaaatgggccaatcagcaggatgtgggtggggccaaagaagggaataaaagcaggctgctccagcccggcagtggcaatttggttgggtgtgcttgtactctgtgtaagctttgttttttggttctttaaaataaatcttgatgttgttgattctttgggtcagcattgcactgctcttgtgagctgtaacagtcactgcaaaggtctgtagtttcactcttgaagccagcaagaccgtgaaagggtaatgaacaactccagacacatcaccttaagagctataacactcatcaggaaggtatgcagtttaactcttgaagccagcaagaccacgaacccaccagaaggaaaaaaccctgaacctgtctgaacagctgaaggaacaaactccagacccacaacctttaagaactgtaacactcactgcaagggtttgcggctttaccctttaagttagggagaccaagaacccactgatttcagtcacca

SEQ ID NO: 10902 - DNA, 1008 bp, Artificial sequence
  DNA replication origin
acactcgaggaaccgccccctccacccgcagccgccggcgggccactcgtgcacgcgcacgcgcgcgcctctcagcgccggcccctcctcccctgcgctccccggagccgctgcgcatgctcactcccccgctccccgcgacccgccgccctccaacagccggtcggccccaaagccctccttctcgctctcccctcgcgctgcagcgcgcgtggctgacggcgccgagcgacggcccgcagtggggcggagggaagcgcggtctacgtcactggcgccaccgccgggccttactgctgattgggcgctccaagggaaccgcctccacgccccccacccccggaccccgggcgcgcgccctgagagaccgggagacctggatccctcgccctggcccggctgggtgcgcgcggtgcgggcggcgtgggcggtgcgggcatttcgggggcccgcgctgcaggggcagccctgacccaaggtggggctgctgaactcggtgaggtggatactgtgacagttcagatttttgccttaaaatgtaatgctttttgataaagatgcttatgtataacttttttaaaaaggtgtcactatctcagcatttagatatattaatttgcggggttttttttctgagcctgaatcgaatgacctggataggtcacttacttgcagaatgcatgttaaaacccctaaaacacaaacagacctgcgttatcattctgctaatccctcttcccgcagcaagaacttgggcctcccggggttccaggacctgcctgacattacctgtttactccaggctcggcaggtgtcctaatcctcaaggccatcgccggctctagcccccctttttttgatggtagtattcttttatctaagttgcgtctgttatttttttccctcgaacttaaactagatctctctccccacgctttgctgtctgtcttcatgtccagcgttagccagaggagcatctaaaatccaactacaagttaaactcctcga

SEQ ID NO: 10903 - DNA, 1284 bp, Artificial sequence
  DNA replication origin
tcggcgacccgagggcgggcaggcgggcggcaggtgccgccgcagcctctggctggtcccgcgtctccgtcctccggcggcgatgagctgggccctgtcgggggctgcacctgccggctgcccatcagcaccggcctcctggcgtgacctcggcctcctcgcgtgtccagtccccgcggcgcggcgctgcccctgagagggagcggcggcggcctcctccgccccgagtcctcgctcgggggccgcgcgaggacggcgcccggccccctcccctccttcctccgtccgccgtcctcaatgtctccccggcggggagggggctgcctgggagacacgctgagcggcccccccacggaggccctccggctgcagcagcagcagcgcccggcccggcgtcccgcagcctccaccagcggcggcggcctggaggagccgcgcacccgccgccgccccccgagcctcgcagccgccgccgccgcccggcacccgaggagagggcggcgggcgcccctcggggaagatgaaggcggaggggggcgaccactccatgatcaacctgtcggtgcagcaggtcctgagcctctgggcccacgggacggtgctgaggaacctcacgggtaattgacgcgcctgggctggggacggggatgcggtccgcccctctcctgtcttctccttcctcgggaggggacacgctcctcgccgccccacccccgtgcgcgccccgctcggagctccaggtcccggcgaggaaggtgttaatcggagccactctgcgcgtgtcccgggggcgccggctcccgccacccccttccctgagtcgccaggggagcatcagcgacccccgctcctgccccgcacggggagagctcccggtggcggcccggcctctgtagtacgcgcggagtagctttagtgctgagacttgagcgcatttcgcttttattccattaccctcctcccctcccccttctacacacatcgcttcttgctatttacatctttttctgatttagttctttttctttctggcaaatctcaagccaaatgtagaacctaaaatcattgcccacaatggtcgatttactttttcaaccgctaattttttgggcgatgtagataactgagtaaattatagtgggtcaggggctgagctaaggtctagtgcggtctaagcgtgttagcttcatatatctccttcccctcccatttccttttgtctgtctgtctctttccctcaggcctccagctgctgcttctgagacatttgataattttgtgtat

SEQ ID NO: 10904 - DNA, 1234 bp, Artificial sequence
  DNA replication origin
gaaggggtgaggacagacggatcagaatttgtgctttgggcaagtcatacatacatacgattttgtggattttgtcatggttagaggcaggagggccgtgatcagcaggttttcactattacgcgggtccctagacacattcttgactttcaaaatttcatcacagatatgtgaaagattctgtggaagaatataatagcaaaaaaaagaagaagaagagggaggggagaggaggagggggaaggaggaggggggaggagaaggggagaggagaaggggggtagggggaggaaggcgagggggacgaggaggggaaggggaggagggtgggggaggaagagcggagggggaggaagggggggtgaggagggggaggaggaggagaagaagaaagaagaggaagaagaaacagcaaactaaggattctgcctctaaactgacagtagtcaatttttatcagcttccagaagcttctttttttgaatactcagttaaacatgcatcacctttgttttaggaacttggaatagaaaacagagtacaaagaactcatcagaacaccacagacaggacctcttgatcactggagaagctattcaggcagccactgtccccagagaaccccaggaaagaacaaaaacaggggtgtcattttggagccttcagtcaagaatcatctcctgttcttggctgggctgccatgagggtggggtgcacacagagccctgggaaaggaagaaaacacggttgcaacaccactattttgtttcttctaacaccctcctttttccccactcacatttgagcacttacgggcatcatttgttctaaaacaaaggaagaaaaatatatctgttatgagttccctctgtgcttgactgagttacctggcattgggatggcttgttttctgggatgcccagagctgtacacattcctttctggggtgaatacttcgtatagagagacataaacagccaactaggctgcagggagtaaaccctgttactaacttttctttctttggtgctacattcctgcggagataaatatatagaaagacagacagattataaaggaggaagggcattgtgtcagcatgagggctccaagagaacaaaaagggttatcgtgtgcaaaggttgaaaatagaatttaaagctatcaggactggggaaagagttgaggcctcccaggaaaaatctgcaaagaaaacttgaaccttccaggaaaa

SEQ ID NO: 10905 - DNA, 1149 bp, Artificial sequence
  DNA replication origin
ccgcgtgaacgcttctggagccccccttggggaaagtggggttcgagggaggatagtgtcactgaaaagctcaacacacgtttttcttggcgaacagtttggagagggcacaaagtccaccccggagccgcgtccactgggccccgcgccaccctgcccgcccccgccgctgcgtccacggctcgggttcccacgcggccgcccggccgggcccggctcaggcacccccctggcgcggccccgcggccccggccctccgcccagcgcgcggcccggcagcgccgccgccgccgccgccgccgccaccgccacgcggagatcccggaggttcctccccgccggccgccgggtcacgccgctcgtccctcccctcggccctccgccctccgccctccgcgcgcgctgggctttcccatccaccggccgaatcccctcctcctctgggcaacccggcgacaaaaccttccccgcacgccctgccaactctgccccacgcccaggctcttcccaagccaggcgccagacaaaagaaccgagagaaaaacttacccgaactgcaacacaaaagtctgatccaaagcttcctgggtttaacttttaattttaaaaacaaaaaagcagaaaccaaaagcctcctaggttggaagtgggcgtgagaggaaatgctagagggaggcgcttcattccccgggctgcctgtgcccccctttctggcccctgcccggggctttgatgttatctagtgcaccgcctccatcggtttctaccttgggctctgcgccgccgagaagatagacagatcttccgcacttcacttgcaggttctgagagaggcaagcaggtagtcgcgggaaaggacccacactccttagccccgcagtgagagaggaacatttgcacgggcttcctgttgctacctggactgaaatgaacaatccacccctctagtgatcctggagacttgcaccgtatggtctttcctgctagacgcacagcgggaggcctcctacattagattcattttccctccacccgtagcacaaacttgtaagatggtggtggagtatgtttcctgaggctttgttcgggttttagatctcagtttggaaggtaaatattatttcccttctgagacagtcctgcagcctt

SEQ ID NO: 10906 - DNA, 1342 bp, Artificial sequence
  DNA replication origin
cggccccgccacctacccgccgcttcgcccctccccgccccgcccggccgagccgccgcagggacgggagggggacgcgggaggaggtggcagcgcagcccgggggggaggggcggggttagggacgcggggggcgggagccctgggtcgcgacgcctggggaaccagcacacggcgggggcggaggggcgggcccggccagtcacgcggccccgggaaggcctggcggggtcgctcagttgggggcggttggtccgggaagagggacgggacgggcggggccgtagtttctctttaccgtctctttactttctacagcaggatgtgggccggccgctgacgtcatggggtctcccggccccgcccctcgcccgggcagaatgggggagggggaggcggggggggggggggaccccaagggggtttcctcagcaacgcgtagaaggaaggggaaagtcattgtgaaacttaaaactcattaactttgaaaaacaacttttaaaaaaacggagggggcagggtgttggtttggagagtggaaggggacatgttaaccctgaactgaaaccactttttggtggcggatgttctattaaaagagcgaggaaagccaaggttattccagaggccgctccaaagccccgctggtgcttcccagtgccgaagctgcgagcgcaattaacccctgcctgccagcctgacagcttatagggccaacccgggaggggacttcggggacagaaaaggggggtgcggggctggtcgtcggaccgggctccagggaagaggggagagcgtgaaaggggaagagggagtaattagcatgaaccaaggtgtgaccccggctgctagaaagcagtagagaaagcaaggagtggaaatccatggcaaagcagtgaagaggggctggaccagggtaacgaaggttttcagggttagacctaaagaacgttcgcagtttggggcacagaaattccacaggtccacctcaagaagcaaaagtggctggtttaacgggccacctcaaacttgagaggaataaggtgaaacaaaattgatgcaaaaaaaaaaaaatccctgatgaaactaaactggtttccccttttaaggaataaaaatgctaaacgaccatacaaccactaagacagctggccatctgtgcaaacttgaattgttttgttcccttgggcttccataacgacgtctaggtttttcctgctggagttgacccctaaaattcccctgaggaaatcgtacctctggctcatttgagctaagaaaagctcaaaccaccagaatgggaatgattaaaaatggaatactcagtaatggcgagtgtgta

SEQ ID NO: 10907 - DNA, 1385 bp, Artificial sequence
  DNA replication origin
catgccgtggctccgggcgccggcgagcttcgccgcctcctccgcccggcggctgcggcccccgcccgcgcgccccgcgctcccccccccgccccccggcccgctcccctgtttaatatttcagtgctgggtggtgtgagcgccagtcgccggccttcagcgtggcggctgctgggcggcggcagggtggcggacggagcgggggaccggggagcggcggccgccggaggaggttatgtttgtgtttggggttgtcaagtgaaggagggatcccaggcgccgccgccgccgccgcgcgggggtcgcggagatcccgagccgcggccgccgccatcagcagcgcagctccagggccggctgcagcggcagcggctccgccgggcgtcctggcagcaggttcggcgcgggctccgcggcgggggcgctgcagctggggagggcggcggggcggaggggggggggggcaggagcacatcccttcggcgggcggggggcgtgcgggcgcgcgtgtgtgtgtgtgtgtgcgtgtgtgtgcaaccgccgaccttgcagaggggatggctgcgtgcgggagacccttggcacttctgggcgccctcgccgcgcgcgagccgagcaggtacagagggacccagcctccccagccgccttccagccgcagacgcattttgcaagagggtggggggtgaaagagaccaggcctcggcatcccaacctcccggctttgtgggtttctttccctttcgttctttgctctaagtgcctgtttactcccggccacctgggtagtttctttccgggttgggagtgcgcgccagctgcagttgggaagggggcggtgggttggggtgcgggtcggctcgggctcgccttggggtcgggctcgggaaggagttgctggctggagaggggagggggcggcggcggagcaggcggcgaggaggagtctcagggctgccgcgctcgcctcatctcgtcctcctcctcctcagctctctgcatccactccaggctccttcctgagctggcacttccattccccccctcctcctggcatgcgaagcgctttgttcagtgcagcgttgcagaggggttttcccaggctccgccctccacattcattcatgttttttctccttgcaactgtctttacgctttttgatcgtgtcatgtttttgctccatgtagtatttatttctttcccgtaaaggaacggtttatcactcgtcctagtcgctacaatgctgctgtctttggaaatacccacttccccccacaaggatttaaatatgggatggacagctagggacagtgggtaggcaatgaacggggtagcagaaagcctttacggacagggaatgtgcatattttacatttatgctccg

SEQ ID NO: 10908 - DNA, 1044 bp, Artificial sequence
  DNA replication origin
gtgccggggaagcccgcgtgggactcgggcggatgtggggctgcacgcgccgccctcccccaccccgtagctcgcacacacgccctctgcgcaccggagacacaaagagcgcgagtgctgagcgcccgactgcggggggcggcggggaggacgcccgggaggggcgggggctcaacagccggggagggagggagcagggcgggggcgggggcgcggcgccaggggcgttcttacctgcccccaggttaaaggagatcctggcctctgcgaggtacggcgtgtcgctcttggagcgcactctccggatgggccgccggtctatatcatcctccgaggatgccgccattaatgtgggaggcaggagcagggtcgcccggcgagctgagagggagaaggagacggagggagagggagagaggcggaagggggaggaggggagaggaagaggctcgcgcacgggggagggggaggggaagggggaggggagaggaagggaaggggtggggagggagtgggaaagagagggaaaaaggaaaaaaaagggagagagaaagaaagagagcaaaggagagaaaggggtgaagggagagaaagaaaatccgttaaggatctgtggactggagcagagatcaggctatccctggctggcgcccggggctcccccagactcctctcccagccacagggccgaggggccagtgcttttggctgacaccccgcctcccgcctgcagccccagtttccagcccttggcacagataggctcttgcgaaagggacgactccaacgcagagatgcccagtcagcactgtgccctctcccgccaaacgcgcttacgctgcccaagtgcacactacggtctccttcacccacaggctgctctatgtgagcgtgccgcgcccgcggtcccagctccgtgcgtggagttactacttctggggtgcaagccctggtcccgctggtcatggaggagggcattgtgcccagcccagccctctctactcccttactgccaggcaagagctcaaacagaaagagaactag

SEQ ID NO: 10909 - DNA, 1240 bp, Artificial sequence
  DNA replication origin
cctccgtctccttctccctctcagctcgccgggcgaccctgctcctgcctcccacattaatggcggcatcctcggaggatgatatagaccggcggcccatccggagagtgcgctccaagagcgacacgccgtacctcgcagaggccaggatctcctttaacctgggggcaggtaagaacgcccctggcgccgcgcccccgcccccgccctgctccctccctccccggctgttgagcccccgcccctcccgggcgtcctccccgccgccccccgcagtcgggcgctcagcactcgcgctctttgtgtctccggtgcgcagagggcgtgtgtgcgagctacggggtgggggagggcggcgcgtgcagccccacatccgcccgagtcccacgcgggcttccccggcacggggaggaggaagtgctgtcagtgaccacagtgatcccgggaataacccggagcccgggccgcgcgcccatgcgcaggctgcgggcgcggggtctggcgaggctccccgggcgaggttggctggcgcggctactacggggtggaacttgttggtgacattcagactctgttggctttgacgggttgacgccgccgctgcggtgttggagtggggagagggggcggggctggccgcctggaacggaaccttttccttgcaccaagcagctgggaagctaccgtgctggtcataatagcatggtctggagaatgcacgttaggtgacttgatgctgtccctggaactggtgcccaaagtggcccagatcgaattaagtgaaaagggtaactgaggtacatgaaggagagaagaaatgagaagggaagatagggaggaaaggaaggaaacgagggaaggcagtggggcgctagggaagaaaagaaggaaggagggaaggaaggaaggaaagaaggagggaaggaaggaaggggggaaggaagggaggagggagggggaaggaaagcaacagaaggaggactgagggattcagagtcaaaaaatgcctcagttgagtccactgaaggttactcaatgagtaaagtccagcatctactgttccctctgctgctgctgctcctaactcgactctagagtgccttactcgtgtgtggtcactatcactgggaagaagttgttcaccactaacttcatagctctgccttttctgaatgactcctaagcttccatcctagtttgttttctcttcctgtccaaggtcccttattattctagcaac

SEQ ID NO: 10910 - DNA, 1038 bp, Artificial sequence
  DNA replication origin
ggggcagcgaggtcggcgaggtcaagaccctttcggcgccctccccgacccgccccgccgcggcggtgcttatatagagcggccggcgcgggcggggcgggggcatgctggcgaggccgaggggcgcgagtggcagcgcgcgggggccggagcagcgcccggccccgggcgcccgggggccggatggcggagcccacgcgctcagcgaagccggggaggtttgcgctccgttcgccgcgctgcagggagggcgcggtgccaggcgcgagcgccgagaaacccaaaaagaaagctttttatttgctgaggatgaagcccctgaaggagcccgcccccaacaacaacaacaacgtgtcctttgtgatccactgtcaactaggcaaggagatcaaacacatttgcagcaactgcagtcggggggaggacgcccgggacggtgagtgccggggcccgtcggggcggcggcggcgagcgcgggaggcggggaggtggctcgggctgtctcagtttgggggcaccgccggcgtctgtcgcctggaaaactgcggggacatccgcactccacccagacatgacagccgcccgccgggcactttgcagagtgccacccacagcccaacccgggctcgcaaccctgcacatcccattgacgtatatggtccccaaaatgagggttttgaaacagttaaaagagcaagtctgggattttcatttgggaagccgaggcttaggggatttgtcggtagcaaaagcgctgactcctgctttttccttccatgggcttcttaactgttgccccgtcctcctattatgatgggatacagggtttgctggactgcgttacggacatgggcttccttcgggtggcatcagtttggagaggcggtttggctgcggcgcccagagccctagagacttgtggagttgttgaatgacgcctgtttagagtaaaacatggctgtgatttttggagtgccgctgctggtccctgctggaatgatgcccaaagaccaaaatgtggagaggtgggggaggggg

SEQ ID NO: 10911 - DNA, 946 bp, Artificial sequence
  DNA replication origin
tgcactccagcctgggcaacattgagcactgagtgagcgagactccgtctgcaatcccggcacctcgggaggccgaggctagcagatcacttgcggttaggagctggagaccagcccggccaacacggcgaaaccccgtctccaccaaaaaaaatacgaaaaccagtcaggtgtggcggcgcgcgcctgcaatcccagggactcggcaggctgaggcaggagaatcagacagggagggtgcagtgagccgagatggcggcattacagtccggcctccgtttggcatcagagggagaccgtggagagagagggagagggagagggagactgtggggagaggaagagggagagggagactgtggggagagggagagggaaagggagagggagagggggagggggagggggagggggagggggaggccaaatagattttcaatggagacgaaataaccttctattggaagatgccatctaggatttcttacgggggagcaaagaaagcagtttcttgagatgggagtctacttctgataaagatgctgtgaacattcttaaaatgaccaaaaaggattgagaatattatattaacttagttgagaaagcagcagcagggtttgagaggactgactccaattttgaaggaagttctattgtgggtaaaatgctatcaaacagcatcacatagtgccaaaaaatcgttcatgaaaggaagggtcaatcaatgctacaagctccattgttgtcttatttcaagaaattgccacagccgccccaacctttagcaaccctgatcagtcagtaatcatcaacatagaatcaaggccctccatcagcaagaagattatgacttgctgaagcctccgatgatcattcactttttttttttttttagcaatacggtatttttaaattaaggtatgtacattgttttttggacatgatg

SEQ ID NO: 10912 - DNA, 1228 bp, Artificial sequence
  DNA replication origin
gcatgctgccttcaagcatctgtttaacaaagcacaacttgcaccgcccttaatccacttaaccctgagtggacacagcacatgtttcagagagcaaggggttgggggtaaggttatagattaacagcatcccaaggcagaagaatttttcttagtacagaacaaaatggagtctcccatgtctacttctttctacacagacacagcaacaatctgatttctctttcctttccccacacttccccaccttccactcgacaaaaccgccatcgtcatcatggacccttctcaatgagctgctgggtacacttcccagacggggtggcggccgggcagaggcgccccccacctccctcccggacagggcggctggcggggcgggggctgccccctacctccctccgggacggggtggctggccgggcgggggctgccccccacctcctggagggggcggctgccaggcggagacgctcctcacttcccagacagggcggctgccgggcggaggggctcctcacttctcagacggggcggcagggcagagacactcctcacctaccagatggggtggtggtcgggcagagacactcttcagttcccagacggagtcgcggccgggcagaggcgctcctcacatcatagacggggtggcggggcagaggcgctccccacatctcagacgatgggcggccgggcagagacactcctcacttcctagacgggatggcggccgggaagaggcgctcctcacttcctagatgggatggcggctgggcagagacgctcctcacttcccagactgggcggccgggcagaggggctcctcacatcccagacgatgggcggccaggcagagacgctcctcacttcccagacggggtggcagccaggcagaggctgcaatctcggcactttgggaggccaaggcaggcggctgggaggtggaagttgtagcgagccgagatcacgccactgcactccagcctgggcaacattgagcactgagtgagcgagactccgtctgcaatcccggcacctcgggaggccgaggctagcagatcacttgcggttaggagctggagaccagcccggccaacacggcgaaaccccgtctccaccaaaaaaaatacgaaaaccagtcaggtgtggcggcgcgcgcctgcaatcccagggactcggcaggctgaggcaggagaatcagacagggagggtgcagtgagccgag

SEQ ID NO: 10913 - DNA, 1152 bp, Artificial sequence
  DNA replication origin
atcgctgtcaaaaccctaggtgagcgacccctaccccgcatcctccgtcccacccccgccctttaaccttctctaggttccttcccccctgcctttccctctccgcatcccagaagcttaccctgcatctacgctgccccggggatctgagatcccagatccgactcagagctccctccttcctcgtccccggccttccccacctttgcgcttccctcctgcctcctggcaccacttggacgcgcttccccacgtgtgtagattgcaggctggagaaggcgtgtgttccggggatccgaactaggaagatcagatgccgataataggggatagggtgctccgcgagaagaggaaagttactcctcagctgtgtgtgtagtgtccaagtgtgtgtgtgtgggggggggggatgggggggtggaggagggttgtgcgcgcgcgcgcctgggagaggcgagtgcgcgcccagaaacgcctgaataaaaggccgcacacgtgtgtcgggttttcttgggtgcgatagaggacctgcccttcagcagcggtggcgccctgctagggtcgtttgtttctttctgctgtgagttagtttagcgtgagattgcagatgttaccatcggctggaattatttcgtctgcgctggaggcaaggacggtgggagtggttggatgggggtgatgatgtattagaatgttttcagaggcgtcataggttagtaaagactgatttggtaaaaccagggggttttaacttttgactgcagcctcccgggaaatgtcttctgccccaatttggagtaatagattttaaatttttaggaggatgggcgcagtagctccagaggcatggatgctttgcatgagaaaaggccctccctaatcgccttcaggaatagtttcggaaggcacagtgttgacccgtgggctggagatgagttcagggtgcctcaccatctggtccctgctcccctcaactcccaggcagtctgaacaatctctgaggacagagtagcagcctctcagcctatgctcaggggaaagagaagggcatgttttgttcatcatcagttcttgcacgtaacctaaaacaatcccaggaaggttgcttgatcttacaattccaagaaaatgagcagctcacctttgaaagct

SEQ ID NO: 10914 - DNA, 1157 bp, Artificial sequence
  DNA replication origin
cagctcgggatcccagtccggcgcgctccgggccgcatccttagccggcctcctggcggccgcgggattatttcattcccaacggagagctaggaagaaaggagactcccccgcggagcggttccgtgctctggcagggtgtagacgtttgtctgtgcgattcgccggctgcgcaaacgacgcgggagagagccggtcccgggctgcggcggcgcggccgcggggatgagccggccatggagcggccttggcggggcgcacgcagcggactggcgctgccgcgggagcgcagcctgagccggggctccagggggcttcgaagcctccggcgccctgggggggtccctgccgccgactccgggaaggacgcgagccccgcgtggcggacactgccgcagtcaccgttctgaggcgccccgagcttgctccgcctgcagctcggtgcgctctgggcacccgggcgccttgcccggtgcacggcggctggcgcaccgcggctagattggctacaggagcggggtgcaggactggctagaggtgggtgtgtgcgcgcgttggactggagatccgagcagaagcagaaccaggcggctctgagcagccatgcttcccggggtgggcgtgttcggcaccagcctcacggcccgtgtcatcatcccgctgctgaaagacgagggcttcgcggtgaaggcgctgtggggccgcacgcaggaagaagcggaggagctggccaaggagatgagtgtccccttctacactagccgcattgatgaggtgctgctgcatcaggacgtggacttggtgtgcattaacctgccgccgcccctcaccagacagatcgctgtcaaaaccctaggtgagcgacccctaccccgcatcctccgtcccacccccgccctttaaccttctctaggttccttcccccctgcctttccctctccgcatcccagaagcttaccctgcatctacgctgccccggggatctgagatcccagatccgactcagagctccctccttcctcgtccccggccttccccacctttgcgcttccctcctgcctcctggcaccacttggacgcgcttccccacgtgtgtagattgcaggctggagaaggcgtgtgttccggggatccgaactaggaagatcagatgccga

SEQ ID NO: 10915 - DNA, 999 bp, Artificial sequence
  DNA replication origin
attcgatgaatatgcatacatttatttagcaaatgtttattgagcgcctactacatacagggcaaggcagtgtgccaggtgccaaggatatggcggaaaaccagacagacgcagagtccccatggctccagaggtgcggggccagccttggccagtcctcctcagtgccccctcgagggcctgggaagggtgcagggtggtggaggtgggggcaagctgggagaagtaaaggctgcggtaagtggcgacggcaacaggagccgaagcaagaggcgggcgtggcatgtggccagggcgacgtatccgtctcgaaactagacacgagacgcacgtgccgcagcggcctcggagaccccctgccccgctgcggccgtacacaccacagcgtctacgcgggggcgggcatgggcctaggggcgggggaggtgggaggcagatgggagcccgccaagactggactgtcttggaagaaggcggctgaaccgtgcgtgcgcggccggagcgggggcgcgcgattggagcaggctagcttggaaggagaccgtagaagtctgcggttccgtgcccagactctggggcctggattccaatcgcaggcctgttgcttatatatgtcaccttgcgcaagtcccttagccttcattgcggctcattcacatcactggtaaaatgggtttacaataaccttaggttgctgcgaggactaaaagggacaatacctggaaaggcgttagtatgatgctcagcacgcaagaaacgctccgggagccgaggttattattatcggctgttcgcacctcgccgggtcccctcacctaccccaggccaaggcgcccactgctctcttccaagggacaggcgactaacctattagggcgcgtcctgcctagatagatgtatttgcttggttggggcggggtttggagtgaagcagggaagagaaggagatggtgagggcaaagaaagggaagaagcggaggggcaggaggcgggcgaggc

SEQ ID NO: 10916 - DNA, 1452 bp, Artificial sequence
  DNA replication origin
ggtaggtgaggggacccggcgaggtgcgaacagccgataataataacctcggctcccggagcgtttcttgcgtgctgagcatcatactaacgcctttccaggtattgtcccttttagtcctcgcagcaacctaaggttattgtaaacccattttaccagtgatgtgaatgagccgcaatgaaggctaagggacttgcgcaaggtgacatatataagcaacaggcctgcgattggaatccaggccccagagtctgggcacggaaccgcagacttctacggtctccttccaagctagcctgctccaatcgcgcgcccccgctccggccgcgcacgcacggttcagccgccttcttccaagacagtccagtcttggcgggctcccatctgcctcccacctcccccgcccctaggcccatgcccgcccccgcgtagacgctgtggtgtgtacggccgcagcggggcagggggtctccgaggccgctgcggcacgtgcgtctcgtgtctagtttcgagacggatacgtcgccctggccacatgccacgcccgcctcttgcttcggctcctgttgccgtcgccacttaccgcagcctttacttctcccagcttgcccccacctccaccaccctgcacccttcccaggccctcgagggggcactgaggaggactggccaaggctggccccgcacctctggagccatggggactctgcgtctgtctggttttccgccatatccttggcacctggcacactgccttgccctgtatgtagtaggcgctcaataaacatttgctaaataaatgtatgcatattcatcgaatgcccgcttcgcacccatttggtgccgggagaggggactaaaaagtgaaaggcacgtcttctagctgaaggtctctggagaggtcatgggtcaggtcatgttcatctcctgtcttcagcactgggctcaatgtagcacatggtctgccgcaacacgagtggaaaacgtgatacttgcaagagtttaaaacaacttgtaacaactggcagtgaggcggggcgcgtggagagagcaggataccaaaaaagctgtgtgtggcaatgcggggtggaggctgacctagggcattagaagaaaggcacaaaggacacagtgctgggtggctggcagcagcctggggaggactgagagacaaagaggggtgttgccctcaatactaacaggcttcttttgagcaggggttttgtaagaaccaaggcaggaacgcctatctgggcacaggggcaggcagtggtgtcagacccaaggggctggatacatcacaggcttgtcacatgtcagagatggccaggctttcagggagcagaggatgtgcagtagtggtcggagcacagctagagccactggcgttgacttctggctctgccatttactagctgtgggaccttgagcaaatcacttctctgcggcata

SEQ ID NO: 10917 - DNA, 1010 bp, Artificial sequence
  DNA replication origin
cggacctgagccacggctcacctggggcagctcgcgcccccgaatacagtctcccacgccccgccccccggggtgcctccctcccagctctctgtacccacccaccatcccccacatcccttcctccaaccgctagccagtcaccagcccgggaccgcagggcagaggccgggccgcgcatgcgcaccgcggaccggtgccacctccgctcgcgagcccgcggcaggccctgggcggtgcgcgcagtcccgcgagagcagtgcttggtcgggacctcgaagccggagcccgagcgggagaggccgcggagaccccggcccggcgcaggcagagacgcacctgcgggaggcgggcgcgccggctggagaggaggccgtggggcggagcggctcagcgttctgctcggctgcagcggcccctgccggagacccgggcgccgtggtcttctttataattgaaggattgtctctctgtttttatttggggtgggggtgggggtggggggcggcgcagtgacttgcttcgactttgtcagcttccagggttcattccactgcccaaatatgtagtgagttactaccggctttgcttcctccttcagcaaacggctggaccacacaacttcaggagagaggattttaaatgttagggtcattttccctaaaacgatttcaaatgacggtgagttggttcccaggctaggccacctaacctcgaacgcaatgacgagtgcactctgactgctgagctgagagccttccgtggctctgggacccagtgactcacgtggctccgcatgtccccgttcccttaaaatcggagtctttccttttcttggattccggcttgccaccagcaccacttggcagaatggaattgcttgcgggcatgtcagtggactagaaagggaagtaagtggtctgagaacttgggggccaaaaatgttacattaacattttttgcctacctaaaatctcagccacttcccacagtttggctggaaattcagc

SEQ ID NO: 10918 - DNA, 1406 bp, Artificial sequence
  DNA replication origin
tggaagctgacaaagtcgaagcaagtcactgcgccgccccccacccccacccccaccccaaataaaaacagagagacaatccttcaattataaagaagaccacggcgcccgggtctccggcaggggccgctgcagccgagcagaacgctgagccgctccgccccacggcctcctctccagccggcgcgcccgcctcccgcaggtgcgtctctgcctgcgccgggccggggtctccgcggcctctcccgctcgggctccggcttcgaggtcccgaccaagcactgctctcgcgggactgcgcgcaccgcccagggcctgccgcgggctcgcgagcggaggtggcaccggtccgcggtgcgcatgcgcggcccggcctctgccctgcggtcccgggctggtgactggctagcggttggaggaagggatgtgggggatggtgggtgggtacagagagctgggagggaggcaccccggggggcggggcgtgggagactgtattcgggggcgcgagctgccccaggtgagccgtggctcaggtccggagcgcggtcgggacacagcgcctctaggagaaagcctggaaggcgctccgggggtacccagagctcttagcgggccggcagcatgtgcggggcccaaggtcttccgggctctgcgtgggggtcgctgcggctggagaccagggagggggatggaaacggggttggaaagtaatcccacccgagcaggtgggcatgggaggccgctgtgctggggagccccgcgagggctccgaacagagcctcccttttcagaaaggtcaccctggtcattgcagctgccagggtgaccgaggaaggtggccggggtggaggcagtgggcgtggagaggggtcggattccggacgtagtttgaaggtggagccgtcaggttctgctgagcagcttggctatggggcgtgcgagaagggaaggctcagggcctagtccctgggcacgagtagtagccgggaggatgaagtcccagtgcttcggggggaggcggcttgaggacggctctggagctcaggcttgcccgcgtggagtggaagctgcctcttggacacagggcggggaggccgcatgcagtctggcgcgctgggaggatgggagatccagaggggcagggctggaggggtaggaggaaaacctgaagagggtggcgcccggaagcccgggaaagtgatgaactgggtcagaggccgggtatcaacaaataggagggtggagacgaccttgaggaaagcaggtgatggaacgggagggaatggggccccctagtggagacacctgggagtgatgtattgcatttatttagctcttaggcgttcaaaaattatttattgggagcctgtacaactttttgcagttcattgcattatccttag

SEQ ID NO: 10919 - DNA, 1129 bp, Artificial sequence
  DNA replication origin
tgggcaatgatttcttggataggaccccaaaagcaacaaaagcaaaaatagacacatgggattgcatcaaactaaaaagcctctgcacagcaaagaaaataattaacagagtaaagagacaacccacagactgggagaaaatatttgcaaaccatgcatctgataaggggctcttatctaaaatatataagaaactcaaaaaactcaacagcaaaacaaaacaaaacgaataacccggttaaaaaatggacaaagaacctgaacaggtattcctcaaaagaagacatatgaatggtcaacaaatacatgaaaaacgctcaactttgctaaccaccagggaaatgcaaattaaatcacactgagctaccacctcacgcttgttagaatggctattataaaaaagatcaaagacaacaagttttgtccagaatgtggagaaaagggaaccctggtacactgttggtggaatgtaaattagtacagccattttggaaaacagtatggaggctcctcaaaatctaaaaatagaattaccacatgacccagaaatcctacttctgggtatatatacaaaggaattgaaatcagtatgttgaagagatagctgcattcctgtgttgttttcagcattattcacaataaccaagatatagaagcaactaagtatccatcaactgaggaccggataaagaaaatgtggcacatatatacaatggaatactatacagtcttaaaacagaaggcaattctgtcatttgcaacaacatggatgaacctggaggacatgaggccaagtaaaataagccaggcacagaaggacaaacagcacatgatcttacttatatacttggggtctaaaaaagttgaactcatagaagcagagtagaatgatggttaccaggggcctggcagagggctgatgtggaagggagggatgttggtcaaaggatacaaagttttagttaggtaagaggagtaagttttagtgatctactgcacagcatggtgaccatagttgatgatgtattgtatatttccaggagagtagattttcaccacaaaaaataagtaggtgaggtgatggatatgtcaattagcttgatttaatctttctacaatgtatacatat

SEQ ID NO: 10920 - DNA, 955 bp, Artificial sequence
  DNA replication origin
ccgccgccgcccccggccaccgcggccccgccgcccccgccgccgcccccgcctccccctgcctcagcggctgcccccgccagcgggccgcccgctcccccgggccttgcagcgggccccggcccggctggaggagccccgaccccagctctggtggcgggcagcagcgccgcggcccccttccctcacggggactcggccctgaacgagcaggagaaggagttgcagcggcggctgaagcgtctctacccggccgtggacgaacaagagacgccgctgcctcggtcctggagcccgaaggacaagttcagctacatcggcctctctcagaacaacctgcgggtgcactacaaaggtactgggcgtgtgtcctgcggtgggagtggggcactgacccgacgtggccggccgccgctgcgccgctctcgacccgcccccgacccccgccctcgcgggctctgccctcggaggccactcgccgcctgttgtgctgctccgggtgggcgcgggggtcgcggtgaagggtccgagggtgaggggcgagattcttggaaaaggaaggtgagtagaatgccccagggtagaaaggagctggtaatcctagaccaggagcaggacaccttgagggaatccgggatgacaggacagaactggctttctgatttccctgggagataaatcttggggcttgggtagaggaatccatggactcggagttgggttacattgttctccaggtggtgggtcaggcgttctcctcttacaaggggggaagagaggcacgattctgaggtatgatttctaattaagagagagcagggatacacagggggaggagtaatcaaaattaggccagagattgtctagggggacaaaaggacaaggggcccaagtttgccatcaatatattttagtaaaagcaaccgggagggtaagagaagggaaccccaggaac

SEQ ID NO: 10921 - DNA, 717 bp, Artificial sequence
  DNA replication origin
ccggcggccgcagcgacagcgcccccgggaagcagaggaggaaggagagaagaggtggaggtggccgcaggctgagtcgcggccgggatgtccgggcagccgccgccgccgccgccgcagcagcagcaacagcagcagcagctgtcgccgccaccgccggcggccttggccccagtctccggagtcgtcctgccggcgcccccggccgtcagcgccggctcttctccggccggctcgcccggcggcggtgcgggcggcgaaggcttaggggccgcggcggccgccctgctcctccaccctccgccgccgccgcccccggccaccgcggccccgccgcccccgccgccgcccccgcctccccctgcctcagcggctgcccccgccagcgggccgcccgctcccccgggccttgcagcgggccccggcccggctggaggagccccgaccccagctctggtggcgggcagcagcgccgcggcccccttccctcacggggactcggccctgaacgagcaggagaaggagttgcagcggcggctgaagcgtctctacccggccgtggacgaacaagagacgccgctgcctcggtcctggagcccgaaggacaagttcagctacatcggcctctctcagaacaacctgcgggtgcactacaaaggtactgggcgtgtgtcctgcggtgggagtggggcactgacccgacgtggccggccgccg

SEQ ID NO: 10922 - DNA, 947 bp, Artificial sequence
  DNA replication origin
gcggctgtttcccggcgggcgggccgggccggcgcgagacgctgcgcgcgggcggcgctaggcgagggggcgggacggaggcgcgagagaggcgcgagcggtgcgagggggcgggccgcggggctcccggctgtgcgccgcgaggcgtcctcccgggcccgccagtcgctcgtgggcaggatcgctgggctcccggcgccgcaggtcccttcggaggtgtccgcctcctctcccttggcggccgccgtcgcccccctcgccggcgaatcccctcccacttgacttctttttgttgtcgtcgccccacctccccaccgtagggctcctcggagccgaggcgccgcttctcgtccaggcgagagtaatcgagccccgctggggccgccgcgagcccaggccccggggcgctctaggacccgtcggcccggggcgtgcggagcggctcaggctccccgcgcagtgctgctagctctcgcctcagtcccgttcccgtttgccgcctccctccaaagaggaacgcattgcctttggtacttcagtgtttaattccgtagcattgaccatatgggcagtagaaaccacttctgaaggcagtctcccacttagaatagtgactgtttcattaattaattttacgaggactcacagtgaacttaacagtggtagaagatgtcattaataaagaccggcatatcttcaaaaagcaggagcaggcactgtatgaatacaagattatagtgtgtgtttaggaagggcttctagagacgtcagaacattttatagactcgttaattttcataacagggttcttaggtaacagaaaattatgcccatttttaaaacaaggaaatatttaccgagatcagcagagtcaaaaataggacttcctactttgcaattcccaatagaatgcttcgtcgactaatttggcacaacttgccaagtgt

SEQ ID NO: 10923 - DNA, 1443 bp, Artificial sequence
  DNA replication origin
ctccgacggtctgggggcgctgcgccctcgcgccccggcggcccgcggcggcgtgtcacgtgcctcaccgctgctcctcctcctgctagtgccctccccgcgcttggccgccgcagccccgcgccggcagctcggggactgggagcgctcgcgcctcgggtatgccgcacccccggccgggcgcagcagcgcgtggaggtgctcaccgggcgtcgccgctgccgccggcgcccttccccagtaccacggcccggcgcctgcactcgtttcctgcaggagaggtgaggcccgggcgggagaggagagggggctcgtctcgcggggttggacggcggggcggggatctcagctacagcctccccgaggaaaggcccggcaggccggagggcgggtcctccaaggccaccggcatctgcccggagcgtgggtcgaaggtccgggcccgccctgctcggccgcggtggcggggcttagcccagaagagacgaattcctgggaatcccgggcgctaaagttggagggaggtgcgtgctggggcggggagttggtgcccgcccactcctagggtctgcttttgggcgccgccttccaggagttctgtttggcagcgcccagcctgttgggcgttcaaggggaaggggtgtgtatgtttgagcagcaaagctctgggaaatgaagggattgctttacagtttgatttcaaattctgatggaatcattaattcgtggagtcctagcgtctgccctgtccctggcgcttttctagatgtgtgagatatatcagtccacaaaatcttccctctggagcttaattctagcagagcagacgcagtaaatatgtgtgtgtggatatacgtatgcataattgatgtatatataatttatatatacaaataatttttatatattcgtaattcgatgcctggtatagaaaaataggataaggcttgggaagtggaatgggtctccagttgtgaatttaaatagggtgatcagaatcgatttcattgagaaggtagcatttaattagagtcatgcatctcttcaggacagtcgcctactgagaaatgagtcattaggcgacttcttccttgtgtgaatattgtagagtgtgcttacacaaacctggatgctacagcctactacacacctagactatcaggtagaggctagtgctcctaggctacaaacctgaacagcatgttaccgtactgaatactagaggcaatctgaacacaatggtatttgcgcatctaaatgtagaaaaggtagagtaaaaatatgtattatagtctcatagaccactgtcgtgtgtgcccctctgtcctgggctgaaaggtagttgtggggctcatgactatttaaaggaggtgagagagatcactgccctggagatgaggaaagtaaatagaatcaatttattagatagcatattgttgatta

SEQ ID NO: 10924 - DNA, 1257 bp, Artificial sequence
  DNA replication origin
aggccggagccggctccctcggcttgcggggaggtgtggagggaaaggcaggggcgggagccggggctgcgggaggcgcttgcgggccagatagagttcggagtgggcgtgggctcggcgggccccgcactcggagtggctggctggccggccctgccaccccgggcagtgaggggcttagcacccaggccagcagctacgaagggtgcgccggggtcccccagcagcgctgccccaccggtgctgcgttcgatttctcgccgggctttagttgcctccccgcagggcagggctccggacctgcagcccgccatgccttgagtcccaccccgccttcgctgttggctcctgcacggcctgaacctccatgaacgaacggcgccccctactccaccgcgcccggtcccatcgaccccgaagggctgagatcgcgggcccgcaagccgcgggactatcaggcagctctacctgcggccccagtgggagatccactgggttagacaagctgggttcatgagtctagtggggacttggagaacctttgtgtctagctaagggattgtgagtgcaccaatcagcactctgtgtctagctccaggtttgtgaacacaccaatcagcaccctctgtctagctcagggtttgtggatgcaccaatcggcactctgtatctagctaatctggtggggacttggagaatctttatgtctagctaagggattgtgaatgcaccaattggcattctgtatctagctcaaggtttgtaaatgcaccaatcagccctctgtgtctagctcaggatttgtaaatacaccaatccacactctgtatctaacttttgtgtgtagctcagggattgtaaacacaccaatcggcaccctgtcaaaacagaccaatcagctctctgtaaaactggccaatgggctctctgtaaaatggaccaatcagcaggatgtgggtggggccatataagagaataaaagcagggtgcctgagtcagcagtggtaagccagtcaggttgtttcctggggatgtggagggtttgttgttttacaggggttgttgttttactctataattaaagtttataattcagttttttgagttttgtgagttgcaacagtcgttgattaaaaatgtgcggtttcattcccgaagttgatgagcgtattaacgcaccggggaaaatcagtaactccagatgtggggcatcaagagctgttatactccctgagtaagggttgtggtttcatttct

SEQ ID NO: 10925 - DNA, 1163 bp, Artificial sequence
  DNA replication origin
ttttttcccccaaaagcctcgatggcacgccaagaaggaaaataacaacaacaacagaggggcagctccctgagcaggtgcagcccgcgcgggcgctccgcagccgccctccgccgcacagcccctcaagttggtgccaggacggcggcccccgtggtgcccggagggagactccgcgcgcgggccccggcgccgctcggcccgaagtttgccgccccctctcctcggcgcgcttgggcggcccggcgccgtccaggactgcggggctggctgctgccccagcgttggggaggcccggcgtcccgccgacccctccccggccgcgggcgcgatcgccttacctggccggcggcggcccagggcccgggagccgctccggctgcggcggcgcctgggaggggagggaggttcccgtggaggaggagctcgcgcgaggagctagcgggctggcgggcgggcggctttgtctctacggcgctgagccgccgaccctgcgtcaccatggcaaccgccggggcccccccggcccttcccctcagcagtccgggtattcggagaggacaaggacccccgatgggccgccaccaccacaaacacgcccctctctcagtctccctcacaaaccgcctgtttctccccagcgagaggggaaggctaaagcggagcgagcccagggccaagtggtattcgcatcctagtaggcactcctttgcttccccacactggacattccaactcccgtcgcaccaccatcccccccacagacaccctccaccactaccaccaccacacctttctcctgtggagctgtaccctcaaaatggaaattcacttaagggaggagaaagagcaatgcaaagtgataaagtgttgagcaactggtactcggttctcctgttgcaactgccgcagcatgcacggagctgccaagggacgccgtgccgcctcctccctctccccctcctcctcctctctcttttagcaagctttgcctctgctggatgtggtctcactccacccaacccgtgtatctgtcttgttgagggctcccgtaggagagaggggaaagggggctttatctctgatgtaaacactggatacacttgtaacctcagaagctgaaacacaactttcaggctgcagtatggatctcagctgctgcc

SEQ ID NO: 10926 - DNA, 1136 bp, Artificial sequence
  DNA replication origin
ctctccgaatacccggactgctgaggggaagggccgggggggccccggcggttgccatggtgacgcagggtcggcggctcagcgccgtagagacaaagccgcccgcccgccagcccgctagctcctcgcgcgagctcctcctccacgggaacctccctcccctcccaggcgccgccgcagccggagcggctcccgggccctgggccgccgccggccaggtaaggcgatcgcgcccgcggccggggaggggtcggcgggacgccgggcctccccaacgctggggcagcagccagccccgcagtcctggacggcgccgggccgcccaagcgcgccgaggagagggggcggcaaacttcgggccgagcggcgccggggcccgcgcgcggagtctccctccgggcaccacgggggccgccgtcctggcaccaacttgaggggctgtgcggcggagggcggctgcggagcgcccgcgcgggctgcacctgctcagggagctgcccctctgttgttgttgttattttccttcttggcgtgccatcgaggcttttgggggaaaaaaaggtatgaaagtatttacctttggactttcatgtttcatggcattctctttgaggaggggttgggagggtagtaagagggacaagcgaaagatttttacgaatctctgaaaagtgagcccatttttatgcctgtggctgaagcattttgaggaggcttctgaagttcgtttggatattgaatcgaaagacctttttttctttggaaggtgcagttgcacctataactggatggtaagggtagcccggctttccccgactagcaagaccagaatgtagagcagtaccgatactttgtcaaggagatacttggcaccgaggtcattgcttttgtttctagaaggtattgtgttcatgctgtaaggaactggaaagtgccttttgtttttatgtgtagggaggcaatccaaagcacctctggaggcaggtagctgggcggtgtttgcatcggtgtttatgagtgggatgatgaggaccacgatgcggttgccactggggcactggataggttataggtacctttctcagtggccccaacccttgcaatcatttcgtgatagtttgttgcagacgcgaagc

SEQ ID NO: 10927 - DNA, 1463 bp, Artificial sequence
  DNA replication origin
tcccggcttccttttgcgggtcaacggcagcgtcacgcgcgcgagcgcggtctgcaaagcccccagcgctgggcgtcacgcggggattgctgtcgccgctgccagccgcagcagcgacgcgaactcggggcgcccggcccgggcgcgcgggggcggggacgcgcacgcggcgagggcggcgggtgcgacgggggcggggacgggggcggggacgggggcgaagggggcggggacgggggcgccccggcctaagcgggactaggagggcgcgccacccgcttccgctgcccgccggggaatcccccgggctggcgcgcagggaagttcccgaacgcgcgggcataaaagggcagccggcgcccgcgcgccacagctctgcagctcgtggcagcggcgcagcgctccagccatgtcgcgcggcctccagcttctgctcctgagctgcggtagggctcgcgagcgcctgtctcgcctgtcgccccccgcccctccacgacaccccctcccgtcggtcgcttgctcacgacgcgctctctctttcttgtagcctacagcctggctcccgcgacgccggaggtgaaggtggcttgctccgaagatgtggacttgccctgcaccgccccctgggatccgcaggttccctacacggtctcctgggtcaaggtaggtgctgcgatacccacgggctggggtttggtgggctcatttgaagacagcaggaaccatctcccctaggctggcgaccctctgtggctgccaggtgggggcgaggggcgtctcccgcagctgaacttggagtacccagcctcccgtcgcgcctcccccaccccatccgcatccaggtacagggccgaattaggttttgctctccgcagacctcaatccccttcctgtcactgaaggtggcctgagatgaatgatccacttaagatgttttggaagggcagagactctcatttggattaattctggaggccacctgtggttgtgggccagcaggtcaggaagaaagcaacagggacctagatttgggcattggacagggggaatgtctccagacttctgatttcttgtgttttgtgactgtgatgcccatgatacatgggagggggagggggcaatttgaaaggaaaggctaagacacagaagtgacttaggccatttcatccatggtagttatcagtggtcatctcctttgtgggatacccttggcttcctcccctagccctcctcctccttcctctggcagccttgagagcatcaggtggatgcatgagccggagcccgcatgtgtaagaacaggccttgctgctcctactgtaagtggactgagtgacaaggaggctttttcaaggtttcctcttgactgaaacattctcagattctaagatggcaatgatggtgtcattccaaagccaagcagctactgtttgatatcactggtccttctttaagtcaggcca

SEQ ID NO: 10928 - DNA, 1197 bp, Artificial sequence
  DNA replication origin
aaaaggagcattaaccttgactatgcctttagctccagccacctttttaagagtaaattgctgggcaggtgggggagggctagtcacggaacgaaactgcaagccagactgtgtgtgaggaggggaggtgataaaaggattatagggtggaggagcagaggctgaggaagaattgggacctagctcggcctggcgaggagcagcctggggaggaggggagaggtcagatgggtctgtagaaaaggaagattagaaagactcagcgacgcttggggttggtactgaggggacaggcgggagggaaagaaggaagatttgggacgagttgcactgggcacagagactaggaagggactgatgtgtaaaagaatgcctggatgtcaggcacctcagaccgtttgcctattttatgacaagaattatttagattttgcaggatggaaaaattcaaagtgccattttctggctatttggaactactgtcgagtttgtattggggtcaagcggcattgtagaagaaaataaggcatttaggttttaggtcaggtgtgagttgaagaggttttaagtttttgagaacacaggccaagggagtagaaggaggaatggagggtggaaggttgcccatagtgaaggaagcaagcctagggaaaagagagagtagagaaatggagggaaggggttcgggggttcttaccttccagaaaagtgggaaaaggggttggggcgtagagataagaggttggggcatggaaataagggattggggtgcagagatataagaggttggggtgtggaaataagggactggggcacagagatacaaggttggggcacgggaataagggattggggcacagagataagaggtcggggtgtggaaataagggattggggcgcagagataagaggttggggcacggaaataagggattggggcacagagataagaggttggggcgtggaaataagggattgggggttcttgccccatagaaaagcgggacttgccgctaagggtgaaggagaaggggttgaggggtacttgcccctcccccagaaaggcagagaaggggtagagacaaggagagaagaggttggggtacttgcccctttcccagaaaagcaggacttgccgctaagggtgaaggaccaaggcaggcgtccctgcatggtctgacacctttgaaacgtgtg

SEQ ID NO: 10929 - DNA, 1136 bp, Artificial sequence
  DNA replication origin
gtgaccaaggaagggagggaggaggacagaaaggtgaggcctcttggaaaggtctcaaaggtgtgggtgtagcagccctggagaggctggggaggcactgggggttccagcttcaccccagactccctagacgtgaacctgaggcagagaggccactggccctgaggcccatgtgggctgggaccatgccggactctggggaccagaaaggactgacaatggccagcgagtggagggggctttccagctctttggtgatctgcacagttcccctgggccagtaggcttgttaatgatggtgcagggatgtctgctgccccagaaggttgggagatcagagtgggatctaagattgtttaaaataaaaataatatggaaaagtgtactctgatattatacccatgacacaactctgacacaatttaaaaggggaggtggtggagatatagtcaaattcctagagatagaaagtagactggtggtttccaggggctgggggaagggggcactgggggttagagtttggtgggtgcagagtttccatgtggcaagatgcaaagagttctggagatggcataatgatgggaatgtacttatcttagagaactgcatactcaacaacagctacgatggttagttttatgccatgtgtattttatcatgactcacaagccatagaatttggccccaagggtgccaggagcaaagatggaggtagatctaagtcagcttggggacagtcatggagggcttcactggcaggtgccaagtgactgagacccaaaggatgggctggcaggaaagaggtggagggggtgtggaaacagagggtgggactggggcggtcggaagggagcaagggaaagatgagcacacacatacacacatatgtgtgctttcacacttacatccacctgctcacacacccagccagcagagcaccctgggtgcatctggacagcatggctagagtttagaacattaggtgggatggcgagtagaggggagggatcagcctggtttagattttatctggtaggtgatgggaaccattgagtattcttggtggcggctgagggatggtgacataatcagatgggtgttcccacaggatcaccctggcacctgtgcggaag

SEQ ID NO: 10930 - DNA, 1002 bp, Artificial sequence
  DNA replication origin
ataagctcttgccgccaaaagttcactttgtggtagaatttcagagaaggattggattcagataacaaagactacctatatttattgagagacttttaaaatgccaggtactgttctaggcattggggattcaacagtgagcacaagcaacaaagtctaggaggaaaagggcaataaatgaaacatggtacaaaatgtgtcaggagagacgcatccaaagaagaaaaatcaaccaagctatggggacacagataggagaggtgctgctttatgtagtcagggaaagtctttttggtgaggtgcagagacctgaatgaaaatccatttgcatatctgtggggagggctgaccaggccaggactgagacagggagtggcctgttgtgtttgagaagggtaaaggggctggtgtggcaggggagactgagcctggggcggaagggttggggaggtggcgtgggtggggaggtgggcgagagaggacagcaaacaggtgggtgtggggagaccttggaggaccttgtaggcaagggtaagatcactgaattttatcttgagtgaggtgggaagccactgaaagttttgagcagaggaatggcataatctcacatatcacaaaggatgattctggctactgtatagagaatatactatgtgtgcgtgcatgtgtgtgcgtgcatgcgtgcatgtgtgcgtgtgcatgtgtgtgcgcgtgtgcgtgcgtgtgtgtacgtgtgcatgcgtgtatgtgtgtatgtgtgatggaaaacggaagggtagaaacagagagcccactccaaaggctctcgcaatggcccaggcaacacacgatggaggcttaggcccaagtggtcacgcaggggtggtaaagaaacagtaggttctggacatattttgagggcgaaattgacatgacttgagatgaatcagaggcaggagaaggttgaaagctttctgcctggatattatgaagaacggggttgccattgatggagtagggaag

SEQ ID NO: 10931 - DNA, 1782 bp, Artificial sequence
  DNA replication origin
tctccagaggagaaaaaaaatcacatacctatgtagctctaaagagaatggaagcaaatctagaactagtaacacaacttgtttaacagctgtggtgtaattgtgacacttcattgaacaaaactgttcaatgggcagaaagattatcgctattttttggtggcattcagaattatgcttcttgcaaagcatttccatttttgtaataatacatcatgagacagtccatccaaaaagtatcttgtaaggattagattgctctaaacaacaaatatcagttaatagtgtgagtcgtccatagctttcagggccctagatatgataaatagagaaacttggcatctgaattcttaatgcctaaacaatgcgccctcaactcaataactgacattgatgatggcaagggcccccactgatgacttacttggcttcctccatcaaattcctcataaaaaagagggagggttgaacaacaaaacaagggtggcaagcccaaatctttgtccattccaggctcttcaccactgagcagacaaatgagagtgaaagcacagacttcctgctctttctcttgcaacccattaagacttctctctggtaaacaggcctgtggttgcttttgtttagttttgtttagttctcctcccttcccccatttgtttaaagcattgaaagtcctacaattgctgtggccatcattctcccagactacaacctgcacaatggcagggttacaatgggagagggaggctggcggtgattcctttgtgtttcagagagtttcaacgaatttgtcaggctgcagcagctattgccgtgtaggtactgggcgccaaccggtaagcagcaggctcttccgggttgatctgcaggaacacgtttttgccttttaatgtgtcgtgaagcacgggtaagaagctctcgctgagtccttgctagttctcacagttctgacttatgccctgaaaactgtgcagagagcttggagatagggtgttaagaccggcaagaacatccagggctttgtggatgctccgtacccgcccccacctcctctgctgctgtcacaaccccacaccataattggcagtacttctcaggcttgggtggaaagagaaggcagatagttgtaaaaaccagataagatgcactaataccaagggctttagttaaaaaatcttcatagctttttatttcccaaccaccacattctcctaagacttgggtttggtcacctagaatgtgtgcgatcttacatgaatcactaacatgctctgggtttcaatatcttcatcaataaaattagagtagttctcaaagtgtggtccctggaacagcattctcagggaagttgttagaaatgcaagattcttaaaccccaacagagacctactgaatgggccacgctgggtgaggtctagctatctgtgtagttttaaccagccctttagggaatgctgttgcaggctcaagtttgagaccgcctgaaatagatgatcttgtgcattctttctagcactggcatttcttttttcttttgtttcctttttttgtttttttgagacggagtctctctctgtcgcccaggctggagtgcagtggcgcgatctcggctcactgcaagctccgtatcctgggttcacgccattctcctgcctcggcctcccgattagttgggactgcaggcgcccgccaccacgcccggttaattttttttttttgtatttttgagaggtgacagcgtgccggcagcccttgcagccctccctcgctctccgcgcc

SEQ ID NO: 10932 - DNA, 888 bp, Artificial sequence
  DNA replication origin
gggggggtcggccccccgcccggccagccgccccgtccgggagggaggtggggggggggtcagcccccccgcccggccagccgccccgtccgggaggtgaggggcgcctctgcccggccgcccctactgggaagtgaggagcccctctgcccggccagccgccccgtccgggagggaggtgggggtgtcagccccccgcccggccagccgccccgtccgggagggaggtggggggggtcagcccccccgcccggccagcctccccgtccgggaggtgaggggcgcctctgcccggccgcccctactgggaagtgaggagcccctctgcccggccagccgccccgtccgggagggaggtggggggggtcagcccccccgcccggccagccgccccgtccgggaggtgaggggcgcctctgcctggccgcccctactgggaagtgaggagcccctctgcccggccaccaccccgtctgggaggtgtgcccaacagctcattgagaacgggccaggatgacaatggcggctttgtggaatagaaaggcgggaaaggtggggaaaagactgagaaatcggatggttgccctgtctgtgtagaaagaagtagacatgggagacttttcattttgttctgcactaagaaaaatttctctgccttgggatcctgttgatctgtgaccttacccccaaccctgtgctctctgaaacatgtgctgtgtccactcagggttaaatggattgagggcggtgcaagatgtgctttgttaaacagatgcttgaaggcagcatgctcgttaagagtcatcaccaatccctaatctcaagtaatcagggacacaaacactgcggaaggccgcagggtcctctgcctaggaaaaccagagacct

SEQ ID NO: 10933 - DNA, 1002 bp, Artificial sequence
  DNA replication origin
ccacccgcggcgcgaaccgcctgtggaatcgaggaatcgcgcgcgtgcggcccggagccgcgggggagggacgcgaggcttccccggggaaggcctcggagcgtggcggtgaggggggcggtgtcagggaggggttggagcccgtcctaaggaaaactgggccacgcaccaagaggaatcctcggtgcgaactagttgatcggcggcgcctgctgcttgtgccgtgcagccggtgtcacctcaggacagcgcctcgcgtctgtgtacagagcgtgctgcgggcgcctagggtagtccgaggtcacccctctccgcgccccgcagtcgcgcacgcccccacgcgcggggtgggcggtggccgggggtcgccgagtggaaaggccacgcccccccacgcccgggctcggcacgctgcccctgggtcgcgaacgcgcctccgctcgacccgcttggaggacgtcgctggtggcccaggagtgaagccccggcggctgcctcctgagaaaagatagccgtgtttaaagagactgaacgggatctttgctttgccgggcgtattttgtgataaaataccacaaaatgttgagacaaaaatgagtggaatatggagaccgagccgcacagacacgcaattgtaaggaaacatctcgaacaccgagtgccaggaatatcaactgtccgggccacgcaagagcctgctttttacctgcctccagccccctgtcgtgctggtttaatcgctgaaacaaatgaagtagcaggccctggcatagcgctttgggccttcgccttattaacaactttgtcaagtctcgcatcgcgattctgccttgttaatttccttgtttttcgctgtggttttggagaagcaatgttttccatgatctctcaggctagcctcggaataaaacgtggcagaagcgctcccgcgaacacatacccatatattttattctacctattccctagagtctgctaacttcaaaagtctagatactcaca

SEQ ID NO: 10934 - DNA, 2340 bp, Artificial sequence
  DNA replication origin
ccccggccaccgcccaccccgcgcgtgggggcgtgcgcgactgcggggcgcggagaggggtgacctcggactaccctaggcgcccgcagcacgctctgtacacagacgcgaggcgctgtcctgaggtgacaccggctgcacggcacaagcagcaggcgccgccgatcaactagttcgcaccgaggattcctcttggtgcgtggcccagttttccttaggacgggctccaacccctccctgacaccgcccccctcaccgccacgctccgaggccttccccggggaagcctcgcgtccctcccccgcggctccgggccgcacgcgcgcgattcctcgattccacaggcggttcgcgccgcgggtgggggcggggcgcgcggggagggggctggcggccgccaggggaggggggccggggcccggggggcggaggagggccggcgtggggagttcctcgctcgcggaccacacgctccgcgggccaatcccgagccagcctctagcagtgtcgcacgcgggacacgtccaagcgtttgttggcacggccagtgagggggagggggcgaggaggagggaggggagttgagtgacaggctttgcggggcaggctgggaattgtagttcccagcttccgtggccatagccattttgtagtcgggggactacaacttccagaagatcaaggggaccattctaaggtgccccgggaataggcggctctccccggggccgggcgtcctggggcactcctacccagcagcccggctgcaggtagacgcgaaggcagtggcgggggctggcgtggggcggccgtggggtgagcggcaggcaggggaaagggggtgaggtggagcgacggagcgtgccatgcattgagctagggagcctctctcaattccacgcctgggctcggcgtgggagcgacgcccgagggcttgcctgggaggggttcgtcgaggtcgctcgggtgtctggttggccaggctgcgggggtgccctggactgggccaggggcggtcggcaccaggctaagcgggcgcctggcggctgagcggtgggagttttcggctggcgcccggcggggaattatccgaggagccctaacttgtataaaagcagagtccatttaaagttgggctggatagcctctctctcattggttagggggcttggaaaaaagagactcggcgagccctcgctgtggtgctgccgccgccgccgccgccgccgctggagttgactcttctgctcgcactgctgctgcagcacaaacgtgacttccaacattttttatttatctttcccttttcttttccaagatgtaactacggatcagacactaaggaccttcacgtttcgctgatgtagtttttggaggaaaaaggggggggagtgaagggcgtcggtttttttttgtgtgtgtgtgtatgtgtttcgggggaaattttccattatgagtgttttactaaagtgaatttttttttgtttgcttcgttcgtctttggctctttttttttccttcccaatttcggatttatttcaaggcgaatctggctttgggggaagaggaagaaaagtcggattacaagatcaaccaccaccaacaacaataaaaaccaccaggatatttttttgcaaatttctgacggctttaaattcatgaagcaattgtccccttttgcaatcagcatttggatctcagaatgagcaaggaaagacccaagaggaatatcattcagaagaaatacgtaagtgctcctaacaacacatcctttgacttgcagttttaagcaatggctgtgaatgtcaagtttatagataattctgcctctgaagggttttaaacacagcgtccgataaggctgtttcttttttttctgaaagagggcttttcaagcaaagtggtgtctgcctagtttggttgaaaaaacagactggtgtagagatacctcaagtgaataaattgacctcgaatgacacaaccataatctacttttagatgaaaggcaagggattttggtggagcttgaggtggggggtggctgcggtaatgtaactaaactgcattctcaagcggatttggccccgtattgcactttgcatgcaaatgagcctgtgttattattattaatgttatttggaaaaatcgtgtaacgcatgtgtgttggaagccctttaagttgcgatcgagggtccgattatggcgatcttctctttgcactggcacatcaaatttaatgtctgtggtcgttttggcttatctggtttgcaacataaaccagttgggaatcatgttacagcgaatgcatttgttgggattgactttaataatgaggctggt

SEQ ID NO: 10935 - DNA, 1108 bp, Artificial sequence
  DNA replication origin
agaagggctggggcgccggcgcgcggcgggggaagaaccggggggcggagagggggcgcgctgacgtctcgccggcttaacctgttgctctcgagactgcgtcggagcccgcaggcagggccgcgggaagccggccgggccgccgccgccatgctcggccgtgtgcgcggtggggggcgcccgctgcagctgtgcgccgcgcgccccctccccggcacgcccacgcccccgcccccgctcccaccccctccccgcgcgctctcccctccccgcgccccgcaggccgcgccacccccgcgccccacccgccctcctgcccgcctgcaagccggcccgggtagaccggtgcccgcctcgcgcgcccgcctagagcccggagtatgccccctataggccgcgcgcgcgcgcccgcccgcccagccccggcccagcctgccgcgacccccgcgggccgtccctttcgcagccggctcgaggacgtcgggaacaccggctctgctcccggtgcattaactcgtgccgtgcctcccgcagccgccgccagccacgggcttgcagccggacgcccggactcggagacacgatccgctgaacgcccgcaataagaaagaaaacccaccccacgctgctctccacctcaacgaggtccggaatgggaggcggggtgcggttctcgtccaagttctaccccatttgctttgtggctgcatccgaaacggacgtgccccgggaaggcgtccacgctccaagacaaggttgcctcagtgcagtttctacagcccgagtttaaactagtcctttgcattctacccagccctctgcaatgcggatgtattttaattcttaaattctttatggaacagctttctaagttgggcttgattatttaaccttgcatttctttcatagttgaagttgacgtgtctagataaggatcagctctcttgaagaggcattcagcttttccattaaatatatttttttacaaaaccagtgccccgaaggtcatctctcattacacacaccacaatgatcaaaaagggaaaatattaacaccaatttgtctacccaacttaaataaactttcctcttacgttgcattattcct

SEQ ID NO: 10936 - DNA, 1108 bp, Artificial sequence
  DNA replication origin
gtggcgcggcctgcggggcgcggggaggggagagcgcgcggggagggggtgggagcgggggcgggggcgtgggcgtgccggggagggggcgcgcggcgcacagctgcagcgggcgccccccaccgcgcacacggccgagcatggcggcggcggcccggccggcttcccgcggccctgcctgcgggctccgacgcagtctcgagagcaacaggttaagccggcgagacgtcagcgcgccccctctccgccccccggttcttcccccgccgcgcgccggcgccccagcccttcttccctccctccgccccccgcggcgctcggttccccgacgctcccggccgcactctgttgtcattgtgacgtcacaaagggacgggctcgggtggaaccttcccctcctcctccgtgacgtcaaaagtcgggcgggaggctccaggcgcggcggggcggcggggggaggagggagctgggcgggggcgggggctgccgcagagccgggctgcggcgtgggaggaggaagaggaggaagatgcgctcggcctctgccttccgctccggagcgtcgcgcttcccaccaggtgagggccggggagccgtaggtccccaaaggagtgccactggaccctgttctgatgccacttgggaagcggggagcggggaggaggcgcctcctttctgcaggaatgttttcacttcctctgttccaggtctcctgatggtgttgcattactagcgtggtgcatgtgtcccctctccagtgcttatgtaaagaaatgaaagtattcagggaaagctgtgctttgttggaggaccgcgttgtggatttggccaccttgtcacttgaagtcgtgttaggggtgcttcagcaggatgtggccggatgcctttcatgatgatgctgcacagcagcaactgttgctctttctggaagctttgtggtactacggtgggggggctttcctttgctgtgccggctctgtacctactgactgttattttggggggctggaccaaaggaagacttgtcattgataaatgtactgagaagagcacaggactcctttaagtctcaaggtgctctgggcttagttcttctgagcagggaaac

SEQ ID NO: 10937 - DNA, 934 bp, Artificial sequence
  DNA replication origin
cttcctctgttccaggtctcctgatggtgttgcattactagcgtggtgcatgtgtcccctctccagtgcttatgtaaagaaatgaaagtattcagggaaagctgtgctttgttggaggaccgcgttgtggatttggccaccttgtcacttgaagtcgtgttaggggtgcttcagcaggatgtggccggatgcctttcatgatgatgctgcacagcagcaactgttgctctttctggaagctttgtggtactacggtgggggggctttcctttgctgtgccggctctgtacctactgactgttattttggggggctggaccaaaggaagacttgtcattgataaatgtactgagaagagcacaggactcctttaagtctcaaggtgctctgggcttagttcttctgagcagggaaaccagaggctggcgttctgttttctcttttgtaaaatggaaaaatacctgccattgccacttaactaagtcactgaaaagatcatgtgcatggaagatgtaaaacagtatgcctctttataagtaaggtggcattattacttgagctggtggaaggcagcacgtttcccacaattggtctcaaaagcccgggatgcctgctgagttgccatttagtttattaccttagcaaagcagagttgggggtgcgattgtcgatagtaggctttgggagaaatgattgttatatttcgtaataaatgatgtccttgagaaactcataagttgcagtgtaatcctgtcttaattgtgttgagcacgactcccactgcaataccttaaataactgaaaacatttgcctttgaaagccccaatcgacttggacaataaaaacagttgcatgttttgctctagagatattttctgccgtttccatcattccactgcctggttattcctagggagaataacagataggata

SEQ ID NO: 10938 - DNA, 1000 bp, Artificial sequence
  DNA replication origin
ggtcagcccccgcccagccagccgccccgtccgggagggaggtgggggggtcagccccccgcccggccagccgccccgtctgggaggtgaggggcgcctctgccaggccgcccctactgggaagcgaggagcccctccgcctggccagccgccccgtccgggaaggaggtgggggggtcagccccccgcccggccagccaccccgtccgggagggaggtggggggggtcagccccccgcccggccagccgccccgaccgggagggaggtggaggggtcagccccccgcccggccagcagccccgtccgggaggtgaggggcgcctctgcccgggaggtgaggggcgcctctgcccggcagcccctactgggaagtgaggagcccctctgcccggccagccgccccgtgcgggagggaggtgggggtgtcagccccccgcccggccagccgccccgtctgggaggtgaggggcgcctctgcccggccgcccctacagggaagtgaggagcccctctgcccggccaccgccccgtctgggaggtgtagccggcagctcattgggaacgggccatgatgacaatggcggttttgtggaatagaaaggggggaaaggtggggaagggattgagagatcggatggttgccatgtctgtgtagagggaggtagacacgggagacttttcattttgttccgtactgggaaaaattcttctgcctcgtgatcctgttgatcggtgaccttacccccaaccctgtgctctctgaaacatgtgctgtgtccactcagggttaaatggattaagggtggtgcaagatgtgctttgttaaacagatgcttgaaggcagcatgctcgttaagagtcatcaccactccctaatctcaagtacccagggacacaaacactgcggaaagccgcagggtcctctgcataggaaaaccagagacctttgttcacttgtttatctgctgaccctccctccactattgtcctatgaccct

SEQ ID NO: 10939 - DNA, 1274 bp, Artificial sequence
  DNA replication origin
gggcagaggcgcccctcacctcccagacggggcggctggccgggcggggggctgacacccccacctccctcccgcacggggcggctggccgggcagaggggctcctcacttcccagtaggggctgccgggcagaggcgcccctcacctcccgggcagaggcgcccctcacctcccggacggggctgctggccgggcggggggctgacccctccacctccctcccggtcggggcggctggccgggcggggggctgaccccccccacctccctcccggacggggtggctggccgggcggggggctgacccccccacctccttcccggacggggcggctggccaggcggaggggctcctcgcttcccagtaggggcggcctggcagaggcgcccctcacctcccagacggggcggctggccgggcggggggctgacccccccacctccctcccggacggggcggctggctgggcgggggctgacccccacctccctcccggatggggtggtgccaggcagagacgctcctcacttcccagacggggtggctgccgggcggagggtctcctcacttctcagacagggcggctgggcagagacgctcctcacctcccagacggggtcatggcccggtagaggcgctcctcacatcccagacggggcggcggggcagaggcgctccccacatctcagacgatgggcggctgggcagagactctcctcacttcctagatgggatggcggccgggaagaggcgctcctcacttcctagatgggatggcggccgggcagagacgctcctcactttccagactgggtagccaggccgaggggctcctcatgtcccagacgatgggcggccaggcagagacgcttctcacttcccagacggggtggcggccgggcagaggctgcaatctcggcactttgggaggccaaggcaggcggctgggaggtggagtttgtagcgagccgagatcacgccactgcactccagcctgggcaccattgagcactgagtgaaccagactccgtctgcaatcccggcacctcgggaggccgaggctggcggatcactcgcggttaggagctggagaccagcccggccaacacagcgaaaccccgtctccaccaaaaaaatacgaaaaccagtcaggcgtggtggcgcgcgcctgcaatggcaggcactcggcaggctgaggcaggagaatcaggcagggaggctgcagtgagccgagatggcagcagtacagtccagcttcggcttggcatcagt

SEQ ID NO: 10940 - DNA, 932 bp, Artificial sequence
  DNA replication origin
gcggccgggcagaggctgcaatctcggcactttgggaggccaaggcaggcggctgggaggtggagtttgtagcgagccgagatcacgccactgcactccagcctgggcaccattgagcactgagtgaaccagactccgtctgcaatcccggcacctcgggaggccgaggctggcggatcactcgcggttaggagctggagaccagcccggccaacacagcgaaaccccgtctccaccaaaaaaatacgaaaaccagtcaggcgtggtggcgcgcgcctgcaatggcaggcactcggcaggctgaggcaggagaatcaggcagggaggctgcagtgagccgagatggcagcagtacagtccagcttcggcttggcatcagtgggagaccgtggaaagagagggagagggagaccgtggggagagggagagggagaggggggagagggagagggagaggggctaacttatattgtttagaatggaaccattacagagactttcatcctgttctgaatgtgaaggtggccctgcctatctcctttctcattttgcccttttattccactcagttcttcttgtaaagtgtgtatttgccccatcagtctctcagtatgtgtagaaaccagaatggatggattttggtcatttgggtgtggacttgtggtcagaaactctttggaaggatggttatggaggtgaggattatttgtttgaggaatgaaacgataatgtacagttaatttggtgatggtatatttttagatgcaagtaaatacgagatctgaagtgtacgattcaaaagaggtcatctgagttggcgactaaaatagagagcaagattaactgtttatttttatctgtgggtgagtagggggaagagggtagaaaaatttcacgagaacagtggttcttaagcgggttttgtggagact

SEQ ID NO: 10941 - DNA, 1315 bp, Artificial sequence
  DNA replication origin
acctggaattttctaagaacacaccaaaaaaaaaaaaaaaaaaaaggctattatgtcttaattgtcaaggacatgataggtgactagtaatcaatttggatacagtgctagaaaacattcaaattttagggctttttaagggggtaagtagtttgaattttattccaagtgcccaggaggcaattggaagattttaagcaggggagcaacgtgatccgattgatcttttaaataactctttctggctgctgtgtcaaggatggattataggggtgtgtatggcaaaagagtagaatctggaagaactgtctgtgttcccattgaaagaggatggtgccttcgaccaggataaatatagtgaagatatagaaagagaaggaggttccagaaatacttcaggagtagagttgattggatttgatgggttaatatggggaatgaggaaaagaggggaaccagaggtgatttcaagtgtcttaccttgagcaaattggtggatggtggtgtcatttactgaaacggaaaatacaggatgagcagattaaaggtgaacatgcaatgaatgaaattttcaattttgtgtatgttggtctgagatgccttttggatacatgttgtatacatgcttacatgagtaagcaactggtatgaattgacggagagggaggaaggacagggcagaagatagagctgtgggagtcatcggttccttgacagaatttacagcgtggtaatggatagactctatgctatccatctatggaacaacacatctggagaagagagaagagctggggaggctggactgtagccttgggagtggctattaaaataggagaaggggtggagcggaagggagagaggaactatggagtgcttagcaagagaagaaagtgttttaaggatggggatgataaactgcattgaaagccactgagaggtggagaaaaaatcagggcagagaagtaataaaaggcatcagcaacatggaagtcactggtgactcgcgaaaggcgatcacctttggtgtgtagggcacaaaagcctgggggggtaaagagagagtggaaagtaagaatgtcgagacagtcgactattattgccattttatgaatgaagaaaccgaggctcaatatttgactgtctcattcaaggtgaaagccagtggggtcagatcctggacctagaatccatgcaatgatttgtgcacatcgcctattgaagagagagatccaattctcttccaaaacgtaaaagccaacacttccctcaaaggaggcttcgagttaaatcatcctttcacgatgccgcttcc

SEQ ID NO: 10942 - DNA, 916 bp, Artificial sequence
  DNA replication origin
ggcaaccgccccatctgagaagtgaggagcccctccgcccaacagccgccccgtctgagaagtgaggagcctctctgcctggcagccaccccgtctgggaagtgaggagcgtctccgcccggcagccaccccgtccgggagggaggtgggggggtcagccccccgcccggccggccgcccctactggaaagtgaggagcccctctgcccggccagccgcccagtccgggagggaggtgggggggtcagccccccgcccggccggccgcccctactggaaagtgaggagaccctctgcccggccagccgcccagtccgggagggaggtgggggggtcagcccccggcctggccagccgccctgtccgggagggaggtggggggtcagccccccgcccggccagctgccccgtccgggaggtgaggggcgcctctgcccggccgcccctactgggaagtgaggagcccctctgcccggccaccaccccgtctgggaggtgtacccaacagctcattgagaacgggccaggatgacaatggcggctttgtggaatagaaaggggggaaaagtggggaaaagattgagaaatcggatggttgccgtgtctgtgtagaaagaagtagacatgggagacttttcattttgttctgtactaagaaaaattcttctgccttgggatcctgttgatctgtgaccttactcccaaccctgtgctcactgaaacatgtgctgtgtccactcagggttaaatggattaagggcggtgcaagatgtgctttgttaaacagatgcttgaaggcagcatgctcgttaagagtcatcaccactccctaatctcaagtacccagggacacaaacactgcggaaggccgcagggtcctctgcctaggaaaaccagagacctttgttcacttgtt

SEQ ID NO: 10943 - DNA, 1285 bp, Artificial sequence
  DNA replication origin
atttctcaatcttttccccacttttcccccctttctattccacaaagccgccattgtcatcctggcccgttctcaatgagctgttgggtacacctcccagacggggtggtggccgggcagaggggctcctcacttcccagtaggggcggccgggcagaggcgcccctcacctcccggacggggcagctggccgggcggggggctgaccccccacctccctcccggacagggcggctggccaggccgggggctgacccccccacctccctcccggactgggcggctggccgggcagagggtctcctcactttccagtaggggcggccggccgggcggggggctgacccccccacctccctcccggactgggcggctggccgggcagaggggctcctcactttccagtaggggcggccggccgggcggggggctgacccccccacctccctcccggacggggtggctgccgggcggagacgctcctcacttcccagacggggtggctgccaggcagagaggctcctcacttctcagacggggcggctgttgggcggaggggctcctcacttctcagatggggcggttgccaggcagagggtctcctcacttctcagatggggcggccgggcagagacgctcctcacctcccagacggggtcgcggccgggcagagacgctcctcacatcccagacggggcggcggggcagaggcgcgccccacatctcagacgatgggcggccgggcagagacgctcctcacttcctagatgtgatggtggccgggaagaggcgctcctcacttcctagatgggatggcggccgggcggagacgctcctcactttccagactgggcagccaggcagaggggctcctcacatcccagacgatggggggccaggcagagacgctcctcacttcccagatggggtggcggccgggcagaggctgcaatctccgcactttgggaggccaaggcaggaggctgggaggtggagattgtagccagccgagatcacgccactgcactccagcctgggcaccattgagcactgagtgaacgagactccgtctgcaatcccggcaccttgggaggccgaggctggcggatcactcgtggttaggagctggagacccgcccggccaacacagcgaaaccccgtctccaccaaaaaaatacgaaaaccagtcaggcttggcggcgcatgcctgcaatcgcaggcactcggcaggctgaggcaggagaatcaggcagggaggttgcagtgagccgagatggcagcagta

SEQ ID NO: 10944 - DNA, 1472 bp, Artificial sequence
  DNA replication origin
cggcagccccgcgcacaccaaagagaaggcggctgtggcggcagcggcagccccagccatgctgtgttatgtgacgaggccggacgcggtgctgatggaggtggaggtggaggcgaaagccaacggcgaggactgcctcaaccaggtgagggcgaggggcaagaaggggccccggcgggtcccgcgaggccgaggggcctcgcagcgacgcctggcactctggcgcgccccctactaggggccgggaggcactgcggcggcagccggggggagcgcgtcccctcctctccacgggcgtggggcgcgcggtctcctcctggcgcgcgtggggtgcgcggagaaagcgcgcagcgggggtccccagcgctgagggccgggcgcagcccgcagccgggatccaccccccagcgccccatcatccccccaacccagcactttcccggaagaaggcggctccgcacacctgccgcaggtatgtgcgtgatgccgcctgtcgggtccccgcggcgcctggcagtgccacccgcgtgccaggatgggatggagtggctcgaagcagtctcgggccccaggggttcttggcagacaagccgggcccttgtctcacgctgcttctcaggctgctgctctcaaatgcaccgttcacctgcatctccgggtttgcgggggacgggaggaataggtttgggtcatctactgctcggttgtttttaagcatgtgtttccttaacagtgagggagatcggtgccaaatagtgcagaggtggtatggcagacagcacatgtgatcccaggaaaacgctgtgccctcaacccctctagctctgagatgtttggaaaaccgcttgtgaagcttagctgacacttgtggcgtgttccctcaatgtgtttgatttttggagtccaaatggttaaaattgcccagataataagtcgccaaaaatcagctgtgcagagtatgctggtggagggaattccggtgattggaatacgaaggaaaataccctgtagtttcccctcctcatcttttggaaggctacttttgaggactccttttttctctattgcaattggtcatgccctagacgttaaaaggaattatgagcctccatactagagctcgtggtttggtatcattggagccgtggaactttgtttttccagtttagatcaggaattgtaacaccattgaactttgtaaaaagcaccagcaatcttagcctcagggagccgttgggtttgctttgatacgtaccatttgctcatccaggctgcattcctttttgttttaggtgtgcaggcgactgggaatcatagaagttgactattttggactgcagtttacgggtagcaaaggtgaaagtttatggctaaacctgagaaaccggatctcccagcagatggatgggctagccccttacaggcttaaacttagagtcaagttcttcgtggagcctcatctcatcttacag

SEQ ID NO: 10945 - DNA, 1106 bp, Artificial sequence
  DNA replication origin
gctgcaggtggaagctgtctgctagtcactcactgtgtccccgcactcctcagtcatttgggtggtcaatgggactcagcaccgtggggcagggggctgtgcttgtcgggggaggctcgggccacacctaagcccacatagtggggtggggaggctaggcatggtgggctgcaggtcctgagccctgccccgcggggaggcagctaaggcctggcgagaaatcgattgagcgcagcgccagtgggccggcgctgctgggggacccagcacaccttccgcagccgctggcccgggtgctaagcccctctgcccggggccgccagggccgacaggccgttccgagtgaggggcctgccgagcccacaccgaaccggaactcgcgctggccggcaagcaccccgcgcagccccggtttccgcccgcgcctttcccgccacactttcccgcaagctgaggaagccgactccggccttggccagcccaggaagggggtcccttagtgcagcggggggctgaagggctcaagtgccgccaaagtgggagcccagccagagaaggcgccgagagcgcgtgagggctgccagcaagctgtcacctctcaaatggatactagagtctgggaagggtaggagtttttccttgcctgctgcccagatggagcagatttatcaagacgggaactgccagagaaaaagtttaattcacgcagagctggctgactgggagacgagttttattactgaaatcagtctccctgaaatttcagagtctagggttttccaagaatagtttggcaggcaggggaatgggtgctggtgattgggtggggatgcagtcacagaggtgtggaaaacggtccttgtgcgctgagcccgcttttaggtgggggccacaggacagctgagtcgagttggaggcccccctgggaggagtcattaggtcctcagaagtgtgaaagcctgaaaagacaatctgaaaagtgtagctgctgtagaaaacgggatggaggttcctcagaaaattaaaagcagaattaccatatgatccagcaattccacttctgcgtatatactcaaaagaattaaaaacaaggtatctggaggtcg

SEQ ID NO: 10946 - DNA, 1396 bp, Artificial sequence
  DNA replication origin
gagtccatctcctttctaacaacatggatgaagctggaaaccatcattctgagcaaactatttcaaggacagataaacactgcatgttctcactcataggtgggaattcaatgggaaaacttgggacagagcagggaacatcactgaccagggcctgtcgtggggtggggggcaggggggagggatagtattaagggaaatacctaatgtcaatgacgagttaatgggtacagcacaccaacatggcacatatatatatatacctgtgtgacaaacctgcacattgtgcacatgtactctagaacttataataaaaagaaaactttaagatcataaggttggttatttcctgggtcacaaattgagtacgtggtctgattataaacacaagttcctaagcaagtccctgtacaccaataattatggtacaacagcgttctggttatactgttcccagacgaagtagtatgtgtacagtgaggacacccttctgtgggtgcttgtgtctacaattggtgggttttatggtctcactgacttcaagaacaaagccgctgacccttgtagtgagggttagagttcttaaaggatgcatatctggagtttgttccttctgacacttggatgtgttcagtttcttccttctggtggggttcgtggtctcgctggctcaggaggtaagctgcaaaccttcgcggtgaatgttacggctcttaaggcagggcatctggagctattcactcctcccagagaattcatggtcttgctggtttcaggaatgaaactgcagaccttcacaaatgagggtcacagctcatacaggcagtgtacacccaaagagcgagcagcaacaagacttactgcaaaaaacaaaagaacaaaggcaagcgcagcaggttgctattgctggctcgggcagcctgcttttattctcttatctggccccacccacttcctgctgattggtccattttacagagagccaagtggtctgttttgacagggtgctgattggtgcgtttacaatccctgagctagacataaaggttctccatgtccccactagataagctagatacagagtgtcaattggtgcattcacaaaccctgagccagacacagggtgctgattggtgtgtttacaaaccttgagctagatacagagtgctgattggtgtatttacaatcccttagctagacataaaggttctccaagtccccactaatcaggagcccagctggctttacccagagcatcccgcactggggctgcaggtggagctgcctgccagtcccatgccatgcgcgccgacactcctaagcctttgggtggtcaatggaactgggcgccgtgtagcagggggcggcactcttcggggaggcttggacagcacag

SEQ ID NO: 10947 - DNA, 1763 bp, Artificial sequence
  DNA replication origin
tcggggaccctggggacaaacagaacggtgcgcatttccctcccccgtccccattcggtcactgccacgggctgtacacctgagggggaaggacgggggcggcggcgcgaggaggaagggcttcgccgccaatctgtccctaaccagtctgcctctcaacccctgcctgaggcggaggcggtgcccggggcgggccaagcgtgaccgcgggtcggcggggcgtgtttaagaccgcggcgtgcgcacccggcccacgccagctcccggccgcggcacagcagccccggcgctccccgcgccgccccgcgcaggcgcccccgccccgccgtcgccgccgccgcagccaggagccgctgcaccatgccccgcatagatgcggacctcaagctcgacttcaaggatgtcctgctccgacctaagcggagcagcctcaagagccgagccgaggtgggggacgttcggaagtcgcagtggggtgggatttttttttccgggtggcgcggggcaagtgggtggaagggggtggcaccgggttaccctgcctgctttggtgtttgagactggggcgctgcgcccccgttcccgcgccccagcacctgccaggacgtgaggtgtctttaagggcggtgatacgggggcccatgaaattctctacacgtcggtcccgttgggtggcctaggggaagttcacagtgaaactcgaccacagatgagcgagatccagtggccagttggtttagaaggaataggggtacgagggcgcttatagcaagaaaaggaaactggagctaggggagagaggacgagaaaaacaactgcagatcccggtgatttttggctgcgtctcctagtgctgataattgctgctgctttcgcttcgggtccagcggtggaacttcgtgaacgcgtctgaaaaaccagaacccagggcacaagttcagggtttcctttctgagtttggcggccttgctggcagtggggcttggggactcagcggtactggacagcccgcggtcccagcctagccctggagaagagtttcgaaagctttggggtgagagaggtgggggcgaattggaagcctcgggcatttccctggttctgcctggatgtcctcaaatcctaaggaacaggtggagaccggactggaaatagcctgaggctgggggaagggaggccagtccctgaaggataaactagttgcctgaaaggcagagtgccccggggtggtgtgcgctggtgactggctttgctgagagctggagaggaaggtgaggaaaccggacacggttgaaggctggggctgaaggagtaaacacgaggaggctgggccaacctgcacagctccgtccactcagctccacaaacaagaccataaataaatcccctcagcaaagaagtccgctgcccactccggtgccaggcctaactgcagtgcctggggctgccagccgagggcttgcttggattggggaagcctccgcgttagccaatgactaaaccaagtggccttctgtaagcagcagcattggctggtttggagcccggcaggactggaggacgtaggggaggaatgattaaaacttatcgccccagattgggtgaccctgtgcctgtccctcatgacctttcaggtgctaaagagggggcctctcttggaacaaaaacagtttggagggcaggcctgggcctctggaagcatgagctgtagccaattcctaaggcaagaccaagatgaaatagggggattctggatgtgctaa

SEQ ID NO: 10948 - DNA, 1349 bp, Artificial sequence
  DNA replication origin
attaaatcctgttgtggggtttgagggctggaatttaatttttggagttttctttaatgtcgggagcagattgggtaataaagtgtattttgagaataagacggccttttgaacttttagggtctagggctgtaaagcgtctcagggttgctgccaaacgagccatgaactgggctggatttttatatttgatgaaaaagagcctaaacgctatccgatttgggataaagaaaaaggagcattaaccttgactatgcctttagctccagccacctttttaagagtaaattgctgggcaggtggggagggctagtcacggaacgaaactgtaagccagactgtgtgtgaggaggggaggtgataaaaggattatagggtggaggagcggaggctgagaaagaattgggacctagctcggcctggcgaggagcagcctggggaggaggggagaggtcagatgagtctgtagaaaaggaagattagaaagactcagcgacgcttggggttgggactgaggggacaggcgggagggaaaggaggaagatttgggacgagttgcattgggaacagagactagagagggaccgatgtgtaaaagaatgcctggatgtcaggcacctcagaccatttgcccattgtacgacaagaattatttagatcttgtaggatggaaaaattgaaagtgccattttccggctatttggaactactgtcgagtttgtattggggtcaagcagcactgcagaagaaaataagatgcttagattttaggtcaggtgagaattgaagaggttttaagttttttgaggacacaggctaagggagaagaaggaggaatggagggtggaaggttgcccatagtgaaggaagcaagcctagagaaaagagagtagagacacggagggaaggggttcaggggttcttaccttccagaaaagcgggaaaggggttggggcgtggaaataaggggttgggatgcagagataagaggtcgggttgcagagataagaggtcggggcacggaaataagggatggggtgcagagataagaggtcagggcacagaaataagggattggggtgcagagataagaggtcagggcacagaaataagggattggggtgcagagataagaggtcagggcacagaaataagggattggggtgcagagataggtcagggcacagaaataagggattggggtgcagagataagaggtcggggcacagaaataagggattggggcacagagatataagaggttggggtacatgcccctcctctagaaaagtgggacttgccgctaagtgtgaaggagaaggggttgggggtttcttgccccccagaaa

SEQ ID NO: 10949 - DNA, 1014 bp, Artificial sequence
  DNA replication origin
gccagcagagtggaataggcctccagctgggagcgctgggatggagtggtggcccctgcggccgaggccactgcactggtgacggggttggcggttggggggatcagctgtgatgggatgaagctggcataggttccactgtattgggaggacccaatgaactggaaggtgtgcggcaggtgagcgtactgcacgggggacaccggggtccctggctgcggggtggcgtacgcggcaggcagcgtggtggccacggggacagacctgggagcgctgggcggggagtagtccagccctgtggacaatgctttgtgtaaacctattccctgttgtaaaccaagctccaccgaggtccctgccggcccatgcctcccgcccccgtggccccggccaccagggttgcccgggagccatgctgtgccctccacccggtggttgtcgctgggcagggtaggggccttctcctcggaggaccggctggtggcggggatctcgcgcttcttgggaggcaggcattcgttgctccgctcttggttggatttcatttttcgccgtcccccctccacggtgactgtttcactgtctggatggctctgattttagtctgataaacggaaagtcacatttgatttctgtaggggatccaggctcttcatgaggaatcatctccccgtgggtacaatccgccaacagcagctctggatgctgggaaagggaagagggcagtgacaaagggaaaaggaaagggaggagaaagggaaggagggaaaggacatcagaacatgagcaccggggaaagaacatctttggcaagattaagactaggccctggactcggtgtgaactcccataacccaatcataccccaagcactgaagcagagaaaacactagccaacactttgggaggccgaggcaggcagatcacgaggtcaggagattaagaccatcctggctaacatggtgaaaccccgtctctaccaaaaataaaaaataaaaaacaaatttagcctgg

SEQ ID NO: 10950 - DNA, 1502 bp, Artificial sequence
  DNA replication origin
gggtctcacggagggctggacttctccgcgggtggtcgcccggcctcggcgccctggggcgggggtctcccctcggagggccggcctcgccgggtgtgcggctgcgggcggggaagggactgctcctgcagccgggacgggactttgcgcgcggccgggtgccgggcggggggcgcagaggggtggcctcggggaccgcgcgggggtagcgggtgtgcgggtgcctggagcgcggctggagtggcggtgacggccctggccgccgccgccaccgccgccctgttggtgcggccgcttcctgatcatgtgcagcggcagccgccgcccggagccgggagcccgcgagcgccccagtccgggccggcgcccccgccagcacccgcggcaggagacgaggagccgcggcaggcgctgccctgagccgggagtgaacggctgcgcggctgctgggagggtgaatgaagccaggaggaggggaaggaggaggaggcggcggccgccgcggaggaggcgctgcggggattgggatgcgccctggagccccactgctcgttcactctgggccgggccggagactctgccactcccgggggcgccgccgcctcctcctacgtggttccagtgctgcgcgcaggccggtcccgcagggggcagggaagggggccggacgggcggagcgagaggtgaggcggtgtcggagcgcggcgtgagtgtgagtgagtgtgtgagtgactgtgtgtgtgtatttgtgcgcgcgcgcgccgggcggggggcgagggccgtcgcgacgcggagggggcccttccttggctacttggctgactctgcagcgccccgacccctcttcagccccccgccttcaggctgccttcttaaactccgtggcttgtgctttcattttgtttcagaccacgtagggggctgactgaaagggatgaaacaattcaggttttctagggagattgagcaagaaccttagtgggggtggaagtagggtggtgatcgagactctgccagaaaacaaaacaaaacaaaaaaaaatccgtttctaaggacggcggggattcggttcgagcccgtggctgctctgttttgttttgctttcttggtatataatcctacagataaaagggtaatataaatatttgagaagagggaaattgctgaagagtagtaagggcaaaaaaaaaaaaaaaaaaaaaaaaaaaacagtcggaagaagctggttatataatgcgcgatgtggctaacaagaaaggcaagctatttttattttgtttaccgtatgctgtgcagtagggactcctccaaactggttctgtccccgaagagattcttagcttccctgcgagatccacaggatacaattagcaaaattagaagaccctattacacccacagaataaaaactaatgccttacagtggctttctccctgcacatcctgtcgtgcatgcacgggaatgtgtgtatgcaaataagttctcctttggcaatctagta

SEQ ID NO: 10951 - DNA, 998 bp, Artificial sequence
  DNA replication origin
tccagccgcgctccaggcacccgcacacccgctacccccgcgcggtccccgaggccacccctctgcgccccccgcccggcacccggccgcgcgcaaagtcccgtcccggctgcaggagcagtcccttccccgcccgcagccgcacacccggcgaggccggccctccgaggggagacccccgccccagggcgccgaggccgggcgaccacccgcggagaagtccagccctccgtgagaccccctctctctcaccgccctctccggggaggaggaatgggaagagggcggccgggaaagggaccaccccccaaccccagccgccgcctcccccctgcgccacccggagggaggaggacatggctctccgcacttgcgaccggaccagcagccgggggagcggggcgccgccgccgctctccccgcccgcgccccccgcccgggcgcgccccctagcccggcgggcgcccacccagcccctgacagcccccccgccggccgcccctgcgcccagagtgggggtgtcggcccgggagcctggagccggggacggttgtatgtacacacatacacacacacacacacacacacgcacacacacagaacacgacgcgtcgatttccttcgctcctcttccagctgttttccgtgcagccgattggggttttgggtttgtttgctggttgttgcttttgcccctctcgggagatcgggggaggagggattttaatctaaataaggggagaagggaatgggggaggggggaaagaatcggaggaggaaaaaaaaatagtcacttactgtaaagtgtaaatggatctggggttgcgtggggaagggggggcagagggagagaaacaatgtcttgcggctgctgttgctctggctgctgctccacggggcttgttttggatccccctgcagtgaaacaggtcctgtacggctccgccactgtagtagaaatgatgtctgcggtatactctgctctctcctcctcctcc

SEQ ID NO: 10952 - DNA, 1331 bp, Artificial sequence
  DNA replication origin
gcctactggatcctgcgcctgggccgcggggggaggggagcagggaggaggggggagaagggaggggaggggggagggagggtgcagggggagggggcggggaggggcaagggggcggggagggagggggtggggcaggaggaggtggggaggggactgggggaagggagagggggaaggggcaggggggaagggggggctagggtgggcatggcgggctgcagatcctgagccctgccctgtggggaggaggctgaggcctgcggctgtcagtgctgggggacctggcacaccctccgcagctgctggcccgggtgctaagcccctcactgcgcagggccagtggcactggcaggccgctccgagtgcggggcccgccaagcccgtgcccacccggaactcgcgctggcccccaagcaccgcgtgcagccccggttcccgcctgagccggcttcagccttggccagcccagagaggggctcccacagtgcagtggcaggctgaagggctcctcaagtgtggccagagtggacgctgaggccgaggaggcgctgagagtgagcgagggctgctagcatgttgtcatctctcaaaaggactgttaattttcagagatccaaacaaaacaggggagaggtggcctcaaggaagttgactgggacttagataaatgcaaaaagatggaatctgcttgcagaattgggttcaaggcagaccttctggcctcaggtataggaaaaggccaatgtacaaaagtagatgtaagtaaagctaggtgatggattaatgatggccacaaatctgacacttcttccaacaagagataggatctatttcctacactgttgaatctgggcagcttttttgattgatttgatcaatagaatctgaaggaaattatgctatgctagtttcttgggtcaggactcaaacaagtggcagctgccactactttctgcctcttggcacactcactcttggaaattagctgccatgccgtgcggaagcccaagcagtcttctaaagagaactaagctgagagaaaacaagatccccatccagccctgccagctgactttcagccaataaccagcattaacttgtctgtttattatgagtgagtgaaccatcttggaagtggatcttccaggcccatttgagctaccccagctgatgacagatggagcaaggaccagctgtccttgctaactcttccctaaattacagattcatgagcaaactaaatgattgtcttaaacaactgaattttaaagtgatttgttatgtagcaatagatgaccagaacagtcattatactattatctctactt

SEQ ID NO: 10953 - DNA, 980 bp, Artificial sequence
  DNA replication origin
agatttttcttccttaggaatcaggtgccttgggtggggtgtggggagggtccgcgggaagagcgtccgagcgccgaagcgggcggggggcgcggcggcggggccaggggcgaggaactccgcgcagcttcggctctggtctgtccctcccgccgtgggatctggaagacgagtgccgaggacagctctccacctctctgctcccttcccccgcgggccgggggtcgacgcccggctggggaggggggcgggccggacgcctgcgattggccgcggcagcacctggggcgccgggcgccgccgccccccagctgttgggaacagctgcttctctccccgcgcggcgcggcgctggggctcggggctcccgctctgtagccggcgatggggtagggctggagacgcctgtaggcggcctggctctcggcgtcgcctgctctaaccagtcaaagtcttagggacccggcgcagcaccagccgggacccagggtgcggggactgtgcccaaggaggaagctgcgttgctttccagaggggacgacgcgagctttttgggttaggcctcggtgacagggccggcgacctggactggcgaactggggtccccagaggcctggggcgattcgctgagaggccaatcccctcccgggcgcggggggtcaaggagctcggccgaacgaaacccaagctggacaccctggggtctgaagagtgagaaggagggccccaactttctttggccccaaaaagccagtgcggggaagtatcagagaggtagagccagaaggaaaagaaagatctagcgcttgggtgtagttgggaaaaccattagctttaattgctaccgcccagccaaaccaagtaaccggagatacctatgtccatcaggcaccgccttctatttcagaggaccataagttagtattttagcccccacagtcaccaaatttgtctttcctccctaacttagttattcagga

SEQ ID NO: 10954 - DNA, 1443 bp, Artificial sequence
  DNA replication origin
cccgcttcggcgctcggacgctcttcccgcggaccctccccacaccccacccaaggcacctgattcctaaggaagaaaaatctacctctaaagcacccgcttcttcgcttgagaactaccctctcttttcatttttggcctccccgccgggtgagtggaaaccgcttgcacattctatagaacccgattctaatccagacgatccggagaatttgtacggtgaccggcagggggggcgggaggagagagcgaagtcaagtctccagggccgctggcgacttcggaagccgcgcgcccggcgctctcggccgcccccggccgctcgcccccgccgcgccgccgccctcgcccccgggctcgcccttggcccccggcggccgcgaaagggtgcgggagacgcggagccggaggaggaggcgcagccgctgcccgagccgcagccgcagccggagcccgagccgcggggcgggtgcgaagatgcacacgacccagaaggacacgacgtacaccaagatcttcgtcggggggctgccctaccacaccaccgacgccagcctgcgcaagtacttcgaggtcttcggcgagatcgaggaggcggtggtcatcaccgaccggcagacgggcaagtcccggggctatggatttgtaagttgcacggactgggggtgacggggagggacggagtggcggctgaccccggggatcgggagcttggagtgaggggctcggcgtgacccgtgaggagccccgcgggtagagcggcgctgccccttcgctccggggtgaactgaaactttgctaggggagagggtcggcgccagcctcgcggggttcggagaagacccagcgctgtgcgaggtcgggggccgggcagggcagagcaggggtgaaaggagagacctgtaatgacggcgggatttggggtgcggagggttgcgagggaggggccgcaaccctgaacaattgcattcccgggctggatgccggttgttaagcgcgctgttgctttgtaaaaatgcgtgtgttctggtgttttggctggggcagggaggggacaccccacgaggtctggggctgttgcccttgtgtcatccccccgccttttaactgcaaaggtaggttcttttaaatcatgatcctagggctctttgccgaactgaaacagagcatattaagcttccttcctagagatttaagcgtgcaaattcagctgccgaagagcagggagccccagagtaggacaatagctattgtcgttggggagtgttttcgaggttgggagcgttgggcggatgtaaggctggactttctttaaagcaaacggtgcctctgaggctgagtagggacctggggggcgggggattcgggggaaggaggatctagagttccaagaatttaggcttccaaatctcggctaggccctactaacacccttaagatttc

SEQ ID NO: 10955 - DNA, 967 bp, Artificial sequence
  DNA replication origin
gtgaggcgaatagattgggggacgagaaacaagggcgaaggagtaggtactgccggcgtgcatcaatatggaaggattggtgaagaggtgttagaatttccttggtttgctcttggggaagaatgagcttttgatcttttattatccagtccccttgaagggaggttccttgctgtagtagcaaagcctttttggtgggagggtatctgggtgggactgctggggtgacaaggacgatgggggcaaggagaggagaaagggaggccgttttcctgcctcatcggcctttttatttcctcttgagattttatctgatcctgtttgatgttctcaacagcgtatgactcctgcttcagttgggaggtgtgtggcctgaaagagttgttaagtaagggggccattagtaatgggggttcttttggtgataaggaatcctctcttgccagatggtagcatgggaatgaagaatgtgataggcatacttggagtctgtgtatgtgttgacccgtttgtctttggagagggttagggctctggtgagagctatgagttctgcattctgggaggaggttcctgggggtagggtttagcctcaattacatggtttaaggtaactactacgtacccagcaattttgggagagccgggggctccagaagaggagccatctatgaatagtggccatctgggttagtgagaggctcgaaggagatgttagggaagtgtggctgcaggtgatccagaatgtcagtgcaagaatgagtaggaggggaagaggatatggggagtagggatgctgggttgaggggggtgcttttggcaaggctgaatttgggattttcgataaagagggcatgcagtaactgaattcgggaaggagagagggagcttaacgcctgagaggagaggagatcctgtaagttgtgagggctgtggacggtggtgctttggccaaatgttactttcc

SEQ ID NO: 10956 - DNA, 801 bp, Artificial sequence
  DNA replication origin
aagaacaatagttccttcctgggaggtggggtcaatgtgggtatatatttggagggcctctgtaaggcgggaaagaaattcggcagggtttttgttggctctttgggagatttctttgagcttttcaaaatttacagctttatgggctgctttgttaaggcctatgatgaggcaaataatcatatggttacaagatgcccggtcggggtctgtgggttggtacttccaggggggttcctcctggggagctgcagcagcccctgtggacttagtagggtcttgccgatgaagatcatctgcatgcgcctgtgctgcaagccacactctttccttttcttctgaaaggagagtagaagagaggataatgtagagatcatgccaagtaagttcataagattgggtgagatatttaaattctttgatgtaagtgttgggatcagaggaaaagaacccgagacatttttcaatttgggagaggtcagagagggagaaaggaacgtggacgcaaatgatgccttcggctgtggccacctcttggaggggaagtatgggggctggttgttgggcatgctgagtttgagagcgggtatgacgtggagatggggatgaatcagagtcagaagctgggtggttggagccggggggaaagacagagggcaggagcatggggtggaaggtcatgatgatggggcggaggattattatgttgaaggggcagggggaagtcggcagggtcaaagaagaaggaattgtcagaaggaaaggaagctgaggatgagtctggcctggagtgggcaagga

SEQ ID NO: 10957 - DNA, 1037 bp, Artificial sequence
  DNA replication origin
attcagctgggaggagggagaggggaggagaaggggagggccgcgggaggagggtacgagtggccgaccacggatttgcattgccgaggacgggaccccagggcagcgaagcaggtaatcctgcagcggtcggggcccggcgaggcggggaggggtcggggtgcaggtgcggggggcgcctggcggcgggcgctggcaagttgagcccgatgggtggggtagggaagcggccgggacgctgcggctgtggcagcagcgcgaggggaataaaggcggcgcgggcgcgggggccggggcgcggcgacccgggcgcggggcgcgggcgcgggcggactcccatctgggtcagcggagcggcgcgccctgcccccgcctccccagctccggcgtcctggccgctcggaaggcggggtgcgggcaggagctgcccggggttggcgggcggccgcggcctccccaccccagcgccgccgcccgcccggccgctctaactttggggggtctcgtccaccgggctgtgagtcttccaggggggtgggggtgggagtcattgcgccggctctgaccagagccacctcgatcagaaagtgctggaaagaaacagacctggcttcccctctgcagaacctgacttgaggcgatgagtcacttctaaaaaatgcagaggcaactgagactgggggaacggctcggaaaaacggcacccgccgctggctctctgactgctttgggtagaggggtgttcgtggaagtagccgccgtatcatcacttttagggccaaaaatcaacctgcagatggccttttctttattctcatcagagtggtgttcgctgcaagttgtagcaatatttgaatggatgcattcttaaaaatgagtatgtatgggtgactgcatttaggaagttgaaccgggactaggtccaaacagccagagtggagatgaacacttggtaaaaacatctaggacctttggttttatagttatggaaatgcagaagcttctgggacttgagcactgtagtttactgagtactc

SEQ ID NO: 10958 - DNA, 1288 bp, Artificial sequence
  DNA replication origin
ctggagcaggggtgctgatgccggcagctgtccgcgggtcaggccccgcggccccggggctcaggaagtagaaggggttgtaatagcccagctgcgggggcggcggcgccgcggcctgggggactgcagcgccgcccgaagggaagctctgcggggagggctgggggctgcagtaggctgggaaggcggccaggccgctgtgccaggtgaggtagccgcagtaggactgccacagccactcgtgcacttgccgggagtactcgcgggcgctcagccgagctggtctctctcgtggcgccgcggcttcgggcgcctcgcagcccgcctgctcctgcagctctgcaccggagccggaggccgcctccccgcgcttcctgagctcgcgcggcggctccaatttgtcggctgcggcggcagccgcgaggcccggggctgtgggccggcccggggcctggggttcggcctgggggtcgtcgcgggggcatgggacggcggtggtaggagggcctctcagggaagggacgggctcgtggtcccctccgccatcgtcctgcccgggagggtggcctcgggcttcctcgggcccctcggccatcgtcgcctcagcagcaccctctgggatacctgtcactgctccgtttccctcccccaatggcccctccccaacagccccgtcaccaccgcagcaaccgcaggcgtcaacaatcccccgccggaagcggaagccccgcccctcaggagcaacgcccgccgccaggcggagctgggaagggagggcggggaggtgcgtctgcagtcccgggttcgggccctagtagtcggtggctggtcggtgactgggaccagaccgtcgcctcctcccttttacagctttaagtctgtgacccgaggcctctctgtatattcccgtggggttgggcctagttgtcctgggagaaactagatggatgaggagtatttccgagacaggtcccagggccagcgcagccttttctgttgcagaaccgcgactgttgttttgggatccaggccggagggtttgttgcttgtgttcattccagttaaccattagtactcgagaaggtggtacagaacgcatctatccccttagaagaaaagaaattaaaagccaaactaaactgggatatatattaatataggaaactaccactgagacataggaaagtgtattaaaatataactagtgaggtgctatgtataattcagaggaaggggaaattatgcatgggccagactactaacaaaaggctccaaagcctgggatacg

SEQ ID NO: 10959 - DNA, 775 bp, Artificial sequence
  DNA replication origin
cgcgagctcaggaagcgcggggaggcggcctccggctccggtgcagagctgcaggagcaggcgggctgcgaggcgcccgaagccgcggcgccacgagagagaccagctcggctgagcgcccgcgagtactcccggcaagtgcacgagtggctgtggcagtcctactgcggctacctcacctggcacagcggcctggccgccttcccagcctactgcagcccccagccctccccgcagagcttcccttcgggcggcgctgcagtcccccaggccgcggcgccgccgcccccgcagctgggctattacaaccccttctacttcctgagccccggggccgcggggcctgacccgcggacagctgccggcatcagcacccctgctccagtcgcgggcctgggaccccgggctcctcacgtgcaggcgtcggtccgggccactccagtgacgagggtaggatccgcagccccttcgcgaagcccgagcgagaccgggcgacaggcaggtgagaagcgcgaggtggaggctgggcggagtagaagggttttcgggggcctgtggggtagagctggcacgctttttagacctgtaactgctgcttctactctgattgactatcctgcccgttcagttcactagctatcgtttgtccaggccctaaattcccaaaatgtacaaggaggcaatacagtttcttcttcctttagacctggcactccaaattgactcccttactcatgggactagttgtttattcgtgaaaagaaattgctcttca

SEQ ID NO: 10960 - DNA, 961 bp, Artificial sequence
  DNA replication origin
cagccaccccatctgggaagtgaggagcgtctctgccaggcagccaccccatccgggagggaggtgggggtcagcccccgccaggccagccaccccgtccaggagggaggtgggggggtcagccccccgcccggccagccgcaccatccgggagggaggtgggggggtcagccccccacccagccgccccggccgcccctactgggaagtgaggatcccctctgcccggccagccgccccgtccgggagggaggtggggggggtcagccccccgcccggccagccgccccgtccgggaggtgaggggcgcctctgcccggccgcccctactgggaagtgaggagcccctctgcccggccagccgccccatccgggaggaaggtgggggggtcagccccccgcccggcgagccgcccggtccggaggtgaggggcgcctctgcccggctgcccctactgggaagtgatgagcccctctgcccagccaccaccccgtctgggaggtgtacccaacagctcattgagaacgggccatgatgacaatggcggttttgtggaatagaaaggggggaaagacggggaaaggattgagaaatcggatggttgccatgtctgtgtagaaagaggtagacacgggagacttttcattttgttctgtactaagaaaaattcttctgcctcgtgatcctgttgatcggtgaccctacccccaaccctgtgctctctgaaacatgtgctgtgtccactcagggttaaatggattaagggtggtgcaagatgtgctttgttaaacagatgcttgaaggcagcatgctcgttaacagtcatcaccactccctaatctcaagtacccagggacacaaacactgtggaaggccacagggtcctctgcataggaaaaccagagacctttgttcacttgtttatctgctgaccctccctccactattgtcctatgaccc

SEQ ID NO: 10961 - DNA, 1268 bp, Artificial sequence
  DNA replication origin
acctcccagacggggtggtggctgggcagaggggctcatcacttcccagtaggggcagccgggcagaggcgcccctcacctccggaccgggcggctcgccgggcggggggctgacccccccaccttcctcccggatggggcggctggccgggcagaggggctcctcacttcccagtaggggcggccgggcagaggcgcccctcacctcccggacggggcggctggccgggcggggggctgaccccccccacctccctcccggacggggcggctggccgggcagaggggatcctcacttcccagtaggggcggccggggcggctgggtggggggctgacccccccacctccctcccggatggtgcggctggccgggcggggggctgacccccccacctccctcctggacggggtggctggcctggcgggggctgacccccacctccctcccggatggggtggctgcctggcagagacgctcctcacttcccagatggggtggctgccgggtggaggggctcctcacttctcatatggggcggttgccaggcggagggtctcctgacttctcagacggggtggctgggcagagacgctcctcacctcccagacggggtcgcggccgggtagaggcgctcctcacatcccagacggggtggcggggcagaggcgctccccacatcttagatgatgggcagccgggcagagacgctcctcacttcctagatgggatggcggccaggaagaggcgctcctcacttcctagatgggatggcggccgggcagagacgctcctcactttccagactgggtagccaggcagaggggctcctcacgtcccagacgatgggcggccaggcagagacgctcctcacttcccagacggggtggcggccgggcagaggctgcaatcttggcactttgggaggccaaggcaggcggctgggaggtggaggttgtagcgagccgagatcacgtcactgcactccagcctgggcaccattgagcacttagtgaaccagactccgtctgcaaacccggcacctcgggaggccgaggctggcggatcactcgcagttcggagctggagaccagcccagccaacacagcgaaaccccgtctccaccaaaaaaatacgaaaaccagtcaggcgtggtggcgcacgcctgcaatcgcaggcactcggcaggctgaggcaggagaatcaggcagggaggctgcagtgagccgagatggcagcagtacagtccagcttcggctcggcgtcag

SEQ ID NO: 10962 - DNA, 862 bp, Artificial sequence
  DNA replication origin
gcccgccgccgccgccgccgccgccgcgccccgccccgcgcgcccgcccctccccgggccgcggccgtgccccgcgtcgcgctcccccgggatggcccgcgcgcctcggcgctgcctctcggagctcacggcggagcggcggcggccgcgctcgaggggcgcgcggctgcagcggcggcggcgccgcgcgtgaggggccgcctaaggccgagcgggcgcggcgagcggccgggcgagcgcagccaacatgtcggataccaaggtaaaagttgccgtccgggtccggcccatgaaccgacgaggtgaggagctttccgctcttttttatttctgctcgggctgagggcgggggcaactttagaaactgcggggccgggacggcgagagcgcggccggggccggggggccggggcggaggcggcgtccgcgctggccgtggtgcccggggcgccgtctccaggctcggccgcctccagggacggagccccgctcggcgcggctggcgggcgggcgggctggaggcgcggatgctggactttgcaacgtccctttctctctgctttcagaactggaactgaacaccaagtgcgtggtggagatggaagggaatcaaacggtcctgcaccctcctccttctaacaccaaacagggagaaaggtaaagcgggttccgagagggcggctgggaggatccagcctcgcggggtcccgcaagtttgagccaggaaaatgggagtgctctttcctattgttaggaggacggcttcaagtttgtcgccggctcctgtttgaagctgttgcaagtccaagttcctctcctccctcgccccccttctcctccatctagagcggcggcaggcagg

SEQ ID NO: 10963 - DNA, 1208 bp, Artificial sequence
  DNA replication origin
cgccccgcgcccgccaactcccagctcgcggccctgattggtcgccgcattcccgctctccttcccgaaccgccattttgaaaatcttgttgattctggggagccgagcgcgcggcgcgagcgtcacgccagacagcggcccgcgcgccttctcctcggcgtcggccgccgccgcctcccagaacctcctcgtgccctcgcgtgccaggcccgcggcggccgaaatccgcggtaagggctgcttcgggacgccggaggcccggtcgcccctgccgcggccgacgggggagggacgcggccatttggacggcggcctggggcgggggaggggacgtggagggccggcagctcgggccgggccgggaacagcgcaggccgggcgggcgcgcgcgcacgcggggcagcgggcgcggtttcccgcctcgggaatccctggacggcggcggcggagcgggagggaagccgcccctggggactgagcgctgcggtcccggctatgggaggaggcaactttcagggcaggtgtcccgcgggaagggtagcatcattcagggtggccgcccggtcctgcctgcgggagtaggaggaccgagacgtccggctttcttcccgcatgcaggttcacagcatgtccgcctcggcccctgctgcggagggggagggaacccccacccagcccgcgtccgagaaagaacccgaaatgcccggtcccagagaggagagcgaggaggaagaggacgaggacgacgaggaggaggaggaggaggaaaaaggtggggggagtcgcatcccaactgatgaatttttcagaccgaagtttttttgtatttttcacccaggaaacagttttcttgctcttttggtgtttagaggcgtgaagtcggagtgattttcagcgagaatgtgtgcacaatttatctgcttttgttttgagcgatggcgtagaattgactttgtgtattccggtttttaaagtatttgttagcgtggtagagatgtattggagtgcagccgacttctcgtccgctctaaacgttcgttaacatttcatcatttgacgggaagtttgtaggtcttggatttgatttttttttttacctgtgtgtgtgcacctttgaagttgctaagtggatgttctaattttgtccttttcattacacatcttttgccttttgaagttattgtaaggtcttggtgcagcccgttaa

SEQ ID NO: 10964 - DNA, 1584 bp, Artificial sequence
  DNA replication origin
ggcaggggcgaccgggcctccggcgtcccgaagcagcccttaccgcggatttcggccgccgcgggcctggcacgcgagggcacgaggaggttctgggaggcggcggcggccgacgccgaggagaaggcgcgcgggccgctgtctggcgtgacgctcgcgccgcgcgctcggctccccagaatcaacaagattttcaaaatggcggttcgggaaggagagcgggaatgcggcgaccaatcagggccgcgagctgggagttggcgggcgcggggcgggggaggcggggcggccgggtgcctccgcgggaagctcgggcgggcgggaccgcgaggggtcgcctcggccgcgggcggagggatgcgcgcgcggggctctccccggctgcgcctggagtgtggtcggcgctcgggccccggagtgcgggcgggctgtgtcccgcggggcgggcgggagcgggaggcgaggcggcctggcagcgcggaacggaaggacgctagggggcctgcgtgtttattgtttccacggtcgcttcctggaaaagatgatgagcagtcccgggccgcggaggggcgcggcgggcgcggtaaagaagtttagagatctccgaagtcgctatcgacagtgttactctgaggcggaggagaattaatcagcggtctcatcaatgctccagaaatcatgctgggtgatagataactcccaaatctgtatttctgaggaccgcatcgcttgtaaggtgcaccgaaaggaaaaagatcctacctgccacgttaaaggttcacatagccagccacatagatttacacccctgtaaatataaggggagaggctccctcccaccccattccttctcctctcctctctcacacacactctctgttttataatagaggaaatatgttatttggccgggtccagacccttctcccagagttctaggtcatctatgcagatgctttttacacattcaacactgcagacactcaaagcagtatcttccctgctcaatgctgccttcttttgtatgtgatttcctttattttctcccaactcttcaaccactagctcacctgaaggatccttgtactcagtggacttaatagaaatgtgatcagtgaaatttgcctggactctgggttgcaggacaaaaattagacatttcctttgaatcttcccttttccttttgttccccttccaaaacatacgcgaatagtgtcatttctaccctcaaacggtatgccattttccacactatttatcccactcaaatcctatccacactccacagctcatctctccttcttgctgcctgcaacgtggttgggagtggggggttgtgtttcacccctatttgtgttacagctctttcaatcctaccatttggcaggtcctgagttctggtcctgtgtccaggaagagtgaggcacgcaaacaactggagggtgagcaaggtggacaggagcttcactgagggacagaacagctctcctgagacctgaagtgggttgctcctttctgcaggggggttgtcccgactagcgtcctgccctcagtggagaggagacccatagtgggcagctcct

SEQ ID NO: 10965 - DNA, 1408 bp, Artificial sequence
  DNA replication origin
gctcttgcatgttcctggcgcccgctgtctctgaggagtgggcagctctggccacgccttccatactgcagctggcatcccctcagcagctgctccagacaggctgtcactgccatcaagacaacgagcaggtgaatatatattctatgacaattagtgatagcagtaaagcaagttaaagaagataggaagtaccagtagggtggatgggattttgttttatatattcaacaatgaagcaatgacttattaataagatgacatttgaagagatcctaagaaaatgggagatctgaagacccactaggttattccaaagaatgctctaaagttttggatgtggggcacgagagtcaggtagaaatcagtgatgaccttggggtttttggttcaacaactgtgagaacaggagtagctattcgttgagatgagaaagacttcgggggtgggggtgggcaggatggttttagaggggaaagtgcaggaggtgggaatgagttgttttgttttagacatgttagttttgacaattcaaaatggagattcaggagtggcagttggatttgagagtctggcattcagcagaagaaactctagctcaagaaataaatatagcagttgtcaacatgtagatggtatttaaagccctgaaactgaatgaaatcactaacagggaacataggtagggataaggggatattcaaaattgtaccttggagctctccagtgttgagaggttcaagagtgagaggggaaccagcaaaggagaagagaagagcaactgtagccagtgaagtgggaagagacttacatgaaaattgtgtccgagaagccaagtgacaaaggagtgtttttgaaggagggtgatccactgagtcacatgctgataaaaggtcaggtaagatgagaactgataattgaccactggaaataccaatgttgtgttatcagtgacatggactattctgtggggtggtgagtctaaatgttccaggagtgggaatacagagagacaggtaggcaaggaatggattcagacactctttccaggaatgttgctgtacaggaaaacaaagaaggagcagtagttcaaagggagtttggttttgaagaaaagagacccatgtttgtatgatgatgagaatgaatcagtggagaggggaacattgatgatacaagagaaggagacagtagctgaagccaatctacagtaggtaggtcaggttgggttctctgtaagcagaagctgaaacagaatttgggacaccaggtgattattagaggtgaagaactgtgaagggaagggggaagaagtaagattgggcagaggaagaggtcaaactgcaaagctggcttgacagagcttcagacagctacgaggggagttctggagtgagtgctgctcttc

SEQ ID NO: 10966 - DNA, 1867 bp, Artificial sequence
  DNA replication origin
agtggaggcaaggaattgcaacttttttctattattgtacaccttgaaggcgaggttaattaaatcctgttgtggggtttgagggccggaatttaatttttggagttttatttaatgttgggagcagattggtaataaaatgtattttgagaataagacggccttttgaacttttagggtctagggctgtaaagtgtctcagggttgctgccaaacgagtcatgaactgggctggatttttatatttgatgaaaaagagcctaaatgctatccgatttgggataaagaaaaaggagcattaaccttgactatgcctttagctccagccaccttcttaagagtaaattgctgggcaggtgggggagggctagtcacggaacgaaactgcaagctggaccgggagtgaggaggggaggtgataaaaggattatagggtggaggagcggaggctgaggaagaattgggacctagctcggcctggcgaggagcagcctggggaggaggggagaggtcagatgggtctgtagaaaaggaagattagaaagactcagtgacacttggggttgggactgaggggacaggtgggagggaaagaaggaagatttgggatgagttgcgctgggcacagagactagggagggaccgatgtgtaaaagaatgcctggacgtcaggcatctcagaccgtttgcccattttacgacaagaattatttagatcttgcagggtggaaaaattgaaagtgctgttttctggctatttggaactactgtcaagtttgtattggggtcaagcggcattgcagaagaaaataaagtgcttagattttaggtcaggtgagagttgaagaggttttaagttcttaagaacacaggctaagggagaagaagggggaatggagggtggaatgttgcccatagtgaaagaggcaagtttaaggaaaagggagagtagagacatggagggaagcggttcgggggttcttaccctccagaaaagcgggaaaggggttggggtgcagagatacgaggttggggtgtggaaataagggatcagggtgcagagatataagaggttggggcatggaaataagggatcggggcacagagatataagaggttggggcacggaaatgagggattggggcacagagataagaggtcggtgcacagaaataagggattgcggcgcagagatataagaggttggggtgcggaaataagggattggggcgcagagatatgagcttggggcacttgcccctcctctagaaaagcgggacttgccactaagagtgaaggagaaggggttgggggttccttgccccccagaaaggcgcagaaggggtagagacacggagagaaggggttggggtacttgcccctaccccagaaaagtgggacttgctgctaagggtgaaggaccaaggtaggcgtccctgcgtggtctgacacctctgaaacctggatgaataatcagagaggtgtccctgcaatgattaaacaccaagggaaggctgccttccctagtccgtgaccagtgccagagttttgggtccacagataaaacgtgtctcctttgtctctatcagaaaatgaaaggaattgaaattaaaagaagggagagattgaagagtggaaaggtgaaagtggttgagggacagtgagagaggttggagaagagaggaaaaagaggccacttactggatttgaaattggtgagatgtttcttgggctggttggtctgaggacctgaggtcgtaggtggatctttctcatggaacaaatagcaggaggacaggggattgatctcccaagggaggtccctcgatccgagtcacggcaccaaatttcatgtgcatctgtgtga

SEQ ID NO: 10967 - DNA, 874 bp, Artificial sequence
  DNA replication origin
gtgtagcacctcccttctctctcttccttcttctccagccatgtaagacatgactccttcccctttgccttcctctgtgattataagtctcctgagacctttccagccatgcttcctgtgcagcctgcagaactgtgagtcaattaaacttcttttctttataaattacccagtctcaggtagttctttatagcaatgtgagaacagactgatacaggtggggtactggtggaaatggggctgcagctttcctgcatgtgcggatgctgtcagtggagcacaggtgggggcatggttgtcagtgtccatgcttgcagttgccctggcagtggtggggtgctgccccacatctgccagctctgtgtgtgcattcacactgctgggggaggggggtggtggagttgccagcattcatgtgtttgcaccattagtggtggcagtgctgggggagcagggccactggtatccacgcacatgactgcagtggtggcatggaggttgggaggaatttctggtgtccatgcacacattcatgctggtggtagtgttggcacaggtgtgggggcatagctgctggcatctgtgtgcacatttgcaccggtggtgaggtggagctgctggtgtgcatgaactcgttagtgccagtggcgtgactgtgcgtgtgtttgtgtgtatcaccattgtcaatgcacgtgtttatggtagcaatggcagtatggctgaatagcaacgttttgggggttgggaggacagtgaattgtggtcacgctggcagcagtgttgggttgtgtacattcatatacaccagcaagggagggaatgctaggctcatctgtgtgcacacaccagcaaagccatggcagggagagggggt

SEQ ID NO: 10968 - DNA, 956 bp, Artificial sequence
  DNA replication origin
cgagggaggcaggcaagctccgggccccgtccgcggccggctccgctccctttgcctccgcgcccggcgcgctcggggcaccgcgacactcccgagcccaacaattgacgggagggtcgctctgggttttacgagggaatctttgctcagtgggcgacactcagcccgagcccaaaggaaaaaaaaagcaaaagcaccggaagaaaagtagcccacccgggtgtcctagtcactcccttcggagctccgactaagcccgatcgcggccgccgcgctcccctagcccgggatcaccccactcccggtactactcacaaccgcgcctcctccactacgctctcgcccggcccgccgcgcagctgtatttatagagccgtgcgccccgggggcgggaccagcgcgcgggccgggtcgcagcgcgagccgagcggagcccgctgggcgcgcgggcgggggcgcggagggagaggcgagggcgggggctccgggcggtgctggggggcggggagtccggctacccgagtggaggagtgggcggggggtctggagtggccagccaatcaggcgggcagtgccacctcggggaatgacgctcgggccaatgggaagggcactccattccgtcaacgctgtgggtcggggttctgagaaaagagagctgagtgggagtcgggccaggctgatgtgtgcccaagggaggggaaaagagagagcgaagttcctgcgaagaactgcgggaatgtgcggccggaattcactctccaccgccccccttatcccgactaggctgctgagggagcgcctgggccctgctcgcggataccctgccactcctaatagcacggcgcccagggaccctccgccacccatcactccatccgtgggattccagtgccttaagaaagacgcgctgttcaagaaggcacgttcattctgttctatatttccctcctccg

SEQ ID NO: 10969 - DNA, 1678 bp, Artificial sequence
  DNA replication origin
acttcccagtaggggcggccgggcagaggcgcccctcacctcccggacggggcggctggccgggcggggggctgaccccccacctccctcccaggcggggtggctggccgggcagaggggctcctcacttcccagtaggggcggccgggcagagacgcccctcacctcccggacggggcggctggccgggcggggggctgatccccccacctccctcccagacggggcggctggccgggcgggggggctgacccccccacctccctcccggacggggcggctggccgggcgggggggctgacccccccacctccctcccggacggggtggctggcccggcagaggggctcctcacttcctagtaggggcggccgggcagaggcacccctcacctcccggacggggcggctggccgggcggggggctgacccccccacctccctcctggacagggcggctggcatggcaggggctgacccccacctccctcccagacggggtggctgccgggcggagacgctcctcacttcccagacggggtggctgccgggcggaggagctcttcacttctcagacggggcggttgccaggcagagtgtctcctcacttctcagatggggcggccgggcagagacgctcctcacctcccagatggggtcgcggccgggcagaggcgctcctcacatcccagatggggcggcggggcagaggcggtccccacatctcagacgatgggcggccaggcagagacgctcctcacttcctagatgggatggcggccgagaagaggcgctcctcacttcctagatggggtggcggccgggcagagacgctcctcaatttccagactgggcagccaggcagaggggctcctcacatcccagacgacgggcggccaggcagagacgctcctcacttcccagacggggtggcggccgggcagaggctgcaatctcggcactttgggaggccaaggcaggcggctgggaggtagaggttgtagcgagccgagatcacgccactgcactccagcctgggcaccattgagcactgagtgaccgagactccatctgcaatcccggcacctcgggaggccgaggctggcggatcactcgcggttaggagctggagaccagcccggccaacacagcgaaaccccgtctccaccaaaaaaatacgaaaaccagtcaggcgtggtggtgcgcgcctgcaatcgcaggcactaggcaggctgaggcaggagaatcaggcagggagattgcagtgagccgagatggcggcagtacagtccagcttcggctcggcatcagagggagaccgtggaaagagagggagaccgtggggagagggagaccgtggggagagggagagggagagggggagggggaggggagggagagggagagggagagggagcttgtatatgtatttctgtctttttctttctctcccctttcctttctttcttctttctttcttcatcctatgccagtctctttattatctgaccacccaggcacatctcagtggcctactttgtggattaggcatgagccagagaccctcagcacctgggacaattctctctgtttctactcttgttctccattgcgcagccagctggtgtgggctcagagaacaatgacttgaatttccagtgttaacaggaatacaacac

SEQ ID NO: 10970 - DNA, 906 bp, Artificial sequence
  DNA replication origin
gagcccctccgcccagcagccaccccgtctgggaagtgaggagcgtctccgcccggcagccaccccgtccgggagggaggtggggtcagcccctgccatgccagccgccccatctgggagggaggtgggggggtcagccccccgcccggccagccgccccgtccgggaggtgaggggcgcctctgcccggccgcccctactgggaagtgaggagcccctctgcctggccagccgccccgtccgggagggaggtgggggggtcagcccccccgcccggccagccgccccgtccgggagggagttgggggggtcagcccccccgcccggccagccgccccgtccgggaggggggtgggggggtcagcccccccacccggccagccgccccgtccgggaggtgaggggcgcctctgccgggccgcccctgctgggaagtgaggagcccctctgcccggccaccaccccgtctgggaggtgtgcccagcggctcattgagaacgggccatgatgacagtggcagttttgtggaatagaaaggggggaaaggtggggaaaagattgagaaatcggatggttgccatgtctgtgtagaaagaagtagacatgggagacttttcattttgttctgtactaagaaaaattcttctgccttgggatcctgttgatcggtgaccttacccccaaccctgtgctctctgaaacatgtgctgtgtccactcagggttaaatggattaagggcggtgcaatatgtgctttgttaaacagatgcttgaaggcagcatgctcgttaagagtcatcaccactccctaatctcaagtacccagggacacaaacactgcggaaggcctcagggtcctctgcctaggaaaaccagagacctttgttcacttgtttatctgctgac

SEQ ID NO: 10971 - DNA, 1338 bp, Artificial sequence
  DNA replication origin
tcggctgcactgtggaagcccctttctgtgctggccaacgccggagacagctccctcagcttgcggggaggggtggagggagaggcgcgggcgggaaccggggctgcgtccggtacttgtgggccagcgcgagttccaggtgggcgtgggctcggcacgccccacagtcggagcggccggccggccccgccggccccgggcagtgaggggtttagcacctggggcagcagctactgtgctcaatttgtggccaggccttagctgccttcccgcggggcagggctcgggatctggagcccgcctgcgcctcccccgccactccgtgggctcctgcgcggccagagcctccccgaggagcgctgccccctgctccagggcgcccagtcccattgaccacccaagggctgagtgcgggcacacagcgtgggactggcaggcaactccacctgcggccccggtgccggatccactgggtggagccaggtgggttcctgagtctggtggggactgtggagaacctttatgtctagctaagggattgtaaatacaccattgggcactctgtatctagctcaaggtttgtaaacacaccaatcagcaccctgtgtctagctcagggtttgtgaatgcaccaatcgacactctgtatctagctactctggtggggacctggagaacctttgtgtctagctcagggattgtaaacacaccaatcagcgccctgtcaaaacagaccatttggctctctgtaaaatggaccaatcagcaggatgtgggtggggccagataagagaataaaagcaggctgcctgcaccagcagtggtaacccgttggggtctcgtttgctttttggtttgcaataaatcttgttgttgttcactgtttgggttcacattgcctttatgagctgtaacactgactgtgaaagtctgcagcttcactcctgagctagtgggaccacgaattccccccagaaggaataaactccaaatacatgtgaacatcagaaggaacaaacgctggacatgtatcctttaagaactctaacattcactgtgagggtccacggcttcattcctgaagtcagtgaaaccaagaacccaccaattccggacacgcagccactatctccagacatccagcagctttttgtcttaatgtttcagatgcttctgtcttctgtgtgtctgctgagtttggagcttggggttcttaaaggcacagagttgggggtggggcaggccaaaaggcaacattcaggaaggaaaatgaatggttgtcactttaggcagcaggtccagtcttcaaggtggagcccctgctagggacacccccac

SEQ ID NO: 10972 - DNA, 918 bp, Artificial sequence
  DNA replication origin
cgaggcggcggcggcagcccgggtgctgcggccggcagctgaaaaatggctccaggaagctgctgctgacaatgaatgaagggatacggtttacgcgccaaggtcctcccgcgaaactcggatttcccgccggcttttcaaaccatatttgcatatccccgcccctcaacccgccgaggaccgttcccacagcccattgggccgctacctccttacttcagtcccaatcatggagcagggccgcgacttgctggtttccattggctgccgtgcatcatggttaccggggcgacagggaccctatttgcataggcctccttgattggctggcagaagagcagtttttagggggtggggcaaagaatttccttctctcccacggaagaccacgcctggcctaggctccgcccctgtccccgcccgcccgccgggccggcgctactgacctgggcagggactccgcgccccgcagactcagtgtagatctagtctagagcccaagtttcgcttttggaaattgtcaaggtgactaagggaacactctttcctttgaccagtcagtgcaataaacgaacagcgcaggagatttttccagatacgtgccaaaggcaagttggaccatgcggacgatgtctggcaggtgcaaaaggagccctttaaatcgtgggcttctcccttcctgaaatccaaccaatgacgcggcgagagctgatcccgaggccggggctgatagacagaagcatgtgggcagacagaatcgtgggggcagaaggttcagcagacgcgattgcgggcaccagttaacattccagatcattcccggtaccttcattattagcctggataggggtaaagtacaaattaactcttttgtcttacaacggatattggtttgaatccagcagacattccctctgg

SEQ ID NO: 10973 - DNA, 860 bp, Artificial sequence
  DNA replication origin
atctggatgtacgcgcccggggcggcggcagcggcggcggcggcggcgaagccggggctggctagcagtgcccttttgtccatggaggctgcagcggcggcggcgacgacagccgccccctccccacccccggcggtcaccaggtactgctccagagcgggctggattccctttctcatctctcgctcctgctctttttagtgttatggtatattaatgtattgttttcaatttctttattatttgcagtcggagtttccaagtctctcctccttctctcctccccgcccggcgcttccgagccccctctctctcttttctttttatttttccgcaccgcacaggccccgggggccaaaaataatcggggctctggagagaggagggtcccggccgcacggatatcgggccccaagcggggatggaggcgtcgggggcggccgatgcaacggattgcgaggcggcggcggcagcccgggtgctgcggccggcagctgaaaaatggctccaggaagctgctgctgacaatgaatgaagggatacggtttacgcgccaaggtcctcccgcgaaactcggatttcccgccggcttttcaaaccatatttgcatatccccgcccctcaacccgccgaggaccgttcccacagcccattgggccgctacctccttacttcagtcccaatcatggagcagggccgcgacttgctggtttccattggctgccgtgcatcatggttaccggggcgacagggaccctatttgcataggcctccttgattggctggcagaagagcagtttttagggggtggggcaaagaatttccttctctcccacggaagaccacgcctggcctaggct

SEQ ID NO: 10974 - DNA, 976 bp, Artificial sequence
  DNA replication origin
cggggggaggtggggggccggctggagagggggcccggagggccgaacagaccggcggcgcagggcgagggcgggcgccggtgggggggtggggagaggagagggagggtggcggtgccgggggcgggtgcgagggcgccgggaccgtcccaggccagggagccggcgagcaggaggaagtgggtgcccccctctccccctccagcgccccctcccgccgccgcctcctccccagtcacaggcgcgtcctgcgcgcacgtgtgcgaaacgtcaccggcgggtcccggagagagggacagacccaggcggcgggacgggaacccagctgcccccgccctccgtcgccggggggcggagagggggacagggcggggaaggaaggggcaaggggagaggcgggtcaagggcaggcccggggcccggcgaggaaggcctgggcgcttgggccacgcgggcgccgccgctgccactgccaggatgcgcccaggccagagcgccagcccgcgagcccctcaccccagacagcccacgccccagtccgcacccggcttccagccccacctcccccacgcccgactcccctccacctcccccagcccctttgttgccgggagttacagatcctaaaatgtgtcaagcgcagccccgccgatcccctgcgctccgagcacgccgcagggacccccggccgccaacgagcctccaaggccgactgggggctagcaccccaacagtcccccggtttcaacccctcagagccccccacaccccagttcactactccctcccccacccccttctccatccggggcgtgaccccttcctacgcccgagaaagaggaagcttcgagttggaggggaagggagagtgggggtagggaaaagtgcaggaaaagaagggggggccgcgaaaagttttggagtgtttgatgtggttcgcgccaaggcaatccccgccgccccgcgcgcctggccg

SEQ ID NO: 10975 - DNA, 1015 bp, Artificial sequence
  DNA replication origin
ctgcccttgacccgcctctccccttgccccttccttccccgccctgtccccctctccgccccccggcgacggagggcgggggcagctgggttcccgtcccgccgcctgggtctgtccctctctccgggacccgccggtgacgtttcgcacacgtgcgcgcaggacgcgcctgtgactggggaggaggcggcggcgggagggggcgctggagggggagaggggggcacccacttcctcctgctcgccggctccctggcctgggacggtcccggcgccctcgcacccgcccccggcaccgccaccctccctctcctctccccacccccccaccggcgcccgccctcgccctgcgccgccggtctgttcggccctccgggccccctctccagccggccccccacctccccccggagccaggctggtttcggaaatgcccttacagcagcaggttagtgaccgggacggctcgggggccgccgacgccgcgggggcaccggattctgttgggggctgaagcggtgagggtaggcggttgagcggggttttggagtgggaacggggggttgggtgctcgagggaaatgagtaagcaagaaaaatctaactaagtaaatgccccggcctccggttctaggaacctcggggcgggagtgtctgccccagggggtgggtatggtgtttacgtggattttttttctagggggcggatggatgggcgatagaaaaccggagggggcttctcgccaatggccgagttgagctctgttttctgtcttccttcccttgtgctggagggggaggggggtgggtcagagggtagggtgtctgtaggattcccaggccacccgccaccccctccctttgtccctgtaatttataaagcgcctttgagagatgatttaggtcagtatgcggcttctctttttgttggtactagaaagaagtgtggcccggaggtctcccctttctccttttctctccttcattcccttcctccatgcctccgggtcttcacc

SEQ ID NO: 10976 - DNA, 1793 bp, Artificial sequence
  DNA replication origin
caggcatttggaagttcttgtgtgctggagatgtggctggggtttgtctcacagtggaggcaaggaattgcaacttttttctattattgtacaccttgaaggcgaggttaattaaatcctgttgtggggtttgagggctggaatttaatttttggagttttatttaatgtcgggagcagattgggtaataaaatgtattttgagaataagacggccttttgaccttttagggtctagggctgtaaagtgtctcagggttgctgccaaacgagtcatgaactgggctggatttttatatttgatgaaaaagagcctaaacgccatctgatttgggataaagaaaaaggagcattaaccttgattaagcctttagctccagctacctttttaagagtaaattgctgggcgggtgggggagggctagtcacagaggacactgtaagcttgaccaggtgtgaggaggggaggcaataaaaaaattatagggtggaggagcggaggctgaggaagaattgggacctagcttggcctggcgaggaggggagaggtcagatgagtctgtagaaaaggaagattagaaagactcagggacgcttggggttgggactgaggggacaggcgggagggaaagaaggaagatttgggacgagttgcactgggcacagagactaggaagggactgatgtgtaaaagaatgcctggacattaggcacctcagaccatttgcctattttgcaacaagaattatttagaccttgcaggatggaaaaattcaaagtgccattttctggctatttggaactactgttgagtttgtattggggtcaagcagcattgcagaagaaaataaggcatttaggttttaggtcaggtgtgagttgaagaggttttaagtttttgagaacacaggccaagggagtagaagggggaatggagggtggaaggttgcctatagtgaaggaagcaagcctagagaaaagagagagtagagaaacggagggaaggggttcgggggttcttaccttccagaaaagtgggaagaggggttggggcgcagagataagaggtcggggcatggaaataagggatggggtgcagaaataaggggttggggcatggaaataaggggtcggggcacggaaataagggattggggtgcagagatacaaggttggggtgtggaaataagggattgggggttcttgccccctagaaaagcgggacttgcctctaagggtgaaggagaaggggttgaggggtacttgcccctgccccaggaaagcagagaaggggtagagacaaggagagaaggggttggggtacttgccccttccccagaaaagcaggacttgccgctaagggtgaagtaccaaggcaggcatccctgcgtggtctgacacctttgaaatgtggttgaataatcagagaggcgtccttgcaatgattaaacaccaagggaaggctgccttcccagtccgtgaccggcgccggagttttgggttgacagataatatgtgtctcctttgtctctcccagaaaatgaaaggaattgaaattcagagaagggagagattgaagagtggaaagaagaaagtggttgagggacagtgagagaggttggagaagagagtaagaagaggccgcttacctgatttaaaattggtgagatgtttcttgggctggttggtctgaggacctgaggtcgtaggtggatccttctcatggagcaaagaacaggaggacaggggattgatctcccaagggaggtcccccgatccgagtcatggcaccaa

SEQ ID NO: 10977 - DNA, 1295 bp, Artificial sequence
  DNA replication origin
ttgaggcgcagccgctccgcctctcgaatgaaagggatcttgtcgctgtctttgagcagcttccagcgtttgcccagccgcttggagatctcggcgttgtgcatgtcgggcgactgctccatgatcttgcgccgctcgatctgcgaccacaccatgaaggcgttcatgggtcgcttgatgtgcccactcggggtcttgcaccagctcgggtcgtcggccttgccgcccgtggaggcggtggagccgggcgtgggggaggaggcgattcccagctcgaggccggcgcccgagtccgagctctcgccggccagcagcgcttccgtgttctcggcattgttggtttgctgcaccatggcctcggctcggcgggcgcccacgcgcgctcacaccctcgcggcggccgccgcgcgatcgccgggccctcccggttccccgggccaagcacacgccgaacgggaagacgcgcgcggcggccgaactggcccctcaactcctcgcaggggcggaggtgggtaaagagagaaaagtccccaaaagatttggggaaggagttctccgcctctcgcagaggagttatagttcccaggctggagagtctctctctccctctctctcgctctctcaccgcgctgcagtttgctgtctctcggctgagtctggagaccgtgctaaagtagagaggagtttctcgaatgctggttgctgaagcttccaatgcaagtttctcgcggcctcccaggcaagtcttttttttttttttttctttttccctgaagcagttgattccagttcacgagcgctctcggtagctcaggaaagcgacatagtctctagcacttagtccctctcctacaatgcaaagcaaaaaagactgtggctccaggactctctgtgggcggaatcggcactaaggagttggtgcaattattttgttgcaaggtaggaagccaaaaagcctgcatgcaacagactggcatgaataaatgtatgtttccccctcccttctgcaagaagggagctggtaatggcaggagttcctccagtgcagactcttaaagagcgtgcaagaactagagacccgacagcgaaacaggcctcttcccctcacacacagtttctcttgctgcagcttagagcagaccccaattccgcctcgcgcctctttatcctttcacagtcttggctgcagccaatcagctgctgtaaccaacgcttcctcatgccaaacccctcccccgggcttcccattggcttggaacccgatgcaataataatctccgcgtgcaatgagaagc

SEQ ID NO: 10978 - DNA, 985 bp, Artificial sequence
  DNA replication origin
ggcccagggggtcgctggggtcggctcccgcgcccacgccgcccacgggcgacgacgacgtgcccaggccgccgaacaggtagacgcgcttcaccttcttctccgccaggtgcttgcccggggccgcgagcgctgcggaggccgaggctgccgaggaggcggaggccgaggcgctgggagtccgcgccttgtacagcgagtggtggtcggcggcggcgcccaggggcagcagggcggcggcccccgcctgttcggcggcgaaggaggcggcggcggcagccgctgctttcccgccgccgccgccgcctgccaggatgagcttggcgtgcggtttgctaaccccaccgcccgcgccgcccgccactttggagccgcagctctttttctgcgccggtttggagttggcgccgccgccactcgcaccgccgcctcctccccccgcgttgctgctcccgccgccgccgccgcccccatggccgcccccgccactgccaccgaccttgtctcccttctcccccggcttggaggaggcggcggccgaggagctggagttggcgttgccggacttcaccttcttcctgggccggtacttgtagtcggggtagtcagccatgtgcttgaggcgcagccgctccgcctctcgaatgaaagggatcttgtcgctgtctttgagcagcttccagcgtttgcccagccgcttggagatctcggcgttgtgcatgtcgggcgactgctccatgatcttgcgccgctcgatctgcgaccacaccatgaaggcgttcatgggtcgcttgatgtgcccactcggggtcttgcaccagctcgggtcgtcggccttgccgcccgtggaggcggtggagccgggcgtgggggaggaggcgattcccagctcgaggccggcgcccgagtccgagctctcgccggccagcagcgcttccgtgttctcggcattgttggtttgctgcaccatggcctcggctcggcg

SEQ ID NO: 10979 - DNA, 1708 bp, Artificial sequence
  DNA replication origin
tcatcctggcaggcggcggcggcggcgggaaagcagcggctgccgccgccgcctccttcgccgccgaacaggcgggggccgccgccctgctgcccctgggcgccgccgccgaccaccactcgctgtacaaggcgcggactcccagcgcctcggcctccgcctcctcggcagcctcggcctccgcagcgctcgcggccccgggcaagcacctggcggagaagaaggtgaagcgcgtctacctgttcggcggcctgggcacgtcgtcgtcgcccgtgggcggcgtgggcgcgggagccgaccccagcgaccccctgggcctgtacgaggaggagggcgcgggctgctcgcccgacgcgcccagcctgagcggccgcagcagcgccgcctcgtcccccgccgccggccgctcgcccgccgaccaccgcggctacgccagcctgcgcgccgcctcgcccgccccgtccagcgcgccctcgcacgcgtcctcctcggcctcgtcccactcctcctcttcctcctcctcgggctcctcgtcctccgacgacgagttcgaagacgacctgctcgacctgaaccccagctcaaactttgagagcatgtccctgggcagcttcagttcgtcgtcggcgctcgaccgggacctggattttaacttcgagcccggctccggctcgcacttcgagttcccggactactgcacgcccgaggtgagcgagatgatctcgggagactggctcgagtccagcatctccaacctggttttcacctactgaagggcgcgcaggcagggagaagggccggggggggtaggagaggagaaaaaaaaagtgaaaaaaagaaacgaaaaggacagacgaagagtttaaagagaaaagggaaaaaagaaagaaaaagtaagcagggctggcttcgcccgcgttctcgtcgtcggatcaaggagcgcggcggcgttttggacccgcgctcccatcccccaccttcccgggccggggacccactctgcccagccggagggacgcggaggaggaagagggtagacaggggcgacctgtgattgttgttattgatgttgttgttgatggcaaaaaaaaaaaagcgacttcgagtttgctcccctttgcttgaagagaccccctcccccttccaacgagcttccggacttgtctgcacccccagcaagaaggcgagttagttttctagagacttgaaggagtctcccccttcctgcatcaccaccttggttttgttttattttgcttcttggtcaagaaaggaggggagaacccagcgcacccctccccccctttttttaaacgcgtgatgaagacagaaggctccggggtgacgaatttggccgatggcagatgttttgggggaacgccgggactgagagactccacgcaggcgaattcccgtttggggcttttttttcctccctcttttccccttgccccctctgcagccggaggaggagatgttgaggggaggaggccagccagtgtgaccggcgctaggaaatgacccgagaaccccgttggaagcgcagcagcgggagctaggggcgggggcggaggaggacacgaactggaagggggttcacggtcaaactgaaatggatttgcacgttggggagctggcggcggcggctgctgggcctccgccttcttttctacgtgaaatcagtgaggtgagacttcccagaccccgg

SEQ ID NO: 10980 - DNA, 915 bp, Artificial sequence
  DNA replication origin
ggcgtctttgttctgctctggaggagagaccttggcaaggagtcgccgggcgggtgcagggacctaccgccaccacattccggacccagcgggagccctcctcttaatgcccctccccccgcaagccaacccaggacatagcccccaggtccccaaggttccgtctacctcatccttctacccccaaacttcaccaacccgaaaggattccaagtctgggatggggagaaaggaaagagggtggaggcaaaggtgcgcgacgggctggataccaactggagggtgggtgttcgcattgaaatgtttttttcttttgccctagaaattgcttccccatgcgggcccctactctctcccatttcccccacctccctgctttctttttcttcaattctagtggatctagaaggaaaacgagtgctgctctgagtcactcagcgagctaatgctatggcccgaagttgggatcagggtcgaggggtgggggaccatgtggatggggtcccaattctggaggttgagaatgactggaagggacctggggaagggtcgggagctgttcctggtccgagacacctgatttgtcccggacaaggcagtgggggaggggaaggaaagaggggatgctcggctgggacgtgtcgcggcagggggtggaggatgaggaggcggcctgggaccccgagtcagatctttggggtgagcacgaggacgtggtgtagggaagaggacgagtgagcagcgcctggctgtagggtcagagggcgcctggtcatcctgagagccttgccttcgcagtttgagattaggggaagttcggggcctgagaaggtgggcgcgatgctggagctgggaattcttcctcggagcccctggaccgagttgcgctgcgcctgcagcaacaggtagccccga

SEQ ID NO: 10981 - DNA, 844 bp, Artificial sequence
  DNA replication origin
caattctggaggttgagaatgactggaagggacctggggaagggtcgggagctgttcctggtccgagacacctgatttgtcccggacaaggcagtgggggaggggaaggaaagaggggatgctcggctgggacgtgtcgcggcagggggtggaggatgaggaggcggcctgggaccccgagtcagatctttggggtgagcacgaggacgtggtgtagggaagaggacgagtgagcagcgcctggctgtagggtcagagggcgcctggtcatcctgagagccttgccttcgcagtttgagattaggggaagttcggggcctgagaaggtgggcgcgatgctggagctgggaattcttcctcggagcccctggaccgagttgcgctgcgcctgcagcaacaggtagccccgagggatgggcggaggccccggccgaacccggagctggcctttgtcctgccaattagagggctctccagagggacagcgtgggtgggggtaggtggggaagggcgggagaggagtttcctaacacttggagcccctttgagttgttctgtgtattgggtggaggagggtgaatccgagaggagggaggagggtgaatccgagaggaggaaggaggatgaagagcctagcctgcgccccacctctgattgtgtaagcgcctttatctagggttgaccccctaccctttgcattttgtctcttgggatgacgaaaaatggacagaaactcgacgcccaagtgaatgtttcacattgattggcagggaaagtgcaaacaaagaggtgcatctccgggaaacaatgattttggagatcccctgcccaccaccccagactt

SEQ ID NO: 10982 - DNA, 898 bp, Artificial sequence
  DNA replication origin
gggggtcagccccccgcccggctagccgccccgtcggggagagagggagatgggggggtcagccccccgcccggccagccgcccgtccaggaggtgaggggcgcctctgcccggccgcccctatgggaagtgaggagccactctgcccggccagccgccccgtccgggagggaggtgggggagtcagccccccgcccggccagccgccgcgtccgggagggaggtgggggggtcagccccccacccggccagccgccccgtctgggaggtgaggggcgcctctgcccggccgcgcctactgggaagtgaggagcccctctgcccggccagccgccccgtccgggagggaggtggggggggtcagccccccgtccggcctgccgccccgtccgggaggtgaggggcgcctctgcccggccgcgcctactgggaagtgaggagcccctctgcccagccaccaccctgtctgggaggtgtacccaacagctcattgagaacgggccatgatgacagtggcagttttgtggaatagaaaggggggaaaggtggggaaaagattgagaaatcggatggttgccgtgtctgtgtagaaagaggtagacatgggagacttttcattttgttctgtactaagaaaaattcttctgccttgggatcctgttgatcagtgaccttacccccaaccctgtgctctctgaaacatgtgctgtatccactcagggttgaatggattaagggcggtgcaagatgtgctttgttaaacagatgctttaaggcagcatgctccttaagagtcatcaccactccctaatctcaagtacccagggacacaaacactgcggaaggccgcagggtcctctgcctaggaaaaccagagacctttgttcacttgtttatc

SEQ ID NO: 10983 - DNA, 1306 bp, Artificial sequence
  DNA replication origin
tccccgacggggcggctagccgggcggggggctgacccccccacctccctcccggacggggtggctggctgggcagagtggctcctcacttcccagtaggggcggccgggcagaggcacccctcacctcctggacggggcggctggccgggcggggggctgacccccccacctccctctctcccggacggggcggctagccgggcggggggctgacccccccacctcccgcccggagggagcggctggccgggcagagaggctcctcacttcccagtaggggcggccgggcagaggcgcccctcacctgccggatggggcggctggccgggcggggggctgacccccccacctccctcctggactgagcggctggccgggcagaggggctcctcacttcccagtaggggcggccgggcagaggcgcccctcacctgccggacggggcggctggccgggcggggggctgacccccccacctccctcccggacgaggtggctgccggtaggagacgctcctcacttcccagacggggtggctgctgggcggaggggctcctcacttctcagacagggcggttgccaggcagagggtctcctcacttctcagacggggcggccggacagagatgctcctcacatcccagacggggcggcagggcagaggtgctccccacatctcagatgatgggcggccgggcagagatgctcctcacttcccagatgtgatggcggccgggaagaggcgctcctcacttcctagatgggatggcggccgggcagagacgctcctcactttccagactgggcagccaggcagaggggctcctcacatcccagacgatgggcggccaggcggagacgctcctcacttcccagacggggtggcggccgggcagaggctgcaatctcggcactttgggaggccaaggcaggctgctgggaggtggaggttgtagcgagccgagatcacgccactgcactccagcctgggcaccattgagcactgagtgaacgagactccgtctgcaatcccggcacctcgggaggccgaggctggcgggtcactcgcggttaggagctggagaccagcccagccaacacagcgaatccccgtctccaccaaaaaaatacgaaaacccgtcaggcgtggcggtgcgcgcctgcaatcgcaggcactcggcaagctgaggcaggagaatcaggcagggaggttgcagtgagccgagatggcagcagtactgtccagcttcggctcggcatcagagggagaccgtggaaagagagggagagggagaccgtgggga

SEQ ID NO: 10984 - DNA, 1021 bp, Artificial sequence
  DNA replication origin
cccccgcccggccggccgccccgtccgggaggtgaggggcacctctgcccggccgcccctactgggaagtgaggagcccctctgcccggccagccgccccgtccgggagggaggtgggggggtcagccccccacctggccagccgccccatccgggagggaggtgggggggtcagccccctgcccggccagccgccccgtccgggagggaggtggggggatcagccccccgcctggccagccgccccgtccgggaggtgaggggcgcctctgcccggccgcccctactgggaagtgaggagcccctctgcccggccagccgccccgtccgggagggaggtgggggggtcagccccccgcccggccggccgcccctactgggaagtgaggacccctctgcccggccagacgccccatccgggaggtgaggggcgcttctgcccggccgcccctactgggaagtgaggagcccctctgcccggccacgaccccgtctgggaggtgtgcccagcggctcattggggatgggctatgatgacaatggcggttttgtggaatagagaggcgggaagggtggggaaaaaattgagaaatcggatggttgccgggtctgtgtggatagaggtagacatgggagacttttcattttgttctgtactaagaaaaattcttctgccttgggaaaaaaaaaaaaaaaaaaaaaaaagtcctcagccacagcacttcgagtctacagatatggacaattctacatcttagagagattgtgaggggtctcatgtgttagttaaagaggaagtgggcagagatcacagatgcttaaaatccaatttccatatctgcatggctccatcttgagagctgtgttctaaacccacttaggtctgcaagctgtgctaactttgatgttatcagcagaggactaggtcaagggagaaagtgagctatgtgagctatggaaaaaaaatgaaagagaatcatcaagggagaaaaaaaaatgaagtgagagctaacagcctgcc

SEQ ID NO: 10985 - DNA, 1229 bp, Artificial sequence
  DNA replication origin
aggggctcctcacttcccagtaggggcggccgggcagaggtgcccctcacctcccggacggggcggccggccgggcggggggctgacccccccacctccctctcctcacttcccagtaggggcggccgggcagaggcgcccctcacctcccggacggggcggctggccaggcggggggctgatccctccacctccctcccggacggggcggctggccgggcagggggctgaccccccctcccccctcccggacggggcggctggccgggcggggggctgaccccccacctccctcccggactgggcggctggccgggcggggggctgacccccccacctccctcctggacggggcgactggccgggcagaggggctcctcacttaccagtaggggcggccgggcagaggagcccctcacctcccggacggggcggctggctgggcggggggctgaccccccccccacctccctcccggacggggtggctgctgggcggagaggctcctcacttcccagatggggtggctgccggacggaggggctcctcacttctcagacggggcggttgccaggcagagggtctcctcacttctcagacggggcggccgggcagagacgctcctcacctcccagacagggttgcggcccagcagaggcgctcctcacatcccagacagggcggcggggcagaggcgctccccactcagacgatgggcgggtcaggcagagatgctcctcacttcctagatgggatggcggcggggaagaggcgctcctcgcttcctagatgggctggcggccgggcagagacgctcctcactttccagactgggcagccaggcagaggggctcctcacctcccagacgatgggcggccaggcagagacgctccggctgaggactttctttgtgcttatttttatggctggtttatttgcatcgttgcagaatattcataaatcagaaaagaattttttttctttctcctttaaggataccaaatccaggtgggaagtaatgatcttggtgaattctagcacttgtcaatttgagagtgttcagggaaaacaaatgaaagagaaaggatgaatttgtttgtatgctatcgttcactaattcaaagctgcagacatttctttcttactatacttttgaagttaaggattggaactgaataatagacagccttccaacatgaaacatgaccaagcttgagggattttattg

SEQ ID NO: 10986 - DNA, 1368 bp, Artificial sequence
  DNA replication origin
aacaaaggcatcaaaaggaagaaaaagaagggggaagtgacaaaaatgatagctgataaggagaaaggagaaactgaggtgggctccagcacaagaaggaagacacaggttccagagcaggaagaggaggtaggtctcagagcaggaagcgggaggaagatcccagatcaggaaggaggaggcaggttccagtgcaggaaggaggaggcaggttccagaacagaaaggagaaggcagatcccagagtagcaaagaggaggcaggttccagagcaggaaggagaaggcagatcccagagtaggaaggaggcggcaggtcccaaagcagaaaggaggaggtgggatccagagcaggaaggaggaggtaggttccagcacaggaaggaggaggcaggttccaaagcaggaaggaggaggcagatcccaaagtagtaaagaggaggtgggttccagaacaagaaagaggaggcaggttccagagcaggaaggaggaagcagtttccaaagcaggaaggagcaagcagatcccagtgcaggaaggaggaggaggtagatcctagagcaggaaggagaagacaggttccagagcagaaaagaggaggcaggttccagagcaagaagagggagttggttccagagcagaaatgtgaaggtggattttggcagtttcagagcaggaggaagaaggcagttcccagctcaggaaggaggaggcaggttccagggcaggaagaaggaggaggcagttttcagagcaggaaggaggagtcagatcccagtgccagaaggaagaggcaggttccagctcgggaagaagtaggtggctctagaacaggaatacagaggcgagtttcagcagtttcagagcaggaagaaggagtagcaggttccagagcaggaagaaggagacagatttcagggcaagatgaaggagaaggcagtttccagagcaggaaggaggagccagaccccagtgcaacatgaaagagaaggcaggttccagagcaggaagggaaggcagatcccagtgcaagatgaaggagaaggcaggttccagagcaggaaggaggaggcagaccccagtgcaggaaggaggaggaggaggcagtttccagagcaggaaggaggaggcagatcccagtgcaagatgaaggagaaggcagtttccagagcaggaaagagcaggcagaccccagtgcaggaaggaggagaaggcagattccagagcagggaggaggaggtgggttccagagcaggaaggaggaggctggttccagagcaggaaggaggcggcaaatcccagtgcaagatgaaggagaaggcaggttccagaacaagaaaagggaggtggttccagagcaggaacacg

SEQ ID NO: 10987 - DNA, 1342 bp, Artificial sequence
  DNA replication origin
actcctgggaggcctcctcgtccgcgacttcttcctcccggagctcctcctcctctggctgaggcggctcgcagaccaggcccggctcgctaggggcgctgccgttctccaccgccacgaggaacggactctcctcgtcgacggccgtcgccgccgccgccgccgccgccctctccgcttccgccgccctctccgcctccgcctcctcctcttggtcgggggctgcctccttgggtcgtttgggggcgtcctccggcgggtcccccgcgctcctcttcagcggccccttctcctcctcagtgggcttgtcgtcgtccggcttccccaattcgtcgccgccgccaccagcgtgggtcggcttgtcctcgtcgccctctgcggcctcgggctccggccaaggcccgtctccgctgcccttctctgaggctaatgggcagtcggaggcctggaccgtggggttgttctcgatttcccacagccccgcgctgaagccgcgcctcttgttgggcttgccgaacttctccttgcactccttgtacgggaacaggcgtttgggactcaggaaggccgtctcgtgggtcccgaagaaaaacacctggtagcggttgggctgggtcatgtgctctatcctcgccggccagtgggcatagccctttaacttggcaaacaccaggtccccgctcttgtacatgggcatgccgtaggccgacatagctggttctgcggaccccgcctgggccacaccggaagtagacgccgaagtctgcgcgcgcgcagtaagggcggctgctgggcgggagttgttgagcgacctgttcgaggggaccggcgccacctaatgggcgggcaacgctcggggccccgagaagatccactgcgaagtgtgcattatctcccgaacactcgaagcccgttggacccaccctcggacgccatgatgtctagaatgctggaggaaatagctgggatggccgggtggcggttgtgcttgtggtggccttgtgctactgatcaatctctacggcacctgggccagatggttgcacagtttaaataaacggtgccagagcggcctagaaagggggcagtgtgacaagaaaacacagtgacacaattagtacatatttccatgaaactagtaacagcccagtgcaagcatgcagtgtccctgtaggccccgatctgctcactacaggaaactgtacacctgcgttaggaggagctaaagagatggctgtgtcagtggtttcaacccttttctgatttcctccgggactagcactggagcctgcagtgaggctcaagaactacgtgaaagtctattaaagggttagagtcagca

SEQ ID NO: 10988 - DNA, 1465 bp, Artificial sequence
  DNA replication origin
ccttcctgagtcccaaacgcctgttcccgtacaaggagtgcaaggagaagttcggcaagcccaacaagaggcgcggcttcagcgcggggctgtgggaaatcgagaacaaccccacggtccaggcctccgactgcccattagcctcagagaagggcagcggagacgggccttggccggagcccgaggccgcagagggcgacgaggacaagccgacccacgctggtggcggcggcgacgaattggggaagccggacgacgacaagcccactgaggaggagaaggggccgctgaagaggagcgcgggggacccgccggaggacgcccccaaacgacccaaggaggcagcccccgaccaagaggaggaggcggaggcggagagggcggcggaagcggagagggcggcggcggcggcggcggcgacggccgtcgacgaggagagtccgttcctcgtggcggtggagaacggcagcgcccctagcgagccgggcctggtctgcgagccgcctcagccagaggaggaggagctccgggaggaagaagtcgcggacgaggaggcctcccaggagtggcatgccgaggcaccgggcggcggagatcgcgacagcctgtagttaccagcgtttccagaagagcccctgccccgttcctgctgcggcctggccgttcttggggaatctgaccacggcgtgcaaactgggactgcctttccctctcctcagcccgtcctcctccaacccgcgctcctttgccctgccgggccccaggatggcaggccacctgactctcacctctgtgcccccacgcctctgtgatctgagtcagggcctcagttccctccctgggataaagtgaggccaccatcccagcttccggctccctcttctcccccctctacccgccaccccaccccaccccacccccgcccactcgttgcctgattccgtttccgacttggggttcaggcaggctgttttcacctctagacacccctctccacccctcctgcttccccaggcattatgaacctctgcttaggaatatgggtaggagtgaaaggcctggcagataaagagcagagggcacttgcagggcctgggatgagcagtcttcaagctgtggtagttagcgggcaggagagcgacatcttcctgagctcctgtccatgcctgccatacctgccagcttcagacatttagggaaaaggggcagcatgtggggaatgccccccgccttccacaaatccttttgctgacccaggaagttctgggagttgccgtttttcatcaaaacgtttgggggcttccaagttgtttgtgagatctgaaaacttaactttgcccaatatcctggttggggaccgtgagaaatatctgtcccatttagatctctggggccactgatgggatgccctgggaagatccttggctgccgctttctctccccacagcctcaaggccaccctacc

SEQ ID NO: 10989 - DNA, 1276 bp, Artificial sequence
  DNA replication origin
cctcacttcccagtaggggcggccgggcagaggcgcccctcacctcctggatggggcggctggccgggcagggggctgacccccccacctccctcccagacagggcggctggccgggcggggggctgacccccacacctccctcctggacggggcggctggccgggcagaggggctcctcacttcccagtaggggcggccgggcagaggcgcccctcacctcccggatggggcggctggccaggcggggggctgaccccccccacctccctcctggacggggcggctggccgggcagaggggctcctcacttcccagtaggggcagccgggcagaggcgcccctcacctcccggatggggcggctggccaggcggggggctgacccccccacctccctcccggatggggcggctggccgggcggggggctgacccccccacctccctcccggacggggtggctgccaggtggagacgctcctcacttcccagacggggtggctgccgggcggaggggctcctcacttctcagatggggcggctgctgggcggaggggctcctcacttctcagacagggcggttgccaggcagagggtctcctcacttctcagacggggtggccgggcagagacgctcctcacatccgggacggggcgacagggcagaggcgctccccacatctcagacgatgggtggccgggcagagacgctcctcacttcctagatgggatggtggccgggaagaggcgctcctcacttcctagatgggatggcggctgggcagagatgctcctcactttccagactgggcagccaggcagaggggctcctcacatcccagacgatgggcggccaggcagagacgctcctcacttcccagacggggtggcggccgggcagaggctgcaatctcggcactttgggaggccaaggcaggctgctgggaggtggatgttgtagcgagccgagatcacgccattgcactccagcctgggcaccattgagcactgagtgaaggagactccgtctgcaatcccggcacctcgggaggccgaggctggcggatcactcacggttaggagctggagaccagcccggccaacacagcgaaaccccgtctccacccaaaaatacgaaaaccagccaggcgtggcggcacgcgcctgcaatcgcaggcactcggcaggctgaggcaggagaatcaggcagggaggttgcagtgagccgagatggcagcagtacagtccagcttcggctcggcatcagagggagacc

SEQ ID NO: 10990 - DNA, 896 bp, Artificial sequence
  DNA replication origin
gggaggtgtgggggtcagccccccgcccggccagccgccctgtctgggagggaggtgggggggtcagccccctgcccggccagccgccccatccaggaggtgaggggcgcctctgcccggccgcccctactgggaagtgaggagcccctctgcccggccagccgccccgtccgggagggaggtggggggggtcagccccccgcctggccagctgccccgtccgggaggggggggggtcagcctcccgccgggccagccgccccgtccgggaggtgaggggcgcctctgcccagccgcccctactgggaagtgaggagcccctctgcctggccagccgccccgtccgggagggaggtgggggggtcagccccccacctggccagccaccccatccgggaggtgaggggcgcctctgcctggccgcccctactgggaagtgaggagcccctctgcccggccaccaccccgtctgggaggtgtacccaacagctcattgagaacgggccatgatgacaatggcagttttgtggaatagaaaggggggaaaggtggggaaaagattgagaaatcggatggttgccgtgtctgtgtagaaagaggtagacatgggagacttttcattttgttctgtactaagaaaaattcttctgccttgggatcctgttgatctgtgatcttacccccaaccctgtgctctctgaaacatatgctgtgtccactcagggttaaatggattaagggtggtgcaagatgtgctttgttaaacagacgctcgaaggcagcatgctcgttaagagtcatcaccactccctaatctcaagtacccagggacacaaacactgcggaaggccgcagggtcctctgcctaggaaaaccagagacctttgttcacttgt

SEQ ID NO: 10991 - DNA, 1455 bp, Artificial sequence
  DNA replication origin
agggaaggaaggagggaggaaggagggtgatagacacattagataggtaggtggggggaggggggagagggggggagagagagagggggagggggcgggggggaagagatggggaagagggggggagagatgggggaagggggggagagaggggggagagagagggagggggagagacagggaggggagagagagagagggagaggggacagagagagagggaggggggacagagagagagggaggggggagggagggagggagggagagagggagggagagagggagggagggagggagagagggagagagagagggagggagggagagacagagggagggagggagggagagagagagggagagagagagggagggagggaaagggagggagggagagagggagagagggaaagacagagacaaagagaaagacagagagacttagctgtcagagagaatagtgtccctttaagtttaacccagtttctcctatagaataacaactgtgaactcagagcaaaatatagacatcaactgcttgaaagttccagagagtgaataaagagagccaaactgagagtgaataaagagagtgaataaagagaattccagagagtgaataaagagagccaaataaagagagtgaataaagagagccaaatataaagagaaatatttagaaaaagggaattgtaatagatagaattgtgttccccaaaagatttgttcaagttctaacccctgatgcctgtgaatgtattttcaaatatttgtttcaaaataggcctttgcacatataatcaggttagaatgaggtcatatgggaaaactaggtttcttataaaaatttggcaatagagacacacaggaagaatgccacatgaggatggaggcagagattggaacgatgtgtctacaaactaaggattgctggggactgctggcaaacactagaagccagggaaaggcaaagaaggatccttacatcgattctccagagagagaaaggccctgttgacatgttaattttggacttctagcttccagaactgtgagaggataagtttcttatgtttttagtcaccatattcacggtaatttgttatggcaacgctaggaaattaatacagtactgatacatagtttcctattttacagtttttcccaagtgcagttcctggtatcccacgtgagacagctacaactccaacagtaaaacctcaacattgctggcttgatgaatcagaacagagttttgggcaaccatattccttgaaattgaaagcacaaattccagaaaggagaaagtaagtgggggaggacccttaaagtctgtgtatacgatctgcctaagtctctggctgacccttgcacagcccatgaataatgcaaactacaagcagccctggtaagactaaaaacactgaactgaaatttgagctgccatcacct

SEQ ID NO: 10992 - DNA, 1115 bp, Artificial sequence
  DNA replication origin
acaggagggaggcgacgcggctggtgtcactttggggtaaagccccctctgctccccgccgtgtccccggccagctctggccccctgcatccgggctctctcaccttggcggagacctccctccagcggcagaaagcctcgtaggcagcgcgcacggcggcgcgggcctctcgcaccccgcagtcggctaccatgcccagagcggcgccgctggccgggtcttgcacggggaaggtggcggcggccgggagccagcggccgcccacgaagctgtcggtgcgcagcagcgccgcagagaggcccgccaggcgcccagcgtagcagcggagctgggccgggccgggcgcaggcccggaggcagggaccaggccgccggcgcgggggcggaggcggcagcctggaaacgtcgacccgaggcgccgggccccacagctccgcagccaaatgcaggtcgccatggcccgggcaacgacggcgacaggaaacaggcaagcgggcgcgcgcgcacgggaacgcaggggtcgcggggaagcaagaggagcgaggaggcgccggggacgcgcggggaaagcgtgggagctggcggaaggttgcagagccacagagcagcgccctctctccgcgtctttctcgctgcaccgccgcgccgccctctgcaccttgccctaagcgccgcgcggcttctctcctggcgcgaccttctcccgggggagggttgggttcggggatggagaaggctcgccagtagatgcacctgcggactgctgtcaccttttcacttttcgggtgctcatttgtcactaactgctcctgagcccccaatcgctgctagagacccactctctccccttagcatcccccaaattcggcatccccggaatttgtgcgcggtccatagatgcgctggtgcctgccctaaatgccaaggccgtgatcacgcttcttcagttgtagctcctgagcacgtagtattgattgggagcgatcgttctctgaggggtcgaagtgtgaccccgcgttctgctgcctggctgcttttttgggtgtgtgtctaggcattctcctagggttgctcccgataaataacagcgctttggaaataaacagactaggat

SEQ ID NO: 10993 - DNA, 1606 bp, Artificial sequence
  DNA replication origin
caaccttccgccagctcccacgctttccccgcgcgtccccggcgcctcctcgctcctcttgcttccccgcgacccctgcgttcccgtgcgcgcgcgcccgcttgcctgtttcctgtcgccgtcgttgcccgggccatggcgacctgcatttggctgcggagctgtggggcccggcgcctcgggtcgacgtttccaggctgccgcctccgcccccgcgccggcggcctggtccctgcctccgggcctgcgcccggcccggcccagctccgctgctacgctgggcgcctggcgggcctctctgcggcgctgctgcgcaccgacagcttcgtgggcggccgctggctcccggccgccgccaccttccccgtgcaagacccggccagcggcgccgctctgggcatggtagccgactgcggggtgcgagaggcccgcgccgccgtgcgcgctgcctacgaggctttctgccgctggagggaggtctccgccaaggtgagagagcccggatgcagggggccagagctggccggggacacggcggggagcagagggggctttaccccaaagtgacaccagccgcgtcgcctccctcctgtgctcagttccccagggtatacaaagtggaaagtcagagcaacaagggagacgaccgacaaataagtttggagcttccactttgagccgggcactagggacacgacccctgccctcaagcctcatcaagttatgcactgcccagtaggggaggcagaacgtgagcgcctaatacaagcgagctgcttgttatggtcaacaagcctaaccgtggaggggcggggagaaaggggaggggtgtcagggaagtgagagcacgtgtggcccttcagagtagctgaaatatctccgcagctgcagggagcccacgcaggaggctgcttcagcggcccttgagaaggctggtagtgagggcccctggccagaatcatgggatcggaaacggagagaactgtagaaagatttgggttttgtgcaggggaagagagaaatccaggagcgttctccaggttttcaccctaaatggataaatgctgctattggccattgcatagagaacactggagaattgggagtaaggggtggagggccattaaatgggaagaatagagtaagaagaaaactaagaaagtagtttcttccttctaatattatattattaaacctggagtcaacgcagtgaaattttttaccgtgtccttcaaagctctccctctgaaggaatgcatccagcgatccctacgagtacaagagagtcttagcactcattcatccatcagctgtttactgagcacctgctgtatgccctgcactgttggaggtgcttgggatacctcagttaaacgaaagaaggattctgcccttatggagctcacatggggtggaaggggagcagaagagagatcagaactctaaacaacaaacataatatctaagcaaataagtatgtgagagatgctgagtgcaatatggaaaaaaggtagaagcaggagaggatccgggccagagggaaggggcaagatgcagcatcaacagtgtgaccaggcatattcctctgctagggctgccatagcaa

SEQ ID NO: 10994 - DNA, 1475 bp, Artificial sequence
  DNA replication origin
agcctccccgacgagcaccacctcctgctccacagcgcccagtcccatcgaccacccaagggctgaggaatgcgagcccacggcgcaggactggcaggcagctccacctgcagccccggcgcgggatccactaggtgaaaccagctggcctcctgagtctggtggggacgtggagagtgtttatatctagctcagggattgtaaatacaccaatcagcaccctgtgtttagctcaaggtttgtgaatgcaccaatcgacactctgtatctagctgctgtggtggggccttggagaacctgtgtgtggaaactctgtatctaactaatctgatggggagtggagaacctttgtatctagctcagggattgtaaacgcaccagtcagcgccctgacaaaacaggccactcggctctaccaatcagcaggatgtgggtggggccagataagagaataaaagcaggctgcccaagccagcattggcaacctgctagggtcctcttcgtcattgtggaagctttgttcttttgctctttgcaataaatgttgctactgctcactctttgggtccacgctgcttttatgagctgtaacactcactgtgaagatctgtagcttcactcctgagcccagcaagaccacgagcccaccgggaggaatgaacaactccacacacgctgctttaagagctgtaatgctcaccgcgaaggtctgcagcttcactcctgagctagcgagaccacgaacccaccagaaggaagaaactccgaacacatctgaacatcagaagggacagacgccagacacactgccttgagagctgtaacactcaccgtgagggtccgtggcttcattcttgaagtcagtgagaccaagaacccaccaattgcggacacatggtcatgtggttcattcaatcattataaagcagacaacttctgagcaattaccatttgccaggtagggggctaggtattgagggtatgatggtgccacagacacagtcctactgccctcaagaacttactgtcgattgccctggccattggccttcttgggagaatggaagcattggtgtgggtcctagtggcatggtttgtgttactcttctcagctcaaccagaggcgaaagggaggcccagtggggaagaacagaaaagtatgtttaattgttattagaagacaatgtgagaaatgcaagagagtaggtaaaaggtatgaaggacctgagagaaggaagtcttagaagtaggtagaaaagtttcccagatgaagcgacatctaaactgacatgtgaaggataagtaggcgctaaacaggcgggggccagatgaaatggaagaagagagggagggcttgcaggttgcaaaagttggtgggagaaggatagcatcctatttgcgtctgtatccccaaggctcagcaccacgtctttcacaacagacttacattaaacagaatgaactaattctgaccc

SEQ ID NO: 10995 - DNA, 1098 bp, Artificial sequence
  DNA replication origin
caaaaggaaggagagccatttctggaattgtgtttgtgtaatcagaattctatgcaactccctagcgcatgctttcggttttctttctctgtagcttggtatttctttttatttatactgaggataaaatattcaaagcgaaatctcacattagagtgtcagaggaagagagaagcaacagcaattggggggtcctttggaaaagcaacatatgcagtatgtttttgctaaacagattctccaatgttcaagttttcagatgtttggatgcagtaaatttttggacaggcagatgcattatcttcctgggggaaaggacacaatttgacactattgcaactgaaggggaagctagcacagaaagctaatcctgagtgctgggagatgggggcttcagataggggagttcctcaagctgctgttaccctaagttggtacatccctgcagtttgttcctacagaaggataactactgatgcttcctaattaaccactggagaatagccatgatggtgctggttctcggagagttcgtggctgacatcccctgcttgtgacagcagctaaaatacaatttgaggaaagtagatggtgtgagtgggcaagctcagaggctggtccaaaatggctggaggagcaaggggaagaggggaattgagtgagtgggaatacccgggtaggggagggaaggaggtgggtacactctcagagcaagacagacccgatagaaaacaaaagggaagaaatgattgtgtgtcagctaacaatcgagcagacgctcacacaggatgcccagtcccatagagatggccaagtacaatttcttcagaatgggggcagtgattagtcacaatcctagaccttctaccaagcgtgtggacgtaagagggtaggaagtggggagcagggaggaaacagccccaacatatattttatcataactgttttcccagattaaaagcttgaacatttttcctcagtcactcaagcaacatgtaggtatctccaagacagggacctacgagcctaccaatctcactctgcgccacccccatcccagcagaatcagcccggttctcctgcttttccacttgctct

SEQ ID NO: 10996 - DNA, 936 bp, Artificial sequence
  DNA replication origin
cattcctgagtcaggaaggtgatgggagtgggaaggtggggaaatacagttggcttctctccagggtggatgtcaggcccttctccctccagattcgtcctatgagaccattagtactgtgctaatccgtagtagcgctttactcagttctccccaaacttctactgcatatttgtacttctttccaggtctctttctccagactccagtaaatagagaaatgtttggaaccatccatctctacacaaatagtcatgatacaaggtggaaggtgtaggcatctggagagtaaactaaggtgctataaaagctctgaaatgaaagggcaaaaaaaaaagggggggggcaagggatcttggaaaaatggatgcagattaaggtatttaaactggatcctaatgaatagatgtggccatttggaaatgagcaaaagctatgtggttgcagataagttgcagggtggggttggcaagggaaataaaaggatcaatgtaagagtgaaggggtgcttcagaatgactgggtgatccatctttcattcaatatgtagctatggagtgcctgctctgtgctggggacagcttatatcagacagagatggtccctgccctatgaactcacagtctagtaaaggcatgctcttgggcgttctttctggggatcaagccgattttgccctttctgttgtattcctaggtgagttatgacacagtttatcaggcgatggttctggctgcttgtattccagcccgaggatgcagtgcccagaccacgactggatgtgggtgtttcccatgttgacatgtctcctaggatgttccctttcggctaatgtctcagctcactgattattactgatcctttcacaaggtgactgaatctcaagtggtgtgggagggagtggatgtgtcttgtggtactattctagttaacata

SEQ ID NO: 10997 - DNA, 769 bp, Artificial sequence
  DNA replication origin
acgccggggacccagcgctcgggcaccggaggccggcctcgcaccggtgcggaggccggctctcgcgaggtgaggaggaaacgcaggaggaagaggagaaggagaaggaggagaaggaggagggccggagctgcccccgcccagccggagcccggcaggagcgcgaggaaaacctactccccccgccccgcgccgctctccccgccctctcccacgccttccgctttcacctagggctgtaggtgcggcgcggaggctgggcgggagctacgccggcccaagccccgccggggaccagcgagccgggaggaggagcaggcgccacagccgccccgcgccccgcgcccgcttgtaatccggtccgctccttattcagccgccgggaactgcgaggaggcgtcatgtagcagcagcagcaaatccgcctcgcatttgcaactcttttttttttttttggtggggcggggggcgcgcggcaaaattctgtctccgcccccccttttcttgcccacttccatttgcaagctgcatctgcctctctaaaaaaattgaggagttcggggaagggcagggggccataaatcagagttggacctgcaataacccccacacctacagggcaaccatgaccgaggagagctctgacgttcccagggagttgataggtaagattcacgcggttgttggttttccaccttcctctgcgtactcctcacctctctctcccttcccacctctgctttcccgcaggtctcgagaagtcttggcg

SEQ ID NO: 10998 - DNA, 930 bp, Artificial sequence
  DNA replication origin
ttctttctacacagacacagcaacaatctgatttctctttcctttccccacatttcccccttttctatttgacaaaaccgccatcatcatcatggcccgccctcaatgagctgttgggtaaacctcccagacggggtggcggccaggcagaggcgccccccatctccctaacgggacggctggccgggcggggggttgccccccacctcccagacggggcggctgccgggcagagacgctcctcacttcccggacggggtggctgccgggcggaggggctcctcacttctcagacggggtggccgggcagagacgctcctcacctcccagacggggtggcggttgggcagagacactcctcagttcccagacggggtcgcggccgggcagaggcgctcctcacatcccagacggggtggcagggcagaggcactccccacatctcagacaatgggcggccaggcagagacgctcctcacttcccagacaggatggcggccgggaagaggcgctcctcacttcccagactgggcgggtgggcagaggggctcctcacatcccagacgatgggcggccaggcagagacgctcctcacttcccagacggggtggcggccaggcagaggctgcaatctcggcactttgggagaccaaggcaggcggctgggaggtggaggttgtagcgagccgagatcacgccactgcactccagcctgggcaacattgagcattgagtgagcgagactccgtctgcaatcccggcacctcgggaggccgaggcgggcagatcactcgcggtcaggagctggagaccagcccggccaacacggcgaaaccccgtctccaccaaaaaatacaaaaaccagtcaggcgtggcggcgcgcgcctgcaatcccaggcactcggcaggctgaggcaggagaatcaggca

SEQ ID NO: 10999 - DNA, 1096 bp, Artificial sequence
  DNA replication origin
agcccacccggaggagtcgcaggaccttcagccgggcccaggcggccaaggagccggcataggagcctccgaagcagatccaggggctggaggaggagatgttaaagaggcgggaaagtgccaggcgggcagagaccacatcagccagcctagggtcaaaggggggactcggtcggtcctcatcgctgggaatccctgaagatttccccattctgggggaaacccggatccagagacatgaatgggtgaatctggccagaaaccagggccgttttctcatgacgtgtttccaagtgttctccaagccacatacacttcccagaacatgtgtgcctaggccaagggagaccctgtcctcgtccactttctagaaagccaccaccctctttcccttctcgttttaggtaggagaggaaaaatttccaagtcagtttagatgaaaacctgacaaatgtagggaagggttgagggcactcaaggagggctactaagaggagaaggaggggtcctaacctgatgagttgcaaggtattgggagagagaacagacacaaagagaaatggagagtgaagtttggatatgtctaacatcctctttctcctcccaagggctttctttcttccctaacctttctgaatggcttgcagttggtaccatcctgttgcagttagaaaaccgtttcgcttgtagaaaagattaagatgcagagagacagagatggagacaaagaggcacagatgtagatacagagacggagaaaatgagacaggcaaacagactgttacagacacagacagagataccaatgaggaaagaaaaagctaagttctgtaagaataaagcagatgaaagaaacaaaaagcaggtgaagtaaagttggaaaaatggtggcggtcgttaataggagtgagatgcactgaaggaggctggggtgagaggcataaaaacatctaggggaaggccacgccatgcagagggatgagttcaaaggctcaaggcaggaatgtgcgtgtaagtctggaggacagtgaggacttcaatgtagctggagcccagtgaaagtgagagagtataggtcagagttaactagaggcca

SEQ ID NO: 11000 - DNA, 1127 bp, Artificial sequence
  DNA replication origin
gacaaggttatatttacaaggatctctgtggatgctatgaaaaagttggattgtacagaggaagtgaaaaccatgagaccagagaagcggctgggaagggatcccggcaagaaagaatggaggttcccagcaggacagcagaggtaggcatagaaagcacaagggatggactacagagttgtccatgcagagtgaggaggactcagtaattgacaggctagctagaaaatgggaaggaagcaactaaaacaaggctcaagtttctagtctggtggatggggaaagggggccatccctggaatggggacacagagaaagaataggctgaagggaagatcactcaagtggagacctcagtgtgtgcgtgaggaggcatgtgagggccaagcacatgcatacactagtatggcttccaccttctccagcccaacatctgcaggttacacagtgcctgagagctgggtcgaaatgagtccagaccacctgtaagatgacttctctgggcatagtaaaaaggttgtttgaggggacaaagttagggttaggccagtcacttacagaagccgaactcggtacatgtctgatacaaccactgccggtcacccacaccagacagttgaggttctgtgctcctcagctgtgccactgtctctgctcgggaaaagcttaaacacttctggcccaggctgtgcaagacaatctagggaacaatgtacatacataagacataaattcctcctctcttcccagcaagccagggtgcagaggcctatgtccccagaggtcaaaagtcagaaatagaagggtgagttcctgagttctcctgggagtcagtggtcagagggggtggatgcctgggtccttgtgagttagagatcaatgcactagaagactgagaccttattacctgtgagagcttgggcaagtgataatctttcagacttcagtttccttttctgtaagtggcgataataatagtgcctatctcttgagaacttaatgaaataatatatgtgaagcactttatacagcacttggtccagacagtgctggaaaagcgacagctggattgcagttgtggatttagaggctgcagtcccaggtacctaggagaaccctatccccag

SEQ ID NO: 11001 - DNA, 1311 bp, Artificial sequence
  DNA replication origin
cggcgggctgaagggctcctcaagtgccgccaaagtgggagcccaggcagaggaggcgccgagagcgagcgagggctgtgaggactgccagcatgctgtcacctctcactagctacttaggaggctgaggtgggaggattgcttgacccaggaggaggaggctgcagtgagccatgaccgtgccactgccctgcagcctgagtgacagagcaaaactctgtctcaaaaaaagttttaggcagggcgtggtggctcacacctgtagtcccatcactttaggaggccaagacaggcagatcacctgaggtcagaagtttgagaccagcctggccaacatggtgaaaccttgtctctactaaaaatacaaaaattagccaggctgtggtggcatgtgcctgtaatcccagctactcgggaggctgaggcaggagaattgcttgaacctggaaggcggaggttgcagcgagccgagatcggggccgctgcactccagcctgggcaacagagcaagactccatctcaaaaaaaaaaaaaaaaggccggctgcgttggctcacgcctgtaatcccagactttgggaggccaaggcaagcagatcacctgagatcaggagttcgagaggaacctggccaacatggtgaaaccccgtctctgctaaaaataccaaaaatcagccgggtgtagtgatgggcgccagtaatcccagctgcctaggaggctgatttatcactataggaggctgagacaggagaatcgcttgaacccgggaggcggaggttgcagtgagctgagacagcgccattgcactccagcctgggcaacaagagggaaactccgtctcaaaaaataaataaataaatacagaagtttttaaaaagtggtctatttacagcagttcttttactcagcacagcatttccatatatcaagaaaatacaagaaaatacgaaaaaggcacaaaatgaaacaaaacaaatacaaatacacacagacagtttgaagaggaagaacaagcatcggaaccagactcacatatggtggggatgttagaattctcataccagaaatttgaaacaatgatgattaagatgattaagatgctgaagtctctgatgggtaaagtagacaccatacaagaatagataggtaatgttagcacagagatataaattataagaaccagaaagaaatgctagagatcaaaagcactgcaacagaaatgaaaatgattttgatggccttattggtagactagacatggcggaaaaaaagaatctctgatcttgctgtttatcccaatagaaagcatca

SEQ ID NO: 11002 - DNA, 934 bp, Artificial sequence
  DNA replication origin
gccgctcctactgggaagtgaggagcccctctgcccggccagccgccccgtccgggagggaggtgggggggtcggccccccgcccggccagccgccccgtccgggagggaggtgggggtgtcagcccccgcccggccagccgccccgtccgggagggaggtgggggggtcagccccccgcccagccagccgccccgtccgggagggaggtggcgggggtcagtccccctgcccggccagccgccccgtccgggaggtgaggggcacctctgcccggccgcccctactgggaagtgaggagcccctctgcccggccagccgccccgtccgggagggaggtggggggggtcagccccccgcccggccagccgccccctccgggagggaggtggggggggtcagcccccctgcccggccagccgccccgtccgggaggtgaggggcgcctctgcccggccgcccctactgggaagtgagtagcccctctgcccggccaccaccccgtctgggaggtgtgcccaacagctcattgagaacgggccaggatgacaatggcggctttgtggaatagaaaggcgggaaaggtggggaaaagattgagaaatcggatggttgccgtgtctgtgtagaaagaagtagacatgggagacttttcattttgttctgcactaagaaaaattcctctgccttgggatcttgttgatctgtgaccttaccctcaaccctgtgctctctgaaacatgtgctgtgtccactcaggattaaatggattaagggcggtgcaagatgtgctttgttaaacagatgcttgaaggcagcatgctcgttaagagtcatcaccaatccctaatctcaagtaatcagggacacaaacactgcggaaggccgcagggtcctctgcctaggaaaaccagagacctttgttcacttgttta

SEQ ID NO: 11003 - DNA, 1274 bp, Artificial sequence
  DNA replication origin
gacggggcggctggccgggcggagggctgacccccccacctccctcccggacagggcggctggccgggcggagggctgacccccccacctccctcccggacggggcggctggccgggcagaggggctcctcacttcccagtaggggcggccgggcagaggcgcccctcacctcccagacggggcggctggctgggcggagggctgacccccccacctccctcccggacggggcggctggccgggtgggggggctgacccccccatctccctcccagacggggtggctggccgggctgaggggctcctcacttcccagtaggggcggccgggccgaggcgcccctcacctcccggacggggcggctggccgggcggggggctgaccccccacctccctcccggatggggcggctggacgggcggggggctgacccccccccacctccctcccggacggggtggctgccgggcggagacgctcctcacttcccagatggggtggctgccgggcggaggggctcctcacttttcagacggggtggttgccaggcagagggtctcctcacttctcagacggggcggccgggcagagacgctcctcacctcccagacggggtctcggccgggcagaggcgctcctcacatcccagatggggcggcggggcagaggcgctccccacatctcagacgatgggcggccgggcagagacgctcctcacttcctagatgtgatggcggctgggaagaggcgctcctcacttcctagatgggatggcggccgggcggagacgttcctcactttccagactgggcagccaggcagaggggctcctcacatcccagacgatgggcggccaggcagagacactcctcacttcccagacggggtggcggccgggcagaggctgcaatctcggcactttgggaggccaaggcaggcggctgggaggtgtaggttgtagtgagccgagatcacgccactgcactccagcctgggcaccattgagcactgagtgaacgagactccgtctgcaatcccggcaccttgggaggccgaggttggcggatcactcgcggttaggggctggagaccggcccggccaacacagcgaaaccccgtctccaccaaaaccagtcaggcgtggcggcgcgtgcctgcaattgcaggcattcggcagactgaggcaggagaatcaggcagggaggttgcagtgagccgagatggcagcagtacagtccagcttcggctccgcatgagagggagaccgtggggt

SEQ ID NO: 11004 - DNA, 1187 bp, Artificial sequence
  DNA replication origin
tctggtctctgttttccccacatttccgccttttctattcgacaaaaccgccatcgtcatcatggcccgttctcaatgagctattgggtacacctcccagacggcgtggcggccgggcagaggggctcctcacttcccagacggggcggccgggcagaggcgccccccacccacctcccggacggggcggctggccgggcgggggctgccccccacctcccggacgaggcgcctggccgggcgggggctgccccccacctcccggacggggcggctgccgggcggagacactcctcacttcccagacggggcggctgttgagcggaggggctcctcacttctcaggcggggcggccggtcagagacgctcctcacctcccagacggggtggtggtggggcagagacactcctcagttcccagacggggtcgcggccgggcagaggcgctcttcacatctcggacggggcggcggggcagaggcgctccccacatcccagacgatgggcggccgggcagagacgctcctcacttcctagacgggatgacggcagggaagaggcgctccgcacttcccagactgggcggccgggcagaggggctcctcacatcccagacgatgggcggccaggcagagacgctcctcacttcctagacggggtggcggccgggcagaggctgcaaactcggcactttgggaggccaagacaggcggctgggaggtggaggttgtagcgagccgagatcacgccactgcagtccagcctgggcaacactgagcactgagtgagcgagactccgtctgcaatcccggcacctcgggaggccgaggctggcagatcactcgcggtcaggagctggagaccagcccggccagcacggcgaaaccccgtctccaccaaaaaatacgaaaaccagtcaggcgtggcggcgcgcgcctgcaatcccaggcactcggcaggctgaggcaggagaatcaggcagggaggttgcagtgagtcgagatggttgcagtacagtccagccttgggtcggcatcagagggagaccgtggagaggcagtggcagaggcagaggcaggggcaggggcagaggcagagggacaggggcttttcttttatttttgcataaagacaaactttattgagcccctcagcactagctctctttctcctgcacagtcttcgt

SEQ ID NO: 11005 - DNA, 1002 bp, Artificial sequence
  DNA replication origin
tgcccggccgcccagtctgggaagtgcggagcgcctcttccctgccgtcatcccgtctaggaagtgaggagcgtctctgcccggccgcccatcgtctgggatgtggggagcgcctctgccccgccgccccgtccgagatgtgaagagcgcctctgcccggccgcgaccccgtctgggaactgaggagtgtctctgccccaccaccaccccgtctgggaggtgaggagcgtctctgaccggccgccccgcctgagaagtgaggagcccctccgctcaacagccgccccgtctgggaagtgaggagtgtctccgcccggcagccgccccgtccgggaggtggggggcagcccccgcccggccaggcgcctcgtccgggaggtggggggcagcccccgcccggccagccgccccgtccgggaggtgggtggggggcgcctctgcccggccgccccgtctgggaagtgaggagcccctctgcccggccgccacgccgtctgggaggtgtacccaatagctcattgagaacgggccatgatgacgatggcggttttgtcgaatagaaaaggcggaaatgtggggaaaacagagaccagattgttactgtgtctgtgtagagagaagtagacataggagactccattttgttctgtactaagaaaaattcttctgccttgggatgctgttaatctataaccttacccccaaccccgtgctctctgaaacatgtgctgtgtccactaagggttaaacggattaagggcggtgcaagatgtgctttgttaaacagatgcttgaaggcagcatactcgttaagagtcatcaccactccctaatcgcaagtacccagggacacaaacagtgcggaaggcggcagggccctctgcctaggaaaaccagagacctttgttcacatgtttatctgctgaccttctctccactattgtcctatgaccctgccaaatccccctctccgagaaacacccaagaatgatcaatgaatac

SEQ ID NO: 11006 - DNA, 849 bp, Artificial sequence
  DNA replication origin
aatcagccccccgcccggccagccgccccgtccgggagggaggtgggggggtcagccccccgcccggccagccgtcccgtccgggagggaggtgggggggtcagccccccgcccggccagccgccccgtccgggaggtgaggggcgcctctgcccggccgcccctactgggaagtgaggagcccctctgcccggccagccgccccatccgggagggaggtgggggggtcagcccccaacccggccagccgccccgtccgggagggaggtgggggggtcagccccccgcccggccagccgccccgtccgggaggtgaggggcgcctctgcccggccgcccctactgggaagtgaggagcccctctgcccggccggccgccccgtccgggggggaggtgggggggtcagccccccgcccggccagccgccccatccgggccgtgaggggtgcctctgcccggccacggccccgtctgggaggtgtgcccagcagctcattgagaacgggccaggatgacaatggcggctttgtggaatagagaggggagaaaggtggggaaaagattgagaaatcggatggttgccgtgtctgtgtagaaggaggtagacatgggagacttttcattttgttctgtactaagagaagttcttctgccttgggatcctgttgatctgtgaccttacccccaaccctgtgctctctgaaacatgtgctgtgtcaaactcagggttaaatggattaagggcggtgcaagatgtgctttgttaaacagatgcttgaaggcagcatgctccttaagcgtcatcaccactccctaatctcaagtacccagggacacaaacactgcag

SEQ ID NO: 11007 - DNA, 1172 bp, Artificial sequence
  DNA replication origin
ccctcccggacggggcggctggccgggcggggggctgattccccccacctccctcccggacggggcggctggctgggcagaggggctcctcacttcccagtaggggcggccgggcagaggcgaccctcacctcccggacggggcagctggccgggcggggggctgacccccccacctccctcccggactgggcggctggccgggcgggggggctgatccccccacctccctcccggacggggcggctggctgggcagaggggctcctcacttcccagtaggggcggccgggcagaggcgcccctcacctcccggacggggcgtctggccgggcggggggctgacccccccacctccctcccggacgggacggctggccgggcggggggctgacgcccccacctccctcccggacggggcggctggcctggcggggggctgacccccccacctccctccaggacggggtggctgccgggcggagacgctccttacttcccagacggggtggctgccgggtggagaggctcctcacttctcagacggggcggctgccgggcagagaggctcctcacttctcatacggggcggctgcccggcggagggtctcctcacttctcagacggggcggccgggcagagacgctcctcacctcccagacgggatggcggccgggcagaggcgctcctcacatcccagacagggcggcggggcagaggcgctccccacatcccagacgatgggcggccgggcagagacgctcctcacttcctagatgtgatggcggccgggaagaggcgctcctcacttcccagatgggatggcggccgggcagagacgctcctcactttccagactgggcagccaggcagaggggctcctcacatcccagacgatgggcggccaggcagagacgctcctcacttcccagacggggtggcggccgggcagaggctgcaatctcggcactttgggaggccaaggcaggcggctgggaggtggaggttgtagcgagcggagatcacgccactgcactccagcctgggcgccattgagcactgagtgaaccagactccgtctgcaatcccggcacctcgggaggccgaggctggcggatcactcgcggttaggagctggagaccagcccggccaacacagcgaaaccccgtctcc

SEQ ID NO: 11008 - DNA, 730 bp, Artificial sequence
  DNA replication origin
gagagagcgccggagagttgggctcagtgcagagctcggcgccggggcccatgcccgtgcgcccccgcaggccggcgccatggcctccgggagtgtggccgagtgcctgcagcaggagaccacctgccccgtgtgcctgcagtacttcgcagagcccatgatgctcgactgcggccataacatctgttgcgcgtgcctcgcccgctgctggggcacggcagagactaacgtgtcgtgcccgcagtgccgggagaccttcccgcagaggcacatgcggcccaaccggcacctggccaacgtgacccaactggtaaagcagctgcgcaccgagcggccgtcggggcccggcggcgagatgggcgtgtgcgagaagcaccgcgagcccctgaagctgtactgcgaggaggaccagatgcccatctgcgtggtgtgcgaccgctcccgcgagcaccgcggccacagcgtgctgccgctcgaggaggcggtggagggcttcaaggtgagggcgcggatccgggagggcgggagcgcgagtcggacaaagggaggagagagccaaaggggcttccttttttccgcctagaaaatggctgagccggacgtgtggttcacagccgtcatttcctctctgtccgctccagagcctcagcactcagatttggaggaaaacctgtagctggcgaggaagccaggagtgtccccacccccactctcttttctctgtttaccc

SEQ ID NO: 11009 - DNA, 1496 bp, Artificial sequence
  DNA replication origin
aactctcttgcgggccagtgcgagttccgggtgggcgcgggttccgggggccccacactcggagcggccggccggcgccaccgctccgggcagtgaggggtttagcacccgggccagcagctacggagggggcgctgggtcccctaccgctgccggcccacccgcgccgcgctcgcgtgcttcagccgcctcctcgcggggcagggcttgggacctgcaacctgccatgcccgagaattcgcggtgggctcctgcgccgccggagcctccccgacgattgccgccccctgcttcacggcttcccgtcccatccaccgcccaagggctgagaagtgcgggcgcacggcgcgcgggactggcgggcagctccgcctgcggcccgggtgcaggatccaccaggtgaagccagctggactcctgagtctagtggcgacttggagaacctttatgtctagctaagggattgtaaatataccaattagcactctgtatctagctaaactggtggggacttggagaacctttatgtctagctaagggattgtaaatacagcaatcagcactctgtgtctagctcaaggtttgtaaacaaaccaatcagcactctgtgtctagctaatctggtggggacttggagaacctttatgtctatctaagggattgtaaatacaccagtcagcactctgtgtctagctcaaggtttgtaaatacaccaatcagcactctgtgcctagctcaaggtttgtaaatgcaccaatcagtgctctgtgtctagctaatctagtggggacttcgagaacttttgtgtctagctcagggattgtaaacacaccaatcagcaccctgtcaaaacggaccaatcggctctctgtaaaatggaccaatcagcaggatgtgggtggggccagataagggaataaaagcaggttaccggagttggccattgtaatttgttttgtcctgtttcacattgtggtggttttattttttactattagctgcttggatctgcattttgttttgtgaggtgtaacactgtgagggcctgtagtttcactcttgaggtcagcgaggccacgaacccacctggaaaaacaaacagttccagatatgccgccttaagagctgtaacactcattgtagaggtctgcggtttcacttctgaagctagctagtcgacgaacccaccaaaaggaacaaactccaaacacgtctgactatcagaaggaacaaactccagacacgttttttagaactaacaccctgagggtctgcagcttcattctagaatcatgccaagaactcacaaatttctgacacattgcttttccgcaggaggttgcgggaagacgtacaaggaagggtcgggatggtgcttgaggtggtcagagccacacccagggctgcattctcatcagagacacctctaagttactgcgaagtcggagacaccagaaaggaagactccaacgtattccgagaggagtggaggcaaa

SEQ ID NO: 11010 - DNA, 1674 bp, Artificial sequence
  DNA replication origin
tcccccctgagctcctaacgctccccaacagctacccctgccccccacgccatggggcccggggccccttttgcccgggtggggtggccactgccgcttctggttgtgatggcggcaggggtggctccggtgtgggcctcccactccccccatctcccgcggcctcactcgcgggtccccccgcacccctcctcagaacggcgcgcagtgtacatcggggcactgtttcccatgagcgggggctggccagggggccaggcctgccagcccgcggtggagatggcgctggaggacgtgaatagccgcagggacatcctgccggactatgagctcaagctcatccaccacgacagcaaggtagccctggacatgggggtgggtgggaggtgggggcttgcggggcagggggccagccagctgcacgcgcccccatctgtctgagtcgtctctgggattgcgaggcagacccctcccttgtgtgactggcaggagatgggctgggggtgcaggagcttggggagagtcgcaggggctggaggtccaagatgagggtctaggggctcaagatggttaagcatgctgcaaggcagacccttctgccccgctgcgggagtctcgcagaagtgtcggggtttggagaaactggtggtggatttaaggtattaggagacactgatcctctgagggagtaaactaaccctggaatgggttgggggtggagggaatgtcagaggtggggagctggattgggggtttacatttaccatggtaacaaggtaaaatcttggcgtaggttggagctggaaggaatagggacagaatgaggaaaattttgagagacttgagagctctagtttatttatcttaacaaaacagcaaggtagtggtgagccctacctgactccttctcatccttctattcccaaccctgttgagcattcccagactgtgggatagatggcatatggtgattggggaaggctaatgatcaagaggtgggcagaggcactgggaaaatgaattggattggggatccacatgggaacccccacaatagcatggggatgaagaagagtcaacatacaaggagaagagaacagaaaagaatggcagtgggggagaggggcaaggaggtagcgtggggataatgagagatcttggggcaccttatggaacttgggtcctgaccttcccttcccttatagcattgtggcctctaggatgtgagaagggaaatgggatgtagggattagggaggtgagttgagggagagagagaaggtaagcaaatttgggtccaggggtattaggggatagcttataatgaggttttttttcccacccctctcccctacatgaataattgggggtgcagggaaggatgtgacacagggaaggagatttaagatctcaaatttatcttcactgacatgtggccccagagacttaaggaattgggttagggtgaaatagagtacacaaggtgagaatttggtgatcttaccaaatatcaaccttggggtgatccaaggatttatattcatttttagaacatcactatacacctagaaataggtgtgtgtctgggataggtgtgtgaggggacagaagtgaggttgaaggtagggtgcttgaagagaagagagcacaaggattatcaggagcttggcaagag

SEQ ID NO: 11011 - DNA, 1724 bp, Artificial sequence
  DNA replication origin
agtgggaggcccacaccggagccacccctgccgccatcacaaccagaagcggcagtggccaccccacccgggcaaaaggggccccgggccccatggcgtggggggcaggggtagctgttggggagcgttaggagctcaggggggacacttttcctggggagggctgctaagagggtgccggggaggcgcctccatccctgattttgtggggaggagggggcgagggccccggagaagcagggaaggttggcttcctacggcccccgcggctctcgccaccgtcgccgccaccgcggactctcctcgcggactgactgaccgacggaggggaggaggaggagcaggagggagatgtggggctgggagggggctctgacgtcacgggcggcgcgcggcagcggggggtgggggggcgggcgggagctggggaggcaggaagggggcggggagggaagcgagcgccgaggtgggagcgacagtcggaggggcggggaggggaggggggatgcaacctcgaggaggaaaggaacgaaagaggaagggagggatctcacttaaggggacccgaggggaggagaaatggggacggggcgtgccaggagggcggggtgggcggagggagccgcgggaggctgaagcacggaggaaccagggtaggaagggaaggatgcgagtgggacgggagagaaacggggctggcgcctgaggtctgaagtgggagtatgagtcgatacagtgaagcactgaggatgtgggggagaggaaacggttttggagggaacgagttgggtacggaagggaggctggtttgagggagtggtggggtcgtggaagggagcctggggctgggtagacagaagcctaagaaagggagacaggacatggaattgagaaaagacgagggaaggggtacacggaaggaaaagatgtggggaagagcgcgagaggcctggccagggttgggatgggtgggacaggctgagaaagtccattaggtgaaatcctaggaggcagcaggctggaaaaggttccagcgaaggtcgcaaggaaccccacaggggaaaacgtggtgggagctcagggtctcccagcaccctgccgccctctgctgggctctgcctgacaccggcgaggctcagtctgggaggaggtggagcccagggaagtgtagccaagcagggacaaggagagaccgcagcctcgtggaaaaccgggactggaggcaggaaacaggtagggagggaagggggtggccgcaaactggggtgggttggggaaggtgcgaaaggacgacgccccgtagcctaagggcagaatttcaggggggtggagggtgcagagtgaaggggagggcattgcagtgcgcgcggtaagggtttctcatctcacctgagtgtggcgttcgattcactggcagcaggaaagacggggatcagagaagagttaccactggcgcccagcttccctggcctgatccccagccccctcccacacctgtccatgctgaagaccggggagagcagaagcctgcgtttctgaggggagggtgcctggggataagaacaaggtgggtctgggggtaagggggtcaggacttattttcttcttcgatttttcataggacaacagaatttgagacgggaatgccaatagctaagtttggggcagatcttggttctgtggtgcctgaatattacaaaattgggagtctttaagaaaaaaaa

SEQ ID NO: 11012 - DNA, 1287 bp, Artificial sequence
  DNA replication origin
tcttgggcatatggtctctgggttggtgacagaggtattcaaaaatgtgatgaaatcattttagaatttttttgtcatcatctgccactaatgatcctcaaagagaataactgacaagatgaattatcaatgttataggccaatgatcagtggcctaatgaagggaggatgaaatgaactgtgcaggctgctagctctactacctccaaccgcacagagcaaaattgctcttatgtagtagtcattcaataaatgtatttgtgaattttggtatactggatttaaagtgctgacttgcaagcagtaatgctaagtttgcggcaggaaaaggaatagtcttgaagaggggaggggcttccgaggctactcaccacagcggctgggtgtgtccatatctgtccaggagccgttggccaggcacttgcggaccttgggccccaccacctcgcgctccccccggcacacatactcaatctcatagtccactggcaggaagttgatagccttcacctggtcccgagtcaggccccggtacctgatgcccccttcccagggcgggtgtatgatctggcaacctaaggggtgagtcggggaggcatacagagaggaatggtgggaaagaggaaaaggcaggctccccagtgggaggaaggggagagtagggcgtggtctgtgggcaggctggggacagaggaagagggatggggcactagagggtgggagtggggacaggtacagatcccctggctaaaggacagagagtaaagggccagggttaaagctgatgagagaacccacaagtggggagggaagggtgctgggtggaggtaagaaagaaaagtaattaagaaatcatgaagggtatgatatgtgggtggagcttttctttaaaaaaaaaggctaaatgaggatattcgagttgaattaggataggaggataaagggaggctaataagatcatctggacagcaaagtgggaccaagaaaagggagtaattgaggtagtaatgtggggctgggaaaggggattgaggcggagaaaatgcacaggaaggtggtatagtgtagcaatgtgggcagagaaaagaggtgctggatagtaacgtggggtgacagaaggaggtcagcagtagtaaagtcgggccgagcagaaggggttgccagaccgggatgatatgtgggactgatgggatagtgatgaggaccagaaatgaggagatgcagggaaagggaagtggagcgaaggagggccggaggtcgtcgaagaaggatgcaccttctgaggtg

SEQ ID NO: 11013 - DNA, 1318 bp, Artificial sequence
  DNA replication origin
ccccggctctccccgggcctcaaggccccaggcccggccgctcctccccgctcccccctcccttctcctccacctttctcctcctcccgtccctcctcccctcgaatccaggctccagcctggccagggtctctcccctcctctctcgcttcccccaaaccccacccctgtctcttcttccccggggcggcggcagccacgggagcggggagcggggagccgggagggaaggaggcggcgccggggaccagggagagctcccgggcggagggaagaaggagggtgcaagggaaggcagggcggggggaagagaggggaagaccggggagagggcgcctcccacaacccgagccccgggagccgccccggatcccagccccgccctggaccgcccacagcgcggtggggcgggcggtggagaggcgcggggctgagaggtgggggagagggaggtgccctggtgcacacgcactcgtcggggggcgccggtcactgccgagggacctgcgggccaaacaactggaagctggggtgggggagagggaacccgagccaaaggcagaggagctggcgctgagacagggagtctgggatgaaggtggagaaagacggctgcacaaagagaaggcagccctagatccgggtgagaggagagaggcagaggcagatgcccaggagaactgcgaccggagggcgagaaagaagcctgggtcagaaggaggtgggggagggggactgaggaccacctaagcgcaagaagggttgggtgtagaagagatttctgggagactagagcagctccatggtccagcagcattgctactcgcctgctctgcagggaacgcgcagaacggattggaggcaaaaaacaaaacagggagggggacatcaaggagagaaattgaagtacgaagggagtaaaaggacaagagaaaagaacctcagggtggtttagaagccagtattacctgatgtactccagcagagcctagcaaacagtatttcttgaccaagggcaaactggaagctctaaagacagcaggtacagacctttttgacggctccagaagctcttggctataccttgaagtggaggggtgtgtgtgtgtgtgtgtgtgtgtgtgtgtgtgtgtgtgtgtgtgtgtgttgtgctgttgttgttcgtaggcctgagtttgggctgggagaggaaacagtgggctccttgttgggggggacaaaaaaaaagctgctttctggctggtcctagggggaaaaatggtaggaagaaaccaaacactgagagactgactagaattgagattctcaacctccaacc

SEQ ID NO: 11014 - DNA, 1066 bp, Artificial sequence
  DNA replication origin
cgcgtcaggtgagtagagcggcggcggggagtcgcgctagcggtagtagaggctgatgttggatgttgtccccactcctctgactcttccgcaggccaggggagcactgcgcccctaatcttggaggggcttccaacctctggggtcctccggggaaacgtgggttagtctggggtgtatccaggtgccctgtccactgtgggcactctggggattccgggccgaggaagggctcctggcacgtgttgaaaaagtcggcatcccagaaggaagattctgggcggatgggcatcggggaaggtagtcccaaccaatgggaccgtttctgagcacataagcgcattcagtgggtgctaacaagcgcctgctttgccaggcgacagtgagcaaaaccggctttgttcccggccaccggaagcttcgaggctggggttccggatctgggcgcccaatgacaaactaagcgcggaggacagggccaggagcgcccaccagggcggcgatctggtgggtaggtgcagggcaatggctggaaagggtccccgaagccctgagcagagaccaaagggccgtgcgactgcaggaaggccattttgcttggctgacaggcggaaaactcacgtggctggagtagcagggttggtgacgacaagggtgaatcccactaagcattgcaactgtttgcggtgtgaggggtgagggggattctcatcattctcagaattgctgtggataaagggttttgggttggagagagactgggtgcactcaaaggactgaaagatggcgacgacacattccctcagaggatttacattctggaagggtggggacaggcccgggtacagataagcccgcaggcggcctccagctcttacagtcgaaagtctgatgagttatgcccagtctccttcctcctcccgccggcatgaggtttggggccctgtggatgaaggaagttcatgggaggcaaacgtgcctgggcaagcaacagccgcagagattcagtccccacgggggttagaatccacacttagggcctctgcctaccgcctccagcaaatgc

SEQ ID NO: 11015 - DNA, 1284 bp, Artificial sequence
  DNA replication origin
ctggccaggcagggggctgatccccccacctccctcccggacggggcggctggccgggcggggggctgaccccccccacctccctcccggacggggcggctggccgggcagggggctgaccccccctcccccctcccggacggggcggctggccgggcggggggctgaccccccacctccctcccggactgggcggctggccgggcggggggttgacccccccacctccctcctggacggggcgactggccgggcagaggggctcctcacttcccagtaggggcggccgggcagaggagcccctcacctcccggccggggcggctggccgacccccccccccccgcctccctcccggacggggcggctggccgggcagaggggctcctcacttcccagtaggggcggccgggcagaggagcccctcacctcccggacggggcggctggccgggcggggggctgaccccccccacctccctcccggacggggtggctgccgggcggagacgctcctcacttcccagacggggtggttgccagacggaggggctcctcacttctcagacggggcggttgccaggcagagggtttcctcacttctcagacggagcggccgggcagagacactcctcacctcccagacagggccgcggcccagcagaggcgctcctcacatcccagacagggcggtggggcagaggtgctccccacatctcagacgatgggcggccgggcagagacgctcctcacttcctagatgggatggcggcggggaagaggcgcttctcgcttcctagatgggatggcggccgggcagagacgctccccactttccacactgggcagccaggcagaggggctcctcatatcccagacgatgggtggccaagcagagacgctcctcacttcccagacggggtggcggccgggcagaggctgcaatctcggctccttgggaggccaaggcaggcggctgggaggtggttgtagcgagccgagatcacgccactgcactccagcctgggcaccattgagcactgagtgaacgagactccatctgcaatcccggcacctcgggaggccgaggctggcggatcactcgcggttaggagctggagaccagcccggccaacacagcgaaaccccatctccaccaaaaaaaaacgaaaaccagtcaggcgtggcggcgcgcgcctgcaatcgcaggcactcggcaggctgaggcaggagaatcaggcagggaggttgcagtgagccgagatggcagcagtaccgtccagctt

SEQ ID NO: 11016 - DNA, 922 bp, Artificial sequence
  DNA replication origin
gaggggcgcctctgcccggccgcccctactgggaagtgaggacccctctgcccggccagccgccccgtccgggagggaggtgggggggtcagccccccgcccggccagccgccccgtccgggagggaggtggggggatcagccccctgcctggccagccgccccgtccgggaggtgaggggcgcctctgcccggccgcccctactgggaagtgaggacccctctgcccggccagccgccccgtccgggagggaggtggggggaacagtcccccgcccggccagccgccctatccaggaggtgaggggcgcctctgcccggccgcccctactgggaagtgaggagcccctctgcctggccagccgccccgtccgggagggcggtgggggggtcagcccccctcccggccagccgccccatctgggaggtgaggggcacttctgccgggccgcccctactgggaagtgaggagcccctctgcccggccacgaccccgtctgggaggtgtgcccagcggctcattggggatgggccatgatgacaatggcggttttgtggaatagaagggcgggaagggtggggaaaaaattgagaaatcggatggttgcggggtctgtgtggatagaagtagacatgggagacttttcattttgttctgtactaagaaaaattcttctgccttgggatcctgttgatctgtgaccttatccccaaccctgtgctctctgaaacatgtgctgtgtccactcagggttagatggattgagggcggtgcaagatgtgctttgttaaacagatgcttgaaggcagcatgctcgttaagagtcatcaccactccctaatcttaagtacccagggacacaaacactgcggaaggccgcagggtcctctgcctaggaaaaccagagacctttgttcacttg

SEQ ID NO: 11017 - DNA, 1404 bp, Artificial sequence
  DNA replication origin
tatcaaacacacacacacacacacacacacacacacacagaaatatcaagtttggcaaacaggttgcgaaactggaacctttgtgtaatgcatttggaaatacaaaatagggcacctgttatggaaaacagtgtgttgattcctccaaaaattaaaaaatgaattaccagctaggtgtggtggctcacgcctgtaatcccagcacttcgggaggcttaggcaggcagatcacgaggtcaggagattgagaccatcccggtcaacatggtgaaacccagtctctattaaaatacaaaatattagccgggtgtggtggtgggcacttgtaatcccagctacttaggaggctaaggcaggggaatcacttgaatccgggaggcggagcttgcagtgagccgagaccgcgccactgcactccaactttggcgacagagggaggcgccgtctaaaaaaaaaaaaaaaaaaaaaaaaaaaaagaagcagttggacacacggcctgtgttgggtctgggtagaggaggacagatgtgcagggcaaggactggaggatggggtgagcatggtgtgggggtgaccctgggggaactttggttagggtgaggacaggaggggagggtgctctgagtgagggtggggcttgggaaagatgagaacttgctgagggcccaaggcagctgggcaagaggtaggagcagcacaaggtcccaaggcggagaggggcggagggaccagggagggatggtccagcacccgtgggctggagtggggggtcctcaagagggtggggctgaggatgaaggagtagggaaggggccaccgtgaggcagggcccagagcaggcacctgcactagaggggagggggcatctgccctgccctgtgccctgcctaaggcccaaccaacattagcactagggctccccttgggtggtctagaggggagtgggacggagggaagaccctgggacaaaaggcggcaccagagagttagggtcagggagagttgggagtgggaggcataggggcagccctgggttaaggctgcttctaggaaaggcccataagggaggcaggagggacctgcggtggcgggggcaggggatgaggcagaggacatcctagaaatgtatcagagaactgcagataggaaggggtaacagggagctgggagggcaacaggacccaaggtgccctgagggcaggggaggaggtgggagggaatctggtgtccttagatcactggagttaatagtagcagggaaggatgcaagacaagagaggatccccggcagcgggaggccaggggagaatgagctggggatgagagaagtcgcaggaagaatcctctgcccggagcctgcagactccaacccctcagcgtgagggtcaggagccccacagtccc

SEQ ID NO: 11018 - DNA, 763 bp, Artificial sequence
  DNA replication origin
gggaggccccgcgttggggattctctcctccttctcctaacctgtgtcgggtccttcttcctggatactcaccgggcggccccagttctcactcccattaggtgacaggtttttagagaagccaatcagcgtcgccgcggtcctggttctaaagtcctcgctcacccacccggactcattctccccagacgccaaggatggtggtcatggcgccccgaaccctcttcctgctgctctcgggggccctgaccctgaccgagacctgggcgggtgagtgcggggtcaggagggaaacagcccctgcgcggaggagggaggggccggcccggcgggggcgcaggactcggcagccgcgccgggaggagggtcgggcgggtctcaacccctcctcgcccccaggctcccactccatgaggtatttcagcgccgccgtgtcccggcccggccgcggggagccccgcttcatcgccatgggctacgtggacgacacgcagttcgtgcggttcgacagcgactcggcgtgtccgaggatggagccgcgggcgccgtgggtggagcaggaggggccggagtattgggaagaggagacacggaacaccaaggcccacgcacagactgacagaatgaacctgcagaccctgcgcggctactacaaccagagcgaggccagtgagtaactccggcccagggagcagatcacgacccccacctccatgccccacggacggcccgggtactcccgagtctccgggtctgggatcca

SEQ ID NO: 11019 - DNA, 1393 bp, Artificial sequence
  DNA replication origin
ccactccatgaggtatttcagcgccgccgtgtcccggcccggccgcggggagccccgcttcatcgccatgggctacgtggacgacacgcagttcgtgcggttcgacagcgactcggcgtgtccgaggatggagccgcgggcgccgtgggtggagcaggaggggccggagtattgggaagaggagacacggaacaccaaggcccacgcacagactgacagaatgaacctgcagaccctgcgcggctactacaaccagagcgaggccagtgagtaactccggcccagggagcagatcacgacccccacctccatgccccacggacggcccgggtactcccgagtctccgggtctgggatccaccccgaggccgcgggacccgcccagaccctctacctgggagaaccccaaggcgcctttaccaaaatccccgcgggtgggtccgggcgagggcgaggctcggtgggcggggctgaccgagggggtggggccaggttctcacaccctccagtggatgattggctgcgacctggggtccgacggacgcctcctccgcgggtatgaacagtatgcctacgatggcaaggattacctcgccctgaacgaggacctgcgctcctggaccgcagcggacactgcggctcagatctccaagcgcaagtgtgaggcggccaatgtggctgaacaaaggagagcctacctggagggcacgtgcgtggagtggctccacagatacctggagaacgggaaggagatgctgcagcgcgcgggtaccaggggcagtggggcgcctccctgatctcctgtagacctctcagcctggcctagcacaaggagaggaggaaaatgggaccaacactagaatatcgccctccctctggtcctgagggagaggaatcctcctgggtttccagatcctgtaccagagagtgattctgagggtccgtcctgctctctgggacaattaagggatgaagtctctgagggagtggaggggaagacaatccctggaagactgatcaggggttccctttgaccccacagcagccttggcaccaggacttttcccctcaggccttgttctctgcctcacactcaatgtgtgtgggggtctgactccagctcctctgagtcccttggcctccactcaggtcagaaccggaggtccctgctcccccgctcagagactagaactttccaaggaataggagattatcccaggtgcccgtgtccaggctggtgtctgggttctgtgctcccttccccaccccaggtatctggttcattcttaggatggtcacatccaggtgctgctggagtgtcccatgagagatgcaaagtgcttgaattttctgactcttcctttcagacccccccaagacacacgtgacccac

SEQ ID NO: 11020 - DNA, 1100 bp, Artificial sequence
  DNA replication origin
taaggtatttcagcaccgccgtgtcccggccgggtcgcggggagccccggtacatcgcagtgggctacgtggacgacacgcagttcgtgcggttcgacagcgacgcggcgactccgaggatgtagccgcagtcgccgtggttggagcaggagggaccggagtattgggaccggagcacacggaacatcaggcccgcgcacagactgacaagagtgaacctgcccatgccgcgccgctactaccaccagagctaggccggtgaatgaccccggcctggggcgaaggtcacgacccctcctcatcccccacggacgtcccgggtcccccccgcgagtctccggctccaagatccaccccgaggctgcgggacccgccagatcctcgacccgggagaggcccaggcgcctttaccaggtttcattttccgtttaggccaaaatccccgcgggttggtcggggcgggggcggggctcggtgggcggggctgaccgcgggggcggggccagggtctaacaccctccagataatgtatggctgcgacttggggctggaagggcgcctcctccgcgggtatgaacagcacgccaacgatggcaaggattacatagcccggaactaggacctgcgctcctggaccgcggcggacatggcggctcagatcaccaagcgcaagtgggaggcagaagaatttgcagagcagatcagggcctacctggagggcacgtgcgtggagaggctcgcagacacctggagaacgggaaggagacgctgcagctcacgggtaccagggaacacaagacgcctccctgatcgcctgtagatctcctgggctggcttcccacaaagagagaaggaaaatgggaccaacactagaatgtcgtcctctctctggtcctgagggagaggaatcctcctgggtttccagatcctgtacaagagagtgactctgagggtctgccctgctctctgatacaattaagggatgaaatctctgaggaaatgaagggaagacaatccctggaatactgatgaggggttccctttgacaccagcagcagccttgggccccgttacttttcccctcaggccttgttctctgc

SEQ ID NO: 11021 - DNA, 1170 bp, Artificial sequence
  DNA replication origin
ccagacggggtggtggccgggcagaggggctcctcacttcccagtaggggcagccgggcagaggtgcccctcacctcccggacggggtggctggctgggcggggggctgacccccccacctccctcccggatggagcggctggccaggcggggggctgaccccccccacctccctcccggacggggcggctggccgggcagaggggctcctcacttcccagtaggggcggccgggcagaggcgcccctcacctcccggacggggaggctggccgggcggggggctgaccccccaacctccctcccggatggggcggctggccgggcagaggggctcctcacttcccagtaggggcggccgggcagaggcgcccctcacctcccggacggggaggctggctgggcggggggctgaccccccaactccctcccggagtgggtggctgccgggcggagacgctcctcacttcccagacggggtggctgccgggcggaggggctcctcacttctcagacagggcggccgggcagagacgctcctcacctcccagacggggtcacggccgggcagaggcgctcctcacatcccagatggggcggcggggcagaggcactccccacatctcagatgatgggcggccgggcagaaacgctcctcacttcctagatgggatggcggccaggcagagatgctcctcactttccagactgggcagtcaggcagaggggctcctcacatcccagacagggtggcggccgggcagaggctgcaatcttggcactttgggaggccaaggcaggcggctgggaggtggaggttgtagtgagccgagatcacgccactgcactccagcctgggcaccattgagcactgagtgaacgagactccgtctgcaatcctggcacctcgggaggccgaggctggcggatcgctcgcggttaggagctggagaccagcccggccaacacagcgaaaccccttctccaccaaaaaaatatgaaaaccagtcaggcgtggcggcgcgcgcctgcaatcgcaggcactcggcaggctgaggcaggagaatcgggcagggaggttgcagtgagccgagatggcagcagtacagtccagcttcggctcggcatcagagggagaccgtggaaagagagggagagggagaccgtggca

SEQ ID NO: 11022 - DNA, 843 bp, Artificial sequence
  DNA replication origin
gtctgggaagtgaggagcgtctccgcccggcagccacccactccgggagggagttggggggtcagccccccgcccagccagcctccccgtccgggaggtgaggggcgcctctgcccggccgcccctactgggaagtgaggagcccctctgcccggccagccgccccatccgggagggaggttggggggtcagccccccgcccggccagcctccccgtccgggaggtgaggggcgcctctgcccggccgcccctactgggaagtgaggagcccctctgcccggccagccgccccgtccgggagggaggtggggggggtcagccccccgcctggccagccgctccatccgggagggaggtgggggggtcagccccccgcccagccagccaccccgtccgggaggtgaggggcacctctgcccggctgcccctactgggaagtgaggagcccctctgcccggccaccaccccgtctgggaggtgtacccaacagctcattgagaacgggccatgatgacaatggcggtttagtggaatagaaaggggggaaaggtggggaaaagattgagaaatcggatggttgccctgtctgtgtagaaagaagtagacatgggagacttttcattttgttctgtactaaggaaaattcttctgccttgggatcctgttgatctgtgaccttacccccaaccctgtgctctctgaaacatgtgctgtgtccactcagggttaaatggattaagggcggtgcaagatgtgctttgttaaacagatgcttgaaggcagcatgctcgttaagagtcatcaccactccctaatctcaagtacccagggacacaaacact

SEQ ID NO: 11023 - DNA, 1247 bp, Artificial sequence
  DNA replication origin
aacaacaaaaaagaaattgtcaccgcgtaccaaacaataatatagaattagaaagaggctggggtcctggtcagagagaaaaaaaccaaggcctgaggaagggccttcagagaggagtggtgctgaaggcggagcagtcacactccaaaagagggctcaggttagaaaaccctcacaggaggaaggtggtgctgggagaaggcccagaggaggggatgaccacagcccactatgtggtaagtgaagattttggatatgaagtctaggaactgacagcccaccggggtcaaggaaccgaaagaggatgagggtcaaggagccgttggactagagcctgttttgggtctgggtgggggtgaggagatgggcagggcaaggactaaagggtggcatgagaaggaagtgggggtgaccctgggagaacttggggtaaagtgagaacaggaagggaggggttgtctgggggagggtggggtttggggaaggtgagaacttgctgagggccgaaggcagctggtcaagaggtgggaacagcataaggtcccaaggcagagaggggcagagggaccagggagggatggtccagcacctgagggtttcagggtggggtcctcaagagggtgaggctgaggatgaaggagtggggaacgggtcacctgaggcagggcccagagcaggcatctgcactggaggggagggggcatctgcgctgccctgcgccctgcctaaggcccaactttcattagcaccagggctccccttaagtggcctggaggggagtgggatggagggaagactcccccgacaaaaggcagcaccagaaagttagggtcagggacagctgggaatggagaggcataggggcagcactgggtgaaggctgcttgtaggaaaggcccataagggaggcaggagggacgggagcaggggatgagggcagaggacaccctacaaatggatcagagaactgcagatagaaaggggtagcagggagcagggagggcaacaggacccagggggccatgagaaaggaagctgaggaagtaggagggaacttggtgtccttagatcattggagtccacagtagctgggagggttgacagagaggaaagaaccctgggaacgggaggcgaagggataatgagctggggatgggagcagtcgcaggaagaatcctctgcctggagccggcaggctccaacccctcagcttgagagtcaggagccccatagtccccacagcaata

SEQ ID NO: 11024 - DNA, 1771 bp, Artificial sequence
  DNA replication origin
gggaagatgcgctcccccagggggccaggcgcctggaaggcgtaaagcaggtcgagtgagcggccgtcgtagaaggccacgcggccccgctcccagtccaggtccacgcgaatgcgccgcggcgggggctcaacaccgcccagcagggtgggttcgggtgccgtgagggcccacaggcggccgccgcggccctccacggcccacacggcccccgcagggcacagccttacgcagcccttgcgttgcactgattccccggccgcgcccactgcatagtggctctcctcgtcgtccgcatcctccccagaagagtctctgcaggaggcggcgtccgcagtctccacctcccagcagtggcggccggccccgaagccctgcgcacccagcacagctgggagctgatcgaagcgcttggggccgtcagggggcgcgggcgtccctggtggggccagttgtacgctgcggcggtcggcggagatgagcaggcggcggtgtgcggtcccagggtccagggtcaggtcggctggagacggggaggcagggagaggacctcatgagagagttttctaaatcacaggcggggtagggtggagaatagtcaacgaagatcacgtaaaagactgagagctagtgaccacacaacagctcaaaaggcgactgcaggaccaaaaagaaggaaggcatatgaagagcagacctgggcaatatcagaccttgtactgatgcaccacttctgtagaattggacctggggaaggatcatactggcccagtgcagggagcacagcaggaagatcaaatgagaggttgtctcgtttgtggggttgggggaggaagagtgaggctgatctgacttcgagggaggagtaaggactgatacctcaatctgcatcatctggggtggggcatgggagctgggtcagcaaaatggggaaggttcatctaaagagaaagtcgtactgatactggaacctcaagtaatgggaggggcacagggaggaatccaaggtatcctgagaaaccagcccacccacccacaggaattggggggtggggtggacagtcctatttctgtaggggttgtggggcagaggaggagagcaggtggtgatagccagagaccagaaaaagaaccattggccttatatgtatggggtgctttgaagaaaaatttctggattaggggtgtcagaagcaatctggactgggcaagatggtggatgaccaagatggtggaccaccttctctaggcagtttaaagaagggtagaggcacccttcttcttgggagtgagtgaggaaagaagggtcaaggagatgctggggtccccttccagggaggagtgacgagaggtggtggaagcagagatttttgagaggcacctaaccttcagggatctgttgtttgaatgtatgaaaaaggaagagggaaaatggctggaatatgaggaatcgaggatagacattgttataggctgaactgtgccctcccccactccacacacacacacaaagataggttgaagtcctccaaacctcagaatgttaccttgttttgaaacaggatctttacataggtaatcaagttaaaatgaaggtcattagggtgggctctaatccagattgctgacttacaaaaagaggaaatttggacacagagacaaatgcatacaaaagaaaatgtgcagacctatcacccaaagaacatgtgaggctaccagaggctaggagacaggcatggaacagattctgtctcatggccgtcagaaggaa

SEQ ID NO: 11025 - DNA, 1200 bp, Artificial sequence
  DNA replication origin
gagaacagccgctggggcctctggctcctctccacatcccagtcttaccacccatctaccccccgcgcctctcctgggccccggctccttggccactaaccagcccattcccttgcccgaccgacccctgggcgtctgggactcctgactggcttcttcccagcagccaagctggtcttgggtcttgcttctgccctttgaagtcttcatagacctaattagtctgaaagtaattggcacaattatgcaaattgtttctctctcccccgctccaccatatcggcctgctccagccatcagcactagacagtgaagtggaggggtcggtatcccagtgtttggaggggagcatccagtgccctctcctggctcccatagtactctgtggatctgctgggccttttgggacacattcaagtctagctgcctccctggccagggtccagagacacaaagcaaagggcccaataaatgccactgggcttttattgcaagaggggaagcagctttattgtaaggcttttatataccaactcttagcccgagggctctgggtgtgtgtttggtctgtgtgatggagggaggaagggacagatgtttttctgggatgcactggggaaggtagataaggatggggccgctgaaagagacagagaatgggactgaggaggcagcaaggaaggcaagggctctgaggacaagaaacagtcacggacgagcctgggaaaagagaattgagaacccttggggagtggaaagggggaggacagtggggatggagttaggaggatgagggaaaagtgatggggtgagaggaaggagggatcatgaaaggtgaaggaggagaatgagagggaaaggagcacagtgtgtaaagaggtgagatcactctgaaaggtgaggagggacactgctaactcagacagaactcacctgaggaggggagagatagggaaggatgccccagggaatgaagcccagagctcacatccatgtttgtttctgcccatcctaggatatgaggaagacatggagacggtgagttccacttttctgttccctccttttctcaccagctgccatagccatcacgttctcactgggcccacacctttgttcccattaataggcaggttttctggggtatagtctcatcccttcttcctccagagatgtgagtggggtatgcgtgggggcatt

SEQ ID NO: 11026 - DNA, 1315 bp, Artificial sequence
  DNA replication origin
cgggagtcggagagaagggcatctacacagcaagcagcaggggcggcccgccatctgcgcgctcgaaggcggtcacggtggtcgcggaaggggcggcgtccagatcctggctttccatggatgcgcccgagctgggcccggggctggtggagcgtctggagcagctggcgacgtgtcctctgtgcgggggctccttcgaggacccggtgcttctggcgtgcgagcacagcttctgccgcgcgtgtctggcccgccgctgggggactccgccggcgaccggcaccgaggcttcccccaccgcctgtccctgctgcggcctgccgtgtccccgccgcagcctgaggtctaatgtgcggctggcggtggaggtgcgaatcagccgcgagctgcgagagaagctggctgagcctggggcccgtgcggggagacgccgaggggggcgcatccccaccatgggctgcctggacctgcccggagaggtgaggctgggcgcgcgtcgcggagttgttggtggaagcgggaggttcccggggaagccgggaatggcacgtctggagccggaggccctgtggaagtttaggcaaaggatggggtggggagagaaaagcaaaggatgagggggcgaggaccctgggtcctcaaggtgagaggcgcccggaaggacgatggatggagttgacacttggtccacaggggaggaggctggaccgatgcctgagccttgtgagaggggctggagagaagagactggggaggcagagaaggggtaccggatagaacgcggagagccctggagtcgccgcgaagggcatgggaactgcagaagttttggcagggcagccgcaggcgcccgggaggaggagagctggcggaggggagggagcggcgggcggaagggagagccgacccagctgagggtgaggaggggtcctgggaggatggtgggcgagggcagaacctgcttagaggagcgggagcaggaggctgggctggtgggttgggggcggagaaaaagctggggaggaggggactgacaagaggatggaggaagggagcaaggggttggggcatatccaaacctccccgtagcgtcgtgggggttggtctcggactctggctcaagctaagccctgtgttgtttgttattgttatttcggctcctcccaaggccccaggcaggagcggccaggggtggaggcgaggtgcgggagaacagccgctggggcctctggctcctctccacatcccagtcttaccacccatctaccccccgcgcctctcctgggccccggctccttggccactaaccagccca

SEQ ID NO: 11027 - DNA, 913 bp, Artificial sequence
  DNA replication origin
gccattcgacggaaggaaaaactgaggttccaggagcttaagggtctgggcccagttcaggggggttgttttcgctcctcgacgctgaatttagaaaccagaggctacaaagcgggccgagacttgggttccccaggtccttggtggggaggtttccaggaggctcgggcgcgcccccgtccacggccccggaagctgacgtcgccgaagcgtacgccgctgcccagcctgcgctctcttcctgctctgcctgcagccgccgcgtccggtccagccgcagggccatgccctgtgctgcggttgccgtgtcccaggcgccgccgcgtcaagatccccgtctttcccggccagccaggcggcagcggcattcagctcgtgcactgggctggcagcaggctgagaagaggcggcgcaggttctccgggtcagccagtgccctgctcctaagggtagagatctagctggggacactggtcgtccgcctaggcagtggtgagagggtgggctacagttgtttgggtattcatgaatggaggagctcagggtcctagaccctaaaacctgctgaatcttcacccctcctccgctgggggtagggaaatttgcactgcatttaagcaatgtatagtggagtgggtgggacattcagaagaaaccacgcccacatttaacacccgcgtccttcccttctaccccagcccagcattttgtctttttcccctttgtccagcagtataactcacgctgcccctccgggctgagaggagtgtagacctcacctgctgagcacaactctggcgggcctgtgctctggaggtggtctcagcacctacctagaccctcttgatacctgcttttttagttggtggtgtgggaagaaagtgtgtttaacatgctccttaaataatgctct

SEQ ID NO: 11028 - DNA, 1213 bp, Artificial sequence
  DNA replication origin
gcgggacagcacctaccttcccggcttcgggtccgggagtgcggggcgcggagccgccggagcgctgcctccctccttcctcctcccctcgcccccgccccgcggcgcgacacacaatactcgccggaagcggaagccgcgccgaggctcgtgtcagtggaagctggggtgtcggcgggcggccgcggccgggtctagcggtgcctgcggaagaaggaggaggagggctggcgatgagaagcagcagggggaatcaagggcaagaagggacccagaggggcaggtggctgagatgctggcgtccaggtgacccgaggaatcctctggagatacaggcccgcgcatgcgcgtgctcgagcgctgaagcccattgcccgcagggcgctggactggcgccccggccggcgaggctgtctagtccaggctccaggccccggctctggccaggcgccgccgcctcccggtgcagctgaaagtcgacgaagagggcggggcgggggcggcttgtggacttccacacttttcctctcttcgggccagtctggggagagggtggctagctgtggcggcggccaattacgtggcggacctgcggggctaagctggcacgtcacttccgactagtggagtttttagccttttaacattcaaggattaggtaagttctccccgcggtagacttcaaatactctttgtcctgcccctgcttggcgaaatttaccgaaattatctacctatcccgctggagtgggagccgggggagagctggaaccgcgtctctgctgctcacctttgtgtccttagctccttcgcatggggtccgaccgcaacacgtgcgctggataaacgcttgttaactgggtgagagccaaggcctgttctttccacttctggggctgtgacttgagtttctccgcaggagcagatagtgtttgtgtagggactgcggacttttgcattacagcctccctgctttgcccgcctgctgctggaagcttagcaggtcagtgattttggaggaagtgggtgaggtgatgaggctggggaagagtatgctgggagaggtgtgaggggcccgggaagaggtgatggggctggggaggggctagtagtgggtagaggtgtgaaaaggctgaggaggaggggttagtgctaggaggggtgtgacacggctggtagaaaagatagcttgctccgcctccccgccgccagc

SEQ ID NO: 11029 - DNA, 1059 bp, Artificial sequence
  DNA replication origin
cctgcccctctgggtcccttcttgcccttgattccccctgctgcttctcatcgccagccctcctcctccttcttccgcaggcaccgctagacccggccgcggccgcccgccgacaccccagcttccactgacacgagcctcggcgcggcttccgcttccggcgagtattgtgtgtcgcgccgcggggcgggggcgaggggaggaggaaggagggaggcagcgctccggcggctccgcgccccgcactcccggacccgaagccgggaaggtaggtgctgtcccgccgccgcgcccgagcctggggcctgcgctcgccggccggctccgcaagccgcgtcccagcgccccgcgactgcgtcaccggccccccgcacgtaaccacagctgcctccgcccgcctcgggcccgggcggacgttttgccgccccggcgacgtcagcgcgtccggcgttgcttggctaccccgccgttcccccgtcccgctgctgctcacctccccgggtgaaactctgacgcagtcaccgcgggtctcggcagcgtcatagcggcgggcatcccatctgcacgtcacacctctttctcacctggacacgcatcccttcctaccctgccagccacgacgtttcctctttcccctctccaatgccccagccccagatctggcggaagaagatggagaacgggggtgggacagagttgtggacaacctctcaggagagggtcgcaaggtgggaccctgaacagtggtagaaacaaaatgagattgtccctgaagtttgcccttcagctgagacacaaggagtagaggaagaggaaggactaacgcagaggcactcaaggtctcactatgactgtagttgagagtcctctcccttcttccctaaccctttccccatttctctcaccacttctttgccagtctagatccgtcctggtgccttactgtgcatacagttctactcgtctcaggtgaggaggccacttaatttgtaaaagactgaggaaggggtaggatcaccacaagtcaaagttggattcccacagatagaaatcatctga

SEQ ID NO: 11030 - DNA, 1175 bp, Artificial sequence
  DNA replication origin
tacaggaagttgagcctctggaaggcctcgcggtccttcaccggccccgccatcaccgccgcgctccagggcctcccgcagccccacccctcgcacagccccgcccgggcgtccgcgcgaggcctcctgggaaacgtagtccccgcgccctcgggagcctcccggaggcctcacaaactcatcggtttctaaacacaaccccagcaatccatgcccagggtccctttatgaattttcagtgcttttgtcttcctcaagctcatgaccaattatatcacctagagacctagtggagcaggtgaggatcttaaatcggccattttcaggacagaaggctggtctctttatgtagctacgttggggagatggttatgtgcaatttatacccagctagagcttctgccctactctcctgaggtccgaggcagatgcctgtaagatctacagacggaaggcacagaggtaatacattaaaaaaaagcactggtgccagtgggggtgaaagtgggaaggatcatgagggtgctggagggagggaaaaggactcccggtcctcagaaagcacagtttactcctactattccacctaccaaagaaacacacttcctgttatgcagtgctggacacacagtaggtgatcctcactttctgagtgaatggtttctaactcctaggcttaggtacagcacagaaatctgtcaacagcatcccctgcccctgaaacttcaccccactccccacactgacattcacctcacacccctccctctgacctcttctatcttccagttcttctgtctggtgtcctgtgactcatagtgactatcagttactgaagtcagaagcagagggacatgaattggaggggtagaagatcaatgaaccctgagatggggagggcagcataagtcaggagaggatgacttctctccaatttcagacccagtgccaggcggggacagacaagcagggctccagctgggaggaaggacatggctgaaacctcctctggaactagtttcacaagggttttcggactcaaatgagagtggtgtgtttaaaatgtagatgtaggctgggcacggtggctcacacctgtaatcctagcactttgagtggctgaggcaggtagattacttgagttcaggagttcgagaccagcctgtccaacatgg

SEQ ID NO: 11031 - DNA, 1042 bp, Artificial sequence
  DNA replication origin
ctgctacactgagaggaccattgcgaagcggctcgtcttgcggcggtgagacagccacggggcgggcggcgggcgggacgcgggaggaacgcgagagggagcgcgggcgccagaccactatcctcctccgcccccagggatccctcggtgaagaggactctctgtcgaggctgctcttccctcctcgtcccgggcctcacctgcacccagcgccagagacgtgagtgctccaacggaggtggaagactgcggagcattgggggcgcggaggggggcggggtggggggcgggcactggaggccaacagcgcctttctcactgtagatggatgttgggtgtgggattcgcaggagtcttccttcttcgggtttggattaagttcctaacgccacttgcacaaactagggtttgggctcggctgttttttttttttttcttccagtgtgggcaataaataataacttttaagaggcaaccccacccatgcacaataatagatgttgttcggctttgtggaggacgattcccatcaccattcatttattaagcaaatacttattttctaaaatgtgtcaggtactgtgctagattcattattctcattgaaattacggtctgatgggacagactaagaaacaaaatggtgtagaaaaagattaactgggggagtagaatgctcacttactcatgccagtggtggcgaagtttatgataagcaaagggagtgagagatggaaattctaggcatgtgtgcagactctgagacaagagagcttgtggtgctgtcaaagaaatgagagttcaggaggctggagtttgaggtaggagggcaaaacatgagactggagggggaaacaggccagttcttgaagtcttgttagggagtttgaactttatcttaaagagttccaggaaatcgatggagcttatgccgaggcctgacaccatcaaatgtgcattcaaattgggggtgtggtgggggagcggggatacctactgaaaaacactggaggcaaaactggcagcaagagaccgttacttc

SEQ ID NO: 11032 - DNA, 1253 bp, Artificial sequence
  DNA replication origin
agcacatcttgcaccacccttaatccatttaaccctgagtggacacagcacatgtttcagagagcacagggttgggggtaaggtcacagatcaacaggatcccaaggcagaagaatttttcttagtacagaacaaaatgaaaagtctcccatgtctacttctttctacacagacacggcaaccatccgatttctcaatcttttccccacctttcccctctttctattccacaaaaccgcgattgtcatcctggcccgttctcaatgagctgttgggtacacctcccagacggggtggtggccgggcagagggactcctcacttcccattaggggcggccaggcagaggagcccctcacctccctcccggagggggcggctggccgggcggggggctgacacccccacctccctcctggatggggcggctggcctggcgggggctgacccccacctccctcccagacagggtggctgccgggcggagacgctcctcacttcccagacggggcggctgccaggcagagggtctcctcacttctcagacggggcggccgggcagagacgctcctcacctcccagacggggtcgcggcagggcagaggcgctcctcacatcccagacggggcggcggggcagaggtgctccccacatctcagacgatgggcagccgggcagagacgctcctcacttcctagatggggatggaggccgggaagaggcgctcctcgcttcctagatgggatggcggccgggcagagacgctcctcactttccagactgggcagccaggcagaggggctcctcacatcccagacgatggacggccaggcagagacactcctcacttcccagatggggtggcggccgggcagaggctgcaatctcagcactttgggaggccagggcaggcggctgggaggtggaggttgtagcgagccgagatcacgccactgcactccagcctgggcaccattgagcactgagtgaacgagactctgtctgcaatcctggcaccttgggaggccgaggctggcagatcactcgcggttaggagctggagaccagcccggccaacacagcgaaaccccgtctccaccaaaaaaatacgaaaactagtcaggcgtggcggcgcgcgcctgcaattgcaggcactcggcaggctgaggcaggagaatcaggcagggaggttgcagtgagccgagatggcagcagtacagtccagcttcggcttggcatcagagggagaccgtg

SEQ ID NO: 11033 - DNA, 884 bp, Artificial sequence
  DNA replication origin
gcccggccgccatcccatctaggaagcgaggagcgcctcttcccggcctccatccccatctaggaagtgaggagcgtctctgcccggctgcccatcgtctgagatgtggggagcacctctgccccgccgccccgtctgggatgtgaggagcgcctctgccctgccgcgaccccgtctgggaggtgaggagcgtctctgcccggccgccccgtctgagaagtgaggagaccctctgcctggcagccgccccgtctgggaagtgaggagcgtctccgcccggcagccaccctgtctgggagggaggtgggggtcagcccccgccaggccagccgccccatccaggagggaggtgggggtgtcagccccccgcccggccagccgccccctccgggagggaggtgaggggctcctctgcctggccgcccctaatgggaagtgaggagtccctctgcccggccaccaccccgtctgggaggtgtacccaacagctcattgagaacgggccaggatgacaatcgcggttttgtggaatagaaagaggggaaaggtggggaaaagattgagaaatcggatggttgccgtgtctgtgtagaaagaagtagacatgggagacttttcattttgttctgtactaagaaaaattcttctgccttgggatcctgttgatctgtgaccttacccccaaccctgtgctctctgaaacatgtgctgtgtccactcagggttaaatggattaagggtggtgcaagatgtgcttcgttaaacagatgcttgaaggcagcatgctcgttaagagtcatcaccactccctaatctcaagtacccagggacacaaacactgcggaaggccgcagagtcctctgcctaggaaaaccagagacctt

SEQ ID NO: 11034 - DNA, 749 bp, Artificial sequence
  DNA replication origin
ccaaagtgccgagactgcagcctctgcccggccaccaccccatctaggaagtgaggagcgtatctgcccggccgcccatcgtctgagatgtggggagcgcctctgccccgccgccccgtctgggatgtgcggagcgcctctgtccggcggcgaccccgtctgggaactgaggagtgtctctgcccgaccgccaccccgtctgggaggtgaggggcgtctctgccgggccgccctgtctgagaagtgaggagcccctccgcccggcagccgccccgtctgggaagtgaggagcgtctccgcccggcagccgccccgtccaggaggtggggggcagcccccgccctgccagccgccccgttcgggaggtggggggcgcctctgcccggcccgtctgggaagtgaggagcccctctgcccggccgtcaccccgtctgggaggtgtacccaacagctcattgagaacgggccatgatgacgatggcggttttgtcgaatagaaaagggggaaatgtggggaaaagaaagagagatcagattgttactgtgtctgtgtggaaagaggtggacatgggagactccattttgttctgtactgggagaggttcttctgccttgggatgctgttgatctatagccttacccccaaccccgtgctctctgaaacatgtgctgtgtccactcagggttaaatggattaagggcggtgcaagatgtgctttgttaaacagatgcttgaaggcagcatcctc

SEQ ID NO: 11035 - DNA, 1522 bp, Artificial sequence
  DNA replication origin
ctgctccctgaaggagtgactccccccacgcacatccgggagggtcccaaatagggtgtctgggaggactgaacatcggaagaagttgagtgggatgaaagggagtcaggccgatgggggagagggtcttatggcccctgagagctggccagcactggcgtcaccggcccctccccgcagggcttcaagatgggctgcgctccagttccaacagccgcagcgggagccgggagcggcgagaggaacagaccgacacctcggacggggagtctgtgacccatcatatccgcaggcttaaccagcagccttctcaggggctgggtccacgaggctacgacccaaatcggtgagggtgggagggggcgctggtcccggctttcccgcctacccggaagtcagagctttgggggaaagcgggctgctactggtgaagacggtgggcctgggatgccacagttctccgctagccactcggctccccacagcgggccacagtcttcctttccagaggggctggagagagttgggcttttagaaggagaaggctgagtattgcctgaaagaaggacttgggggaagtctgacttgagagaggagacttgaacgactctggagagaatggtttgcgaagttgattgtacaagaggggagaaaataggagtttgtggccacaggattgctctggatgtctcggtccctgttcccttagataccgactgcattttgagagagacagcagggaggaggtagagaggagaaagagagcagcccgggagcaagttctacagccggtcagtgctgagttgttggagctggacatccgggaggtgtatcagcctggctcaggtgagtgagagcaagacaggcattgggctggggaaggagtttggaaaggtaaaagccgactgtgaggaaggaggggtctgggatgtactcttgaatcctgaagatttcctcacacttggactttttcctgaattcccagttctggactttcctcgacgtcctccttggagctatgagatgtccaaggagcaactaatgagccaagaggaacggagcttccaagactatcttgggaagattcatggggcttactcctctgagaaactcagctactttgagcacaatctggaggtgacagtgtactctagggacaggagtggggcatagtgacctatggtcaaattggtttgggatcaggctggagagggactctgttttcagtttctcttcctgatcctgtctttttagacatggaggcagctgtggcgggtgttagagatgtctgacatcgtcctgcttatcactgatatccgacatccagtgagtactagggataagggtgggcaaggaggagggagaaaggtttttcaggggcaaaggtcagaggcaagagttgggagacagagaggtatctatcttcctgtctttctaatctctacctagtgctgatgtccgcagttaggaactcagttttttattctcttatagcctgtcattcctcccttggccagctcac

SEQ ID NO: 11036 - DNA, 979 bp, Artificial sequence
  DNA replication origin
tcgcggtggcagaactagaaacgagttacagatagaaactagaatatgctttttaaaaaaacaaaaaacaaaacaaacaaaaaaacagtatgcctcaactccttcatactagtaggaaattattatgttcattccttgagtctcgcggcgtcgggaggtcacggcgtcaggcttcccagacagtcgtaaacgccatgtgtttacgcgactggagcaagcggacgccggccccgctccgtcattgcaggccacgcctccactgaaccagggccacgcccccgagatgacggcgaagctcgcacgtgcgcagcccgggggcggggttggccgcgccagcttggagagccagccccatcggggttccccgccgccggaagcggaaatagcaccgggcgccgccacagtagctgtaactgccaccgcgatgccgaaggcgcccaagcagcagccgccggagcccgagtggatcggggacggagagagcacgagcccatcaggtgaggctggtaggcaaggaagaaacgagcagagggggaagagagaggagactgcgcgtgttttaagagagggtcatggggcacgagactgaccgggcccctgcgggagttactgcgcatgcgtgccgtgggcccgggaggagtttgccggggaggagtgggtttggaatcggggttaaaggaaagagatccagatgtcgcacgtgacctaagtgagactgggcgagataaaagaaagagcatatggcaccgagggagagatggggagaaatgggaaaaccttgcttaaaaaatttggacatccgccccaccatacactgtattccaccaggaatatatgagccctgcctcgacctccccttccccctgcgcgcgcatacacacaccttgggagcctgtgatcccccttgtttctcaagagagggtgactccttcatggtttctttcttaagacacccctctcactcaactggagcaagagt

SEQ ID NO: 11037 - DNA, 1043 bp, Artificial sequence
  DNA replication origin
tgcagcagcagcagctcttcctcatcctcttcgtcgtcgggttgggctgctggagggttgggggcactggggacctcaggctccgggcccagctcctccagtaccgaactctcggaggggtattggtacgtggtctccagggctgtctcgctgaaggagatcttaagctgaaggagggagaaaaagggggcaggaggcaaggtcagcaggggagaagcccgcgggggttgagggagagaaagcgggggcggggggggcggagtctgcaagggagcaggtgggactggcggaacgtgggggtgggggctggactcaggtgccccactcactctccccatccactctgggatccagttttcctttccatactggctctccaattctagagtttccctcttcgatcatatcatttcaaaacatcagactttgccctgtacgttggcaggggcttgggaggcagaagtgaataatataagaccaaggtccctgctatttcgagtgtgggaggcagaggggtaaaaagaaattaaaatacatggcgataagtcttgtgatcagaaccgagtctttgggcaccttgggggcaatcgagtgaacttcccagaggagcccagcagactggccagtggggaaagaactggctggggagcgagtctcagacaaaagcaaggttttcatacccacagccccttgctgtcctatgcaaaacccaggaccctgggcacctgttccctcctactctcctcattcctctcctatccatagcaaagggagtctagggcctaggaagagatgggagatgaacagaaaggccgagaggaaccaagagactccagcaacacacaggggaaagatgagccgctgacaccctgaaggctgggggagatgacaagggcagaaaggaaagtccacacaaacctggggtgggggtccacagtgtgcccaaagggacaggcacagagacaaaataccagacagggcacagaaaacccttggtaatcacactgtcccaagagcaggcgagtcccagctgttctcactgc

SEQ ID NO: 11038 - DNA, 1107 bp, Artificial sequence
  DNA replication origin
gagcctccagaggcctcaggctcaactcttgggctccccctatccccagcctcctctctctggtctccctcggacttagtctctcttctcttgactctcttcccttggggctctgatcccgcatctccccagggctgggtctccgctcccgggcctccagaggcccaggctttctctctgctagcagctcttcactccgttgttgttgctgctgctgctgctgccgctcctgccggatgaatcggttctggtgcactggcccgatggcctccagaaggaccgcagactcatccgggtctggaggtccagcctctacagtccctagcacagggctaggctccccaggggacagcccaagcttggcccggcggcgctccaggagccctcgtttccaggctggcatctgggacaggcgctcccgttctgctttctctcggcctcgaacggacgcctcctcctgccggcgccgggctagcagctgtagcttccagtctgggatggtggccatggtcgtcttgaggtgagggtagggagcactggggacagagaacaggaaggagaggctccagagagtgagacagcccgggggtgagactgagggtgggaggagaggaagtggagggggagaggtgggacacaaagcagggcagaggggctaaggatgaggacagagggaaagacggaaggcagagaactggggaaatggaaaaagtgaagagaagttgtgagcccaagttgggggtggtgggggtgatgtgagaggaagagtccggattggaggcaatgagggcaggagccagatgtggcagcacagggttaatgcgtattaaagaccgtctctaggatgtgagaaagagagagaagggcgaaaaggaaagttggcgtgagggagaagagagaaatgtggcaggggtgaggggaacctgggtgcaggccaggctgcctcagcgataccccagggaggctagtgtgggaaggaaggaccaggaatccctgaaaggaccaggaggcaacgggacctgagggggtgttggggaggcaaggaggggcggagagcgaacaggtctagaggagaagggaaaccagggaagaggggaaaggagggcg

SEQ ID NO: 11039 - DNA, 2490 bp, Artificial sequence
  DNA replication origin
tcacgacatcctgagattgagaaaaatcttggtgggagtttcagagccctgaagtcatttttcccagctttgtggtcccaaccctctcctcacctcttccttccctggcttctctgcagtatcttcttcctcttccttgataatcactgtcttctgggagacttcccctctttggggctgtttttgatgtggtggtgaatccatggtagctaaagacctcttgcggctttgagaggccttaggctggagctccggggtgaacctagatctacctgctggttccaccttttggatctgggaggcatgaattggtgtctcaagaagctggggagaggcaggctcaggaatggctgtaagggattcagctgctctcactgctccccatctttggttccttgaggcctgggatttaggttccaagggtgcagagcaaggcttatggtcaatgggagctgcgagggagccagggttcccagcggctctctgcctcttgatgcaactgggttgagtaataggctcaggggaaataggctggtctgtggtgacaggagattggaattcaggggtggtaggaaccggcatagctcttactgtggaagacctcagtgttttgctctgaccaccctgagctatggcctcaggggtgacggactggtctgtgggggtaaaaggctcaagatcagaggctgctggttcaactggtttgggagtcttgacagaggacctatttgtctttctcctagtggccctagatgtgagcttgggggtgacaggctggtctgtggaggtggtaggatggggctcaggggctgtggggacaactggctcaggggtcttgacagaggacctatttgtcctgcacctagtggcccgagatgtgggctcaggggtgacaagctggtttctggaggtggaaggctgaagctcaggggctatagggacaattgattcaggggtcttgacagaggacctatttgtcctgcccctagtggcccgagatgtgggctcaggggtgacaggttggtctgtggaggtggaaggctggagctcaggggctgcgggcacaactgtttcaggggtcttgacagaggaccgattttttcttcccctagtggtccgagatgtgggctcagaggtgacaggctggtctgtggaggcggaagcctgtagctcaggggctgtggggacaactgtttcaggagtcttgacagaggatctatctgttcttcccctagtagcctgagacgtaggctcaggggtaacaggctggtctgtggaggtggaaggctggagctcaggggctgtggggacaactgtttcaggggtcttcacagaggacctatttgtcctgcccctggtggcctgagatgtgggctcaggagtgacaggttggtctgtggaagtggaaggctcgagcttaggggctgtggggacaagtgtttcaggggtcttgccagaggatctattttttcttcccctagtagcccgagatgtgggctcaggggtgacaggctgctctgtggaggtggaaggtgggagctcaggggctatagggacagttgattcagggttcttcacagaggacatatttgtcctgctcctagtggtccgagatgtgggcttaggggtgacaggttggtctgtggaggtggaaatctggagctcaggggctgtggggacaactgtttcaggggtcttgacagaggacatatttgtcctgctcctagtggtccgagatgtgggcttgggggtgacaggtcggtctgtggaggtggaaggccggagctcaggggctgtgggcacaactggttcaggggtcttgacagaggatctattttttcttcccctagtagcctgatatgtgggctcagaagtgacaggctggtctgtggaggtggaaggctggagctcaggggctgtggggacaactggttcaggggtcttgacagaggatctattttttcttcccctagtagcctgagaggtgggttcagaggtgacaggtcggtcggtggaggtggaaggctggagctcaagggctgtgggcacaactgtttcaggggtcttgacagaggatctactttttcttcccctagtaacctgagatgtgggctcagaggtgacaggctggtctgtggaggtggaaggctggagctcaggggctgtggggacaactggttcaggggtcttgacagaggacctatttgtcctgctcctagtggcctgagatgtgggcttgggagtgactggctgggctgtggaggtggaagggtggggctcaggggcagcagaggtagctggaaagggtgtcattctggaggacttccgagttctaattttaggctttgggtggaaaggctccagctctgaggacaagggagcctctggagcttcctgactcccatcttgcctggtcttacgaacggttggcttgatagaaggtaaaaggggagaaagaaggggcggaggtgcaagatgtttctggctctg

SEQ ID NO: 11040 - DNA, 1739 bp, Artificial sequence
  DNA replication origin
cttttttagggcgtgaacagatatgtcgagaaaatgggggtgtgtggttttctttaatgagtccctcaggacttaatgggagagaaagaatcctttaaatcaaggggtagaaatgtagcgaaggaataaaaattccgaggccaagggggattttttttttttgcgcgcggttacagtgtagcgggggaggggcgggaggaagtgcggctgctacgttgtagcagaagggcggggccctgcggggcggggccggggcgccgtgggcgcgcggggacaatgcggcgttgcccgccggcaggggcgcgctaccttgggccccgcccctcgcgcgcggaatttttgtccctggccccgcccacgcgcgaagtcttttgtcggcggctcgacctgcgcgtgcgccgcagtcacgtggagggcggggggggtggtcgactgcggcggcagctctttcctcagacccccagccttttgtgcgccgcgcggtggggcggtgcccagcttgggggaaggagagcggcgcttatcgaagtgtggtcgacctccatccgcccaccgagcacttgggacccgctgcacatatccagagcagggaaagctgtggctttctcgggggagcgagtgtctaggggaagggtgtggcaggcccacgggatgccatgccctagaacaacggcctgagcgcttgtggaattaaaatgggagatgtggggccgaggtgggcgaattgggatccctccaggtcaggggttcgagaccatcctgggcaacaaagcgagaccctcccccatgccacgtttctacaaaaaataaaagtaaaaaattagctgggcgtggtggcgcgcgtctgtggtcccagctactcgagaggctgagatgggaggatcggttgagcctgggagttccacgctgtagtcatccgtgattgcaccactgcactgcaggctgggcaacaggaagaccctgtcttaaaaattagaagaagctgggcgcggtggctcacccttgtaatcccagcactttgggaggccaaggtgggcggatcacgaggtcaagagatctagaccatcctggccaacatggtgaaacccgtctctactaaaaatacaaaaagtagctgggcgtgttggtgcgcgcctatagtcccagctactccgggggctgaggcaggagaatcgcttgaacccgggaagcagaggttgcagtgagccgagatagcgccactgcactccagcctggtgacagagcgagactccgtctcaaaaaaaattaagaaaaagatgaaataaaatggtagttggggacatagttggctgggacttgacctgttgtggtctcgttgctccccctcggcagttctgggaggtgatcagtgatgaacatggcatcgaccccaccggcacctaccacggggacagcgacctgcagctggaccgcatctctgtgtactacaatgaagccacaggtaagggcaggagcccgggcagctcaggttcccttccctgtctcccacttatctgggatctctttccatttctgggcacgccttatcccctttgggtgaatctgtcattttgtccctttcgtgaaccaccgtcggggccaaagacgtctgctgccacctggtggcgggacctggaatgacaagtctctgatccctgctgtctcccatttccagtatatctataaaccttcccttctgccagatttcacagctcttaactttattctctgtaggtggc

SEQ ID NO: 11041 - DNA, 1735 bp, Artificial sequence
  DNA replication origin
tttctgcctgtccttatagatctcctgtgataacaggatggtggggagaagggatgtaagttttttttttttttttttttttgctcactgcaacctctgcctcctgggttcaagtgattctcctgcctcagcctcccaagtagctgggattaccgacacccatcaccatacccagctaatttttgtatttgtagtagagaaggggtttcaccaggttggctaggctggtctcgaactcctgacctcaagtgatctgcccaccttggcatcccaaagtgctgggattacaggcatgaaccaccctgcccggccgggatgtatgctcttggatccactgtctctcacagactagtgtgggccttgggcccccctcattttgacatccttccagatggttccctgcccctaggccaacctccacagtcatgtgggccatgatggccctctggtggccctctaacgtctccagggcaatgtgggcaatctcagcctccgtcttccccaggaacatctgacaggcggccgccaacatctccttgttctgcccctggatttttacctgtagccagagtaggggtaggaaaggtgtggtgggggtctcatgaagtcagagaaaaagcagagagagaagggagagccctctaagaaatgcttcttccatttcagggaaagaaaggaggaggaggcaagtgccttggggtgcctggaaaagatgagactagcagaggaacttctctgcaggcaagggttgagaagactgtggccagaagatgtcttaatgtctgggagagagggtgatggggaagtggactgtggggaaaaggctctgaaagcttcacctgggcaatgccagtgactgagatggggaccccatggcgagtgtaaaccttttcactcttgacattgagggtcagtgtgttgagagagatcctaggggaaaaagaagggacagacagtaagaagaggaggaaaaagagaaaacggaggtcccccttccctggttcccttcttgcctacctctggatctgttggatgcagggcaggacaaagacacgccctccagccaccatgactggggggcttcggcagaaccctgcaaggtgtggggcagtgaggaacggtggcagagcttgaatgtggaagactgaggaactggcgggggtgaggggacagcaacccacaggagagaatctgggagctggaggggaagcagtctgggccttggaatggtgggaatcaaactgggcagttcgtggccatcaaggggcagaagtctggtgctgggaagttggtagggagagggagaaggggcagaggccagactcacaggggttctggggtcactggctgggaagggaacaacagtacttaccggagaccaccatggcctcatttgggccacaagtgaaaaacatggttcaggctggagctggaggagagggagggaaagcctttgcggatggggaaggcgcgctgtggcgtccacaggggcccatcctttccctttcccgtcaggccctcccagtctgcatccgccacggcccgtcccttctacacccatgggtccgctaaggcttttccctacaaaatccttaagatccccagctacctcttctccgcctgcgtatggtccctcccttcccctcgccgctccctttgataaaggtcccccgcgcccagaggcctgcagacctttcccctctctccctgcttctcggcagccccaggctccatc

SEQ ID NO: 11042 - DNA, 900 bp, Artificial sequence
  DNA replication origin
ggcgcccacccctgtgtccgccgtcctcgagccctttaatctgacttcggagccctcggactacgctctggacctcagcactttcctccagcaacacccggccgccttctaactgtgactccccgcactccccaaaaagaatccgaaaaaccacaaagaaacaccaggcgtacctggtgcgcgagagcgtatccccaactgggacttccgaggcaacttgaactcagaacactacagcggagacgccacccggtgcttgaggcgggaccgaggcgcacagagaccgaggcgcatagagaccgaggcacagcccagctggggctaggcccggtgggaaggagagcgtcgttaatttatttcttattgctcctaattaatatttatatgtatttatgtacgtcctcctaggtgatggagatgtgtacgtaatatttattttaacttatgcaagggtgtgagatgttccccctgctgtaaatgcaggtctcttggtatttattgagctttgtgggactggtggaagcaggacacctggaactgcggcaaagtaggagaagaaatggggaggactcgggtgggggaggacgtcccggctgggatgaagtctggtggtgggtcgtaagtttaggaggtgactgcatcctccagcatctcaactccgtctgtctactgtgtgagacttcggcggaccattaggaatgagatccgtgagatccttccatcttcttgaagtcgcctttagggtggctgcgaggtagagggttgggggttggtgggctgtcacggagcgactgtcgagatcgcctagtatgttctgtgaacacaaataaaattgatttactgtctgcagtcttgagtgtatctttgcaagcgccgactccccactcctcccggccttca

SEQ ID NO: 11043 - DNA, 861 bp, Artificial sequence
  DNA replication origin
ccagagcgtagtccgagggctccgaagtcagattaaagggctcgaggacggcggacacaggggtgggcgccagggatgcggcgttaggggcgtcctctggaggcaggggcgccggcacaccctcttcagccatcaggatctggcagaagacgatggtgagcagcagaaagagaagccttttggctgggttcggttcctcgactggcagctggcgccggacctaaggggagacaaaacaggagacaggtcaggtcgaggcctctggagtcgggtcgttccccagtgactccagggcagcgcaccccgcgaatgcccacttcggcgatactcaccactcgagggtagagaaccctgcggctgcgctttcggtgcccgcgagaggcgctggggcgcccggcaggggccgctgcgggctccgggagagggtcgaaggtgaagatctcaggaccggagccccgccggggtcccgggatggtggagggggccggggtcggggcctgcaggatggtcatggtcgggtggcagctgcgagagtgacacatggtgagccgagcggagtgtaaggccaagtgagggtcggctgccggcagaggtaatttatgtgctcctgaaaattgggcgggtccttctaactcctcctcccgcagctggggagcggttggcagcagcgggctggaaattccgacgattaaacaaagggagtgggtggagacttgacatgcacaatcctaggcgcccaactgcacgttgtgagtgtgtgagtcgtgagtgggggtgggtgagatcccgggctgcaggcacatgtcgaggcatgtggcacctggagaggggctcactttagccacaggatccctcacaggc

SEQ ID NO: 11044 - DNA, 1202 bp, Artificial sequence
  DNA replication origin
cagcaccaaagaccaagagggcctgattacccatccgtggtccccagagcccattccacatctcctgcatcactccgaaccccagaggccccctgtgtccctgagaacccccaaatgaccctctaccatcccctcccatcctgggcttccctccccttcaagccagtggcagcctgctgcccaggaaggagaggatgggaaacagctgaaaaaatgtgaggagaggcacgtaggagaggggagaaggcagcttcaggcctgcagaccacctggccacaggagggaagcccagcacgaccagcgagcgagaggacggaccagatgggcccccacacatacactagctgcagtccccttccgggagctgcagctgcctctggaggagcaggctgggtcagcagctggggagagtaagaagcgacgggtggggggcagggtgaaggagtgtacaaggctttgggtgtgagtcagacctgatgccactgaataaactggaaactgaggccagggagcgaaggaggagattgagatgacgtagctctgggagagagatgaaacagctcagctgtggttggggaagaaaagggcaagggaccagaagagggagaggaggctgatggtcagatggggacaatggtgagagaattcccagagagacggagatggactgaggtcaaggccaaggagacaggtctgagagaggaaaaggaggatgaagacagggcacacacagcaaaaggtgggaagccccaggggctcagaggaggagactgaagtttgggaagaaaagggctgaactggatgaaggaactgaagtggactcgggaaggaaacagtgttggaaacaaactcctaagagaggaaggcagggaactgaggaggcttgagagctgggcagacagatcaaggggacaagaagcaaggacaagggaagaaggggctggagtgaaacagagagtggagggaaagaggagggagactggggcgcagagtgtgaagctaagggacacggggagatgagaagtataaaaggctgagaaaggaagaggcacctgcgggacagatggggacatgaggaccaaagagagaatctaacctgtttctggacaacggtccccctttggggacaccctagtccctcagcccattcaccacaccatggcacccaactctattccctctctttcccctcctccctgcca

SEQ ID NO: 11045 - DNA, 840 bp, Artificial sequence
  DNA replication origin
cgggagccgggagcgggaggcgccggcggggctcgggtgtcgggaggcggctcccgagagcagctgtcgggggcctgttccggggagaggagccagggctggggcggctcgggcccaggcgccgcctccccctcgcctcggctccctcccttcctcctcccgctcctcgctcccctccctcccctcggccttctcgccgcgcgttcgggctcgcagccctcccttccccctcccggacccagtagtcccagtggctcccacgcccggcgccgagctccaggccccgcgcccgccacgcccaccccgcgcgctagcgcccggcccggcctcccccaggtaacccgcccgccaagcccgcctgggcgctcccaggccgcccagccgcccgcgccgctgcctccggccggctccgcgcccagccccctccacccactcgcagcccacccccgcttccccaaacgagaacctccaaagctggcgccccagggggctggctgcagtcccgctcagggcccacgaggggaagacgcccctcctacttctgggatcggttcctggtgggagaggcaaaggggagcagccccagggcacagaggaagaagcaggttcccacaggctcggcccagcccagctgcgggagttagcccagagaagggagcagagctcaggtctcagggctcacctgtccagccaggccccagactgctcttctccctccaccaacctttgctcctctctcgcagcctgtgcgctcccgcccctacgacccaacctggaaggccccagaccctgaaggcgggcccactctcttctccttctcctctcagttcctctctctga

SEQ ID NO: 11046 - DNA, 1856 bp, Artificial sequence
  DNA replication origin
ctggagctcggcgccgggcgtgggagccactgggactactgggtccgggagggggaagggagggctgcgagcccgaacgcgcggcgagaaggccgaggggagggaggggagcgaggagcgggaggaggaagggagggagccgaggcgagggggaggcggcgcctgggcccgagccgccccagccctggctcctctccccggaacaggcccccgacagctgctctcgggagccgcctcccgacacccgagccccgccggcgcctcccgctcccggctcccggctcctggctccctccgcctcccccgcccctcgccccgccgccgaagaggccccgctcccgggtcggacgcctgggtctgccgggaagagcgatgagaggtagggagagcggcggcggaacccgcgggcggaggcctggggctcttggggtgggggcgcgcggcggcgcctgcagggcgaggggcgggggaggcaggacgtcccgagccatgcttggtcgtccagctcttctaagcctccctgcccgcctccccgatgctctggcataccgtctgaaaaccgggggcggggactgggtggaggtgaagcccgtgacctcccagaaagagttttgagcctccagccttgaggcaagtcccctctcactcagtgcggaggaactgagccccgggaggaggtgctcctgtgcagccccactgagtcagctcatctatcgcctgccctccacctggccagtccctgcgggcatctaactgctaagcctccgctcagccaacacccagttggtcagtctggtcacagtccagcaaaaagagggactgccactctaacccaccagtgacaccactcttcccggctggatggtcaattagctctggcatgagagaatgtcactgccggtgagcgccagcttcagggtcccacccccccatgcctggctcttggctgaacatttcttcccagcgcttccagcagccagaggcaggcgcccaagctcgctggctgttgctgagggcctgtaggtgtgtccaggactgagtggtgtggtggagacaggtgaaaggggagtgagtggaaaggcagggaaaggctgttgtccttattgccactcttcccacccagcgcccacctgttccctgccccctcgacgtccctctggcttggtcacccatgtgtgttagaggctgggccccagttctctggggatcctgtgcccaagggcccgggtgtgtgtgtctcatgctgtcttttggtcacaggagcatgtggtgtctgtcatttcatgttcacaggtgtctgaaggtggctattcactgagcgatggggttggacttgaaggaatgccaaggtgtggacgggttgatgtatgcatgagcttctgtgtttgctctgtctcagaaactctgtgagggttgtcagggacactgagaggtgggtgtgtgcatgccacatttagcctcgctgtttacagccagttcagtaagtttgtgtgtttcaccgtgtgtgtgtgtacagagctgtgtgggtgttgtctgagtgggacttgggggttgggagaggagcgtgaagggcttgaggcagggtggcctggcccctggtttgtctttggttgtaatggagtggaagggggtgggattggggaaggtcttctgggcttgtcctctcttgccctctgggtctctgactgtggactgaagacccagtggagagagatgaggtgactgggggtgttggagaacagacagcccagacgtctctgtgcttctccgtgttcctctgcttggctctgtgccccgtgtttctgagcctgctctatttacctcttgcattgtggctctcgctctgtctccgcctg

SEQ ID NO: 11047 - DNA, 1546 bp, Artificial sequence
  DNA replication origin
cttcacctctgggactgcagagagaggacacatgtgagggaaagggcaagcgcccggggtgagagccctcctcctcgcagctctagagagagtggagaataaaggaggagttactatagtctggggccaccacagcaacctcctgtctagctctggagagctgaagagatggcgtggaagaggaggagggagaagagctggggaccagtaagctttctactcctcagctcaagggggggaccttaaaaaagagcaagcagcagcagagatgagctaagggcacaagagcttcctccttgggagctcaggagagcagaataggccacagtggggagaggaggaagtgcaaggtgtgagggcttttccctgccccagtagaggtatggggagcctggcggagcccaggggcagaggggcttaccctgggtgttggtgggtttggcccaggcgggtgtgggggggcccgggcctcgagggggacgggcgtaagtggccagaaggaggcggtaggctggattggagagcagcaacgctgtcgggagaaggaggaggggaaacacggggaagggatgagactcaaggctagacagacagggagaccttgaatagggcaagaccagggctgatgggatgattgcattaagagacagacaggataaaacaaggatctgcagagtgacggacggctggctggataatgaatgcatggacagatgggacgtatgaatagatggatggatggtaaacagatgttttgttggatggatggataacagatggaaagatggatgtgtgaatatagatggatagatggatgatggatatgggtgggtggatggatggatgaatagatttatgaatatagatagaaagacagatgatggaagattgatggatggatgcaaggatgtatgactatggatggaaggatgggtgatggaggatagatgaaggaacaaacatggtgagtctaatacaaagcaaaggggccagggagacacaatgagagggtacaacaaagatagagagatgtctgtgggacacagacaagatagcaccacgggggactatgggtaatacatggggaactcttgagagagactacatggtagggacaaagagtgatatagacagtaaccaggggcacagaaagaagaaaacaagtggaaactggggaagacaggaaaaaaagagaatgggaaagggatacaataagaaaacagcagagaggacagaggtgcgactggaacaaggcaggtcttaccagagccattggggacacagggagcggagtggggcggattcccacgaggccggggctcctggtacgggggtggctctctaggacctgggcggttgttgatgaggatagtgtccccagggacagagaggtgaaccgtcagctcctcttccaacaccctccgttcagccttgtcatagggatgggaggcatcacccgtgttgctcagcacacacggcctggccctctgctgtgtccatccctgcgttccctccctcagccctcacaagagccctacagctgtgg

SEQ ID NO: 11048 - DNA, 1317 bp, Artificial sequence
  DNA replication origin
aggatgtggtggactcagaggctgtggagaaggcctcagtagtttcagaggctgaggtgggagctacagtaggcacagaggttatcatccaggctgtggggatctcggaatctttgctagaggccaatgtagtcacagactgcagtggttcctgaggttatgatggaagccagagtgatctcagagcctgtggtggtttcaggcgctttgataaagactgcagtaggcacagatactatcttggagagagtggtgctcttggaggctatggtagagtccatggtgggcacagacttggtcacggagtctatagtattctgatagagtgtggtggaggctgtggtggacacagacgctgtagtggtcttagcaggcattacggtggctgtggagaacccagactgtgtggttgtcacaggagctttggtggagaccacagcagtctcagaacctgtggtcatggctgtggtcatggctgtagtcacttcagtggcagaggtggaagctctggtggtctcagagcctgtgctgctttcagaggctgtagcgaagactgtggtgggcacagatgatactgtgtggtgtccggtgttctcagagcctgtggtagaggttgtggtgggcacagatgctgtggtggtctcagcaggtgttggaggggctgtagagggcgcagactctacagttgtcccagaggcttttgtggagattgcagtggtcgcagagtctgtggtggaggctgtggggatctcagagcctgcggtgattttagaggttgtggtgaagactgtggtgggcagagatgttatcgtagaggtcgtggcggtcttggaagctgtggtcatggttttagaggctgtgttgggagctgtggaaggtgtagatgttatcacagagggtgtgttgttcttggggactgtggcggacacagatgctgtggtggtgtcagtaggtgttttggtggctgtgtggggcacagactctgcagctatcacagaggtttgagtggagactgtggtgtcctcggaggctgtgatggcagcaatggtagtttcagacatggtggcctcacaggctgttgtgttcttagagcctgaggtggaagctgtggtgggcacaggtgttactgtggaagatgtggtggtgttagagaccgtggtgaaggccagggtggactcaagggccaggatagaggctgtcactggctcagacactgcagtggagaacctgatggtctcataagctgtggaggagactgggatggctgcagagctcatggtgatctcagaggctgtgctggaggctgtgctggaggct

SEQ ID NO: 11049 - DNA, 1025 bp, Artificial sequence
  DNA replication origin
agtccctatttagtggggccaaatcaataaattcagcctgacctaactctatgttccttccaccattatcccacacccttcatatccattctaatgcctgttctccagatttctgtttatataaattagaaaattcaagcagttcttttcgagtgtagtacatctcctcatgggtcacactctcaacctcgcctctaggggccctccaggaaatgatacctaacagtgtacaggcttgacttgagacagggcagagatgatagaaacaggtgaagagctagtggttgccattggaattaaaatgtgtgtgatcagagaagacatgggggttagtacctgacacaactgttttggtgatggtctgagtagaaatgtcagtgaccttgttgggcacgaaagtggcagagacagtggtggaggttgcagtggccccagaggctgtggtagaggccaagaagggcgatgaggccaaagcgaaggctgtggaggtcacagatactgctgtggatggcatggtggcctcagagcctgtggtggaagccatgctgcttccagaccctgaagtgacctcagaggctgtgctcacagccatgttgctcgtggatattgcagtggaggctgtggtggtctcagagtctgtggaggaggcggttgtgggcatagatactattatggaggcactgggggtctcagaatctgtgagggaagccgtggaggtttcagtggctgtagtggtctcagatcttgtagtggaggctgtggtggtctcagagcccatcatggataaaaatcctgcagtgttctcagaggttattttggaggttgttgtgggcacagatactattgtggaggtagtgggggtctcagaggttgatgtggcctcaaaggccatagtggaggctaggatgtggtggacacaaatattttgaaagaggatgtggtggactcagaggctgtggagaaggcctcagtagtttcagaggctgaggtgggagctacagtaggcacagaggttatcatccagg

SEQ ID NO: 11050 - DNA, 931 bp, Artificial sequence
  DNA replication origin
ggtcagaggtgtttgagactattcccgtcacaggatggctgcagcagaggccatggagtccattccaggggccatggtgacagagctaggggcggtaggactggttccaggggtcacacaacatgatgcattcatagcagagataattaaaggggagtgggagcgcttagagcagagcggggtgaatctaacatgtctatggtgagaatagctcaggagaggggtggtgggggaggagagatggtagaaagccattcctctgtggccgtgtcctcacaatagaggtgggtgtcgtacagaggaggaggtagaatgtgtcacctggtggagttggtgatggaggaggcagaaggttgaggaaacgtgaccgtgatgggtatggaagtggaagatctatttgacttcggaagtggccacccaaatagaagagggcgggcttgtatacaaagtggcaggccctgcttcttttgtgactgtgatcactgggtgtaaggagggagctggaggaggagatgacagaattggattcattcatgggcatgccagtggccgtggctgggacggaggtgacatcatctaccacactgtggtggtcagcaaaggtggggtgagtgtgcttgggcagatgtgggaggacctgacccaagtggagaaggctgctcacagggacaggagagggtgggctcagacaggtgcgagtgagaatcaacacagcagaggcagtggtggtggctttgatagcaatgggtgtgcctaggtcagaagtggtgaaaataggatcccaaacagcaccagtcaccagaatagaggtgagggtgctcagaacgaagaggatagaatcagatgcaaccggcttgctgatggaaagtgccagagaatgaacataattgtttggtcttagactggagcaaggtgatatgatttggatttg

SEQ ID NO: 11051 - DNA, 847 bp, Artificial sequence
  DNA replication origin
ctggccgccatcacatctaggaagtgaagagcgtctctgcccggccacccatcgtctgagatgtggggaccgcctctgccccgccgccccgtctgggatgtgaggagcgcctctgcccagccgcgaccccgtctgggaggtgaggagcgtctctgcccggccgccccgtctgagaagtgaggagaccctctgcctggcaaccgccccgtctgagaagtgaggagcccctccgcccggcagccgccccgtctgagaagtgaggagcccctccgcccggcagccaccccgtttgggaagtgaggagcctctccgcccggcagccaacccgtccgggagggaggtgggggggtcagccccccgcccggccagctgccccgtccgggaggtgaggggcgcctctgactggccgccactactgggaagtgaggagcccctctgccaggccaccaccccgtctgggaggtgtacccaacagctcattgagaatgggccatgatgacgatggcggttttgtggaatagaaaggggggaaaggtggggaaaagattgagaaatcggatggttgctgtgtctgtgtagaaagaagtatacatgggagacttttcattttgttctgtactaagaaaaattcttctgccttgggatcctgttgatctgtgaccttacccccaaccctgtgctctctgaaacgagtgctgtgtccactcagggttaaatggattaagggcggtgcaagatgtgctttgttaaacagatgcttgaaggcagcatgctcgttaagagtcatcaccactccctaatctcaagtacccagggacacaaacactgcggaaggcctcagggtcct

SEQ ID NO: 11052 - DNA, 954 bp, Artificial sequence
  DNA replication origin
atcatggcccattctcaatgagctgttgggtacacctcccagacggggtggtggcctggcagaggggctcctcacttcccagtagtggcggccagtcagaggcgcccctcacctcccggacggggcagctggccgggcggggggctgacccccccacctccctcccggacgggttggctgccgggcggagaggctcctcacttcccaaacggggtggctgccgggcggaggggctcctcacttctcagacggggcggctgccgggcggaggggctcctcacttctcagacggggcggttgccaggcagagggtctcctcacttctcagacggggcggccgggcagagacgctcctcacctcccagacggggtcgcggctgggcagaggcgctcctcacatcccagacggggcggcggggcagaggcggtccccacatctcagacgatgggtggccgggcagagacgctcttcacttcctagatgtgatggcggccaggaagaggtgttcctcacttcctagatgggatggcggccgggctgagacgctcctcactttccagactgggcagccaggcagaggggctcctcacatcccagacgatgggcggccaggcggagacgctcctcacttcccagacggggtggcggccgggcagaggctgcaatctcggcattttgggaggccaaggcaggcggctgggaggtggaggttgtagcgagccgagatcacgccactgcactccagcctgggcaccattgagcactgagtgaacgagactcccgtctgcaatcccggcacctcgggaggccgaggctggcggatcactcgcggttaggagctggagaccggccccgccaacacagcgaaaccccatctccaccaaaaaaaatacgaaaaccagtcaggcgtggcggcgcgtgcctgcaatcgcaggcactccgtgaagactgtt

SEQ ID NO: 11053 - DNA, 1023 bp, Artificial sequence
  DNA replication origin
gccagtcctgcgccgtgcgcttgcactcctcagcccttgggtggtcgatgggactgggcgccctggagcagggggtggcactcgtcggggaggctcgggccgcataggagcccatggagggggtgggaggctcaggcatggcgggctgcaggtcccaagccctgccccgcgggaaggcagctaaggcctggtgagaaatcgagtgcagcgccggcgggctggcactgctgggggacccagtacaccgtccgcagctgctggcccgggtgctaagcccttcattgcccaggaccggcagggccagccaagcccacgcccacccggaactccagctggcccgcaagcgccgcgtgcagccccggttcccgctcgcacctctccctccgcacctctccctccacacctccctgcaagctgagggagtgggctccggccttggccagcccagaaaggggcttccacagtgcagcggtgggctgaagggctcctcaagtgccgccaaagtgggagcccaggcagaggaggcgctgagagcgagcaagggctgtgcggacttccagcaccctgtcacctctcaatggcagctttgcttcaaaatggcgtccctgttgccgtgcaacaggctgtattcctacactccacctctcaaaactggccctgacaatttcacgtgctcatctcttccatgatagtccctgggcctaaagggaggacccttgatagtgcatagctttagcagcagtgcgttggctccactggaggcagataacacagcagcagtaaaggctcaaacaagacagtaaggaacgtacgagtacagcacctaaaccaagaagcagcttatgccaccaggtgccccaggacccaaaccagctgtgaagccaattattcaaagtaggggtctgagagcttggttatgtgggcttttatatcagtcattaatttagcgatattaactgattcatcaggaatataaacacagcagtttttccaattgcacaagtgccccgttgtgcagcgtga

SEQ ID NO: 11054 - DNA, 907 bp, Artificial sequence
  DNA replication origin
tcccaaagtgccgagattgcagcctctgcccggctgccaccccgtctgggaagtgaggagcgtctctgcctggccgcccattgtctgggatgtgaggagcccctctgcctggccgcccagtctgggaagtgaggagcgcctcttcccggccgccatcccatctaggaagtgaggagcatctctgccgggccgcccatcgtctgagatgtggggagcgcctctgccccgccgccacgtctgggatgtgaggagcgcctctgcccagccgcgaccccgtctgggaggtgaggagcgtctctgcccggccgccccgtctgagaagtgaagagcccctccgcccggcagccgccccgtctgggaagtgaggagcatctccgcccggcagccgccccgtcagggagggaggtgggggggcagcccccgcccggccagccgccctgtccgggaggtgaggggcacctccgcccggcagccccgactgggaagtgaggagcccctctgcccggcagccaccccgtctgggaggtgaacccaacagctcattgagaaccggccatgatgacgatggcggttttgtcgaatagaaagggggaaatgtggggaaaagatagagaaatcagattgttgctgtgtctgtgtagagggaagtagacaggggagactccattttgttctgtactaagaaaaattcttctgccttgggatgctgttaatctataaccttacccccaaccccgtgctctctgaaacatgtgctgtgtccactcagggttaaatggattaagggcggtgcaccatgtgctttgttaaacagatgcttgaaggcagcatgctcgttaagagtcatcaccactccctaatctcaagtacccagggacacaaacactgcggaaggccgcggggtcct

SEQ ID NO: 11055 - DNA, 1188 bp, Artificial sequence
  DNA replication origin
gtgcaccgcccttaatccatttaaccctgagtggacacagcacatgtttcagagagcacggggttgggggtaaggttatagattaacagcatcccaaggcagaagaatttttcttagtacagaacaaaatggagtctcccctgtctacttccctctacacagacacagcaacaatctgatttctctatcttttccccacatttccccctttctattcgacaaaaccgccatcgtcatcatggccggttctcaatgagctgttgggttcacctcccagacggggtggctgccgggcagaggggctcctcacttcccagtcggggctgccgggcggaggtgcccctcacctcccggacagggcggctggccgggcgggggctgcccccccacctccctccctgacggggcggctgccgggcggagatgctcctcacttcccagacggggcggctgccgggcggaggggctcttcacttctcagacggggcggccgggcagagacgctcctcacctcccagacggggtcgcggctgggcagaggcgctcctcacatcccagacgtggcggcggggcagaggcgctccccacatctcagacgatgggcggcccggcagagatgctcctcacttcctagatgggatggcggccgggaagaggcgctcctcacttcccagactgggcggccaggcagaggggctcctcacatcccagacaatgggcggccaggcagagacgctcctcacttcccagacggggtggcagccgggcagaggctgcaatctcggcactttgggaggccaaggcaggcagctggaaggtggaggttgtagccagccgagatcacgccactgcactccagcctgggcaacattgagcactgagtgattgagactccgtctgcaatcccagcacctcgggaggccgaggctggcagatcactcgcggttaggagctggagaccagcccggccaacacagcgaaaccccgtctccaccaaaaaaataggaaaaccaatcaggcgtggcggcgcgcgcctgcaatcctaggcactgggcaggctgagacaggagaatcaggcagggaggttgcagtgagctgagatggtggcagtacagtccagcttcggctcggcatcagagggagaccgtggagagagagggagagggagagggagagggagacagtggg

SEQ ID NO: 11056 - DNA, 1403 bp, Artificial sequence
  DNA replication origin
gcactgggcaggctgagacaggagaatcaggcagggaggttgcagtgagctgagatggtggcagtacagtccagcttcggctcggcatcagagggagaccgtggagagagagggagagggagagggagagggagacagtggggaaagggagagggagaccgtggggagagggagggggagagggagaccgcggggagagggagagggagagggagggggagagggagaccgtggggagagggagagggagggggagagggagaccgtggggagagggagagggagagggaggagagggagagggaggggagggagagggaggagagggaggagagggagagggaggagagggagagggaggagagggagagggggagggggaggagagggagggggagggggagggagagggagagggaggagactggatgtttcctttgatcatctatcacatctttgcagaggacatataagcctgtgcatggctatgagaacacagtggagagccatgtaaatagcttttgccttcaaggtgcctggcagaagcgaatgaatattgctgtcatgtacatgcaaacgttgtgaaatgcttcaatgttccacatcttctttggagacctttaagaaattcatggaactttcagcagtgatatttaccaccaacaatgtaatcaaatggggcagcaagcaaaatgagctactactaatgcaccatggagcagaggaattttctcttgcgctaacaccacaacagacccattctttcatttggattagtattcactacttgtgcttagttgcttgcagtggatacccaatttgtgaagtgagctgaggtataatgcagtattgtatactggaacacaggggctgcaaaagcagaactcactaacaaagtcaaatgccatgaacgtcacaattgatgaaaactggccatttgaaaaatctagatatgataaaattgttaaattgatgaggatgaagattggattatagtatatattcagcatgcaaaaacagataatcaggggaaatgcagtgacagtcaaagcaactatggaaacaatatccatggcaacaaatggcctggtcggaagagaggcccaaagactgcctgtgtcttcctgatgaaatgtctggtagccccctagtggcaatgaccgggtagtggccctctgcgagatgggcgcctctctggagattgagcgccacttctgagggcctggagaagttgacttgttttgcatcccacggggtcacccccacctccccctttccttgcactcactgacatgagacacaacgtatgtccacaaacaactgctgctcctcattgcatctaaagctccgttgccggaaaacataccattatttcatgcagcactaagaggaaaacacagcgg

SEQ ID NO: 11057 - DNA, 800 bp, Artificial sequence
  DNA replication origin
ccttgggctcctcggcaggagccgacgttgctgcatctgtttgacagccaagaagccggggccaggaggggcgcggcctctgcgcgcgggcagcgcctacccctccttcggaattcccgggcccgaacttcgcgccgagcgagcccgcccccgtgccgttcccgattggccagctcatgtgttctcttccgcgccattggacagcgccccaagatctcccgccttccactttttctgattagttcacaagttttcccgggttgccgcagtgaggaggagccgcctgggcgcggagatgctccgacgcatttagtgggcccaaatttagacgccactgcgcctgcgtacacctttccccctcctcccaacagagtgaaataggactttagggcgcccgccttgcgcaggcgcggtcaggggcagaggcggggccgggagcgaggcgtagggggtgtggccaaagcgcagtagggggctctcgcggttggtaagggacgttcgggaagagtcggttgggggcgggaaggggctgagcgggggtcctgggagggttcaaggggtccaaaggggaagggggtacaggggccaggtgaagggacagatgaagagatcagaacagccttagagctcacgggctaactgggtgaagcctcgggtatctaggggagcagtggtgggagagtagagccggctagcgtacagggggcgagggcaggctattgagagatgggggtgagggtcaggaccagaataattccttcagaaaaaggtagattaggttgtaaaaagggacgggagta

SEQ ID NO: 11058 - DNA, 1101 bp, Artificial sequence
  DNA replication origin
gttagagctgccccctctggggaccgggattgtccagccaaggccattgtcctgcccccttcccccagtccctcccaggcttctttgaacctgaagtcagatattttttctccacaccccccaccccctggttttccccacccagggcctagggctggaggcctgggccagggaggtgggggagggagaacggggcctaccgtggtattagatgtctgagttttggttgagaggggagcaaggaacctgatgtgcaggttccatagtggagggggcccaaagcgggtgtcttatcactctgtttcagcaaaggttgggaaactgaggcccagtcagtccaaagtctggtcccttgaaggggaagtagggaccaaccccttagtctgttagatgaggagagtctggagtctgattctggaagacggaggggtggggggatgggggggtggggggatatagcacggaggccttgtctggcagtctactcttgaagatggggtgaaatttggcaggctgggcagatggtgccaggcacccaggctgcggggtggctggatttggccagtatcgggatgggaatgcctaggattctggatggatcgggggaaggcataagggagcagctggccattgtgcttatggctgttgatgcattgagggatagcgccacacacacattcaataaatttgaggagctgagagggtgactggcccctgaaggcacagtgccagaggtctgtggagagggggtcaagcacctgggttcctgaagaacatggaggtgtgggagtgattccagacagctgggatgtgcagagcctgagagagtgccagggagcgggttgggagttgaaagttgggtgtggtggctcacgcctttaatcatgacactgggcggcagaggcgggaggatttcttgaggacaggaattcaagaccagcctgggtaacatagcaaggccccatctctactaaaaataaaaaaactaacagggcacagtggtccaagcctgtagtcccagccacttaggaggctggagcagaaggattgctttggcccagtagatcgaggctacattgagccatcattgtactccactgc

SEQ ID NO: 11059 - DNA, 1461 bp, Artificial sequence
  DNA replication origin
cgcctcccggattcaagcgattctccttcctcagtctcccgagaagctgggtttacaagtgcgcgccagggtttcgctatgttggccaggctggtctccaactcctgacctcaggtgatccgcccgcttcggccccccacaaagtgctgggattatgctgggattacaggcgtgagccaccgcgccgggtctcaaaccccaaattatttttttggggggacggagtcttgctctgtcgcccaggctggagtgcagtggcgcgatctctgctcactgcaagctctgcctccagcgttcacgccattctcctgcctcagcctcccgagtagctgggactacaggtgcccgccaccacacccggctaatttttttgtatttttttagtagagacggggtttcatagtgttagccaggatggtctcgatctcctgaccttgtgatccgcccgcctcggccccccaaagtgctgggattacaggcgtgagccaccgcacccggcctcaaaccccaaattcctaagtatggatgagccaaatcacccctcccactgctgaggagagacgcttgtctcggactggacttaacccaatggggttcaagaaaaagggaaagtcccgcctccgtagcagctccagtccaatgggagcctcccggtacgctcagctggaagatgggcgggactacgctggcctggagcatggcacgtgattccgccggcctggttgccgggaatctggacctgagcgagaagcacgatccccggccgcccccgctcttgcatccccctggtcctactgctgtgcttgctggcgacggttcgttccggaagtcaggccagtgactgcggggctctgctccgccctccatacctgttaagtgtccccctcccccacaacgcctgatccccacagcctggcagcgagagtccagccctccggggaggttgaggcccggtgccaccaccaccactggaggcctgacgatgcctgacgatgcctcacgcgggtgctgagtagtaggggggcttaattatttagcacctctccccttcccctgagccataaccttccccaaactgtggcctttatgaggcctcttgggagtgctttttggagccgggggaggtctggggcgatggaggttgcaagataaggtcaggcttagagggtaggtagggcttcctctgaaactggttgtatctggtaagtaattgtcccatgtctcccacttgaagcttaaacttggccgtaggaggtccttatgcctgtaatcccaggactttgggaggccgagctgggcggaggattgcttggacacaggagtttgagaccagcccagggaacatgaggaaaacctgtcaatacagaaaatacaaaaacattagccaggcgtggtggtgcacgcctgtagtcccagttactctggaggctgaggtgggaggatcgcttgagcctgggaggc

SEQ ID NO: 11060 - DNA, 936 bp, Artificial sequence
  DNA replication origin
ccggccagccgccccgtctgggaggtgaggggcgcctctgcccggccgcccctactgggaagtgaggagcccctctgcccggccagccgccccgtccgggagggaggtgggggggtcggccccccgcccggccagccgccccgtccgggagggaggtggggaggtcagccctccgcccggccagccgccccgtccgggagggaggtggggatgtcggccccccgcccggccagccgccccgtccgggagggaggtgggggggtcggccccccgcccggccagccgccccgtccgggagggaggtgggggggtcggccccccgcccggccagccgccccgtccgggagggaggtggggggagtcagcccccccgcccggccagccgccccgtccgggaggtgaggggcgcctctgcccggccgcccctactgggaagtgaggagcccctctgcccggccaccaccccgtctgggaggtgtgcccaacagctcattgagaacgggccaggatgacaatggcggctttgtggaatagaaaggcgggaaaggtggggaaaagattgagaaatcggatggttgccgtgtctgtgtagaaagaagtagacatgggagacttttcattttgttctgcactaagaaaaattcctctgccttgggatcctgttgatctgtgaccttacccccaaccctgtgctctctgaaacatgtgctgtgtccactcaggattaaatggattaagggcggtgcaagatgtgctttgttaaacagatgcttgaaggcagcatgctcgttaagagtcatcaccaatccctaatctcaagtaatcagggacacaaacactgcggaaggccgcagggtcctctgcctaggaaaaccagagacctttgttcacttgtttatctgctgaccttccctccactattgtcccatgaccctg

SEQ ID NO: 11061 - DNA, 866 bp, Artificial sequence
  DNA replication origin
ccctgattccagtgatcttcgtgctgactccaatcccaactcatgaatctaaagcagagcctaatttagatttgtatttgtttgtaaaattgggtccatagtctagaattgttccttcctgaagagagaaacctgatcgtgtgctgcagtgtgcagggcggttggtgtgggaggagggataggggagggaggacacacaagcagccctgctgagaaaagtacaggcggcctcggtgtcagtgtgaggggaccttgtgctgcagctgccacaaaacagcacttggcctgaggctatgttaataaagatactggctttagaataggaggtgctctacactgatcattcaactgacctttgttgtcagccagacataggacagaaaagttctgcatctggggaacgccattgaagtaaaatcagaaaaatatctgagcatatgctccagtggtaagaggcagacgatacatacactataaccagagtaagaaaagaaagtgatggaaggtggtaagtgccatgaggcaggtgatccgggtatgggcagtggggacagggaaggtggctgttggacaggagtggtcaatgtgtgccttgttgcaaagatgacctttcaggaaagatttgagggatatgaggatgtctggggaagttctttctaggcaaggaaactccagtccaaatgcacaatggcaggaaggtgtctgtgttcccagaagagcaaggaggccaggagggctggacagagaaactagatgaggtcagaggtgtggccagaacaggtgggcttgaggggagtggggttgcatctgacctttgctctgagtgggatggggagttagaggacagttttgagcagaagagggcc

SEQ ID NO: 11062 - DNA, 1064 bp, Artificial sequence
  DNA replication origin
cgtggacgacacgcagttcgtgcggttcgacagcgacgccgcgagtccgagaggggagccgcgggcgccgtgggtggagcaggaggggccggagtattgggaccgggagacacagaagtacaagcgccaggcacaggctgaccgagtgagcctgcggaacctgcgcggctactacaaccagagcgaggacggtgagtgaccccggcccggggcgcaggtcacgacccctccccatcccccacggacggcccgggtcgcccagagtctccccgtctgagatccaccccaaggtggatctgcggaacccgcccagaccctcgaccggagagagccccagtcgcctttacccggtttcattttcggtttaggccaaaatccccgcgggttggtcggggcggggcggggctcgggggactgggctgaccgcgggggcggggccagggtctcacaccctccagaggatgtctggctgcgacctggggcccgacgggcgcctcctccgcgggtatgaccagtccgcctacgacggcaaggattacatcgccctgaacgaggacctgcgctcctggaccgccgcggacaccgcggctcagatcacccagcgcaagttggaggcggcccgtgcggcggagcagctgagagcctacctggagggcacgtgcgtggagtggctccgcagatacctggagaacgggaaggagacgctgcagcgcgcaggtaccaggggcagtggggagccttccccatctcctatagatctcccgggatggcctcccacgaggaggggaggaaaatgggatcagcactggaatatcgccctcccttgaatggagaatggcatgagttttcctgagtttcctctgagggccccctctgctctctaggacaattaagggatgaagtctctgaggaaatggaggggaagacagtccctggaatactgatcaggggtctcctttgaccactttgaccactgcagcagctgtggtcaggctgctgacctttctctcaggccttgttctctgcctcacactcaatgtgtctgaaggtttgattccagcttt

SEQ ID NO: 11063 - DNA, 871 bp, Artificial sequence
  DNA replication origin
aggttccgcaggctcactcggtcagcctgtgcctggcgcttgtacttctgtgtctcccggtcccaatactccggcccctcctgctccacccacggcgcccgcggctcccctctcggactcgcggcgtcgctgtcgaaccgcacgaactgcgtgtcgtccacgtagcccactgagatgaagcggggctctccgcggccgggccgggacacggcggtgtcgaaatacctcatggagtgggagcctgggggcgaggaggggctgagacccgcccgacccacctccctgcgcggctccccgggtcctgcgccctcgccgggagggcccctcgctcctctccgcagaggccgcttccctcccaaccccgcactcacaggcccaggtctcggtcagggccaggcctcccgagagcagcaggaggagggctcggggcgccatgacccgcatctcggcctctggggagaatgtgagtccgggtgggtgactggggactttagaaccgggactgcggagacgctgattggcttctctagaacccgacacccaatgggagtgggaattggggacgcgtcatgagtattcaggaagaaggacccgacgcaggttgggagaagtgaaactcaggggagtggagaatccccaacgcggcgcctccccaatgcagacacggcccttggagcctgagaccctgagagccccgcccgggacctgggacttcgtcctgatccctcttctcctacaccaagcatctttgtcacactgtgtgcctgagtcctggacaaggatctgtctgtggaaaccagggagagaccccaaggctgcgcccagccccttccccttcacttctcctcctggaatccccgtccctgaactg

SEQ ID NO: 11064 - DNA, 1494 bp, Artificial sequence
  DNA replication origin
gcccctgcacacgggggtctctgtgcattctgagacaaattttcagagccattcacctcctgctctgcttctagagctccttttctgctctgctcttctgccctctctccctgccctggttctagtgatcttggtgctgaatccaatcccaactcatgaatctgtaaagcagagtctaatttagacttacatttgtctgtgaaattggacccgtcatcaaggactgttctttcctgaagagagaacctgattgtgtgctgcagtgtgctggggcagggggtgcggggagggggttgctgtcgaaagagggatggggagggagggcacacaagcagcactgctgagaaaaacataggcggcctctatctcagtgtgaggggtccttgtgctgtagctgccacaaaacagcacttggcctgaggctatgttaataaagatactgccttcaaaatagggaggtgctctacagtgatcattcattcaactgacctttgtcattggccagacataggacagaatggttctgcatctggggaacaccactgaagtaaaagaaaaatctctggccttttgtagcatatgttccagtgggaagaggcagacgatagatacattataaccagagtaaggaaggaaagtgctagaaggtggtaagtgctgtgaggcaggtgatccaggatgtgggcagtggggacagggaaggtggctgttgtgctgggtagtcagtgtgtgccttgttgcaaaggtgacttttgaggaaagatttgagagacatgaggatgtctggggaagttctttccaggcagaggaagctccagtccaaatgcactatggcaggaaggtgtttgtgttcccagaagaacaaggaggccaggagggctggacggagagaaactgaggtgaggtcagaggtgcggccagaacaggtgggcttgaggggagtggggttggatctggcctttgctctgagtgggatggggagttagaggacagttttgagcagaagagagccatgatatgacttctgttttaaaaggatctctctgacggctgtgctgagaacagaattgagaggcgagggacgagggaggcagaagggaaaacagtaggaatcgagtgcagtattccaggctggagatgtcggtttccttgactggggcgtgagcaggggaaatagtggggcgtgaggggattctggatgcatttgaagatggactcacagcatttgccaatggattgtatctgtggtgtgagaaagacgaatcaaggacacccatagttgtaaaatgagtgagtagaaggatggagctgctgtcagtggagatggggagactctggcaggagcgtcctgaggagggggcatcacaggcactcagtggaggagatgtctactaggaaggcaggtgggggagctggggtggaatttggacagacaactccagagtttaggggaaaggactgggctggagaaatagatttaggaggtcacaccat

SEQ ID NO: 11065 - DNA, 1105 bp, Artificial sequence
  DNA replication origin
agcgaggccggtgagtgaccccggcccggggcgcaggtcacgactccccatcccccacgtacggcccgggtcgccccgagtctccgggtccgagatccgcctccctgaggccgcgggacccgcccagaccctcgaccggcgagagccccaggcgcgtttacccggtttcattttcagttgaggccaaaatccccgcgggttggtcggggcggggcggggctcgggggactgggctgaccgcggggccggggccagggtctcacaccctccagagcatgtacggctgcgacgtggggccggacgggcgcctcctccgcgggcatgaccagtacgcctacgacggcaaggattacatcgccctgaacgaggacctgcgctcctggaccgccgcggacacggcggctcagatcacccagcgcaagtgggaggcggcccgtgaggcggagcagcggagagcctacctggagggcgagtgcgtggagtggctccgcagatacctggagaacgggaaggacaagctggagcgcgctggtaccaggggcagtggggagccttccccatctcctataggtcgccggggatggcctcccacgagaagaggaggaaaatgggatcagcgctagaatgtcgccctccgttgaatggagaatggcatgagttttcctgagtttcctctgagggccccctcttctctctagacaattaaggaatgacgtctctgaggaaatggaggggaagacagtccctagaatactgatcaggggtcccctttgacccctgcagcagccttgggaaccgtgacttttcctctcaggccttgttctctgcctcacactcagtgtgtttggggctctgattccagcacttctgagtcactttacctccactcagatcaggagcagaagtccctgttccccgctcagagactcgaactttccaatgaataggagattatcccaggtgcctgcgtccaggctggtgtctgggttctgtgccccttccccaccccaggtgtcctgtccattctcaggctggtcacatgggtggtcctagggtgtcccatgaaagatgcaaagcgcctgaattttctgactcttcccatcag

SEQ ID NO: 11066 - DNA, 1016 bp, Artificial sequence
  DNA replication origin
tgtggcctgggaacatggatattaaaaactctccaggtggttctacgcagtggctaggtttgatgacctctgcctagatgtcccaacgactaagagatgtgcgttggggacaaggcaattctcttagtagaaagaggctttcgggacagcattcttattattgagaattgagaattcatatgccacacaatttatccttttaaagtgtgcagctcagtggcttctagcgtaatcacaaggttgtgccaccgtcaccactgtctaccctggaagattttttttcctttttttcttttttcttttctttttattttaaaggctagtcaagtgaaacagtgggagtgaagaagaaacaaagacatctataactggttgtgatcaattagttgtaaacactgcactcagaccagcctgggaagattttaaggatatggtgtggtctgatgggttccaaggcagaggttacaatagcctggaagagggagactgcttaggcagtggcatcctggtgggatagggtgaggagatcccagagcccacgtttactgcaaccctggggagatgtcaccagagaaatgggggtggtgccagacagcagattgtggcagctgaggttttccacggtagagtagaagcatccatcatgtgtgacattcagcagatggggcgctgtgggtggcttggagcactctggttgtaactgaggcaggcaccgtgtttaggaaggctgtgcagtaatctaggctgaagggaggggaaagcctagactaagattgtggctgtgggattgaaatagcgttgaaggagctgactttgactcccggagatgatggggaaagaggaaatcagaagggaccaaggatggtgatgttcttaagagaaactgaggaggaagagaggatgatatggtggcagacgtatagagagtctttgtagatctctcacattggaggggactatggtcggaggtacagatgtcctaaggcaggctggaaaagggagtctggagagagctt

SEQ ID NO: 11067 - DNA, 1646 bp, Artificial sequence
  DNA replication origin
aagaactggaggtcatcctgtgaagtgaaataagccccaggcccagacagacaaactttgcatgttctcacttatttgtggcagccaaaatttaaaacaatggacctcatggggagagacaatagaatgatgattaccagaggctgagaagggtagtggggagtgggggagcagggatggttaataatgggtacaaaaatataattagaatgaataagatctagtagatagcacagcagggtgagtacagtcaacaataatttattgtacatttaaaaataactgaaagagcataatgggattgtttgtagcacaaagaaaggataaatgcttgttgtgatataacccatttaccctgatgtgattattacatattgtaggcctgtgtcaaaatatcccatgtaccccataaatatatacatatatatctactacgtacccaaacaaaagttaaaaattaaaaacaaagcaaggggtgggggtgctggccagagagagaaaaccaaggtagagggggagattctcagcctgaggaaggacctgccaaaaggagtaatgctggagggggagcagtggcaccccaagagcaggcaaaacagattttagatatgcggtgtggggagtgagagcccactggggtcaaggaaccaaaagaaaagaaggaaggtcaaggaacagttggcccaacagcctgttttaggtctgggttggggaggggagatgggcagagcaagaactggagggcggcatgagcatggggcaggagtgactgtgggagaacttggggtagggtgaggacaggaggggagggtgctctgggggagggtggggcttgggaaagatgctcagcactgtcatatgctccagcactcccactttcccactgaaagatgagaacgtgctgagggcccaaggcagctgggcaagagacaggagcagcacaaggtcccaaggtggagaggggcggagggaccagggagggatggtccagcacctgtgggctggagggtggggtcctcaagagggtgaggctgaggatgaaggagtggggaaggggccaccatgaggcagggtccagagcaggcatctgcactggaggggagggggcatctgcgctgccctgcgccctgcctaaggcccaactgccattagcatcagggttccccttgggggtctggaggggagtgggatggagggaagacccccccggataaaaggcagcaccagaaagttagagtcagggacatttgggaacggggaggcataggggcagcactgggtgaaggctgcttgtaggaaaggcccataaggggtgcaggagggaccttcggtggcggggacaggggatgagggcagaggacaccctagaaatggatcagagaacagcacacaggaaggggtagcagggagctgggagggcaaaaggactcagcgggccctgagatgggcagggaggaggtgagagggaatctggtgtccttagatcactggtcattagtaggggtgggatgagagagaggagaggaccctcggagccagaggcgaggggagaatgagctggggatgagagaagtcgcaggaagaatcctctgcccggagcctgcagactccaacccctcagcttgagagtcaggaccccccacagt

SEQ ID NO: 11068 - DNA, 972 bp, Artificial sequence
  DNA replication origin
tctcaccttctttctggtccttgatatgagccagggtcatcctgaggtcctttccgttccctgtcaagtccctggtctctctgtcccatgtcttatttcccaggacatcttctgcccactgtccctggggctttgccctgcatttctgcctgtcatagcgcaggaagggctgaccatccagatgtacctcagcaagaaaccctgactgcacagatccatcccaggacagcaccgtgaggttataacgaagactgtggggctctggggaagaggaaatcacaggtgaaacttcttcctggaagtaacttcacattgatgtttaacacacaggtctgctgtcccaaccttcctggggcaggaaatgcacacgggcaaagggacaagaacgaggatttcatatacaaagaaaactgtgagggtgggaggatagaggagggggctgatgaacagaagaagggggaatgaagatggcaaacttgtaggccaggtgcaaggactgggtggccacaagccccctaagggaataggggccaaggggagaggctgccctgcaggggcaagggaggagcatgaaggtggtggaaggaaggtcttgccagaggggatggtgggaatgggaagggactcaggctcagagggacccatgtccagtgtggctgtggtgcataggctgagggtgagatggaggcaaggggagctgcctcgagaagagactcatcatgggcatggcggggacaagggagggggtggtcatgaggcacaaagggtaggaaggttgtagccccagagaagtttatagtggggtcagtatcccagaggggagcaacgaacggtgtgggcttgggttcaaagtggaagagtagcatgacaaggccccaggacagcaattggatggaacagctagtgtccactggggtgagcaggtgacaaagagtcagttgatcttttcagcaaatagttctgggggcaggg

SEQ ID NO: 11069 - DNA, 984 bp, Artificial sequence
  DNA replication origin
agccccacgtccgggagggaggtggggggggtcagccccccgcccggccagccgccccgtctgggagggaggtggggtcagctccccgcccagccagctgccccgtccgggaggtgaggggcgcctctgcccagccgcccctactgggaagtgaggagcccctctgccaggccagccaccccgtccgggagggaggtggggggctcagccccccgcccggccagccgacccgtccgggagggaggtggggggatcagcaccccgcccggccagccgccccctccgggagggaggtgggggggtcagccccccgcccggccagacgccccgtccgggagggaggtggcagggtcagccccccgcccggccagccgccccatccgggagggaggtgggggggtcagccccacgtccgggagggaggtgggggggtcagccccccgcccggccagctgccccgtccgggaggtgaggggcgcctctgcccggccacccctactaggaagtgaggagcccctctgcccagccaccacctcgtctgggaggtgtacccaacagctcattgagaacgggccgggatgacaatggcggttttgtggaatagaaagggggaaaaggtggggaaaagattgagaaatcggatggttgccgtgtctgtgtagaaagaagtagacatgggagacttttcattttgttctgtactaagataaattcttctgccttgggatcctgttgatcggtgaccttacccccaaccctgtgctctctgaaacatgtgctgtgtccactcagggttaaatggattaagggcggtgcaagatgtgctttgttaaacagatgcttgaaaggcagcatgctcgttaagaatcatcaccactccctaatctcaagtacccagggacacaaacactgcggaaggccgcagggtcctctgcctaggaaaaccagagacctttgttcacttgtttatctgccaaccttccc

SEQ ID NO: 11070 - DNA, 1333 bp, Artificial sequence
  DNA replication origin
tgatccccccacctccctcccggacgggtcggctggccgggcggggggctgagccccccacctccctcccggacggggtggctggcctggcagaggggctcctcacttcccagtaggggcggctgggcagaggcgcccctcacctcccggacggggcggctggctgggcggggagctgaccccacctccctcccagacggggcagctggccgggcggggggctgacccccccacctccctcccggacgtggggctgacccccccacctccttcccggacggggcggctggccgggcggggggctgacccccccacctccctcccggatggggcggctggccaggcagaggggctcctcacttcccagtaggggcggctgggcagaggcgcccctcacctcccggacggggcagctggccgggtggggggctgacccccccacctccctcccggatggggcggctgctgggcggggggctgacccccccacctccctcccggacggggcggctgccgggcggagatgctcctcacttcccagacggggtggctgccgggcagagggactcctcacttctcagatggggcggatgctgggcggagggtctcctcacttctcagacggggcagctgggcagagacgctcctcacctcccagacggggtcgcggccgggcagaggcgctcctcacatcccagacggggcggcggggcagaggcgctccccacatctcagacgatgggcggccgggcagagacgctcctcacttcccagatgggatggctgccgggaagaggcgctcctcacttcctagatgggatggcggccgggcagagacgctcctcactttccagactgggcagccaggcagaggggctcctcacgtcccagacgatgggcggccaggcagagacgctcctcacttcccagacggggtggtggctgggcagaggctgcaatctcggcactttgggaggccaaggcaggcggctgggagatggaggttgtagcgagctgagatcacaccactgcactccagcctgggcaccattgagcactgagtgaaccagactccgtctgcaatcccggcacctcgggaggccaaggctggcggatcactcgcggttaggagctggagaccagcctggccaacacagcgaaaccccgtctccaccaaaaaagtacgaaaaccagtcaggcgtggtggcgcgcgcctgcaatcgcaggcactcggccggctgaggcaggagaatcaggcagggaggttgcagtgagccgagatggcagcagtacagtccagcttcggctcggcatcagagggagaccatggaaa

SEQ ID NO: 11071 - DNA, 1695 bp, Artificial sequence
  DNA replication origin
catcatgtcatttgcaaagaactggaggtcatcatgtgaagtgaaataagccccaggcccagagagacaaacttcgcatgttctcacttatttgtggcagccaaaaattaaaacaatggacctcatggggagagacaatagaatgacgactaccagaggctgagaagggtagtggggagtgggggagtgcggatggttaatgggtacaaaaatatagttagaatgaataagatctagtagatagcacagcagggtgagtacagccaacaataatttattgtacatttaaaaataactgaaagagcataatgggattgtttgtagcacaaagaaaggataaatgcttgttgtgatagataacccatttaccctgatgtgattatgacatattgtaggcctgtgtcaaaatatcccatgtaccccataaatatatacatacatatctactacgtacccaaacaaaagttaaaaattaaaaacaaagcaaggggtgggggtgctggccagagagagaaaaccaaggtagagggggagattctcagcctgaggaaggacctgccaaaaggagtaatgctggagggggagcagtggcaccccaagagcaggcaaaacagattttagatatgcggtgtggggagtgagagcccactggggtcaaggaaccaaaagaaaagaaggaaggtcaaggaacagctggcccaacagcctgttttaggtctgggttggggaggggagatgggcagagcaagaactggagggcggcatgagcatggggcaggagtgactgtgggagaacttggggtagggtgaggacaggaggggagggtgctctgggggagggtggggcttgggaaagattctcagcactgtcatatgctccagcactcccactttcccactgaaagatgagaacttgctgagggccccaggcagctgggcaagagataggagcagcacaaggtcccaaggtggagaggggcggagggaccagggagggatggtccagcacctgtgggctggagggtggggtcctcaagagggtgaggctgaggatgaaggagtggggaaggggccacaatgaggcagggcccagagcaggcacctgcactggaggggagggggcatctgcgctgccctgcgccctgcctaaggcccaactgccattagcatcagggctctccttgggggtctggaggggagtgggatggagggaagacccccccggacaaaaggcagcaccagaaagttagagtcagggacatttgggaatggggaggcataggggcagcacggagtgaaggctgcttgcaggaaaggcccataaaggaggcaggagggaccttcagtggcgggggcgggggatgaaggcagaggacaccctagaaatggatcagagaacagcacacaggaaggggtagcagggagctgggagagcaacaggacccagggcgccgtaagatgggcagggaggaggtgagagggaatctggtgtccttagatcattggtcattagtaggggtgggatgcgagagaggagaggacccccggagccggaggcgaggggagaatgagctggggatgacagaagtcgcaggaagaatcctctgcccggagcctgcagactccaacccctcagcttgagagtcaggaccccccacagtccccacagcagcaagaagcaccacctccgggtcc

SEQ ID NO: 11072 - DNA, 1042 bp, Artificial sequence
  DNA replication origin
gtgccagcagcagcagcgagaagcagagggatcccgtcgacccccacgtgctgagggctccagccagagctggcgacagcaggaggaggagcagcggctcttcagggagcgagcccgggccaaggaggaagagctgcgtgagagccgagccaggagggcgcaggaggctctaggggaccgagaacccaagccaaccagggccgggcccagggaagagcaccccagaggagcggggaggggcagcctctggcgatttggtgatgtgccctggccctgccctgggggaggggacccagaggccatggctgcagccctggtggccaggggcccccctttggaggaacagggggctctgaggaggtacttgagggtccagcaggtccgctggcaccctgaccgcttcctgcagcgattccgaagccagattgagacctgggagctgggccgtgtgatgggagcagtgacagccctttctcaggccctgaatcgccatgcagaggccctcaagtgaccctagggaagaagcaagaaacttcggggctgcagcctcaggatgaggcagaaggaagggtaagggaaaggatggggaccacaaggaagagccaggtgctgctcagcagaggatatgggtgggagcgaaagttgtaacaagtgggggtggggggtgcgggccgccaccactgctccttgactctgccgtttcctaataagacctggttccacatctcactcccagtgtctcctctgtctttttccattgctgtggttttcatcacccatgacatctcctttcccgccccgcctgctgaaacccacagctcccacacacctgcaacacacacgcacacgctaacacgggctctgagctggaggcaagaagcctctgcatgccccctcagttcagccctaagaaggcccagtttgccatccagtctcactccactccctacactggggtcttgtccaccctgcaatctgtggctggagaaatagatgcgaacagaggcaaaaaggggaacaaaaccagtttccctcccctccc

SEQ ID NO: 11073 - DNA, 750 bp, Artificial sequence
  DNA replication origin
ccctgaacatctgcctggtccttcagaggccttggtctcttccgaacttcaggctgtcttattcaaggatctcatgcccacccatgttcccgtgttcccagaggcgtgccctccctgtcttctactgccttccacttccactcctgggattctcctgtagagaactgggctcaaaacctgaaagataagtttctgattgataagatgctctggtgtaactatgcagacagtgcactcaccagcacatgtctgtactctccttgcagccctgtcctttctttttgccaagttcccagttgtgtcctgggcgatggtagtggggtctacctatcttagtttccagggagcccccctctctcctccgtgggaatcccagactctccctccacctctcaggacttcaactactggttcttggaaaaggaaatgtttatagggaaggccatgcctgggctgcccagagatgaactcaggtttaggatggggcagcagctgaatggcggagatgaggattggggccctggaggaagagagatacaactgacaagctagagggcagagatggatggagccagcagcctggctggctttgggtgtggagctccagttgcccaagaacagacaacccatgttacataattttgctctttccacctccttcccctgctcctaattttagcaactgaaattccactcccccacagggctcttcctccagccattctgcttgtattccccatcctcccccag

SEQ ID NO: 11074 - DNA, 842 bp, Artificial sequence
  DNA replication origin
cagacctcccgccctgggagagagcaccccccgacccccgagagagagatcgacagagaaggggacaagatgcagtcagagaaaccccaaggtgagcagagggagacagagagagacaggaagggaacagagaggaatcatggcagaaacagagaatgtgtgacagagacaatgagactgacagatggagagtcagagacagagaaggaaaccaaaaccaaacccaccaaggcccaggcccaggcaggccggggatccaggcagcaggtgcaggagggaccgaggcccaggcagagggcaggacactgctgggcggtagtccaaagcacgaagcacgggcagcccaaggagatggggcaggagagcctcacctgctgtgcggagcccctgggcccggacgctcaggtccctttatagaggaagcggcagtggcagcgtggcaggcagcgggcgggttctaggtcggggctggggcccggggaagcccccagggcttagaagatactgctgtttcagtcaaaggcaggaaaggctgaggcctaggagagaaccacaggctgggggttcaggcgactgagttctgggaaagggagtcgggtcaggggaatcgtgggctgggagggccagggagtggggtcaggcctagagttccaaagaagggacagtcaattcagagaggaggtggttgagcagctggggtgtgagctggaggcccggttccctgaagagcaatcatatataacatctctgcacccttggctgagtacaggcttctctctttgcccatttccttctcttgtacccctgtccttgtcccaaacaactcaaatcatacttgtccc

SEQ ID NO: 11075 - DNA, 1259 bp, Artificial sequence
  DNA replication origin
tttttccaagttctacagagcgaaggctccaaagaagacagtactagggctgaggactaggtgggggatgccatctgtgtgggtggatagctggtctccctgggtgagctggaacgcagccccgtggtacatcgagtgcagccagggttcctgcagccctggatacaccatcttctgggagctgaggagaggcacatggaaggggtactgggaggagaagagctggacctcatgggccaggtagagtggggaggaggtggccttgggagagtaggctttcccagagaagaccacctgggagtagacgaagtagatgccactggtggggaccaggagagaattgttgctcaaggagaaaccatcctggaggaaggcacggtccgtgtttgctctccagagcagtgagttctgcttgctggggtctcctaggaagagccataggggatgggggtgggagatcaggggtctggatcagaggtctcaatccctgaggaagtgggcactgaacaactgagttcctgggggatggcagggggaggcataggagtgggctccctctgttttttttagcgtgggggaagttgggggagaggggtggatgcttgggttcctgaggcaggggtaggaggagagctggtggggacatgtctgggaggtcaggtggatgtttaccaatgaggtgagcagcaggtttgagggtgctgtgggcaagatgcatcttggggtgctgacgggcagtctgggcagctgaaggtgtgaggccaacaccagggagcccctaggggagaacagagttgaggggggctctagggctcaaggtttggctgagccaccccagcagcccccattctcctgctgcctcacctgggccccaggcagcagaaccagcagcagccccagaaggaggaggtgtagggtggtgccacacacccttgggaggaagagacgttcaggtggtgtcatggggagaacctgcagagaaagagagagagagagagagacagtgagcggggcggggcacgcggcggaagacagacctcccgccctgggagagagcaccccccgacccccgagagagagatcgacagagaaggggacaagatgcagtcagagaaaccccaaggtgagcagagggagacagagagagacaggaagggaacagagaggaatcatggcagaaacagagaatgtgtgacagagacaatgagactgacagatggagagtcagagacagagaaggaaaccaaaaccaaacccac

SEQ ID NO: 11076 - DNA, 1167 bp, Artificial sequence
  DNA replication origin
tccctcggcccccaactcgcactcatcccagaaacagcaccatccctcctcccccggcccggctcggctcccgcaggggctaaaagccgccacttccccagaagtcccaagcctttaggatcgcattcccaagagcgcgtcggcccgtgtctccgcaggcgctccgctgaaggggcaggggctaggctgggagacgacgaaggaacaggcgtttctgacgagcgggacgcagttctcggacgccgaggggctggcgctcccgcaggacggcctctattacctctactgtctcgtcggctaccggggccgggcgccccctggcggcggggacccccagggccgctcggtcacgctgcgcagctctctgtaccgggcggggggcgcctacgggccgggcactcccgagctgctgctcgagggcgccgagacggtgactccagtgctggacccggccaggagacaagggtacgggcctctctggtacacgagcgtggggttcggcggcctggtgcagctccggaggggcgagagggtgtacgtcaacatcagtcaccccgatatggtggacttcgcgagagggaagaccttctttggggccgtgatggtggggtgagggaatatgagtgcgtggtgcgagtgcgtgaatattgggggcccggacgcccaggaccccatggcagtgggaaaaatgtaggagactgtttggaaattgattttgaacctgatgaaaataaagaatggaaagcttcagtgctgccgataaagatgctgagttgcgacacacgtcttaattcagggtgggtgcacgggtgcgggttaaatattctcagtactcttctggttgcttgaaacaattcatcacaacacagtgtatggcctttgctcctagggatgatggtctgcctgtcccaccccctccctgcctctgaatggccaggccccaccattagcccagttggagggtgggaggaagggggacttctcaaactccgaagcttctctaggcatcctgattttcagggccacatggtcccaaccagactctgcaccatactcttttctcttgggtaccccccaacagtgagaggggtcattacagagcccagcaagcaccactcagaaaggcccagcagcagagtaagcccctatcatgacagaggaatgaag

SEQ ID NO: 11077 - DNA, 1115 bp, Artificial sequence
  DNA replication origin
gggcaagcaggcccggcagcaggaggacaaaatggcggcggctaatggcagcttctcctccccccggcccaccaccgccgccgccgccgccaccgccaccgccaccacctctcccgcgccggaaaagggcgtcagcgcacggttcacccagactcacctggccgggtgcgcggggatccgggacccgggcctaggggctccccgggacgggatggcggtggggcgggggaggatggcggcggatggcgccgggttcggctcctcccgtctccctcgctcactccgcggctgagccccgactaacggcccatccgggcaaccgccgcccccgggagcaccccctcccacctcccacctccctccgcgcctagacacgccccttaatttgcataaagggcggggcactttctaccctaaccctctacttccagggctgtctttagtttaaaaaaaaaaaaaaaagggccgggcgcgcggagcatgcggaggttatttgcataaagaggagggacttaagggcactaggaccccgattggctaaggaggcgggcccccagcgtcggccgttgagccgtgttgagggggcgggaatgcggtgcaggtcggctgggcggttgggacgcagaatttacacgacgaatgtgggagaaagaggcggagcgtgcgtcggacgttagtagaaagatgggagcggagagacgttgggacgccaaaagtggaaggcaacgacacacggcccgtggcgccttcagctagggagaaagagagagaggacgggggctggcgggcgggattagctgccggagggctgagtttccgcaggcctggtaagagttccagctctcgcatccctttgccgtgagtttgaggaggtggttggagcggggaaatgcaccagaggggcggggccttccagttattatattacgtcatgcaaatgaggtggctagacagaccaatccaaaggccccgggaagcgtttcgtccgcaccacgcagcgtaggcattcttcgggcagttctacctatttgcataatgtatgcaaatcatttgaacaaagataggctaggaatgactcgttcatcaaaatatgggcaaccatcgactaagacgga

SEQ ID NO: 11078 - DNA, 760 bp, Artificial sequence
  DNA replication origin
aagaactttatgacaagctagagataagatggatgttgcttcgtaggtgtttgaggaggccaatctgtgaagataaatatatgaagggaaaacgaatacaagagtcatgtagcgaatagaccaaaactaacagaaaataatgaatacgaaagcaggtggaaaatatatggaaacaggaatggcaaaaaaaaaaaggatgtagacaacgaagtaagggggcagaggcccaagaagaaaaacggggttgggggagaaaggagacgaggaacaggaaaaatgaaaaagcagacatagggcgactgagcaacatagaaagcaaagatgctgggataaaagcaggattctagagtgggagtggctcgacacgaagaggggcgtccagaggggggaacacagcgctggatgataggagggggtccaatatggaggaaaagcgcccttccgagagaaccgtcgggcgcggcccaccaccacggggcggcagccggggagggggcccacaaatgggggtgaaaagccaggagcgcagcggagggtagggagttacggacccaggcgcaggggtcaccccctgaagccaagacggtgggtggttaggggcagactacggatcctgaatgaactgccggaggtgcgggtcccggagtagaggtaccggagggggaggggcaagcaggcccggcagcaggaggacaaaatggcggcggctaatggcagcttctcctccccccggcccaccaccgccgccgccgccgccacc

SEQ ID NO: 11079 - DNA, 1096 bp, Artificial sequence
  DNA replication origin
ttcaagcaagagaaaactaaaaaagaagcatacaattccatcagagaagaagaaacaacactttagattccctgtttattggacacaagctccctaatcatgcccccagggccctgtaccccaggctcccagcccagcagcctcgtgtccatctgggaaggtttgcaggaaggtatgctgggagtttaaggattttatgagcttgctcagccggaatgggggttggtaccagagaaatcctcatagaacaactagggctgtacatactcccaggctataggaacctcaagtatttgaaatatcccatcttttcctaaacttgctcctgtattggctcctggaaaaaatcgcctccagatgaaatactgttttaccatatgaagaactgagaaaaagcattatggagccaccttagcaccctgtaaccatgggccagaaaacagagggccaaggccagagccatcttcgttttcctatcctcattaaaaatgtccatcaccagtgtttctttactcgatacctccagctccctaagcaagccggacgacaggtctctcagtccattccagagtgaccaggcattcgtttatggacgggaacagtgtaaagagatgagaaatagtggggaagaaagcagggaaatccagacaggcccagaatgaaagctaaaattggggagaaagaactttatgacaagctagagataagatggatgttgcttcgtaggtgtttgaggaggccaatctgtgaagataaatatatgaagggaaaacgaatacaagagtcatgtagcgaatagaccaaaactaacagaaaataatgaatacgaaagcaggtggaaaatatatggaaacaggaatggcaaaaaaaaaaaggatgtagacaacgaagtaagggggcagaggcccaagaagaaaaacggggttgggggagaaaggagacgaggaacaggaaaaatgaaaaagcagacatagggcgactgagcaacatagaaagcaaagatgctgggataaaagcaggattctagagtgggagtggctcgacacgaagaggggcgtccagaggggggaacacagcgctggatgataggaggggg

SEQ ID NO: 11080 - DNA, 870 bp, Artificial sequence
  DNA replication origin
tccctcccacctaggccggccccggcccgactcgccctcagaaactcactgtttggggctgcggactttctcgtcgtgccccacaaaagtaaagcttggggacctggggggagccggaagtatcgcttcgagatccccaaatactatcggggaaacggaagtggccgtcggtggcaggtttgggggagaccggaagtgacggtccgtggggaagtcgggggcggagccgcggggtggtgggtgtgtgtgtgtgtgtgtgtgtgtgtgtgtgtgtgtgtgtttggctgtgggttagttgtgccgttctgctggaacaccgtgggaaggcagtagacgcgggcagtcagctagcaggtctgtcgccccgtgagtgccgtttcgggtctatagtgagttaggagggttcgatgggcgtggcgcgcgtgcgcgaaaccactttctccgcagagtgtggggcgaccaccgctttcgcgttgtcccaggattttccgacctctggggcgcttgtcctgccgtgaccggtgatgacactagtctctggtctcgtgcttccttcctaatctgactggctccctgcttattgtgattggcgtcgtggagcccctcccacctctcgtcctccagctccctaagccgtcgatctcctgccctttgtgtttctctccctgtgccccggaatcagaagggggatggggacaggtgtgaatgtgtgtgtgtgcaggagaaactttttaggtattggggcagggattaatgctagggagtctttcgggtacactctggtctgggcaacagcgggccttccttccttcgttcttctttagagacctgtcggccatggagcctaatgatagtaccagtaccgctgtg

SEQ ID NO: 11081 - DNA, 793 bp, Artificial sequence
  DNA replication origin
gttggagagggaaggtgaggagcagaggggagacccgggaaaggggctgtgaccgtggggtgggggcaaagggtgaagagagtgtgggctttaggagaaaagtgtgaggcatgacccaaattgtaagcatagggacctcagggatggggaagaaacccgagtacgagggtgcagggccccccttcatacacaggagagaacagaactatttagggtgtttgtgtttatggacagtgagggcactgctcttggattcaccagctgttatttttgcttttacttttctcccaccttcagttttttttttttttccacctccactttttaaaagcaaaaaaaaaaaaaagtatgatggtggtgaataaagaccaaagggtcctctctacctttgaaaactctcctggggtggaggagaccagggcaggatagacagacctctgcagtaagagagtggttgggaaacccagggtgttccttggatctcaggatctgagccatcgagggaagagtggggctgctaggcaagtggattagggggtctggatagggccccacaggtgacagggagcctgcagggcggatctggtgatcatgggagccagagggagtggggacagtgcaggcagtattggcaggagggccagtgcagaagggctggtagctcaggcagtgtgggggaagcactgaagcctgtagtccccacttgggggctaggggtttgctcactcagcaataaataactgtgtcacatcaaatcctaaatataccactacaaagtgagagttactgccac

SEQ ID NO: 11082 - DNA, 1414 bp, Artificial sequence
  DNA replication origin
actctctggtggtgacccaggccttgtcagatctgagattcttggaatctcagattgtgggggtgtggatggtgaatgaatttgggtatgcccccctttaccccagaactgaagaggaagcaaactacttgccacacttgaggctgcatgactattcagagaagggaggagccacttctgaattcagagtaggactgcatcaccaggcaaatacctgttctgagccagaaagactctggcttctgaggagatcctgagagtctgagtagtgccaggaagcagcctcagaatttgggggcccattacacaccccagccatgttcctgcgacggcttggtggctggctacctcgcccttggggccgccggaaaccaatgaggcctgacccgccttacccagaacccagacgggtggacagctcctcggagaattcaggaagtgactgggatagtgccccagaaaccatggaagatgtggggcatcccaagactaaggactcgggggcattgagggtttctggggctgcttccgaaccaagcaaggaggagccccaagttgagcagctagggagcaaaagaatggattccctcaagtgggaccagcctatctctagcactcaagagtctgggagactggaggctggaggggccagtcccaaactcagatgggatcatgtggattcaggtggcaccaggagaccaggggtgtcccctgaagggggactgagcgtccctgggccaggagccccattggagaaacctggtaggcgtgagaagctgttgggctggctgcggggggaaccaggagctccctcccggtacttggggggcccagaagagtgtctgcagatctccaccaacctgaccctgcatcttctggagctgctggcctctgccctgctggccctgtgctcacgaccactgcgggcagccttggacacactgggcctgcgtggaccgctgggcctctggctacatggcctactgtccttcctggctgccctgcatgggctccatgctgttctgagcctacttactgcccaccctttgcacttcgcctgcctctttggtctcctgcaggccttggtgctggctgtcagcctccgggagcccaatggggatgaggcggccactgactgggagagtgaggggttggagagggaaggtgaggagcagaggggagacccgggaaaggggctgtgaccgtggggtgggggcaaagggtgaagagagtgtgggctttaggagaaaagtgtgaggcatgacccaaattgtaagcatagggacctcagggatggggaagaaacccgagtacgagggtgcagggccccccttcatacacaggagagaacagaactatttagggtgtttgtgtttatggacagtgagggcactgctcttggattcaccagctg

SEQ ID NO: 11083 - DNA, 1115 bp, Artificial sequence
  DNA replication origin
cggtggcttctcgttgtgccccgcccgcaagcgccctcctccgggccttcgtgacagccaggtcgtgcgcgggtcatcctgggattggtagttcgctttctctcatttagccagtttctttctctaccggggactccgtgtcccggcatccaccgcggcacctgacccttggcgcttgcgtgttgccctcttccccaccctccctaatttccactccccccaccccacttcgcctgccgcggtcgggtccgcggcctgcgctgtagcggtcgccgccgttccctggaagtagcaacttccctaccccaccccagtcctggtccccgtccagccggtgagtctgaagtcgtcgctgctccgagtcccttgtcgctgggagcggcacatggggtctccggactttgatgtgggggcgggggaggaagcgaccaggtccggcacgaaggagggagaggtggcctgaggagcggaggggggatgtgtggattccggtgaaagggacctgacaatcgcccccaacccgtgagaaaaggaggagcccagttcttgcttgagaatgataaacttggaaacccttgggaaaggcgtgggggtcatgcagagacttgtattggtagggagcctgagtcgaggtccctgccggagttgacacagaggagagagggccctggccttcgggagctccagggatgtgggtcgggctggtgggtcaaagtatctgttggcttctttcaagtggtgggaccccaaagaatgtttaacttcaaagaaaaggggctgagatgtaaattagaggagctggagaggagtgcttcagagtttgggttgctttaagaaagggtggttccgaattctcccgtggttggagggccgaatgtgggaggagggaggataccagaggcagggaaggagaacttgagctttactgacactgttctttttctagctgacgtgaagatgagcagctcagaggaggtgtcctggatttcctggttctgtgggctccgtggcaatgaattcttctgtgaagtgagttctcttcaacctccctacttgccagcttcacatatcttcccaccagacgttccttcacatattccacttctgcactgttc

SEQ ID NO: 11084 - DNA, 852 bp, Artificial sequence
  DNA replication origin
aacaaagacagagagaagctgagagagccagggagcagcttgagacatggggagggagggggaggagtaggagggaaggcgacagacacaactcaggagcaggagaggaagctaagttacagagacaacatgctgagagagcagaggagaccctccaggcaagggcagactccttgcaggggcaggctgggggcccccgctgcctgctgggtcaggctggtgaatctggtcatggttccgccccccagattcactccctaggtgtgtttgtttactggttcctcactgtcttgctcaaatgctccaactctacaaatcccgggatctcggggtgcagatcacctctcccagattcctgagcctgtgtctggccatgggcacctccagcatcttcctctgcgtgctgttcctctgtggggcactgggtaagggtgggctggggaaccttcagtggtcagggggctgggggtggggacaagggcatgtggaggaacctgagggctggggaggagaggggtgtgggtgctggaagaggccaagaagagagctgggggagtgggggacttcagggagaccagccactgggaaggccagcctgatgaggtgggaaaggaagagtttcctttcaaggcatttgagaataactgtctcccccttgctgcatctttgatccgcccctgtctcccctatcccttatttcacgtgttgcttctgtgctgggccctttggtcaatgtcaatttctattttcctatctgtctctggtgccatttacttaactttttcactgaccccctcaacttccctgctgctgggtctggctttttgtctcactctttttatgttggtctct

SEQ ID NO: 11085 - DNA, 799 bp, Artificial sequence
  DNA replication origin
acctgaggtcaggagtttgagaccagcctggccaacatagtgaaaccctgtctctactaaaaatacaaaaaattagccgggcgtggtggcgggcacctgtgatcccagctacttgggaggctgaggcaggagaatcgcttgaacctaggaggcagaggttgcagcgagccgagattgcgccgctgcactccagcctgggcaatgagcaaaactacatctcaaaaaaaaaacaacaacaacaaaaaagagaaaaccttcatcccagctaggagaggtaaggtcctaagacctatgtgacaaatgtgtcccaggtcttcttaccaatggggcaggttgaaaatagtgctggagacccatccctttagagcccgttgtgtcaccaggaggccaggcctagcagaagcagcacccctccaactgtgccccaccaggggctgcccgcagccagccctgccccagccctgccttgagtcaccaatgtgaagggggaaaaggcaggggtggccgtggtgaggatcgggtcagatgagccggtaggggtggtgtgccggtcctgtggggaaaaggaagagaatgacagggtgtgctagagctgtactcaaattaaacctacaccaccctccccggccttgcccaccctgtgatggaaagtagtggttcctcacctgcggggctggggccgataccaggagccggaggaaagcatgagtcgggggtactgggttggcttctcgtccccctgcagtcacagtcaccatcaccacggaatccggggccgctgaatctgggacctccagcc

SEQ ID NO: 11086 - DNA, 871 bp, Artificial sequence
  DNA replication origin
gcacccctccaactgtgccccaccaggggctgcccgcagccagccctgccccagccctgccttgagtcaccaatgtgaagggggaaaaggcaggggtggccgtggtgaggatcgggtcagatgagccggtaggggtggtgtgccggtcctgtggggaaaaggaagagaatgacagggtgtgctagagctgtactcaaattaaacctacaccaccctccccggccttgcccaccctgtgatggaaagtagtggttcctcacctgcggggctggggccgataccaggagccggaggaaagcatgagtcgggggtactgggttggcttctcgtccccctgcagtcacagtcaccatcaccacggaatccggggccgctgaatctgggacctccagccacaggcggccccaggccgactcattcagttccaggtgagccctggagagaggatataggcgtcgctaaagctccaggctgcccagagcctagagtcgggacgcctgcaggggcacgggagcggagaggaggattctgagggccagtcggagggggacaggggcagggcttgggataagcattggccgggcaagatgccagagggagctggagggttcatgagcctcacctggagaggttggaggtgagggagaagctggggttgacgaaagtcctaaggtcaagatcctgagggcccgagaagctggcgatgcggagactgagcgggactttgctgcccggggccaagaaacccgaggggccactaagctgcagagaagggttcttcagggaaggggccgctctaactctctccagccccagccgcactttcccctggcgtctcacctccagaaggacagggactacagtgctaggc

SEQ ID NO: 11087 - DNA, 1075 bp, Artificial sequence
  DNA replication origin
catcttttaatcctattaactcagtgaggcaagcattacatcaacttgcctgcgtgttcatagacataggaagaccaagacacagcgggtctatgaaacgtgcccagggttaccataccagttggcaatctgggatttgatcactcttttcccacatctgatgtactaccttcttgtctcattgtccattccagtcctcgcttccctcctctgaatttctcccctccccctcttctgtacaaccccctcacctgggggtcctgggccgagcttcggagtcccagggccggcagcgttgctccacaggcagctggtattaactccgtgtcggcgtaactgacccactgttggacaaggacagccgcccggctgccccctgggccccccaggcctgctggccacagcagctgggccacagccgtggccccccacacccagagcccaccgggcccctgctccagggccggcaggcggggtgggggaaagggagtcctgctagtcgggggtggctggagacagatgcgggggtgggctcctccccatccgggaccctccccagcctccccatagcgagcggctatgagggctcggaggctggggaaggcatctgggtgaggggagacgtagagggtggacatagttatgagaaggtccgaacgaagtggaaaaacctaaggagaaagagagacaggggaagactgcgggatcgaggtgggtcctatgtttgagtagagaggggaccctcacgggagctccttcgccgcagacacccgagtcccataggactgagggtctgaccaggcaggctgtcaggagccgaggacctggctctcagaggggcagtgtcagtggggagttcctggggaagaggaactatccaccatcgcggggcttcggggagtgtggaaggctctcaggagcgggtcggcgtctggttggatgcgggttcgagccgcgtgtacgtactggagggagatggtcagactgggccgggaatccacctcacagccaggcgccggccgcggctggaccggccgagcggcccgggcggaggagtcgagcgggcagagacggt

SEQ ID NO: 11088 - DNA, 1876 bp, Artificial sequence
  DNA replication origin
gagatggtcagactgggccgggaatccacctcacagccaggcgccggccgcggctggaccggccgagcggcccgggcggaggagtcgagcgggcagagacggtgggcggctctccaggtgaccctagttccctaagatcgccgccccggcagccggcgcccacgtgttcccccctttgtgacagggagcgtttccgggcctgcgggtcctggcgggggcggccgtgccccgcctgcgagtgcgcgcccgccgtgtccgacactgccccgggggccgcgcggctcgccgcccgccggtctcacgaggaacagcgcggggcgcggggcgctgggcgcggacgcaggacgagaggacacccctgagcacgacgctcccgtcaggcgccgccacgggcaccttgtgcgggtcctcggccgggtggcgagggcggcgcccagcgggcagctagggaactggcccaagagggtcggccggccctgccggtggagggcgttccccacccggtagcggggaggtgcccagcagggagccgcctgatgaggaccgaaggggaggtccatttgccgaggccctggcgtccagcttcctctttgagcctcatctcctcatgtatgaaaaaagggtgacggccgggcgcagtggctcacgcctataatcccagcactttgggaggccgaggtgggcggatcacctgaggtcagaagttcaagactagcctggccaaggtggtgaaagcccgtctcacgcctgtaatcccagcactctgggaggccagggcgggtggatcaccaggtcaggagttcaagaccagccaggccaagatggtgaaaccccgtctctactaaaaatacaaaaattagccaggtgtggtggcaggcgcctgtaatcccagctaccccggagcctgaggcagggaattgcttgaaccctggaggttgaggttgcagtgaactgagatcgtgccactgcactccagcctggcgacagagctgcagtatttgtaaaaatacaaaaattagccaggcgtggtggcacacacctgtaagcccagctacttgggaagctgaggcaagaagatcacttgaacctgggaggcggagattgcagagctaagatcacaccactgcagtccagcctgggtgacaaagtgagactccatctcaaaaaaaaaaaaaaaaaaaaaaaattagccgggcatggtggtgggcatctgtaatcccagctactcaggagctgtggcaggagaatcgcttgaaccgggaggcggaggttgcagtgagccagaccaagccagtgcactccaccctgggcaacagagtgagactcccgtctcaaaaacaaaaaggagggtcacactagatggtctctaagggtcccttaaggctgagaagtctcatctgtatcatgaactcatatttgctgaatgagtgaatgaagtttagtaattcccagtcacaacttttctctaaaatataaattacatcacttgtatttatcttctatacatattcagaaaacatgaactgatttggttggattggtgaagtctggtagcatgaaatgtatcttatgacactatcacattaatggaaggacagcaagcactccagttgcaggtatggtataagcaaaaggccacagggagaacatacaggtagggacatgttggggaaacatggtgtagagcaactgtattatatgctttataccaaggagagtagtgggaagctgagttggattcttggctgggttaacgcagagtaacaggggcttggatgaattcgacatccttttccatgtcccagccccctgcccaacacatagtaacagaaccaaaacacaaatttgcatcataaattttattcccgatgcggga

SEQ ID NO: 11089 - DNA, 900 bp, Artificial sequence
  DNA replication origin
ttttcgcctcccgtcctgccccccagccttccttggaccaatcagaggccagagtgccgccccctgctcagaactctccagagtcttctgggattcactggaggggacagggaccctgagaggaagggggagtggcggtgggaagggtgttggtctccatggcgatgctgaccgcctgcgcttcagcgcctaattgacaggaagggtcggcgctgggcttttaattgtgggggcttgctgggcctgcgcagttgtgggcagggggctggtgcggggagcgggttacgcgcgtccaggggagggtgggggcgtttgtgttgacaccgcccggccacgttacaatggagatactgtctctgacctcatgggccagtttggaaaaagattactgagttggagccgtctcaaatttgcagggagggacggggtggggggtggggggaccccggttgtgcagtttgatattgagggagcccccacctactcgctggggctgcgtaatctggacgtttccaaactgaagcgaaggcgtcgggagactaggtgagccagtagggatctgattgattgtgaacctgaaaggctcagtaggtccttgtttgggaaagtactggaaagttccctagttggtttaagcctgaggtatgtgggcgttggctgatccgggtaggaggagcacttggggaaagctaagatggcttcagattgattggtcggagcagccagaatgggggaggcgggggaagggagtgcggcctgtcggggaaatggggaggcggggaaggcggggtaagggggaggcggggtaactgggaagcgggggaaagggagtgcggcctaggaatctgcggtgtggagagggatagacactaaaccctttattttatttttatttattta

SEQ ID NO: 11090 - DNA, 1088 bp, Artificial sequence
  DNA replication origin
ctcttcagcccttgggaggttgatgggactgggggccgtggagcagggggtggcgctcgtcggggaggctctgcagcacaggagcccacggcggggttggggctcaggcatggcgggctgcaggtcctgagtcctgtcctgtggtgaggcagctaaggccccgtgagaaatcgagcacagcaagctgctggcccaggtgctaaacccctcactgccctgcccggggcttgtgggccagcctgccgctccaagagcggggcagccgagcccacgcccacccggaacttgcgctggcccacaagcgctgcgtgcagccccggttcccgcccgcgcctctccctccacacctccccgcaagccgagggagccggctccggcctcggccagcccagagaaggctcccacggtgcagtggcgggctgaagggctcctcaagcgcggccagaatgggcgccaaggccgaggaggcgccgagagccagcaagggctgcgagggctgtcagcacgctgtcaactctcagttctatggtaaggcttattgcatagttacaatgatctgattagtcaattttttttttcttttttggggggtgggggaaggtgttttttacattccacactgaagatgcaatagtcatggggtcttgggtgccatctggtctgagtcaggtacaggacaataaaggaggcagttaatctacaacaaagatcagtgattggaaaggaggtctcattacagaacaagagcaatgaggaggagagtctgtaagaagcagaattgcaaacatgctacatgactcagtctccaaggcttaacttccatcttggcataaacttagagtcctgaagttttgttttctttttacggtggactttgcacatcattgcctggtgagtgcccgctggatcagcagccaaattctagcatgaaaccctttccccaacatcccctttcaccttgcatggccctccttcccttcacacattgatccccactcccagcccctttgcttaggatcaaaccagctcaagctctctctgtcttctcagctgtcccttaaataagggaaagagacagtaacaatgaa

SEQ ID NO: 11091 - DNA, 988 bp, Artificial sequence
  DNA replication origin
gtcagccccccgcccggccagccgccccgtccgggaggtgaggggtgcctctgcccggccacccctactgggaagtgaggagcccctcagcccggccagccaccccgtccgggagggagatgggggggtcagcccccccacccggccagccgcccggtccgggagggaggtgggggggtcagccccccgcctggccagccgccctgtccgggagggaggtgggggggtcagccctccgcccggccagccgccccgtctgggaggtgaggggcgcctctgcccggccgcccctactgggaagtgaggagcccctctgcccggccagccgccccgtccgggagggaggtgggggtgtcagccccccgcccggccagccgccccgtccgggagggaggtggggggggtcagcccccccgcccggccagccgccccgtccgggaggtgaggggcgcctctgcccggccgcccctactgggaagtgaggagcccctctgcgcggccaccaccccgtctgggaggtgtgcccaacagctcattgagaacgggccaggatgacaatggcggctttgtggaatagaaaggcaggaaaggtggggaaaagattgagaaatcggatggttgccgtgtctgtgtagaaagaagtagacatgggagacttttcattttgttctgcactaagaaaaattcctctgccttgggatcctgttgatctgtgaccttacccccaaccctgtgctctctgaaacatgtgctgtgtccactcagggttaaatggattaagggcggtgcaagatgtgctttgttaaacagatgcttgaaggcagggtgctcgttgggagtcatcaccaatccctaatctcaagtaatcagggacacaaacactgcggaaggccgcagggtcctctgcctaggaaaaccagagacctttgttcacttgtttatctgctgaccttccctccactattgtcccatgaccctgccaaatccc

SEQ ID NO: 11092 - DNA, 1798 bp, Artificial sequence
  DNA replication origin
ggctggccgggcagaggggctcctcacttcccagtaggggcggccgggcagaggcgcccctcacctcccagacggggcggctggccgggcggagggctgacccccccacctccctcccggacagggcggctggccaggcggggggctgacccccccacctccctcccggaccgggcggctggccgggtgggggggctgacccccccatctccctcccggacggggtggctggccgggctgaggggctcctcacttcccagtaggggtggccgggcagaggcacccctcacctcccggacggggcggctggccgggcggggggctgacccccccacctccctcccggacggcacggctggccaggtggggggctgacccccccacctccctcccggatggcacggctggccggtcgggggggctgaccccccacctccctcccagatggggcggctggccgggcggggggttgaccccccccacctccctcccggacggggtggctgccgggcggagatgctcctcacttcccagatggggtggctgcggggcggagaggctcctcacttctcagacggggcagttgccgggcggaggggctcctcacttctcagacggggtggttgccaggcagagggtctcctcacttctcagacggggcggccgggcagagacgctcctcacctcccagacggggtctcggccaggcagaggcactcctcacatcccagatggggcggcggggcagaggcgctccccacatctcagacgatgggcggccgggcagagacgctcctcacttcctagatgtgatggcggctgggaagaggcgctcctcacttcctagatgggatggcggccgggcggagacgctcctcactttccagactgggcagccaggcagaggggctcctcacatcccagacgatgggcggccaggcagagacgctcctcacttcccagacggggtggcggccgggcagaggctgcaatctcggcactttgggaggccaaggcaggcggctgggaggtgtaggttgtagtgagccgagatcacgccactgcactccagcctgggcaccattgagcactgagtgaacgagactccgtctgcaatcccggcacctcgggaggctgaggttggcgggatcactcgcggttaggggctggagacctgcccggccaacacagcgaaaccccgtctccaccaaaaccagtcaggcatggcggcgcgtgcctgcaatggcaggcactgggcaggctgaggcaggagaatcaggcagggaggttgcagtgagccgagatggcagcagtacagtccagcttcggctccgcatgagagggagaccgtggggagagggagacagagggagagggagggagagccggtggataaactctttaaactagattctaagcctggtacagtggtatgtgcctgcagtcccaactctatctactctaggaggctgaggcaggaggatcccttgaacttcagtctgaatctaacctgggcaacatggcaagactccatctgtaaaaagcaacaacactagattctcagcttttgttcgtttgtttaagacagtctcgctgtgtctcccagactggaatgcaatggtatgatcttggcccactgtaacctctcgctcccgggttcaagcgattctccttcctcagtctcctgaatagctgggactacaggcgcgacccacaacacccagctaatttttgtatttttggtagagacggggtttcgtcatgttgaccaggatggtcttgaactcctgacttcagg

SEQ ID NO: 11093 - DNA, 1011 bp, Artificial sequence
  DNA replication origin
ccctggtcttctggtctgaaggggaaggaacccctatgagggaccttctcgaggagaggcttgagtcccttagggccataggggagcaggcagtgaggactcccgagtagacttcctggagcggcttcaggtcaatcattgtccatgagccatggagggacagagtccagcgcacctggggaaagtggaccccacccgctccttcccagactcctgcccagccctcggctctccctcctcagtgcccacaaggaaccctgactgcccagccctcctcctccctgtgtgtgtactcagggaggaccaggaactcaacgtgcctgcaatctctatggctgggctcaggtgtcactctgactgctggcccagagcccggagcacactgtggccaggggactgaggtcccaccagagtgaggatgtacagggccgcttccctccccaggccctgctggggttgacacctttgtctccagtttctttccccatagccttgaaccagagggtaaggtagggcctggggcagataggggaagaggccatgacctccctgaggggctgtgggtctgtgtggtccctggggagggattagggaggaggcagggatgagaatgagggagtgagagccactgggagtcccacatcccagctaaagggagactcaggagaaccgtgccagggtagggcaggggaccaaggccatttcccagactgactgccttgagatgtgagccggaaactataaaggccttccttcccctccccatggcagcctgggtggagctcccagggagctgctgagctgctgaccaggcctggatcctacctttcctgctccccagttttcccctcctgccagtcctgccctagcccatctccctccaaacacctgaggcctgggtaggatcctggggctaggaggactcagcaggacaagatatgcagagagagactcatcctccacacctcttctcatgtccctcagggaagccagtcaaatacgacccctcct

SEQ ID NO: 11094 - DNA, 1597 bp, Artificial sequence
  DNA replication origin
ccatctttcaaaatagaaaaaatttgctgggcgtggtggcaggcacctgtaatcctggctactccagagactgaggcaggagaaccgcttgaagccaggaggcggaggttgcagtgagccaagattgagtcactgcacaccagcctgggcaacaagagcgaaactccatctcaaaaaggaaaaaacaggtccaatttccacactttaatctttggcgggagcgtgttgggagtgtacggcagttaaggtagttggcgagattataaagcgttttcttatcagagcatgccaggtcgttcactgtggtccgtagtgcccccaggaaatagccctgagcccccgtcccaggctccagctccccagcccgctgggcacaaagttgagaagaaggaactagagtgtgtcggggaccacaggcgggggtggggctgtgacgtgtgggagggcggggcgggcagcaggtgagacgccaggtctccagggctccaatcactccggagactgagccatggggggaaagcagcgggacgaggatgacgaggcctacggtgagactggggcgaggcccgggaccctgtggagggaggggaggacgggtactttgggaatggtgtctggggctggctccagggagaggaactaaggagagtactgtgtccctgaggggagggcccgggaaccgggagccatggagggagggagtcagggtcctgggaggaggatggggcccgggggctggggctgttgctggggagcccatggggagtgaagctgggtgcctctgaagagttggggctgaggtccttgggaggaggggggtatttcaggcctggactctgggtccctaagggcagggccctaggaaacaaagccgagatggaaggtggcaggttggggccctgagcagaatagggctggatgctgggagtgtcctgtgctgcagagcctgcaaccagtgaggccagggtccctgtaaggaggaggaggttcagcctggagtctgggtctctgagggcgaaagctgcttgtggtctgccggctcccttgaggagtgaggggaccctgagtgggctggcctctgcctgccagggtctctgggagaagtggcagagggagtgggttctgctgggggtccctgtgaggagttggggctgagggtctttgtggaaagggggctggggtcctgcctaggggtctctgtgaggagctaggagcaggagctggtcttggggtactctgaggaatagggacagggcccctggggttcctgtgaagggtgaagcctgaggggagaaacagcagggagcctgtttccagaatctgcaaggaaaaggggctggggttctgaggagagagggagctggggactggcctccagatccccacgagcagtgaaggctggggactcacctgcggaggcccccctggtcttctggtctgaaggggaaggaacccctatgagggaccttctcgaggagaggcttgagtcccttagggccataggggagcaggcagtgaggactcccgagtagacttcctggagcggcttcaggtcaatcattgtccatgagccatggagggacagagtccagcgcac

SEQ ID NO: 11095 - DNA, 1218 bp, Artificial sequence
  DNA replication origin
cccagctacttgggaggctgaggcaggagaatcgcttgaacctgggaggtggagactgcagtgagccaagattgtgccattgcactccagcttgggcaacaagagtgaaactccgtctcaaaaaataaattaaaaaaaaaaaaaaaaaagagccaaaggagactaaagtaagattgagggttgtgggatggcagccaagagaaagggggagattacagatgctgggcagagaaagaactgatggagagggacaggcccctgaggaggtggacagataggtagctgttatcacctccactctacagacaagaaaaataaggctcaaagaggttaagtaacttggccaagaacatccagaagcagagaggggctcaaacccaagtctgtttgtctcccaaactggcactttctccagctaggaagggcgaggagggggtggaggggaaggtagagggtggaggtggaggggagggaagacaagctctgtggtctgggcagagtggaggcaggtgccattctcagctggggggatgggggtcagaggcggctggctgctcagctgcaggaataggggtcagaggaggctggctggagagtggccagatggagacatgtgactcatcagggcagatggctgagagggaggcctggcagtcagcagtggccatgtatccccttcccaccaggtgttaaggtgctcccggtgacttactcgcagatgaaggtcccctgtgggatggtctgcagggcgcggaccccccagcccatcttggctgttcggtagagctgtagccgcaccctgggggtaggagagatggcgctgttgggtggaggccctggaaaagccccaggggcagggaggaaagggtgaggtggggagagggtgggctgtggagcagggcctcacttgatgccactctgtacgacccggttcttgcagtttctccagcatgagcacgcctggttacactcgaaaatcagcggaggctcaatcttgttaaattcctggagcaatcgcccatcctagggtgcggaggggaggatagtggtttctctgtggggcccacctcagctgcccacccaggaaccccaagactctacagagacagggaagttggggttggggaggtcacacaggctctgagatccgagagcacgaaatgcaggagcatcatccctggtttgcatagacctgggcacacgcccatcgctgtccca

SEQ ID NO: 11096 - DNA, 1418 bp, Artificial sequence
  DNA replication origin
gcccctctactcttgatgccccctgaccccctaaccactgtcctttctttggggtccatgtgttacaacagtgggtggtgatggtcctagggtgacgggtaatcagtatggtggtgtccccagggctactgggagctcatatgataccttgctgtgacctaggaaaaggatccctcccctggtggggatgcgaccccacaccagggctccctttcagccaacccttccttggccaggtgcctttgctggtttgaagcttgtccaactgtacttggcagctctcggtgtccttttggggaggccccgggccccctactcacctgcaggtgggtgatgttgcgatcgatgttcatggtggacgtctcgcagttctctgagatgtacttgtaatcctcagggcagggctccccatccacaccgttgacacagggaatgggcacgttctcatagccccgagccacgtccctgcagaagacgggaagaaggggctgggaagctggaaaagggggtgaggagctactccaggtataaggaagagagttggggaggttcctggggctgggggcaggggagtaaggttgccaggtaagatgcaggacagcgagttaacatagaattttagataaacaagaaatagctttttagtatgtcccaaaaattacacaggacattctcacactaaaaaagtatgcatctgtgcatctgaaattccagtttaactgggtgtcttctatttttatttgctgtatctggcaaccctagtggggagggggcctgtgggtggttctggggattcagtggtgcatggggaggggttggggaatgttgtgaggatgcaatggagcctggggagggtatgggtggggaggaggtggtcttgggtgcagagaggggcccagggctcaccggcagatgatcttctctgtgcggatggcccgatttcccaccccaagtcggagcttgcggttgagttgaagcgcaaaccacacgtcggagcgctcgggagtcaggtcccatgctgtgtccccctctttgttccgcagctcagggttggccccacgtgacaggaataacctgaagaggggacaggatgcccaatgcagggtctgaggctgcaagaagtgggggcaggggcatcaagggcggggcaggggctcacagcacgcagtcatggtagctctcccgagctgcgatgtgcaggggggtgtccccatggtagttgacagcatggaggtcacagcgcgcattcagaaggacttcggcgatggcggcgctgcccgtgaaggaggcccagtgcaggcagatgttctcctcctgtggaggtaggaggggaacagatgaggtgcaggcagctgggcccttgaatccagcctccaccttgctcaggggcctggggctgccctacctcaaccaaacgc

SEQ ID NO: 11097 - DNA, 1114 bp, Artificial sequence
  DNA replication origin
ttccagtggccggcgcaaggccaagaagaaatggcgaaaagacagcccatgggtgaagccgtctcggaaacggcgcaagcgggagcctccgcgggccaaggagccacgaggtgaggaggctctgctgcttttgggtgccctccagcccccgcccggccccccagagtgtgtgcacgcacacacacgctctcgcatgtccacctgcatgtacccacgcgtccaggcacctgtgagctcgcactctcactctctctgtctctgtgtcaggagtgaatggtgtgggctcctcaggccccagtgagtacatggaggtccctctggggtccctggagctgcccagcgaggggaccctctcccccaaccacgctggtaattgccaattgccgggacagggagccactagggggcgacctcagggcaggagggaaagggaaggaggggaaccacgccagagccggggtgtccatggccaggctttaggggttctggggcatggcggggtggggtagggagggagtgagaggacccgccaggggtcccagtaggtgaggtgcagagcctccctcagctcctcttttcctccatccaaggggtgtccaatgacacatcttcgctggagacagagcgagggtttgaggagttgcccctgtgcagctgccgcatggaggcacccaagattgaccgcatcagcgagagggcggggcacaagtgcatggccactgagagtgtggacggagaggtggggccgtgggctggtgggagaggtgccagggcgtccagtccccggccccagcctcacgctctcttctcacccatcctcactgcgcacagctgtcaggctgcaatgccgccatcctcaagcgggagaccatgaggccatccagccgtgtggccctgatggtgctctgtgagacccaccgcgcccgcatggtcaaacaccactgctgcccgggctgcggctacttctgcacggcggtgagtgaccagtggggcagacaggtagcatgccctgtggcagagggggccccagtaacctgaccatgtcgtttccctgctcccagggcaccttcctggagtgccaccctgacttccgtgtggcccaccgcttccacaa

SEQ ID NO: 11098 - DNA, 1080 bp, Artificial sequence
  DNA replication origin
tgcacctcacctactgggacccctggcgggtcctctcactccctccctaccccaccccgccatgccccagaacccctaaagcctggccatggacaccccggctctggcgtggttcccctccttccctttccctcctgccctgaggtcgccccctagtggctccctgtcccggcaattggcaattaccagcgtggttgggggagagggtcccctcgctgggcagctccagggaccccagagggacctccatgtactcactggggcctgaggagcccacaccattcactcctgacacagagacagagagagtgagagtgcgagctcacaggtgcctggacgcgtgggtacatgcaggtggacatgcgagagcgtgtgtgtgcgtgcacacactctggggggccgggcgggggctggagggcacccaaaagcagcagagcctcctcacctcgtggctccttggcccgcggaggctcccgcttgcgccgtttccgagacggcttcacccatgggctgtcttttcgccatttcttcttggccttgcgccggccactggaaccactctgggaagggggaggaggaggagttaggaaccctcacccccaggggcccccccaacaccttcaggaccagacctccagccccatagtctcccactcctctggagatatcagcctccgtctcttaccctatctgactgattccctgactcctcatcttcctcttcttcttcctcttcctcctcctcttcctcttcttcttcttcctcctcttcctcctcctcctcttcacttagttgttcagttagagcttcaacttcagactgggagagaggcagaacagacatatccaacccccaggactcagacaatgaggtgagtaaagaaaaccaccaccaccattgccccccgccactacccacggatggctgctggggataagtgtgggtagcagaggagacaaagggccacataaagagagggtgcatggaatattacacagcagtgaaaaagttacagacagcaatgtgcacagatcttggtaatgtgatattaagttaaaaaacaaaaagcaagtaccaga

SEQ ID NO: 11099 - DNA, 1571 bp, Artificial sequence
  DNA replication origin
ggggccggggggcccgggcgggacttgcagcaatccagggggccagcaccgggggcggatgaggggaccagggtgtgggaggtggggggagtgggcacggaggcgcgcgtgcagccgccggctgcccctgagtgggcgacgggcgccggggccccaggagcacgcgtgaggggcacgaggggccgtccaccgggctggggggcagcgggtgctggaggggttggtgcccggggtccccgcggcctgggggacaaagggggagcggcgcgtgcagccgggaggagggggcggggccggggcgcggaggccccgccccctccccctcctcttctctcggccccagagatgcggggtctaccgagagggagggggttgatgcgggcccgggggaggggtcgtgcggcccctccgggcagccgaggccgcggaaggggggggccccacagaggaagaggtaggccccggagcctactctctcttcccagggcccaggcatcctggaccccccaactctctactgggctgaccagccctcctgtcccttgtctcccctcccagggggaggcccccgctgagatgggggcgctgctgctggagaaggaaaccagaggagccaccgagagaggtgagtgcagctaaaacgggccccaattggaccgtcaccttccctaaacacaggatctcctgagcccttagctctgaactttttctcttcctctacagttcatggctctttgggggacacccctcgtagtgaagaaaccctgcccaaggccacccccgactccctggagcctgctggcccctcatctccagcctctgtcactgtcactgttggtgatgagggggctgacacccctgtaggggctacaccactcattggggatgaatctgagaatcttgagggagatggggacctccgtgggggccggatcctgctgggtgagaggctgggtagcctggggggttggtgggaaatttctgactcttgccttctttcttatcttgccttttgcttgcctgttttctaggccatgccacaaagtcattcccctcttcccccagcaaggggggttcctgtcctagccgggccaagatgtcaatgacaggggcgggaaaatcacctccatctgtccagagtttggctatgaggctactgagtatgccaggagcccagggagctgcagcagcagggtctgaaccccctccagccaccacgagcccagagggacagcccaaggtccaccgagcccgcaaaaccatgtccaaaccaggaaatggacaggtgagtgggatgggagagatgggataatcaaccataaacctttggtgagctcttttacagtttcacttaaggcttctactccatttactcattcacatatttaagcaaggggctgctgtgtgtcaaatattaggctgtgcttgatctgtgaaccaacagacaggttcctctcttcctgcagtttacattcttgggtggtgaaagtttgatgttaaagagtcaattatatagttaatgtcttaattactcttatgataatgacaaggtaagggaatttcaaaccact

SEQ ID NO: 11100 - DNA, 1782 bp, Artificial sequence
  DNA replication origin
gggaacagggagggaatttggcaggaggacatgctcctgcttagaatagacctggggtgagggagtggtaaggggaaaagattactgagtcccagaaaaggaagtgggagacagttcttgcatgctggggaaatgagactgcgagtatgaggcttgctgaaatttgagggagaacaaagtaagacgccaggtaagagaacgtggggtgcgcatcctgggtagatattgggaagtgggggtacaatagcaagaaacaatggatagtcatgggggtgggggggatagggcacttagaaaagaaagaacacaagaagggctgttgggagggagggagaggagtagagacatacagtattttttaagaaaaaacatattttttaggattttttctggagtttggggttttagtttttctgcttttgttttccacaaaataaaaaacaaaaaaaaacttttttttttcctttacactctggcaactgcgtgtacatgactatcctgccctagacagcctctccctgtgatgctgcgttcttaatacctagaggtcacaactctgcatatcccttgcctgaaggagcccagccctaaacatgggagaggagtgtgacaagtgagctcctctggtcagggactcccccaagtccccacccccagccctccaccagttctgcaatctcaacacttagccaggtacctcacagtacaagtgattggcagtcgtggggatgcacatgaactctatttgagggacttaggatcagtgctagggatgagctacaggtggccaacctgcccacggaaattgtaagcaggagtctgtttggtcatattttgtctggggtaaataggtcatgtcttcaggaaagctaaaaaaaaaaaaaaaaagctaagtttggattaaggtgcagggaaaactacaattcccagaaagctctggaatagttaaccaaagagaactacagttcccagaaggcctttaattggcctcaggtgccccacctgcctgtgtcaaatactgcgtgtgaaatcatacagatcttttccaaactcgaccaaaacgtaatacctaaagggatggtaccctaaatacagctatcgagattgtctatcttggtgtatatcatttatacttaaattgtccgctgggctatgacccacggagtacctgactgtgcttatgaagtgttcggcaaaaaaggtttacttactgcagtgtcaccagtcagtaatgacgttcgggccgctgggcttacctggatccctagtgcgtgtgaaggtgtaacacgcctgatataaacagaagagacatttagccacaggttttcagaagggcacgctgctccaggggacatgaagcagcatgctagaaccagccaagaataaaggtgtcctccgcgtccctatcgccccttcgtgctcgttagaaagagcaaaaaggcgaggccaaaactgaggccaagccttctatctggtaacccaaaaactagaaaggcagaaaagcaaccagaggcgggaaaagcccaaccaggccagaggaaatacagccgctgccgagagccgagaagttcagaagctccgcttgttacctaaaaccagatggggacagagacgccacacctgggcccaggcgtgtctcgccctcggtccctgcagaactgaggccaggaatgacaggaattctcccttgcagctcccagcttaggacagtcacagccatctccgaggccgctctcaggggaaaatggccaaaaagcatgtagcggctcctttaaggctcct

SEQ ID NO: 11101 - DNA, 1651 bp, Artificial sequence
  DNA replication origin
agccaggaccccaaagccagccccgaagcccccacccccacctcctctaccccctccactcctgcggccagtgaagctggagttcccactggatgaagacttggagctgaaagccgaggaagaggatgaggatgaggatgaggacgtgtctgacatctgcatcgtcaaggtggagtcggccctggaggtggcacaccggctcaaaccccctggaggcctgggagggggtctgggcattggaggctccgtgggtggccaccttggggagctggcccagagcagcgttccccccagcactgtagccccaccgcagggtgtggtgaaggcctgctatagcctgtcggaagatgcagaaggggagggcctgctgttgattcccggaggccgggccagcgtgggggccacctcgggcctggtggaagcagcagcggtggccatggctgcccggggggcggggggcagcctgggggcggggggcagccggggacccctgcctgggggcttctcaggtggaaaccccttaaagaacatcaagtgcaccaagtgcccggaagtgttccagggcgtggagaagctggtcttccacatgcgggcgcagcacttcatcttcatgtgccctcgctgtggcaagcagttcaaccacagcagcaacctcaaccgccacatgaacgtgcatcgtggtgtcaagtcacactcgtgcggcatctgcggcaagtgcttcacacagaagtccacccttcacgaccacctcaacctgcactcgggagcgcggccctaccgctgctcctactgcgacgtgcgcttcgcccacaagcctgccattaggcggcacctcaaggagcaacacggcaagaccacggccgagaacgtgctggaggccagtgtggccgagattaacgtcctcatccgctagccgcgcaggcgtggaggccaggaggctggggcccctgggctgcgtggaaaaagggctctttggcccaggagaattggggggtggggggtctggggcagaaaggtaagagtgggaggctgagcagatgcacacatcctgagagagggaagatgattccttggagagacttgctcttgagagtgcaagaatctggagctgggaaaagggttcttggaggccaggggaatacggggtcccagagaaagatttccttctcttagaagtgcatgtatatgtggagggagggaaaagggtcctatagaatgagggaagacaaaaatgttttattcctggctaaggctgcccaggggaaggttctgacatttctcgagataagaagggttggggggtgggtgggaacagggagggaatttggcaggaggacatgctcctgcttagaatagacctggggtgagggagtggtaaggggaaaagattactgagtcccagaaaaggaagtgggagacagttcttgcatgctggggaaatgagactgcgagtatgaggcttgctgaaatttgagggagaacaaagtaagacgccaggtaagagaacgtggggtgcgcatcctgggtagatattgggaagtgggggtacaatagcaagaaacaatggatagtcatgggggtgggggggatagggcacttagaaaagaaagaacacaagaagggctgttgggagggagggagaggagtagag

SEQ ID NO: 11102 - DNA, 1406 bp, Artificial sequence
  DNA replication origin
tgatgttctttaaggggtttccacctgagaagcccccaggcaggggtccccggctgccccccgcccccaggctgccccccgccccccgggcagccatggccaccgctgctgcttccaccaggcccgaggtggcccccacgctggcccggcctccgggaatcaacagcaggccctccccttctgcatcttccgacaggctatagcaggccttcaccacaccctgcggtggggctacagtgctggggggaacgctgctctgggccagctccccaaggtggccacccacggagcctccaatgcccagaccccctcccaggcctccagggggtttgagccggtgtgccacctccagggccgactccaccttgacgatgcagatgtcagacacgtcctcatcctcatcctcatcctcttcctcggctttcagctccaagtcttcatccagtgggaactccagcttcactggccgcaggagtggagggggtagaggaggtgggggtgggggcttcggggctggctttggggtcctggctggagggaggagggacttggtggcgctgatgctgctcacaaggctagcctcactgaccccatcctctttgaggcctattttgggctcaatgaactggctgagggcattccggcatttctccaccacgtgctccatctgcaggtaggaggcggctgtaaggtagttgacgatgtccctaacagcgaattccaaggcgcccgtgtagcaggagaggagcaagtcggccacgatgcgtgcactgtgcatcagggagacctgcagctccgagctggggttcagcaggaactggtcccgcaggaagggtgagcaggcggccaagatgaccttgtggcctcgaaacttgaggctgtcggccacaatggtcacgtcgcagaaccgctcctctgcccggagctggttcatgttccgtagcgttgcggcctcgtggccgggcagctggaagcgcaggacttccaccccagaggccattgtggcgggggtgggcaaccctggttgggaaggaaaccggtcagagacaaaggtctctggctctccgaagccaaggctccaggaccctcgcccccattcttgcccagccccccggcatccgatctcccggtcttcagatttcttcctcagtttccccaaccctggggaggtgctgtccctctgagaggagggaggcgtggttctcgggggcggggcagcggcgtccacaccccccagcccagcagcccgctaggatggggcgagcccgcgcgcccacggtggaaggacggagaaaaaggggggccagaggcctggggctctggactccaaggtggccccggttgcaggctcttctcaccccgccccctttaccggctgcctcattcctccgccccccccttacacg

SEQ ID NO: 11103 - DNA, 1222 bp, Artificial sequence
  DNA replication origin
aaacactgtctacgctgcctccaccctcctgccaaacagcatcccttgagttcaagaattcagtttcagctcaagaacaaactttttatgggtggatgctggctgagccaaagaggaattacttcaacaatcatttgttgcatgaccttttttggtgttttgttttgagaaggagtcttgctctgtcgcccaggctggagtgcaatggcgcaatctaggctcactgcaaccttcacctcccaggttcaagcgattctcctgcctcagcctccccagtagctgggattacaggcacctgccaccacgtccagctaatttttgtatatttagtagagtcagggtttcaccatgttggccaggctggtctcgaactcctgacctcaggtgatccacctgcctcggcctcccacagtgctgggattacaggcgtgagccaccacaccctccctattgcatgatttttatttgcaaaacaaaacccacaacataattcctgcaaccaagaagtttatagtctaatggggaaaccagatattgaacacataataagaaacttcatcagaattgaaatgtatggaaaacgcactagtctcctgaaggacgtaaaaaagaaatccaattggcaggaaacagtggcatcttcacgcggacttggataggtggggaagtgggtgtaggtacgaggaagtggaagggaaggcaccagccttcaagacgctcctaagtgctgtcgctgaagctgtggagactataacttagtctgagagagacaagagaaagagaaggcccgggcgcagtgttgaagggaagttttgtttagagctggaccttgtcagtctggaggagaggtgaggaataagggggacggagcggtggaagattagagtagaatcatactaacataataaatcacatcattaaaattagtcctagggttaattatatactaaaggtgaaatgggcaaggtcatcgatagcacaagcggagggcgactgccttggcaagaagttgggatcaatcctgagaatggaggggagggcgggtgtgattttaaaggactgacatggagtggaggaaagttgagggcactggatcgtctggctttgtggaaagtgaaatcatatttcaggcctgaagggctgaggcggttactagctttacaagagttggaaaagcctgggaatgtgtctggagcaactgtgagcacactcagcagaggag

SEQ ID NO: 11104 - DNA, 904 bp, Artificial sequence
  DNA replication origin
cagccgccccgtccgggagggaggtgggggggtcagcccccagcccggccagccgccccgtccgggaagtgaggggcgcctctgcccggccgcccctactgggaagtgaggagccactctgcccggccagccgccccgtccgggagggaggtgggggggtcagcccctcgcccggccagccgccccatccgggaagtgaggggcgcctctgcccggccgcccctgctgggaagtgaggagcccctctgcccggccagccactctgtccgggagggaggtgggggggtcagccccccgcccggccagccgccccgtccgggagggaggtggggggatcagccccccgcccggccagccgcgccgtccgggagggaggtgggggggtcagccccccgcccggccagccgccctgtccgggaggtgaggggcgcctctgcccggccgcgcctactggaaagtgaggagcccctctgcccggccaccaccccgtctgggaggtgtacccaacagctcattgagaaggggccatgatgacaatgacggttttgtggaatagaaaggggggaaaggtggggaaaagattgagaaatcggatggttgccgtgtctgtgtagaaagaggtagacctgggagacttttcattttgttctgtactaagaaaaattcttctgccttgggatcctgttgatcggtgaccttacccccaaccctgtgctctctgaaacatgtgctgtatccactcagggttgaatggattaagagcggtgcaagatgtgctttgttaaacagatgcttgaaggcagcatgctccttaagagtcatcaccactccctaatctcaagtacccagggacacaaacactgcggaaggccgcagggtcctctgcctaggaaaaccagagacc

SEQ ID NO: 11105 - DNA, 1179 bp, Artificial sequence
  DNA replication origin
cccacctccctcccggacggcgcggctggccgggcggggggctgatccccccacctccctcccggacggggcggctggccgggcggggggctgacccccccacctccctcccggacagagtggctggccgggcagaggggctcctcacttcccagcaggggcggccgggcagaggcgcccctcacttcccggatggggcggctggccgggcgaggggctgacccccccacctccctcccggacggggcggctggccgggcagagtggctcctcacttcccagtaggggcggccgggcagaggcgcccctcacttcccggacggggcggctggccgggctgggggctgacccccccacctccctcccggacggggcggctggccgggcggggggctgacccccccacctccctcccggaccaggtggctgctgggcggaggggctcctcacttctcagacagggcggctgccgggcggaggggctcctcacttctcagatggagcggttgccaggcagagggtctcctcacttctcagacggggcggccgggcagagacgctcctcacatcccggatggggcggccgggcagaggtgctccccacatctcagacgatgggcggcagggcagagacgctcctcacttcccagatgtgatggcggccgggaagaggcgctcctcacttcctagatgggatggcggccgggcagagacgctcctcactttccagactgggcagccaggcagaggggctcctcacatcccagacgatgggtggccaggcggagacgctcctcacttcccagacggggtggcggccgggcagaggctgcaatctcggcactttgggaggccaaggcaggctgctgggaggtggaggttgtagcgagccaagatcacgccactgcactccagcctgggcatcattgagcactgagtgaacgagactccgtctgcaatcccagcacctcgggaggccgaggctggtggatcactcgcggttaggagctggagaccagcccggccaacacagcgaaaccccgtctccactaacaaaatacgaaaaccagtcaggcgtggcggcgcgcgcctgcaatcgcaggcactcggcaagctgaggcaggagaatcaggcagggaggttgcagtgagccgagatggcagcagtaccgtccagctt

SEQ ID NO: 11106 - DNA, 1239 bp, Artificial sequence
  DNA replication origin
gaggaggggaaggagacagagagagatagtgagcacaggaaggcctctgctgcaggcagactcctgattcctgaccctgtccaccatgagggaggcgctctccttgaagatgagaaagtcattttccgacacactctgcgaacagtccaggagcaggtagaggttcagatgaccagagcgctggatttggattttacggcccaggctttctggagaaatgtggaaggggaggattcagatccccacctccttcctgcgctctcgccaagcaggtccagcttctctgcctccctccctttcagtggctgagcccaccaaggctcctggcctccaggaaggttgcatcctcccttgctccggcccagatccagcaccctgctcaaccagaaaccccacctcaaacactcaccctttgtcttctgggtgggattggtggccccaagcatgtgggagaaggaagtgcccagggcaggggccacgtcctcagggaagtcataagagtagggttctgtggggagagccacacaggagtcagccggggcagtggccgggtgtgccgaggaatctcaggagggcagggcagctactcacggcggcagatgggctccgttccactccagaccccgttgccctggcactcccgctccgaagaccccgtgagcacaagattcgaggagcagcgatagcggaccttgtccccatgaccaaagcggaagcctgtccgcactgcgcccagtgaaatgcctgggttggggcagtggccagctgcgagtgaacaaaggaaggcagaggtgagtagccccctcccatcaggctctgcctcctcagcggcctcagttgccagcagaagcttcccagttccaacccagggatgcacccatgtctgtcccagagcccccagagacccagggaagaagtcagctgatggtccctccactccttcagagaacatttatatttcataaaccacagtgaggcatccctacacacccatcaaaacggctaacactgaaacaacaggtaattccaagtgttggagaggatgcagagcgactggcactctgttaccttgctggcatgtacgtgggtgaaactttctcagcctctactacaactaaacatatgccagcctgtgatgtgacaattccacatttagatcatttactcaagagaagcaagtgcatacatgtaccaaaatcacatgcaagaatgttcctagagctccctctccctcaccct

SEQ ID NO: 11107 - DNA, 1066 bp, Artificial sequence
  DNA replication origin
cccctccaggagggaggtgggggggtcagccccctgcccggccagccaccccgtccgggaggtgaggggcgcccctgcccagccacccctactgggaagtgaggagcccctctgcccggccagccgccctgtccgggagggaggtgggggggtcagccccccacgcagccagccgccccgtccgggagggaggtggggggtcagccccccacccggccagccgccccgtctgggagggaggtggtggggtcagccccccccgcccggccagccgcctcgtccgggaggtgaggggcgcctctgcccggccgcccctactgggaagtgaggagcccctctgcccggccagccgccccgtccgggagggaggtgggggggtcagccccccgcccggccagccgccctgtccgggaggtgaggggcgcctctgcccggccgcccctgctgggaagtgaggagcccctctgcccggccaccaccccatctgggaggtgtgcccaacagctcattgagaacgggccacgatgacaatggtggttttgtggactagaaagcgggaaaaggtggggaaaagattgagaaatcggatggttgccgtgtctgtgtggaaagaggtagacatgggagacttttcaaaaaaaaaaaaaaatagtggaattatcaaaaagacaattaaaaaaaaaaaaaacagcactttgggaggccgaggcaggcagatcatctgagtcaggagtttgagaccagcctggccaacagggtgaaaccccatccctataaaaatacaaaattaggccgggtgcggtggatcatgcctgtaatcccagcactttgggaggccgaggagggcagatcacgaggtcaggagatcaagaccattatggccaacatgatgaaacccccatctctactaaaaataccaaaattagctgggcatggtggcgcgtgcctgtagtctcagctaatcaggacagtgaggcaggagaattgcttgaacccaggaggcagaggttgcagtgagttgagatcacaccactgcactccagcctgggcaacagagcgacactcc

SEQ ID NO: 11108 - DNA, 1189 bp, Artificial sequence
  DNA replication origin
cggccgggcagaggcgcccctcacctcccggacgaggcggctggccgggcggggggggctgaccccaccacctccctcccagacggggcggctggccgggtggggggctgaccccccacctccctcccggacggggcggctggctgcgtggggggctgacccccccacctccctcccggacagggcggctggccgggcagaggggctcctcacttcccagtaggggtggctgggcaggggcgcccctcacctcccggacggggtggctggccgggcagggggctgacccccccacctccctcctggagggggcggctgccgggcggagatgctcctcacttctcagacggggcggctgccgggcggagggtctcctcccttctcagacggggaggctgggcagagaccctcctcacctcccagacggggtcgcggccgggcagaggcgctcctcacatcccagacggggcggcggggcaaaggcgctccccacatctcagacgatgagcggccgggcagagacgctcctcacttcctagatgggatggcggccgggcagagacactcctcactttccagactgggcagccaggcagaggggctcctcacatcccagacgatgggcggccaggcagagacgcccctcacttcccagacggggtggcggccgggcagaggctgcactctgggcactttgggaggccaaggcaggcggctgggaggtggaggttgtagcaagccgagatcccgccactgcactccagcctgggcaccattgagcactgagtgaaccagacaccgtctgcaatcgcggcacctccggaggccgaggctggcggatcactcgcggttaggagctggagaccagcccggccaacacagcgaaaccccgtctccactaacaaaatacgaaaaccagtcaggcgtggcggcgcgcgcctgcaatcgcaggcactcggcaggctgaggcaggagagtcaggcagggaggttgcagtgagctgagatggcagcagtacagtccagcttcggctcggcatcagagggagaccgtggaaaggataattccactattacttgtcttttggggtttgtttttattctctctttgagttttgtttccttatgcgcccagttacttttgaaaatgttctgggcagatttgcctagattaataaatgccctccatg

SEQ ID NO: 11109 - DNA, 753 bp, Artificial sequence
  DNA replication origin
cctgatacgcctcttttcactctcttctctgtggagacagaaggagcttcaagagcagggggagatcagaatcgtccagctgggcttcgacttggatgcccatggaattatcttcactgaggactacaggaccagagtatgtgactgtgtgcgtcaggggtgctggggggagggcacaggttgggggagacagggaacttgggaaacagaaataaaaacaaaagaaagaatttccctgcccccacatcccatggagagggcacagggccctggtaaatagtaatatgagggagagagacaggagggaaagagggaggagtgagagggtaaagagggggggagaggagggggaggaggaggaaggaaggagggggaggaggagggggggaggaagagggggaggaggatgaagaggaggaggaagaagaagggtatgagaggtggaaggatctgagcaagaggtaagacaggaagagaaatgctgtcctgggggtggaggttggtagagagtgagggtggggatggaccatgtctctcatctctgcttgtaggtcctcaaggcctgtgatggccgaccgtatgctggggcagtgcagaaatttctagcttcagtacttccagcctgtggggaccttagtttccagcaggaccaaatgacacagacctttggcttcagggactcagaaatcacgtgagacttgtggaaccaaccaaagtcaggcatctggtgcttccctgcctccctccagttcc

SEQ ID NO: 11110 - DNA, 965 bp, Artificial sequence
  DNA replication origin
tctctcgcaccccagtatgactgccgagcactgaggggtcgccccgagagaagagccagggtccttcaccacccagccgctggaggaagccttctctgccagcgatctcgcagcactgtgtttacaggggggaggggaggggttcgtacgggagcaataaaggagaaactgaggtacccggctggcatcggtcctgccccatcactggttctggcctgggctgtgggcccccatcccccggggctgcagccgcacttggaaaggctgcatcttgaggatgacactgcagtggggcaggggctgcagggagggcagggcgtccccggagggcagcagcgtgaaggcctgcagcagtcgggtcagcaccacgaagagctccaggcgcgccagcggctcgcccaggcacacgcgggcaccgcagccgaaggccagagctctggagttcttgcctggctccaggaagcgatctgcgggcgggtggacaggtgggtggggaggcgttcagcggcagcggggaccagcctccaccacattttcatggcaggcccccggccccccacataccaggccagaactcatgtggcctctcccagaccgtctcatccaggtgggcgccttggaggttcggaatgatgactgtgccctcagggatgtcgtagccggagatgctgaagggggctggagttagaggctggccaggacctccctgggctcgggctttcctcactcatccccaaccctcgggagtcacctgctgggccgtgtggtgcggtggggcaaggctaagggcacaacgggccacaggcgcagcacctcggcgatggtggcattgagcaagggcagccgtgcacggtccttgtaggggacccgggagctggaggcaccagggcccagttcgtggtctagctcctcctacagtcgctgctgaatctggggaatgatcgggtggagtcctgccccagcag

SEQ ID NO: 11111 - DNA, 1626 bp, Artificial sequence
  DNA replication origin
ggtcctggaggcaccggctccgttctgcatctcctccccgcagtccctggggaaggggatccgcagcccacctgggagaggagagcaggggccagtccttttccaagccttaggccctggctgcccacccagcccccggccccgggcccgtgcgtccaggtacccgtggtgaaagaggtggacacgggcggcaggaggctctggccccacatggcctggagccgtgcattgtaggaggtggagggaaagaggccaaggagctggtgagatgtgatccctcctgggagcaggatctcctgtgggacagacaagggggggtcaggggagagggaggtggagaccctccgggagggccagaggcagcacctcctggaatcacccagggaggggagttgggtcagtggggccggggcacctggttctgtccaccaggggtgtggaagctgagcaggtagcctgcgggccggactgggggctcagtccaagtgagcagggcggtgcggggggtcacttccttggcctccaagtcccgaggggcctctagccctaggagggaaagcaggaagaggagatggggatgaggcccaacctggctccctctacctcctctccctgtcccacacaccccacagaccctacctgtggtgaaggtgatgctggctggggaagtgaggttggggccccgcaggccacgcactgtggcggtgtagttggtgtggaggacaaggtcatgcagggggtagtccaccgcgctgcctggggtctccgcctgcagaggcggggctgggagtgtagagaggggcatcaaggcctgccccctccatcctcggccagagtccagcctcccccctgcaatccccaccctgaacaagtcccctccagaggcctcaggcctgctcacccccaggggctgtgacctggacgtcataggtgtccacaggattctgggggggcttccagtgcagcacggcgaatccctcggtcaagttcagtgcacgcaactgtgtgggaccgtcaggaactgggggaaggggaggggctcagaagggtccccgcggctctctctactccgtgcctccccagactccactggcctcccgtccgcaatcggagcctccaccacctccctttcaccctcctcgttctctctcaactcccacccatgccgttttcttgactcccacctggagtttctgggtccgggcccggccgtccacctgcacactctgaggctcccctgaaaacgttggggatcgagggttacccagggaaccccagggcggctggagggtgggcagagtgcaggggggagaggaaatgcgaggcgatgagcacatggcaaaggcaccacctccgtccgccagctggtaggagactttgaagctgtccgcccgggatggtgggggcatccagttgaccttggctgaggtctccctgatttcactgaattggaggtcacgggggctctccagaactgcagaggggtcaaggaacaatgacgcaggcaggggcagggaggctcctccctgcgagtccccccctcgcctctgctccagcacaggctcaccaccccttttcctctagtccccaggaatggaagtcgctctgcagattcctccaggccca

SEQ ID NO: 11112 - DNA, 1033 bp, Artificial sequence
  DNA replication origin
ccccagcggggggaggctgagctgctgcccacctctctcgcaccccagtatgactgccgagcactgaggggtcgccccgagagaagagccagggtccttcaccacccagccgctggaggaagccttctctgccagcgatctcgcagcactgtgtttacaggggggaggggaggggttcgtacgggagcaataaaggagaaactgaggtacccggctggcatcggtcctgccccatcactggctctggcccgggctgtgggcccccatcccccggggctgcagccgcacttggaaaggctgcatcttgaggatgacactgcagtggggcaggggctgcagggagggcagggcgtccccggagggcagcagcgtgaaggcctgcagcagtcgggtcagcaccacgaagagctccaggcgcgccagcggctcgcccaggcacacgcgggcaccgcagccgaaggccagagctctggagttcttgcctggctccaggaagcgatctgcgggcgggtggacaggtgggtggggaggcgttcagcggcagcggggaccagcctccaccacattttcacggcaggcccccggccccccacataccaggccagaactcatgtggcctctcccagaccgtctcatccaggtgggcgccttggaggttcggaatgatgactgtgccctcagggatgtcgtagccggagatgctgaagggggctggagttagaggctggccaggacctccctgggctcgggctttcctcactcatccccaaccctcgggagtcacctgctgggccgtgtggtgcggtggggcaaggctaagggcacaacgggccgcaggcgcagcacctcggcgatggtggcattgagcaagggcagccgtgcacggtccttgtaggggacccgggagctggaggcaccagggcccagttcgtggtctagctcctcctgcagtcgctgctgaatctggggaatgatcgggtggagtcctgccccagcagcccacagctgcccagcctccagccgctccctcagc

SEQ ID NO: 11113 - DNA, 1585 bp, Artificial sequence
  DNA replication origin
gggggacctagtgcctcagccagcggtgggggtgggcgagttggtggtgggcctggaggaatctgcagagcgacttccattcctggggactagaggaaaaggggtggtgagcctgtgctggagcagaggcgagggggggactcgtagggagaagcctccctgcccctgcctgcgtcattgttccttgacccctctgcagttctggagagcccccgtgacctccaattcagtgaaatcagggagacctcagccaaggtcaactggatgcccccaccatcccgggcggacagcttcaaagtctcctaccagctggcggacggaggtggtgcctttgccatgtgctcatcgcctcgcatttcctctcccccctgcactctgcccaccctccagctgccctggggttccctgggtaaccctcgatccccaatgttttcaggggagcctcagagtgtgcaggtggatggccaggcccggacccagaaactccaggggctgatcccaggcgctcgctatgaggtgaccgtggtctcggtccgaggctttgaggagagtgagcctctcacaggcttcctcaccacgggtgagatggactgggacccggggcaagaggtgggagccaagaaaacggcatgggtgggagttgagagagaacgaggagggtgaaagggaggtggtggaggctccgattgcggacgggaggccagtggagtctggggaggcacggagtagagagagccgcggggacccttctgagcccctccccttcccccagttcctgacggtcccacacagttgcgtgcactgaacttgaccgagggattcgccgtgctgcactggaagcccccccagaatcctgtggacacctatgacgtccaggtcacagcccctgggggtgagcaggcctgaggcctctggaggggacttgttcagggtggggattgcaggggggaggctggactctggccgaggatggagggggcaggccttgatgcccctctctacactcccagccccgcctctgcaggcggagaccccaggcagcgcggtggactaccccctgcatgaccttgtcctccacaccaactacaccgccacagtgcgtggcctgcggggccccaacctcacttccccagccagcatcaccttcaccacaggtagggtctgtggggtgtgtgggacagggagaggaggtagagggagccaggttgggcctcatccccatctcctcttcctgctttccctcctagggctagaggcccctcgggacttggaggccaaggaagtgaccccccgcaccgccctgctcacttggactgagcccccagtccggcccgcaggctacctgctcagcttccacacccctggtggacagaaccaggtgccccggccccactgacccaactcccctccctgggtgattccaggaggtgctgcctctggccctcccggagggtctccacctccctctcccctgacccccccttgtctgtcccacaggagatcctgctcccaggagggatcacatctcaccagctccttggcctctttccctccacctcctacaatgcacggctccaggccatgt

SEQ ID NO: 11114 - DNA, 1063 bp, Artificial sequence
  DNA replication origin
ttcctgtcctaatgggaaaagttcctgtcctaatggggctaacgtcatgggggacaggctgtggaccagtaagaaagcaaaggcgggtgagcatgtgacaagaagcccagagccaggcaggaatacctaaaccaccctacctgtggatactcaggggacagtcaggatctgaggccaggcaggccttagcttggtgacagctttagagagaaggtgaagcgtgtcagatcagcacaggtggtgcaaaggccaggaggctagaaagagcatggtgtgtgagaagtactgaggattgagtggggtgtcctttgcagtgaatagatagtcctgaagtgtgggagcagaggaggcctggggtctcccagggatgaggatgtgattgcccaggtctgtgctgagatggccccagcagctgtgcctgtgtgaagctcatctgtgggggctaaagatggggatggggtggcagggagcctagaggcagggaagccaataggcagttggtggccctggtgagaggtgacagtggctcaaactaggatcggggactggaggttggggaggaaggtatccagggaaactcgggggagaggtaactctgaggctgctggcagctggtgaggggctgggtccaggaacacaccccaggctctggcctcgggaggagtgtgctgagcttgttgcagagcaaagacagaagcccagtgaacaaaagatggcgaggagaccccagtgcagggagggtaagggtgcagaggccaagtggagctgtgctcaaaagagaggcggtgctggagggacagggagaggtggcctgggtgttgggaggtgggggtgaggtgggggccgagggcaggggggtcagggtgagggataggaaaggccgcaggggaggagaggatgaagagctgtgctggaggcgctgtgggcagcatcgtcctgttcttgggcactttgtgttttgtgacacatcctttctatgctgaactgagaacccagggtcctcactgtccccacacgtgtctgtccagctccaaaggatgaagccgagaccacccaagcagtg

SEQ ID NO: 11115 - DNA, 920 bp, Artificial sequence
  DNA replication origin
agccaggacctgaggccaggcaggccttagcttgatgacagctttggagaggaagtgaagcatgtcaaatcatcacagctagtgcaaaggccaggaggctagaaagagcatggtgtgtgagagacactgaggattgagtggggtgtcctttgcagttggtggatcatcctgaagtgtgggagcagaggaggggaccactcaccaggcctggggtctcccagggatgaggatgtggttgcccaggtctgtgctgagatggccccagcagctgtgcctgtgtgaagttcatccgtgggagctaaagatggggatggggtggcagggagcctggaggcagggaggccagtaggcagttggtggccctggtgagaggtgacagtggctcaaactaggattggggactggaggtgggggaggaaggtatccagggaaactcgggggagaggtactctgaggctgctggcagctggtgaggggctgggtccaggaacacaccccaagctctggcctcgggaggagtgtgctgagcttgttgcggagcaaagacagaagcccagtgaacaaaagatggcgaggagacaccagtgcagggaggctaagggtgcagaggccgagtggggctgtgctcaaaagagaggcggtgctggagggacagggagaggtggcctgggtgttgggaggtgggggtgaggtgggggctgagggcaggggggtcagggtgagggataggaaaggccgcaggagaggagaggatgaagagctgtgctggaggcgctgtgggcagcatcgtcctgctcttgggcactttgtgttttgtgacacatcctttctatgctgaactgagaacccagggacctcactctccccacacgtgtctgtccagctccagaggatgaagcagagaccacccaagcagtgcc

SEQ ID NO: 11116 - DNA, 1119 bp, Artificial sequence
  DNA replication origin
ctgtcttgatggggctcacagtgaaaggaatatagcaacattatggaaagacatgtcatggagagacaggctgcaatccagcaaatgaagcaaaggcgggtgagcatgtgatagggaggcccagggctcaggtcaggaccagacagggacgcctaagtcaccctgcccatgggtacccaggggacagccaggacctgaggccaggcatgccttagcttggtgacagctttagagagaaggtgaagtgtgtcagataatcacagctggtgcaaaggccaggaggctagaaagagcatggcacgtgagaggcactgaggattgagtggggtgtcctttacggtgagtatctcatcctgaagtgtgggagcagaggaggggaccactcaccaggcctggggtctcccagggatgaggatgtggttgcccaggtctgtgctgagatggccccagcagctgtgcctgtgtgaagctcatccgtgggggctgaagatggggatggggtggcagggagcctggaggcagcgaggccagtaggcagttggtggccctggtgagaggtgacagtggctcaaactaggatcggggactggaggtggggtaggaaggtatccaggggaattcagggtaaagatgctctgaggctgctggcagctggtgaggagctggatccaggaacacaccccaggctctggcctcgggaggagtgtgctgagcttgttgcggagcaaagacagaagcccagtgaacaaaagatggcgaagagaccccagtgctgggaggccaggggtgcagaggccgagtggggctgtgctcaaaagagaggcggtgctggagggacagggagaggtggcctgggtgttgggaggtgggggtgaggtgggggctgagggcaggagggtcagggtgagggataggaaaggccacaggagaggagaggatgaagagctgtgctggaggggctgtgggcagcatcgtcctgctcttgggcactttgtgttttgtgacacatcctttctatgctgaactgaggagccagggacctcactgtccccacacgtgtctgtccaactccagaggatgaagccgagaccacccaagcagtgcctaccatgacccctg

SEQ ID NO: 11117 - DNA, 1426 bp, Artificial sequence
  DNA replication origin
tgggcagttccgccgatggcgcgcttctcgtgtctctcgacgggctccgcggccagttcgagcgcgtggtgctgcgctggcggcctcagccgcctgcagagggccccggcggtgagctgactgtgccgggcaccacgcgcaccgtcagcctgcccgacctcaggcccggcaccacctaccacgtggaggtccacggggtgcgggcggggcagacctccaagtcctacgccttcatcaccaccacaggtagtgtgggctggggccacgggacacctatcccttgtccagcctcacctgccgttggagcctgcattcatgaattcctcccactgccaccccccactgcccccttctaccttcaggccctacctggccggggctccagggggcccccaggacaaagcacgagtccattgtccctagaagacgtccccaccccagggtcctggcatccatcctgtggatgcctaaggtcaaggcagcgccttctttggggtttcccgggacacttccaggattgttattttaggcaatagagggtgatgtggttggggcacctgcaaagattcactggagcagtttgagtgggctgggaattgaaaacagtgattcccgttctgactcactgtggtgagagtggctgaagactgtggttagtggttactgttttccacaatttggccttgaccttgaagggacacatcagaactgcgtgggggtggcctgggtgccatcaggcagcaactgtatattggggaggtgaaaccactgcttcttaagctggcttttcagaccccctggctcactttatgctggtctctcccacaggaacgatgtctgggcttggggaaagggcaccctgtggctgctgtggggagggtggtggacctcttcttcccccatagggcccagatgccacctgacctggatgtccacccccacaccctctctctcttcccactgcccactctcctcttgcatcctccctctctaacaccactgtctttcttccaggcttctcactgcagcactaatggaagccacctgaccaccacccagtgggggggatgtatgtggggagggacatggaagtctccgggggctggaggtcatggaagccttgtggggtgaaggatagcaggctttattttacctattacctgcctgaagcacaggcccgtctgctcaggaatgtggtagatgggggtgtttggaggattggctgacctttgggaggagggagtggcccaggtgagggaaccagaagtagaagtagaacaaggctcttagaggctggagggcagaacctggggactggggattcctttctagttctcatactggactctcctctttttctcaccctgccccttcccagggtcctcacccttgggcctcttggggactaccgatgagcctcctccct

SEQ ID NO: 11118 - DNA, 1215 bp, Artificial sequence
  DNA replication origin
cgctcgaactggccgcggagcccgtcgagagacacgagaagcgcgccatcggcggaactgcccagcacctctggcttggggtggcgggacgcagccacccggtcgacgccttcaggcgagaggccgtagattccctggttggagtcccgtttcctggtgccgggatcagggctggcggtggggcgggggtggcggggcgggggtgcgggggagccggctggggcggcggccaacagacgccgctgcaagtattcatggatgtggcgcgccaccgacgtgtaagtctggttggcccgcagtgggtagccgtgagcccgcaggtggcgctccaggtcctgcaccgtgccgcggaaacggctcagctcggccgtcaggttgccccaaggccgccgtgggggctgggacaggcttggcctgggcggggactcctcctccctttcctctgctggcctcgagggccaagggggccgtgggggccgcggggctggggctggccggggccgggacttggggggcggggctggggggcgcacctccgggtaactgtagtggcctggtgctgccaggggcaaaaaaggggagaacaggtcagtggcagctccctcccggcactccttcccgcggcagcccctccctcgatccctcccaccagagccagaggcctcttccctgtgccccagccccacctggaaagagaacggagggaaatcggtcagtgtcccgcagcccccccattcccctccaagcccaccactgttggtgccctagaaagaagagagaagcccgtgggtggggccctgtagctgaaggagagaaaggggagtcggggaagagaacatgagctacagcgaggtgggtgtccccctgtcacaggaaaagaaaaatatccaggtatctgttaagaaacctcgaggtttagtggaaaatcactgctgtgagacccacctcccagcaatcccaatccaaaagtcaacaggactgatgatctctaatctgcctaattccagtcccacaagatctatcagcacaaggcctgtcccggtacctaaatttaaaaaagaacctcccttaactgactggatcaggcagcatctcctattcacttctctccctggggccattcctttcataggctaacctgtaataaccttcctacaggactccaggcatctgagggctctgtctccccagtggcctcaggacagagcaaggccc

SEQ ID NO: 11119 - DNA, 2003 bp, Artificial sequence
  DNA replication origin
ggcgaatgcatttgcgacacgggctacagcggggacgactgcggcgtgcgcagctgccctggcgactgcaaccaaaggggccgctgcgaggacggccgctgcgtgtgctggccggggtacactggaaccgattgcggctcgcgcgcctgcccacgcgactgtagaggtcgcgggcgctgcgagaacggcgtgtgtgtttgcaatgcgggctacagcggcgaggactgcggtgtgcgcagctgtcctggggactgtcgtggccggggccgctgtgagagtggccgctgcatgtgttggccggggtacacaggccgggactgcggcacgcgcgcctgtcctggcgactgtcgcgggcgcgggcgctgcgtggatggccgctgcgtgtgcaacccgggcttcaccggtgaggactgtgggagccgtcgctgtcccggggactgccgtgggcacggcctttgcgaggatggcgtgtgcgtgtgtgacgcaggctactcaggggaagactgcagcacgcgcagctgccccgggggctgccgaggccgcggccagtgcctagatgggcggtgtgtgtgcgaggacggctactctggcgaggattgcggtgtgaggcagtgcccgaatgactgcagccagcacggcgtgtgccaggacggtgtgtgcatctgttgggaaggctacgtgagtgaggactgcagcatccgcacctgcccctccaactgccacgggaggggccgctgtgaggaagggcgctgcctgtgcgacccaggctacaccggccctacctgtgccacccgcatgtgcccggctgactgccggggacgtgggcggtgtgtgcaaggagtgtgcctgtgccacgtgggctatggcggtgaggactgcgggcaggaagagcctccagccagcgcctgccctggaggctgcgggccccgggaactgtgccgggcaggccagtgtgtgtgtgtagagggcttccgaggccctgactgtgccatccagacatgcccaggggactgccgtggccgaggagagtgtcacgatggcagctgtgtctgcaaagatgggtatgctggcgaagactgcggagaaggtgagcaggcagccttccccagtgtactctgggactgtgattctgtgaacaggagccatggggaagacctgagcctgaggaagagtggagggagagcatgtcattccaaggagccagtgcccaccaggggcagcagaaccacaggggtggggctttccagtgggcaggactggccttcagatctctgaggagcaggttggggcccatttagttgcatttagggagattctgtgctcctgaagatggagagaaggtgaaggcgatccaagccccgttcagccctctgtcagctattctccactagcagagaggagtgggagttaggatgggcctcttcgatgtccctgagtaaaaggggctgtgggtgggggtggttgccttgtgctaaccagctttccctaacccattctcttgggcagaggtgccaaccattgagggcatgaggatgcatctcttggaggagacaacagttcggacagagtggaccccggctcctggccccgtggatgcctatgaaattcagttcatccccacggtgagagagatgccaggctccaggaggggactgagtgggcaggacaggggggcagggctcacctcctggaggaagttccaggtgatcattggttgagtccagatggctgggtacctgaagctgctgtaaaggctttcttagcctgcttgacactgggcactgaggcctctgcagcatctccagcaagcattggtcccacacagttggaacacctggtaacagagagctcagtacttcctgaggctgtccagtccattgttggtcatcactgttagctgttatcattgttgcagaatccgtctgcccctattctagcacctgtccgttggccctagctgggtattcatcagcagctggaatgttttttgctttccctgtgtc

SEQ ID NO: 11120 - DNA, 1569 bp, Artificial sequence
  DNA replication origin
ccgcagtcccggcctgtgtaccccggccaacacatgcagcggccactctcacagcggccccggccacgacagtccccaggacagctgcgcacaccgcagtcctcgccgctgtagcccgcattgcaaacacacacgccgttctcgcagcgcccgcgacctctacagtcgcgtgggcaggcgcgcgagccgcaatcggttccagtgtaccccggccagcacacgcagcggccgtcctcgcagcggcccctttggttgcagtcgccagggcagctgcgcacgccgcagtcgtccccgctgtagcccgtgtcgcaaatgcattcgccgtcctcgcagcgcccgcggccccggcagtccctcggacatgtccgcgtgctgcagtcctcgcctgtgtacccgggccagcacacgcagcggccgtccacgcagcgcccgccctcgccacagtcccaggggcagctccgcgtaccacagtcctcgccagtgtagccggggtcacacacgcagcgcccgtccttgcagcgtccccgctggctgcagccccgagggcagctcctcaccccacagtcctcgccagtgtagccggggttacacacgcagcgcccattctcacagcgccccctctgactgcaaccgcgagggcagctcctcatgccacagtcgtcaccagtgtagcctgggtcacacacgcagcgcccaccctcacagcgtcccctctggctgcaacctcgagggcaggagcgctggctgcagtcggggcctgagaagcctgcccggcacacacacacgccctgcacgcagcgcccacggccttggcagtccccgggacaggatggccagccacagctggggccagtgtagccgggaaagcacacgcaacgaccacggacacagcgaccctgatcattgcagtcatctgggcaggaccccgaggctgagggtggggaagagggagggatctcagcatctgtggggtctgagcaggtgggcccaccccagcctggctcacaggaacaggtgcagcggctcagatcaaacacaccatggagactgcagagggtccgcacatctgtctgacctggagtaggaggggagaggcaagtctcagtctctctcctgggagagaggctgagcctatgtagtgctcctatgtgcaggcccctagccaggctagcctcatctcataaggccatgtctgctcccagttgctagtatgtgtaatgtatgcagcctctcagggccctcgcatatgctttggttgacatgtagcccagctctgctctccaagttgtgttctgggctgcatccacacccctcatggtgaggaaggagtgccttcttctaattcataccaaggacctttatggactagcaatgcccaccccaccccacctctccaccctcttctgtgatcacctgctcacctgtgccagcttgggcagaggcaggacaacatcccccagtgcactgttccttgagccccttcaccaactcctccaggatctctagacggaccctcagggcctgtacctctgaagcaaggactgggggctcggtgcctgggggacagcc

SEQ ID NO: 11121 - DNA, 823 bp, Artificial sequence
  DNA replication origin
cccaaggcttgtatgtcccagtgttcacccaagcccttgccctgccagtgcccaagcctcacctgctctttctctagggacttgctgaggtaggagaatgcaaagggggcagtgacaggagagggactgaacagaacagacagcaggagtggctcggggacgggataagccgagaagatagaaatggtgggactggagcagggtggggacttggggtcccagagacggtcccagttggagaaagaggttgcctcttgcctcctgccctctgcccctgctccctgccccagactgccaggggagaactggtgagaggatgagggagccagcactgggtgatagacatggggtgcgatccagagatccaagctagagcagtggctgggaagagatgggagaggagcatgggggagggaggggaagggggctggccatgaggaaggatataggctgagaggaaaccactggggtcagagaggaggggcagcaggtggagaaatggtggggaaaaaagaaatggcaggaagggtggggggtgtcaagttgggcaaaaattagggtgagctaaaaatggcatagggaaaggacgtgggaggtaagaccggggctgggggttgagatgagggtatggtgagacagtgatgctagacagggagtgggggctggggtgggggcaggagaagaggaggggtggcatgtgggagggcctgggaggggtgggaggacctgccctatctccgctcccctccctgacctcatcctggtcctccccttctcctcccctgctcgctgcagactccctcctcactgtcgctgccgagat

SEQ ID NO: 11122 - DNA, 762 bp, Artificial sequence
  DNA replication origin
gggccagagggaaggtttcagcccatatcccattctcagcttttggcttcctaggggaggtagcagtggtcacagtgcgccccttttgaggggcttatctatctccgaggacacatagaagctgtctaaactaaacttagtagtggctgggggagatggtggaccttaatactgggtactacatctcccaggcgctttatcactggagcctgtttggcgcatgcgcttggcggtatggcactgtctggaagttacttcctgctgctgtgctcccattgggcccgcctacacagtcatccgcatctgttgattcacgtgctcagcacccaggtctcttactggtcggtagagcttccgggacgcccccttttttgaaagagtcaactgattagttggtgatggggagaggcgggccttgggaaccgtctcctggttggggggtgggggggaaagatggcggagctgatgctgctcagcgagattgctgacccgacgcgtttcttcaccgacaacctgcttagcccggaggactggggtctgcagagtgaggcaccggggaggggagagggctgtggcaaactgtccctgaggcacgcgggaaagaagcgggggcctaaagaggaagtctgggcaaatacggaatccgccatctgaaggagagcggagcagggggctcgttgtgcattaagggggatacaaaagtcagggaagaactctgctccctgctggaacgtcgagttgttccggggtcggggaaggagg

SEQ ID NO: 11123 - DNA, 1092 bp, Artificial sequence
  DNA replication origin
gctgggatgggtggaagggagtatttacagagcgtttacaggcaggtttcttatcccagggagaagggtcctacaccaggaacttcccaaatgtccttaaaaaaagcaaaaggaaaggttctgggattagcaagaaaataggcagatacctgggtggaggagggacaaaaatgtacttgcaaaaaacaggagtgtgggggccttactaccccagggctcggtccttttgccggaagaaagggaggggtctgtccgtctgtgggcgaggcctggagccacaaacccaatcactggactgaatcaccccgcggagaagaaaagaaggcggagcctgccgacctggaggcggggttttgtcagagctggggcggtgcttatagaggaggcggggttttagggaccaaaccgaggttgctcggttgggggcgctacactttgagggtgagggggcctggagcgactgagggtccggcgtttggccgggatcccggaaagcggcgtccctgggggtgtgggttttggaggggttcctgaggaactggattccgagcttgctcgcaaggcgagacgttccgtggaggcggagtttacgatgtatccaagtctgacggccccagaaacgggtgtgcagggcgcccattgggtccgcggtatgactgcagaaagagcctgggagatcgaggggcgcagagtggggccggaccaggggcgtttttagggatcccagtagttctcgtggtgctgcgcggcgatgatgatgactacggtgaggatggtacagagcaccatggccgcgatgcccacggccagggagatgaaggagaagttccgggcctcgcgtgaagcgatctcggccgacaccatgtctccgcgggccaaggccgtgcgcacctacggaggaggggtgggggaaggaggtcaaagagctgcggcctcgttcgaacgcctcagcctttctctaagatggtccccagaacgcccagaactccctgtccccgcccccaaaccgagtatgcccctgccccctacctgcacggccttgaagatggcaatgatgccagtaggccagaagcaacagatggtggtcagcac

SEQ ID NO: 11124 - DNA, 1091 bp, Artificial sequence
  DNA replication origin
gccccaccgccacaggcagccccttcctcacaccatcaccaccaccaccactaccatcagtctggcaccgccaccctcccgcgcttaggggcagggggcctggcctcttccgcggccaccgctcagcgcggtccctcctcctctgccacgctgccgaggcccccccaccacgcccctcccggccctgctgccggggcacccccacccggctgcgctaccttgccccgcatgccacccgacccttacctgcaggagactcgcttcgagggcccacttcccccgccgccgcccgctgccgccgccccgcccccgccggcgccagcccagactgcccaggcccctggcttcgtggtgcccacgcacgcggggactgtgggcacgctgccgctggggggctacgtagcgcccggataccccctgcagctgcagccttgcactgcttacgtgccggtctacccggtgggcacggtgagtgccgggcagacagggacatgggaaagagggggacgcgatacaggacttgaaattggggatacgctgggggctggtaggatagaggaacaagggcagggaacaggtagtgttcccgggacaagccctagaaagaagggagcctgagacaggaaggactagggagagacacgggagtaggagtctactggtgcccagagtcagggcctgggagggggatcggagcctagaggttcagaggaggtctgaaagtaggaaaccgcctggcgggggacggggggaatggaagctgggaaccaagagggatgtgggagaagcctgggactaagggggtaggggaggcctggtaggtgtctggagggaagaaagaaggtctgacctgaggccaggacagccccagtgggaccataccttgcgggagagaatgtagaaagcccaagaatatggtggttaatgaagcaaggaagggaggagaggggcttaggtggaatttatgggtgtcctggaagggtaatgggtgctttattttgagaagccataggtaaaaattgtgcttttaaagccactctgccagccgcccaacgctggtaggctgggagagggtcagagtgatgcccctg

SEQ ID NO: 11125 - DNA, 1212 bp, Artificial sequence
  DNA replication origin
ccccaatttcaagtcctgtatcgcgtccccctctttcccatgtccctgtctgcccggcactcaccgtgcccaccgggtagaccggcacgtaagcagtgcaaggctgcagctgcagggggtatccgggcgctacgtagccccccagcggcagcgtgcccacagtccccgcgtgcgtgggcaccacgaagccaggggcctgggcagtctgggctggcgccggcgggggcggggcggcggcagcgggcggcggcgggggaagtgggccctcgaagcgagtctcctgcaggtaagggtcgggtggcatgcggggcaaggtagcgcagccgggtgggggtgccccggcagcagggccgggaggggcgtggtgggggggcctcggcagcgtggcagaggaggagggaccgcgctgagcggtggccgcggaagaggccaggccccctgcccctaagcgcgggagggtggcggtgccagactgatggtagtggtggtggtggtgatggtgtgaggaaggggctgcctgtggcggtggggctgggggttcggctggaggctgaggggcattgtagggcggcggagaagtgtgagggactgagtctgggagtcctgggggaggtgagtggaggagagtataagaggaaagatgacacagtgatgagttgaggagggggtaaggggaaacacagccggtcagggatggagaaagataatgggagagacacatagagagagacgggtgagaaaccatctctaatttgaggggcaagagaggggctgtatctaggccatctgcccccctccttcttccttccaatctagttttgaggtcacaactctggtctgcttcttttctgtctttttcatcaccatgcacccagctctcacctgcagacctaatcccctctcctttgctatagctgcctttgggctggcctatccgagctagtcctgtgtgtgcgtatgcgtagacatgcaaccctgtgttaatatgtgctcaattcaacagttgtataaacacatgtgggatgacatgtgttccactctgctgttccttcagtggggggaggagtgccccagcctctgtgagaatctcgggacctcttttagggcagattaagaagagccctctggattttgctcccttgacaacccccatctggtcatgtctccatatttcctcacaggatgtctccatgccagccagtgattgtccat

SEQ ID NO: 11126 - DNA, 1360 bp, Artificial sequence
  DNA replication origin
ccgaaacccccaggcgccccacctctccgcctgtgacccctaaccgacaccctagtgcctcagggcttttacttgctagggcttttacttagcatttaaagacgtttctctagagataaggatttctcagcatgtctgagcccctctctctgtttacaaggtcattgcttggtctaaatttgtctcaatcaaaacatttttgcgctcagaatggtgtagagtgacgatgaggtggcggtaaggggttgagcgctcacgcgaacgcctaagtgaccagaacgactggtgtgaagccgtgatctgactctgtggagcctgggactggtttcagcgagagcctctgtactgctctgtagtctctgctaggacatggacgaaaagggacgcagccgggagagcgactgccccaggtgggggctggggggacgtaagggaagaataataattatctggctgtgtttttgtttaaaaaaaaaaaaaaactggtgtaaatctccatagacttcctatcctcgctcccttcacccacccacgcgctcccaagatgcaataagcaaataaaaagactaataacgctgtactgcaggtcgactcaggagctggagatgcgtcttggtgggaggtggtgggtgggagtaggggggtttagggaatggatctgaacattgaccagcccagagactctaagcagcctcaaaagcaaagggaaagtgggggaacaagcacacattaccaacagagctgccagaaatgagcagttaagtcataccccctaccccctccaaaagagcttcagctccttagtcctggacgaagaaggtatgtatgcacaccgcccaaactctctctcccttttccctccaaggcccagctccccctgatttacagacctgggcctccctctttactgctaggttggtaggttcaccaaaccctgggaacttttcagaccatcgcagttctgaactctgcacaattctctctcacacacaagtatttatctcttctaaagaggaggaaactggggccaaggatttgggagaagaccctggcaccttgcagggagctaagagggggagacgacctgcctctggaggcacctgggttattaactccactgagaacctgttcacttcctcccacaatacaatcactgagtcttggtgggggagactccagagagttctccttccttcctttccttagtcccacccgcctcgcctggtctagcctccgtgtttccatgacaactccaaaggaacccaaactgggggcttgaatgccggggtaagaggaggagagaggtggtccgagagcagagagagaccgagtgggaaacatctgaagcgctccccctccc

SEQ ID NO: 11127 - DNA, 1310 bp, Artificial sequence
  DNA replication origin
tgactgacaactactcagacgaataaagccctccttggccaggcgacagcgtgtagcgagttattaccaatcccttggcattgcacattgacttagaccgtatcagccaatagccattgtgcgaaggcaggactgcactaaccttttcccgcccctaccctttgggccaatcctttcttttgaattctttgtgactggcaggcattcagaccaatagtgattaggaaaccttgaagcctgcccaacgatcgtgggcaggaggtggtttctggtttgttggggcgtgtgtatgtgtatttggggggactgaagggtacgtggggcgaaacaaaaccggccatggcagcagcggaggaggaggacgggggccccgaagggccaaatcgcgagcggggcggggcgggcgcgaccttcgaatgtaatatatgtttggagactgctcgggaagctgtggtcagtgtgtgtggccacctgtactggtgagaatcgaggaggggggcgggaggtggtgggtctcgcttatatactggagaggctaggagcgaataatcatacagtcatacagataatcggagggcacgttcccataggtgaagcccgacaggagacataagactttgctggtatgtgtgggtgggagtataacggtcgagatctgtggaaagaaaggtcttaggaaccaggagctgaggcacgtgatgtgctgagaagagaaggtggggcggggagtggcaggacaatgtgagacccgagccaccttaccccagagaagtgaggggtcttagctgtgcaggtggaaacaagtgagacacaaaggttaagggaggcacgcatcagttgagtcggggagaaccaggaaatatggatcacattcagatgagatctgggagggggctggtataagggcactgtggagaggcagacttgaaaggttaaagggtcataaagatagggacattattgagcttgaaagtgagtaatgggggaatgtgctagtaaaggggtttggtttggagtgatggggttggggttgaaaagaggagacccagaaagaggtggctgaaggaaattagaaattaacttgaaaggcagaaaagagagggcacgaaaatttgtatgtgtttgttggggagaggagaaaggagagggttgagtgtgttgaggatggacagagctttaggtgttggaagatcagacaagcaggaaggctaactaagttggctggcatggtagaggttgcagaaaatctgaaaagcaacagcaggttgcttgggaagaggggttagatgggattctgcgaagtctagggt

SEQ ID NO: 11128 - DNA, 1482 bp, Artificial sequence
  DNA replication origin
ctgggcaagtttgctgcgatagtccgagtgttcgatggagttgtcaggggacacaccaccaccagaggctgcagcggctgcagctgctgctgctgagccgccccctttctcgggcccagccacaccctctgccagaagcatgttgtccaagcgcatcagctgtgggtccaccggctcctcctcctgggagctccgaatgctgaggcctagcatgcaggcgagtggacttagggacccagagaccccaatacccagtgctcagtcctcctggtgcttcctggagagccaagttcccaggctttggttccttccccagtccccctgactccttactttcctcagggccccaagttgtcacactctagccctataatgaacagggttctgttcccagagttgagcaatccggggggggcccacataccagttttctccttgatttcacacaggacgctaaagagagcaggcttcattcggtggcagtttagggcgtgtttccttgggaggagtgggagtggggaaagagaaaagttgaggagctagagaaacagagcagggggcctgagaacaaggagggaggagggtcagtctgcggagggaggaagcggattgggggtggaatgagttgggggtggaatgaggagttcttgggaaaagatcagctcccagagcatggggaagctcctcagcttcagggagacacagggaagatgcaggcagcaggttaaaggctgcgggctttgggagatggtctagaaaggtaggaggaggaatctgggagtggatggagaaaggaaagtgacttggtaggtttcagagggagagagacagaggctggggttgagaagagtcagagtttgaggtggcagagtggggctgggggtgccgagctaactggggagatcagtgtagggtgtgtgaaggggtcctggggctgagcaggtgggaggctttgatgcacctagtgtctggctgagcagtggagaggagctttaggggctctggagagggtgtggaggtctccacatctggagagaatgagggggctgggtggagagttaggggagaagataacgtagcccaagaacagtttcttagtctgggagccagagggggctcccggggatggggctgttccaggagactgcaggggtcggcaaaaggttaggagtggggagccgggccaccgggggttccctctgtgaaggtttcagggcctgggggtgaagggaggtttgagagggatcacttttctatgggctcccaggaataaggagagaagagagctgttggatcctggagagggccctggagttggggggggctcccagaagattcagaacatgtgaacggggtttgctgggtctgtgtggggtcccggagtgggggcactcacttggcctgggcctcgtccaggctctggtcggtgatggtcattatctgctgcagaatgtccccgatgtcttgcttccctcggcctcc

SEQ ID NO: 11129 - DNA, 833 bp, Artificial sequence
  DNA replication origin
tgctgcagaatgtccccgatgtcttgcttccctcggcctcccgggacccccccgctacccccaccggggtctccgccaccgggaggctcgccagggcccccaggctccccactcaccaatcccaggcccccccggcccccgcctggagggggcggccccagtagccgttcgtccatagctgggggggggccctgaggccccctccctgctccgcccctccccccgcctggttacttctccccccaaactcgctggggccgctgctccctccgccccaacccccgcccgtctgcccccggctcccggctcccccgggggttcaccccggcactgaagggagacctgggataccggctgggccccccacaggagaccccggcccccggcggcggagaaaatggagccggagagagagaggaggcccaagcgggggtgtgtgtgagagagagggaggagggaggagggagaaggggggggagcgagggagggaggctgggggaggggagccggagaggaagaggaggggagaagagaggaggaacagggaggagctgggggcggagagagagacacagaaacagaggaactgagacctagtggaggaggggagagggaagaggggatgaggggaggagacgggccatctgaaagatatgggaaagccccctggctggacttccgcggcctaggagtggggctgtgttggcggctgggggcgtctgtcacctgggtcctgaatcagggatctaagcgatgtggactcaggccgctggaatgcctgggttcaccggcagctcagttcatatttcttgttctaatgactcccctccctg

SEQ ID NO: 11130 - DNA, 1137 bp, Artificial sequence
  DNA replication origin
cagcaggtgtgtgtggggggccgggacctttgctcctccattcgacccccaccctgaactctcagcagcaactccaggagctcttgcccccctggagggaggggaggctctgaccgctgggcttccatccgctggcactggaggagtggagggagagggagagctttggtgagggtctgagaggaggaggttcttgagaggatcaagggttggtatggggaggcatataggaaacctgtgaaggcgatggggtgcctagggagaaacaggagtagagccccaaagagaacaggggccaagagaccaggaggcctgggtttgcctcctggggggatgtcttacctggtgactgaggatagtgctgtaaagctgttctctgtcctcgagaggacggagtggggcaggggctaggcttgaggggttttggggggtgtagaaggtggccctctgctcctccaggcggcgggactgggcttcagccaccaggtccagaaggagttcagtctgcagggagagcagggaggccgagcggggtcccagggctggggagaggggtgtggagggctcagagacccagagaggttggcagacaggagccgtgggggagtgtggacagggtgacgtgattagggactttggatcagaggagagggggtgcaatggggaatcccaaggggagtctggaggaggtggggagagggcccacaatggagtgggccttggtaatggggtcaggatgtgggcactagggtcggggctctccctgggtgggtaggggtacctgtgtggcgggtccctggaggaggaggggatggaggagcagatcgccaaggccgagtggtggagtttggagggggccagccttcctcatcctgaggggggccctgatgccaaaatatgtccattctagtcaagcagtggtggttgaagcgggaggagtggacagggggctaggccagtggcccgtttcctctctgtgtgtctctgttcctgcctcagtttgcccaagcctttcaaggcccctgtgtccctacatttctgccccaggtcctctcacctcccttctttcccagtgtcagcctccccaaccccgtgcccagctcacctgctcaccatcctcttcttcctggggtctct

SEQ ID NO: 11131 - DNA, 1181 bp, Artificial sequence
  DNA replication origin
aaatgagttttttatttttattttttcatgacaaggaaattagttgtgtgctggggtctagtatggggaaagaatctattaaaatatatttaaaaaggtaaatccaaaaatttataattacaagagtgaatgacaagatgattgtcaataaaattaaataagcaaaacaactgcttgccctttagaaaatgtatccaagctccagggatccaaaatgtttatgaatctgtggatgtctgtgtgtgtgtgtgtgcgtgtatatttttttttcgttgttgtttctctgcctctctcgccaaactatatggagccctggctaaggatagaggactgtcagatgtgttttcaggggaatcgctgttttcttcacatcagggggaagttcttaggcagctgaaagcaggggctcaggtgggcatgggggggtgggagggctgaggtttaggatgggagggtgggtgagagctagtaagggtgggtggggcactgggggtgggcagcgggtacttggctaggggttcaggacctgtctcagggctgctgtccaggggggtggaggaaggggtagtgaaggggtcagagcactcaagatgcgcagtgtaggcaggggacaggctgcggtgtgtgaagagggtagcctgaggtggtgagacttgctgatcacccagctgggctgccttggtctactcacaactggtcttccctgtgtgtttggtaaacaccaaaggaggtaaactctccaatcctggcctgtgctgatggtgaggcgggagaaggcttccctgggtcccaggtccccaacctggcacagtcatgggtcaagggctgcctgttcctcacctgccttcctcacggggcttctgagcctagccttgcttcgggcattaggagagtctgcctggaaggctctctggcccccaatgccctgccctccaaggctcccagtctaggtgggagagacatacagaacaaatagcatcgtgggggtggtgggaggtggtgtgaacatgtctcctgcaagctctgggaagaagctgtggccacacaatggaatgtctccagccctgacctctccttggaactcagacctttctgcctctctcgccaaactatacggagcacctggtaaggatagaggactgtcggatgtgttttcagtggaatcactgttttcttcacat

SEQ ID NO: 11132 - DNA, 996 bp, Artificial sequence
  DNA replication origin
gcccatagggacctacaaagccaaagtaaacatttggccctttatagaaaaagtttactgattcttgttttaagtcaaaaatggtattgggggaaagttaggttcatggatgtgcagaccaagaataagggaaagatctcagccctaactccttcttatacagattttcaataggtccatctttttcaggtttaccctcttaccctagactttcttagtttttagctttccatttctagagatttagggctctgtctaaacagtggttttccttctgtgtagcatttctttggatgcacaataggttccactttcatcagctccgcttttcaccagttttccagaaaagcattacagtctgttgctgttccctgttccccttgtctgcctgattatttattttcagagtcattttagcagtgtttggggagggagttataccttttattcctcaggtatcaccactcttctcttcctaccgcgaaacagcacagtgaaagggaggagatggagtgaagagaccgagggcagggagagggaggggggtgtgacggggtggggaagtgaggaggaagagggggaagagctactggggaggaggaagatgggggaggaagaggatgatggggtggggtggttcagggagtgaataggccgggttgggtgagatgaggctgggtgtatgtgcttgagaagtccgggagtgcggaggggcagaaaggtagacagtgcgtgcgggaagaggggatgggggtggggaggcgagggcggtcagtgggttgagaggagtggggagaagatttagggcgagagaggtgccatcgtgctggggaaggcgggactaggagaggtaaaagaatggggagagaaatgggagggagagaaggaagctgagggagatttgaggagagaaggcgcttgagggggaaccaggaggggagaaggcttgtgagggggaaatgtgagaggagaaggggcgcgagggggaacagcgag

SEQ ID NO: 11133 - DNA, 1029 bp, Artificial sequence
  DNA replication origin
tgggtgtatgtgcttgagaagtccgggagtgcggaggggcagaaaggtagacagtgcgtgcgggaagaggggatgggggtggggaggcgagggcggtcagtgggttgagaggagtggggagaagatttagggcgagagaggtgccatcgtgctggggaaggcgggactaggagaggtaaaagaatggggagagaaatgggagggagagaaggaagctgagggagatttgaggagagaaggcgcttgagggggaaccaggaggggagaaggcttgtgagggggaaatgtgagaggagaaggggcgcgagggggaacagcgaggggagaaggggtcccgcctcctggccgcgccgccctaggtgtcgccgcctggcggttacgaggaggccgcctcctgcttgccggcctggcggtcctactcaacaccgcaagatttcaaaagggaaattcctccagggctgagtcacagggaagaaagcgatttcctccgcctcttccaaagcggtaggtttccttcctccgcctgcctcttaaataacgtggtatctcgcagtttggctgaaacctgaattaaatgcaatgcttttttgacttttactttctcccagaacaacagttgtgatatgatctgttttggggcccttcctgcgctccgccctgggccagagtatgtaaagctcgtgggtctctgtgtgtgtctgagcagctgctctgccaagactccacacagctgtgtgtgtgtcggacccaaggccttggtggcatgggctcatgagggaatctcctgatccaccagtcgcaaagatccatgggagaagcatggtttcctgaggtcgcaccatcactcacttcttcccttggctgggagtgggggttcctttggctctgtgtcgctcccaggggggctgtcgccccatccagcttttctttgttctctgtgggtcgagttgttttcctgatgagtcccaatgcaagtacctggatatttcagttgaagatgctgtattcacttgcctcttttgttcctct

SEQ ID NO: 11134 - DNA, 1270 bp, Artificial sequence
  DNA replication origin
cggccagccgccccgtccgggagggaggtgggggggtcagccccccgcccggccagccgccccgtccgggagggaggtgggggagtcagccccccgcctggccagccgctcagtccgggagggaggtgggggggtcagccccccgccaggcgagacgccccgtccgggagggaggtggggggtcagccccccgcccggccagccgccccgtccaggagggaggtgggggggtcagccccccgcccggccagccacccggtccggtagctgaggggcgcctctgcctggccgcccctactgggaagtgaggagcccctctgcccggccagccgccccgtccgggagggaggtgggggggtcagtcccccgcccggccagctgccccgtccgggagggaggtggggggtcagccccccgcccggccagccgcgccatccgggaggtgaggggcgcctctgcccggtcgcccctactgggaagtgaggagcccctctgcccggccaccaccccgtctgggaggtgtacccaacagctcattgagaacgggccatgatgacaatggcggttttgtggaatagaaagaggggaaaggtggggaaaagattgagaaatcggatggttgccgcgtctgtgtagaaagaagtagacatgggagacttttcattttgttctgtactaagaaaaattctgccttgggatcctgttgatctgtgaccttacccccaaccctgtgctctctgagacatgtgctgtgtccactcagggttgaatggattaagggtggtgcaagatgtgctttgttaaacagatgcttgaaggcagcatgctcgttaagagtcatcaccactccctaatctcaagtacccagggacacaaacactgcggaaggccgcagggtcctctgcctaggaaaagcagagacctttgttcacttgtttatctgctgaccttccctccactattgtcctgtgaccctgccaaatccccctctgcgagaaacacccaagaatgatcaattaaaaaaaaaaagaaaaagaaactgcctctgttaggatcaaaggttgagaaagtaaggagaatacagagcttccttccataacggtaggaaggcaccaaatttgaacagagtaaggctcctagtgccactgcctaaaaggattgagatgagtagcataggtaagttctgctccaggcttcagatcacaattctagtaacatagcacagtgagaacatttttattttttctggacaagttttgcctccccatcg

SEQ ID NO: 11135 - DNA, 1221 bp, Artificial sequence
  DNA replication origin
cccacctccctcccggacggggcggctggccgggcagaggggctcctcacttcccagtaggggcggccaggcagaggcgcccctcagctaccggaccgggtggctggccgggcggggggctgacccccccacctccctcctggacggggcggctggccgggcggggggctgaccccccacctccctcccggacggggcgtctcgcctggcggggggctgacccccccacctccctcccggactgagcggctggccaggcggggggctgactcccccacctccctcccggacggggcggctggccgggcggggggctgacccccccacctccctcccggacggggcggctggccgggcagaggggctcctcacttcccagtaggggcggccgggcagaggcgcccctcacctcccggacggggtggctggccgggagggggctgacccccccacctcccttccggatggggtggctgccgggcggagacgctcctcacttcccagacggggtggcagccaggcggaggggttcctcacttctcagatggggcggccgggcagagacgctcctcacctcccagacggggcggcggggcagaggcgctccccacatctcagacgatgggcggccgggcagagacgctcctcacttcctagatgggatggtggccgggaagaggcgctcctcacttcctaggtgggatggcggccgggcagagacgctcctcattttccagactgggcagccaggcagaggggctcctcacatcccagacgatgggcggccaggcagagacgcacctcacttcccagacggggtagcggccgggcagaggctgcaatctcggcactttggggggccaaggcaggcggctgggaggtggaggttgtagccagccgagatcacgccactgcactccagcctgggcaccattgagcactgagttaacgagactccgtctgcaatcccggcacctcgggaggccgaggctggcggatcactcgcggttaggagctggagaccagcccggccaacacagcgaaactccgtctccaccaaaaaaatacgaaaacccgtcaggcgtggcggcgcgcgcctgcaatggcaggcactgggcaggctgaggcaggagaatcaggcagggaggttgcagtgagccgagatggcagcagcacagtccagagggagactgtggaaaggggagagggagagggaggaga

SEQ ID NO: 11136 - DNA, 1765 bp, Artificial sequence
  DNA replication origin
tactgcaatacttcccttcaaacgcctcccctcctccatatttgataacaaaaatagtaagaagagatttccctgtaaatgtagctttaaaattatatacttcaacacacactcagcatgaaaacagatgagaaatccatgaacttgtttggagttttcttgtgagaaatagttgctgcccacaaagagactgtatttccccaatagcagcaccggaggaaatctccctggacattttccagttctctcacttcactttctgcctcttcctctttgacagaaagtgaaatcacacctagtgaaactgacctactcaccatccaaggacagctttcctggtgaatgtacctagaagatgctccagtggagacagcagaggtgccaacacttcgctgcttattatgctaatagaacattagcttcctgggcaacatctctatcacaactcgttaaagaagttacaggggtaactggaaaagaatcaggacaattttcatgatgatctaagcagaaggtcacagatgtgccagcactctgaaggctagaataaggatggaaaatcccacagaaggtgattccagtaagagaatagatgtgggactaatcgacctcgttgtgaaaagacacgtctccagccttgctgtcctggaaaccttctagggggacagggaggctcctgacagagtctctgggcaggaagtgagagccatgacccttccttcttcacatgtcaccatgcagaaattcttctctggactttctacaaaccaccactctctcttcattgtgctgaacaaacacccagagctcatctcgttcctggtccaacttctgtccccattatttacttctacctcccagtaatgtctgtctcccctgtggtaaagtaatgtctcccctgtggtaaacccagaacactgaagatggttttggattccccttgtccttggtgtgtgggggcatcccagttcggggaacattctccgttgaagaagtgtatcttctaccctcagatcggatgaggttgggatgagctgcatctggatccagagaaacagccactgcatgtatagttggaaaaaaaaaaaaaaaaaaggaggaaagctgcaaatactgggaaggcagaatggagaaaaacaagagggagaaaactggaaggttaggtaaaactgtggtccgtcctaggagatacacgatgtgtaagtcctagaaggctagggttgggcaagatcttcagtaaccatctattccagccaggctaggactgtctagccaggatggctgtcacacctgaaagtgttccagggtaaggttttcaggatggggtcctgcctattcttcaaacgcctgttacgttattgcttgttcttaaaattaagtcctatagtatttccagtcatggtgtgtccactttcatttaagcctcttcattttcattttctgtgggtttatgtaataactgggccatccacttctcatacacctttatttctagtgattgaaatcccaggccttgtagtcaaaaagatctgaatcttgataattgctctttctttagtagctctgatcttggtgacgttaccttgcttctttcaggcacacctaactctcataataatgcaaataattatggcattcagcacaggactattgtgagaaataaatgagatagcgtatagggaacttaatactatgacttctctgtgatgaacacttggttcattttagcttccaatatttatagtaacactaatagcagaggtga

SEQ ID NO: 11137 - DNA, 885 bp, Artificial sequence
  DNA replication origin
aggttccagcgcccgcaccccgctcagggagccccggatggtggcgtcgctgtccgtgtcttctcaggaggccgccctgtgaccggatggttcgtgtccccacagcacgtttcctgtggcagcctaagagggagtgtcatttcttcaatgggacggagcgggtgcggttcctggacagatacttctataaccaggaggagtccgtgcgcttcgacagcgacgtgggggagttccgggcggtgacggagctggggcggcctgacgctgagtactggaacagccagaaggacatcctggagcaggcgcgggccgcggtggacacctactgcagacacaactacggggttgtggagagcttcacagtgcagcggcgaggtgagcatggccgcgggcggggcctgagtccccgtgagctgggaatctgagtgtgtgtgtgtgtgtgtgtgtgtgtgtgtgtgtgtgtgtgagagagagacagagagagacagagagaggaagagagagagagagcgccatctgtgagcatttagaatcctctcagtccggagcaagcagttctgagagcacaggtgtgtgtgtaaagtgtggatttgtctgtgtctgtgtgtctgttgtgggaggggaggcaggagggggctgtttcttatccttggagacctctgtggggaggtgacaagggaggtgggtgctgggggctggagagagaggagaccttgattatctcggtccttagagatgcagggaagggaaatgtaaggtgtgtgtggttggggtgaaggtttaggggaggactgctgaggggtaaggcaggtttgggataatgtgaggaggccagttccagactctccctggcatacacccttcgtgtaatctctgaattaaaag

SEQ ID NO: 11138 - DNA, 923 bp, Artificial sequence
  DNA replication origin
cagcctccccgtccgggagggaggtagggggggtcagcccccctgcccggccagccgccccgtccgggaggtgaggggtgcctctgcccggccgcccctactgggaagtgaggagcccctctgcccggccagccgccccgtctgggagggaggtgggggggtcagccccccgcccggccagccgccccgtccgggagggaggtgggggggggtcagcccccccgcccggccagccgccccgtccgggaggtgaggggcacctctgcccggccgcccctactaggaagtgaggagcccctctgcccggccagccgccccgtccgggagggaggtgggggggtcagccccccgcccggccagccgccccgtccgggagggaggtgggggggggtcagcccccctgcccggccagccgccccgtccgggaggtgaggggcgcctctgcccggccgcccctgctgggaggtgaggagcccctctgcccggacaccaccccgtctgggaggtgtgcccaacagctcattgagaacgggccaggatgacagtggcggctttgtggaatagaaaggcgggaaaggtggggaaaagattgagaaatcggatggttgccgtgtctgtgtagaaagaagtagacatgggagacttttcattttgttctgcgctaagaaaaattcctctgccttgggatccttacccccaaccctgtgctctctgaaacatgtgctgtgtccactcagggttaaatggattaagggcggtgcaagatgtgctttgttaaacagatgcttgaaggcagtatgctcgttaagagtcatcaccactccctaatctcaagtaatcagggacacaaacactgcggaaggccgcagggtcctctgcctaggaaaaccagagacctttgttcacttgtttatctgctgacc

SEQ ID NO: 11139 - DNA, 1145 bp, Artificial sequence
  DNA replication origin
ccacctccctcccggacggggcggctggccgggcagaggggctcctcacttcccagtaggggcggccaggcagaggtgcccctcacctcccggacggggcggctggccgggcggggggctgacccccccacctccctcccagacggggcggctggccgggcagaggggctcctcacttcccagtaggggcggccgggcagaggcacccctcacctcccggacggggcggctggccgggcaggggggctgaccccccctacctccctcccagacggggcggctggccgggcggggggctgacccccccacctccctcccggacggggcggctggccgggcggggggctggcccccccacctccctctcggatggggcggctggccgggcgggggggctgacccccccatctccctcccggacggggtggctgccgggcggagacgctcctcacttcccagatggggtggctgccgggcggagaggctcctcacttctcagacggggcagctgccgggcggaggggctcctcacttctcagactgggtggttgccaggcagagggtctcctcacttctcagacggggcggccgggcagagacgctcctcacctcccagacggggtctcggccgggctgaggcgctcctcacatcccagatggggcggcggggcagaggcgctccccacatctcagacgatgggcggccaggcagagacgctcctcacttcccagacggggtggcggccgggcagaggctgcaatctcggcactttgggaggccaaggcaggcggctgggaggtgtaggttgtagtgagccgagatcacaccactgcactccagcctgggcaccattgagcactgagtgaacgagactccgtctgcaatcccggcacctcgggaggccgaggttggcggatcactcgcggttaggggctggagaccggcccggccaacacagcgaaaccccgtctccaccaaaaccagtcaggcgtggcggcgcgtgcctgcaatcgcaggcatttggcagactgaggcaggagaatcaggcagggcggttgcagtgagccgagatggcagcagtacagtccagcttcggctccgcatgagagggagaccgtggagaggtagaggtaggggtaggagt

SEQ ID NO: 11140 - DNA, 1015 bp, Artificial sequence
  DNA replication origin
taacgcctacttccaaaagtggcctgcccagactattttggtagcaagcgtggaaatcagatctgagaatctcgggagcagccctggtgcccaattttctccatcacgcacacccttctcgcctctccctgcctcctgcctttccacttgcaccagttttcccaccccagcctcagggcggggctgcctcgtcacttgtctcggggcagatctgccctacacacgttagcgccgcgcgcaaagcagccccgcagcacccaggcgcctcctggcggcgccgcgaaggggcggggctgtcggctgcgcgttgtgcgctgtcccaggttggaaaccagtgccccaggcggcgaggagagcggtgccttgcagggatgctgcgggcgggagcaccaaccggggacttaccccgggcgggagaagtccacaccggggtaatgggtctgggcttgagggttggcagaggggtggaggagatgcagcggccaggggaccctggaagcgcgcgcggagaagtgaatgcagagaccaacgggagcgcagggaggtcgcctgtagcagccagcgcttgcaacccgcaatgagcatagagtatttcttttctgaggggggtcgtctagagtgtccgtgaagggaacaggcacgcgaggctggtggaaaaagcgggtgctttgactcttagctggaagcgtcaacgggaagctactctaaagcgctttcgctttcactctggtcccggacagtgggggctggttaaatcaagaaagggggttggggatggtgcaaagagatgaggaaatggtgccctgggtgaagtagaacagcacttgggagaaggaaatataggcacttattgagaaggaccaactcatcacacagacttttgataaacttgccactgggcaactcttagcccaagcactgataatgggcgttctgtgttaactagtgatgcccttccctagcttgacccaggaaggcctctccttggcccagatgctgccttactcccttccct

SEQ ID NO: 11141 - DNA, 976 bp, Artificial sequence
  DNA replication origin
agatcctttcactctcttgtaagggggcggggacggccccagagatgctctggagatcctgactctgggctctggttgattcacagagtctgcacccttatttagataaccaagttaggaggaagacttaagagtaagttggggggagggggcgaaactgagctcccaaaatggctcctgcccctcctcggaggcggacggccggggggaggggaggaggggaggagggggagggctagtctgagccgcagccgccgcctcctccgctcgccctcctccctggcgctgaccgatggaccagccgctccgtggggaggactccggaccctggtgggggggcgggggggttctttcgcccccgtggcggagggcccctgagaggcggatacgggtgtgcctttgggggtgatgtggcgtgtggggggaaaggtccgagctcgcctggagggggagggtttttcccttaagtcatccctcccaggacttgctttttctgctctgagccggacgccggaatggagtttgaggaagaggtgaggtgtgttgcattgtatagggtagatggatgcgtttggagattttaatcccacttttagggttgccgaggatttttcgaacgagcagaaatgtattggtaactgtaggtgtgagtggggagggattagaaaggtgcttggacgtgcaaatttgggagacgtattttagcttttgtggtctttgggactaaacagtagtaaataatgttttgctcgtctttccatcgtttggcttgagggagggagtggagtattataagactctggcaacactgttttagactgtggggcatgggaacgttagatcccctcatcgccgttctgaagcccgtagctgttcgccatagaggagcaggccgcggcttctaagatggcgtctttttcctcgtttcagattcttcgctgctgctgccttaccgccgagaaccaccacccgccag

SEQ ID NO: 11142 - DNA, 1007 bp, Artificial sequence
  DNA replication origin
cctccgcccagcagccaccctgtctgggaattgaggagcgtctccgcccggcagtcacctcctccgggagggaggtgggggggtcagccccccgcccggccagccgccccgtccggcaggtgaggggcgcctctgcccggccgcccctactgggaagtgaggagcccctctgcccggccagccgccccatccgggagggaggtgggggagtcagtcccccgcccggccagccgccccatccgggagggaggtgggggggtcagccccccgcccggccagccaccccatccgggaagtgaggggcgcctctgcccggccgcccctactgggaagtgaagagcccctctgcccagccagccgccccgtccgggagggaggtggggggtcagccccctgccccgccagccgccccgtccgggagggaggtgggggggtcagccccccgcccggccagccaccccatccgggaagtgaggggcgcctctgcccggccgcgcctactgggaagtgaggagcccctctgccccgccaccaccccgtctgggaggtgtacccaacagctcattgagaacgggccgtgatgacaatggcggttttgtagaatagaaacgggggaaaggtggggaaaagattgagaaatcggatggttgccgtgtctgtgtagaaagaggtagacatgggagacttttcattttgttctgtactaagaaaaattcttctgccttgggatcctgttgatcggtgaccttacccccaaccctgtgctctctgaaacatgtgctgtatccactcagggttgaatggattaagggtggtgcaagatgtgctttgttaaacagatgcttgaaggcagcatgctccttaagagtcatcaccactccctaatctcaagtacccagggacacaaacactgcggaaggccgcagggtcctctgcctaggaaaaccagagacctttgttcacttgtttatctgctgaccttccctccactattgtcctgtgaccct

SEQ ID NO: 11143 - DNA, 1260 bp, Artificial sequence
  DNA replication origin
ggctcctcacttcccagtaggcgcggccgggcagaggcgcccctcacttcccggatggggtggctggccgggcggggggctgacccccccacctccctcccggacggggcggctggcggggcagggggctgaccccccacctccctcccggacggggcggctggctgggcagaggggctcttcacttcccagtaggggcggccgggcagaggcgcccctcacttcccggatggggtggctggccgggcggggggctgacccccccacctccctcccggatggggcggctggccgggcgggggactgactcccccacctccctcccggatggggcggctggccgggcagaggggctcctcacttcccagtaggggcggccgggcagaggcgcccctcacctgccggacggggcggctggccgggcggggggctgacccccccacctccctcccggaggaggtgactgccgggcggagacgctcctcaattcccagacagggtggctgctgggcggaggggttcctcacttctcagacggggcggttgccaggcagagggtctcctcacttctcagacggggcggccgggcagagacgctcctcacatcccggacggggcggcagggcagaggtgctccccacatctcagacgatgggcggccaggcagagacgctcctcacttcccagatgtgatggcggccgggaagaggcgctcctcacttcctagatgggatggcggccgggcagagacgctcctcactttccagactgggcagccaggcagaggggctcctcacatcccagacgatgggcggccaggcggagacgctcttcacttcccagacggggtggcggccgggcagaggctgcagtctcggcactttgggaggccaaggcaggctgctgggaggtggaggttgtagcgagccgagatcacgccactgcactccagcctgggcaccattgagcactgagtgaacgagactctgtctgcaatcccggcacctcgggaggccgaggctggcggatcactctcggttaggagctggagaccagcccagccaatacagcgaatccccatctccaccaaaaaaatacgaaaaccagtcaggtgtggcggcgcgcgcctgcaatcgcaggcactcggcaagctgaggcaggagaatcaggcagggaggttgcagtgagccgtgatggcagcagtatcgtccagcttcggctcggcatcagagggagactgtggaaagagagggagaggga

SEQ ID NO: 11144 - DNA, 1356 bp, Artificial sequence
  DNA replication origin
tagatgagagtggcgcctccgctcatgtccgccccctccccgcagagaattaccttttccagggacggcaggaatgctacgcgtttaatgggacacagcgcttcctggagagatacatctacaaccgggaggagttcgcgcgcttcgacagcgacgtgggggagttccgggcggtgacggagctggggcggcctgctgcggagtactggaacagccagaaggacatcctggaggagaagcgggcagtgccggacaggatgtgcagacacaactacgagctgggcgggcccatgaccctgcagcgccgaggtgagtgagggctttgggccggcggtcccagggcagccccgcgggcccgtgcccagggcgcaggagcagccgggttggcctaagggaccttagtgccgggcggaaaggggactttgggttggggattcatggggggagcccatctggagcttgtcaggggagcgagcgcggggacctggactgggctgagcatggagtgaggaggacgagagcagagagacccccgggacttcatcaggcctggcagctgactgcatgtggggtgaaaaaaggaagccacaggacagcgcacaagggtatggtgtggagatggaggtggagatggcacagcaggccacacagagaagaaacctacagggaggtagctgggtttgaggtgcttgaggggcagatgggtggtctgatgggcaggtagacagaagggtctgcagccggggaggagactgagatacatgagaccatccagggagaggggacccagggggaagagcaaaggaccggatcctgggaactggacagttgtgatttggccaagacagaaaagcctgtgaaagagaccaaaaaaacccaagtgcagtgtgaggagaggcccgcagagaagagtcttggaagctgaggggaggtgacctcagcagcacagtggacagcggtgccagtgacttgggaaggtcagaaaacagaagatggaaagtgggtttggaaaccagggagacctggggagagcaggttggccgcagcggcaggagctggaatgggagggggtgcatgaggctgagtgtggcgcatcctcctcggggctgagatggattttacttgtcttgggttccccacggctgtcacagggcagtgtctcagttcattcgtctttttccttcaggaagtctgggtgtaaagggatggagagaggtgaggtgtgtgcagtaagaggatttctcaaggatgggacaggaaggccttggagctttggcttcctcctgtgaacttgtggggtggggagcctggtgcaccaacctgagggacttgagggagtagtatcaggatgtggga

SEQ ID NO: 11145 - DNA, 1180 bp, Artificial sequence
  DNA replication origin
gaagatttgaggaaatagctaatattgaggaggggggtgttgttgggagtggcaccacccccatctctccctgctcttcacagagaattccgtctaccaggaacggcaggaatgctatgcgttcaatgggactcagcgcgttgtggacgggctcatctacaaccgggaggaatacgtgcattttgacagcgcagtgggggagttcctagcagtgatggagctggggcggcccataggcgagtacttcaatagccagaaggactttatggaacggaagcgagccgaggtggacaaggtgtgcagacacaagtacgagctgatggagccactcatccggcagcgccgaggtgagggctgtgaaccagggctcctggggcagccgtgggggccgggcccagggagtaggggcagccgggccggcctaagggaccttagtgccaggagggaaggggactttgagctggggattgatgggaggagcccaaccggagcttgtcaggagggtgagcacggagattgggctgagcatggagtgaggaggatggagggagagagacccctgggacttcatcaggcctggcagctgactgcatgtggggtgaggggaaacgaggccacaggacatcgtgcaggggtgcggtgtggagatgaaggtggagatggcacagcaggccacgcagagaagaaacctgcagggagatggccgggtttgaggtgcttgaggggccagatgggtggtctgatgggcaggtgagagaagagtttgcagcgggggaggggcctggcctacatgagaccacccagggagaggggacccatcgggaggagcataggactggatcctgggaactggacattgtgattttgtaacggctccattgtctggggtatataccctggttctttgtcatggccgagaaaattcacgacacagacacacgtgaggagtgggtttgggagtggaaagtttaatagaaaagaaaagagagaaaaaatccttcctcatgctgagaaagtgggttgcccaaaagagggtctgcggtttgtggtggaatgcagtcggttttgtacagaggttgaggaggcggtgattgatttacacagcgctcagggaattggtttgaccagttgtgtcatttacatagcccacgaaaagactgactctcccaccctagtcttt

SEQ ID NO: 11146 - DNA, 869 bp, Artificial sequence
  DNA replication origin
gaggtttttgactctaatctctttgcagggggaaccaggagagtcaggatctccagggatccagggcgagccaggtgtcaaggtgagtgacagctccaaggccttactccccagtccccgtcacccgcctcaaccctgcctccacttttcctgtgacctccttgagctggaactcctctgcagcaagagtctctgctccctgccatcctctatgaggcctgatccctggtctgagtgagcccttcttcccctttcttgaagggaaggggactagggaactccccttgtaggcttgactttctgtgtatgtcccattgtcactgaggggagtaggggatggctgaaggtgtctcggaagcagaggctgcatccctgatcttcaagattccctgggccatctgtgtcctccgcttgttctgcagggtccacgcggggaacgtggagagaaaggagagtcggggcagccaggagagccagggccaccagggcctaaaggccccacaggcgatgatggccccaaagggaaccctgtgagtttggggcagtgggggctgagtcctctcaggccctgtgaatgacagacctgggaatatgggtgtgtgtgagggaggatcttggagtgtggggagcccgggagtttgggggatgctctgggaatggggcatccagagggatgcctggggtctaggatccggagagaaagtgagagatgccctgcagttaataccttgaggaattagacaacacgcagtgcacgtggtagggaaaggggtgcaggagacctcttcctggggggtactggtgggcactgcctctagagaggcagtggcgtgtgcctgtgggcgtctgtgctgggtgggcttagggag

SEQ ID NO: 11147 - DNA, 1300 bp, Artificial sequence
  DNA replication origin
agcacggggtgggaaggaaggagaaaggttagcagaagggaggcaaagcagcacctgtcccccgagggcagggtctgtctgtgctgggggatgggggaaatctcagatcttgcagcccctttggagggggatagtttggggagagtgaacctccaaggtcatagaggtttgggggcagagatctggatgccccggctctacctgccggtaactgctgcctctggtcctggggcggggccaggcagtgggggaagctgccctccgagctgggcatcgggaaaggggaggctgctcccatgctgggtcaaagcctgcagttggagagggcctccggcctggtgagggggacgcctgccaggtcattgacctcttggcaggtggggtaggctttcagggaggggtccgatgccccctaggggaagggggaggcctgtggtgggggctcccagggcgctgcagcagagagacagggagggggcaggaactaagtaaatccccataatctaaacacactgtgcctctccccacggcatgggggaggggaggaaggtgtcctaggagatgattgctgggggtgctgggagaaagggaagaaatgaaggggtcccttgagtttacctgataatcaggggttgtccccgtagtcatcacatcataataggggggctcgtagtcatagtagagagactcagtgggctgggattggggggtgggcatagacaggaaggggatggggtaattggaaggtgtggggtgaagggcgggagagggagatataaagatggtgtgggagttgggaaacgggggaggtgtggagttgggaaacagagagttgaagatgaaaggagaggttgagggtcaggagggaggtggggagaggtggaacagagggaaggggttccacatgtggggcagaagcagacatgattaagagattgaccctctgatctttagaccactgaccccagagcctatctgtattctaactctccagaccccatccaacccaggctcccttcccttcccttcccttcccttccccctactacctccccttttcctgcccctccaggtaggtgggggccagagactgggttccccactcccacacttctgcagacccacccctcctttgatattccctccatccctactccttcccattcctcctccttggtctcaccatcccgactgctttctcctggcttcagtcccctctcctacctgcctccccagctctcacccctctcccactgtctcccaatctcttaattcaaagaaggaagggaaaacccaggga

SEQ ID NO: 11148 - DNA, 655 bp, Artificial sequence
  DNA replication origin
gtgaatggagggatggatgaatggatagatgagtggatgggtggctgggggcttacatgcattaatgaatgggagcattgataaatagtgaatgaataaatgtacgtatgggagggtggactggtgggcagatgaacaggggttacagagtagatggaagcaaatgggtgaataggtagatgggtgaacttatgtgggtgaatgactggtcggatgggaagtaagtgggtcaggagatgggtgagtgagtatattgaaggagggagtggttgagttggtggaaggataatggatagatggtggctgaatggatgcatgcatccttgtgtgcatgggtagatggggagggtgggtgggtgagtgaatagctggatggaggagttgaagaggatagatgggtggaagcatagatgggtggtttgaaggggagagtggttaagcagggggaggattgacaggtgggtggatataagccttcatgcatgactaggtgggcgtgtgatgcatagatgagtaaatagatgggggagtgggtggtggatgtgtgcataggttggctgaggagtgagtgaattgatgggtgggtgaggagagagaggggttgaaaggatggatggatgagggaactgatgaagactgaaggacagagtaagtg

SEQ ID NO: 11149 - DNA, 1048 bp, Artificial sequence
  DNA replication origin
gagggtggggtttcccttcggtggctgtgggcgggcggctggaggcgggggccgggccgggggcgggggcgaggtgggggctctgggcgccagggtggccggggacacacagaagcggcagccaccgaggagggagcagtgccgggagccccgacggcgccttgctgcatggagctgggccgctgacagctgtcgctgcccgcagcctctgacctccctgggaccccggcgtctgaggctcatagtctgctccctgtcttctgtcagcctcagggcatccagcgtctcaggccgacctgggtccctgggacccggcgtttcggcttctcagccatggagcggtgcagccgctgccatcgcctcctcctcctcctacctctggtgctggggctgagcgcggccccaggctgggcaggtaagaggagtcctgatgcctgggtcctcggagtcaggctggagctctgagtgtctctgggaaggggccagctgatgcctggggcagcagcttctgagtctaacaaggagatttggggcttcaaggctacaggctggagggcaggacacctgtgttccttggcatcagggtaggaatctctttgtccttgaagtgactgggggagggcagatagggctgaaaggtggaggaccactttagagaccctgaatggggatggatgcttgtcttgagtccttgggaagagctgaagatggccagggccagcccggtccagtcattgctggtgtggggatggtagacgccaatgttgatgggtgaggcgtgtgtgtcttatggcctttctgtcgatatctctgggataaggggtgagcacctgtgattcagagcagagcccagtaagcccagaaagaaaggaagccttgactacctgtctcattggcctcctggacagggtccccctccccctccctgtgccctcgatgctgccacgcagctggctctggggagcactggggctggctgccaacaggacggccctccggacaggccaggatcaggtgtctgaggccagagccaactctttgcattcct

SEQ ID NO: 11150 - DNA, 770 bp, Artificial sequence
  DNA replication origin
tgaagccccaaatctccttgttagactcagaagctgctgccccaggcatcagctggccccttcccagagacactcagagctccagcctgactccgaggacccaggcatcaggactcctcttacctgcccagcctggggccgcgctcagccccagcaccagaggtaggaggaggaggaggcgatggcagcggctgcaccgctccatggctgagaagccgaaacgccgggtcccagggacccaggtcggcctgagacgctggatgccctgaggctgacagaagacagggagcagactatgagcctcagacgccggggtcccagggaggtcagaggctgcgggcagcgacagctgtcagcggcccagctccatgcagcaaggcgccgtcggggctcccggcactgctccctcctcggtggctgccgcttctgtgtgtccccggccaccctggcgcccagagcccccacctcgcccccgcccccggcccggcccccgcctccagccgcccgcccacagccaccgaagggaaaccccaccctcagtctccacctggggagggaggcgggaaccctccctctatcgctcgctctctcctgccccttgtaggtctcaacggcctgtaccctaagattctcttttcgggaaccccaatatcttccctagccccttccttttctaggacccaaacgtccagtcacacacactccctcccattccctccctcttgggggcccagagccccctttcagcagaggcctgggcgggatttagg

SEQ ID NO: 11151 - DNA, 822 bp, Artificial sequence
  DNA replication origin
ggtgctggggctgcatgatttttgccctgcgtcccttctctttggggctcctttcccctctcatacataaaatcgctttcaaattaaaatcgctgttttctggactgaggtgactgtatgaggatgggcagcgccgtttcgggcttggggggggtatccggttgggagctccggacgcgatccctggacgccgccgccgaggttccgtggggcccaagaggtgcacgcagggtgggggacacaaggcaagctttgtcggggagggggggagagggtgtgccaggctgggggcggggccggccggaggaggaagggggggcggtggattctcaaaggcgccttgttcgctcgtgccctctccgcgccagcgggcggcggcgcctcggctcgctgcggccttccctccgggcgcgctgcgggctccgggcagacccggcgccgtgcccgctcgtgggggcgcactgggcgccgagcgctgcgtgcttctcaggcgttgcccgcccggaggcggcccacgtccccgagtgaccccatttccctggacccttccaaccagagtcgactgctcgctcatcttaccactgctccccctctacctcggctctgggactccctaaccgcgtcccccatttgcatctccttggacctgactatcctgtgtttgtcggtgggtcccagtctctggcctcttgctctccgtagaacaccttcccccacatcccccgccccagttcgtcgctatctatagccttgtctataaatacccccgccccggcccggctctgtaattacacggggcggggtgagggaagtaattatgga

SEQ ID NO: 11152 - DNA, 1194 bp, Artificial sequence
  DNA replication origin
tcttcaagctcattggtgacacccccatcgacaccttcctcatggagatgcttgaggctccccatcaactggcctgagctcagacccagacgtggtgcttctcacactggaggagcacacatccaagagggactccaagccctggggcagggtggggggccatgttcccagaaccttgatggggtgagaagtacagggcagaaccaagaacataaaccctccaagggatctgcttgatatcccaagttggaagggaccccagatacctgtgaggactggttgtctctcttcggtggccttgagtctctgaatttgtcgggttctcccatgatttggggtgatttctcaccctctgtccttcccccagcacaaagcactggccttgcctccaggaccttgcttccttctcatcttgcctcattttgcttcccatctgaagagtggaaatggggaactcccccagaggtggatactggggggcaggcctcccaagctgatggacatgagagtagggccctgacaggccttcctcctctcaaacctggcagatgggggcctctctggaagagggaggggccctgtcactgtccagagtctctttttacacttcacctccttctgcagtcagactgaaatataaaaaaggtggtggtggtggtgaaggggctggtggagatgtaggaaccgatctgctatttttaatttcctgtgaggatagagacttgcagttagactcaaagaagtactgtactttcccaggttgactaagaaatgccagtggtggaggtgggtgtttgggaaaggcagggccctgaaatggcctgtccctagggctctccaagcactagccttcccagcttcccgccgccccccctatctcttcctgtctaacttggggaaggggcctgggctgtgaggacagggcccccacaggggatggtttcacgagtgtagtcccggaggccttccctttacagctctcctccagccctgggcacatagcataggctggggacacaggatcctggcctgagaattgaggggaggtggccagcccgcagaggtggggtgctggggctgcatgatttttgccctgcgtcccttctctttggggctcctttcccctctcatacataaaatcgctttcaaattaaaatcgctgttttctggactgaggtgactgtatgaggatgg

SEQ ID NO: 11153 - DNA, 1062 bp, Artificial sequence
  DNA replication origin
acagagcaagactccatctcaaaaaaaaaaaaaaaaaaaaacacacacacacacacaaaaacaaagaatattagagttcttttaggggaggaagcatgcactgaaagatcagtcacctcaggaaaggcaaggggtctcataaagaccacaggcctgacaaggttagaggattggaaggtcaatgggccatggggaagttcacacaaggatctggggttacaaggaaaacaagaaaatgaaagtggccaggcagtaagttggtcacaacctctcacctgggggctgctgacaggcccggagaatcctgggggagctggagggggcagaccaggggaccccatggaagaactgatgactggaaagggagagcccagtgggggtggtggcatcgggggtgggggtggggccccagagcctccaagggatggagctgttgaagggggtaggggtggcccaggaggagaagggggagggactccctggggaaggggatttggggaggagctgtctgggcttcgggagtctgagggaggggtatgtacaggcacacagacacacaagagacagaagagacaaaaaaagaaaatgagtcttcaaacatccaactagagactttaattctctaataccccaccgtgccggacccagcccactccacccatccccaagttcagagacaccctgctgtcaaacaacagtgtaactccggctggtccgatggtagtgggttatcagaacttattaacatttgtgtcactaaaattggtatacaacctcccactgctatatttgactggctaaaaaaacccaaaaacagcgtaactcctcattgtggtgagaggagggagttgacaaggagaggaggatagttcaggtgaggaaaattttccaaccaatccatttgaatgaataccaggtcatcccaaagccacacctgtctcgtgggtggggcagcacgtggggtagaccatcgagcccctctattcccagcgtaaagccaggtagccagagcgtgcaagggaaagagacaggcaggagagacccctcctaagacgcaggatc

SEQ ID NO: 11154 - DNA, 713 bp, Artificial sequence
  DNA replication origin
aggaatcgtgcccttcccaggcccgcgacctccggtgcccaaggcctcaagcggtcacagctaggagggcggaagctccccttccccgccccgccccgggggggagggtgctaaggccctcgggagggaggggacgcgtgtttacaaacaagggggcgggagcgcaaggaaaagagcaccgggggagggtgtgggggaggggtcgcagataaagcggtcactggctcgcctgcccttctgctggggcactcaccccgcccgctgtcgcccatcccgtcccgtccagcctcccctggctccggctccggggtttgttgttctccgcctgccaccgccgccgccgccgccgctgcgggatccagccagggccgtcgccgccgccaccgggacgcgaccccacaatgcatttcttttcgcacccccaccggcccacactgccctgcggcatgccgctgagggaggaagggcgggcgagcggcccaagacatgatccctggctgagagtagggataccgaagaggtcccagggattcccaaggattgatcggaggattagctgagcacgaggaagcccctgagagaaagactctggcctggattgggtcgaattaagcccgtcgctctgctcagtaccaaaatgacagcgccaatgtggcagccatctttgtacagacgggaagtctcggcgcgagttcccgccccctcgtctagtt

SEQ ID NO: 11155 - DNA, 1049 bp, Artificial sequence
  DNA replication origin
catgccgctgagggaggaagggcgggcgagcggcccaagacatgatccctggctgagagtagggataccgaagaggtcccagggattcccaaggattgatcggaggattagctgagcacgaggaagcccctgagagaaagactctggcctggattgggtcgaattaagcccgtcgctctgctcagtaccaaaatgacagcgccaatgtggcagccatctttgtacagacgggaagtctcggcgcgagttcccgccccctcgtctagttggaaaccgaggaggcggtctcctccggcctgttagcccgcctcgcccaccctcccctcaaatcacctccacactcgcgcatgcgtgtcagtgcaggatggattcgtcgctaccggagtgccgccatattggtaaaggcattagggcgaaggtggaacggaacttcctgttctcgcgggatctaaaggcgggactgccacgtccaagcaaaccgggaaaggagaggatcccggagccggtgagaattctctgttttttctctaccatcctttccaggccttttcctcacctaatgagtcgtagagacgagggcccagagagtctgtaaagtggctggtgaaagattagtgtcccagggccctacatccgggaggtggttcgggataaagagaactagtcttgggaacaatgtaggtgggaacttaagggaatgggagagcggcccatagaggtggacggagggcgcgattggagtaaagcggaccctgtgtaggtatagagttgagtcaagtggagtcactgcctctgtccctctggtcagcgtgatggccagaggcctgggggccccccactgggtggccgtgggactgctgacctgggcgaccttggggcttctggtggctggactcgggggtcatgacgacctgcacgacgatctgcaagaggacttccatggccacagccacaggcactcacatgaagatttccaccatggccacagccatgcccatggccatggccacactcacgagagcatctggcatggacatacccacgatcac

SEQ ID NO: 11156 - DNA, 760 bp, Artificial sequence
  DNA replication origin
ttccctaagtggcgcagaactcccgggacgcaggatcctcacgcgggacgagcccgtcccgtgggcgggagaaccgcggcgtccacgtcccgtcccacccgcgccgcgaatggtgggtgacgtctccgccggcggggggagcgggtgtagcggaggagcaggcggaagtgacgtagggccccagcgcccgggccatggcggcggcggtggcgggagctgctgtctgagcagcggttgcggaccgagcgaacttggcccaggagcccgggcctagggagaggcgcggcggcggcgggagcgcgaacggctggagctgggtgaggggcagtgccggcgcgggggcgggagcgggggcggagaggggcgcttctggaggggcggggtctacgcgaggggcggcccccctgacgccctcctccccttccccccacccccagccttcttcgccttctcctcggctgtggagccctggtggggggtctgcgcccggtcaccatgacgacgccggcgaatgcccagaatgccagcaaaacgtgggaactgagtctgtatgagctgcaccggaccccgcaggtgacaggcattctccctttcaggcttaccccctcccccaaacccttatatccacagaccgcatcacacagcttcttttccgtaatttgctctattctgccttgcctggccctacctttgaatcaccttaatctttccaaagcactttcgcatttagctcatttaatcctcaaaacagccctgccag

SEQ ID NO: 11157 - DNA, 2009 bp, Artificial sequence
  DNA replication origin
tggcggcgaggccgcggcgacaaggtagccacccccgcagcatgcctcgaccgcggtccgcagctgcaccgcctctccccgccccccagggtgcgctggtcccggtcgcgcgctcagacctccgcatcccgggcgtggtcggttaagtccccggccgtgacccaggcccggggagctagtctccgcccttcgctcttacggatcccctcggagtacgccgcaccatgcagctcaggctcttccggcgcctccttctcgccgctttgctgctggtgatcgtctggaccctcttcgggccttcggggttgggggaggagctgctgagcctctcactagcctccctgctcccagcccccgcctcaccggggccgcccctggccctgccccgcctcttgatccccaaccaggaagcttgcagtggtcccggggcccctcccttcctgctcatcctggtgtgcacggctccggagaacctgaaccagagaaacgccattcgggcttcgtggggcgggctgcgcgaggcccgggggctcagggtacagacgctattcttgctgggagagccgaacgcacagcaccccgtgtggggttcccaggggagtgacctggcctcggagtcagcagcccagggggatatcttgcaggccgccttccaggactcctaccgcaacctcaccctaaagaccctcagcgggctgaactgggctgagaaacactgccccatggcccgatacgtcctcaagacggacgatgatgtgtatgtcaacgtccctgaactggtatcagagctggtcttgcgagggggccgttgggggcaatgggagagaagcacggaaccccagagagaggctgagcaggaaggaggccaggttttgcacagcgaggaagtgcctcttctgtacttgggccgggtgcactggcgcgtgaacccctctcggacaccggggggcaggcaccgcgtatcagaggagcagtggcctcacacctggggcccctttccaccctatgcctcaggcacggggtatgtgctgtcagcgtctgctgtgcagctcattctcaaggtggccagccgggcaccccttctcccattagaggatgtctttgtgggggtaagtgcccgacgaggaggcctcgccccaacacagtgtgtcaagctggctggtgccacccactacccgctagaccggtgctgctatgggaaattcctgctgacgtcccacaggctggacccctggaagatgcaggaagcctggaagctggtgggtggctctgacggggaaaggactgcgcccttttgctcctggttccagggagtcctgggcatcctgcggtgtcgagcaatagcctggcttcagagctgagagtgcctggggccacaggaaaggcaggaacaggaccttctctctcccaggcccaacgcaggggccctcactggctgcagctgatctgtttccttataccagatcctcagtctcactaaagacagcgatatgggagacacccaggggcctggcccgccagcccaaaagatggtcatcgggaagagaaaaagaaaaaaatgctgcagttgttctctcaagctagggcagaagaggggtgtcaagctcctcaataaacttgtctccacttcttcgagtgcagtgtggtcttcaccaggacccccagaacaccacaaacctggagagcccagaggctgccagaccctgctgcatgggaaggacatctccagggacatgggagagaggacagcctctctgaggaggaaggcccctaaaaggcaaagctaaggccacagcagccacaaggtatggggtgggggtagaggcaggacactgacccctccgatcctagaatggcctcatgcttggcaagggggaggggaacaggtccacaagatgatccagacacattatccaaaaaatcgctttcctctttaataccaacccaccccaggagacagctgtccacccccagttggggaaggggccacactgcccccacctccttgt

SEQ ID NO: 11158 - DNA, 710 bp, Artificial sequence
  DNA replication origin
ctacgagtgcggagtctgcgccaagaagttcatgtggcgagacagcttcatgcgccaccgaggacactgtgagcgccggcaccgcctgggcggggtcggggccgtacctgggcctgggactcccacggggccatccttgccgtccaagagagagtctcccggagtgggcgggggcagcggcgacgaagcgagtgcggccacgcccccgtccagcagacgtgtctggtccccacccagagtccacaaggtggagatgggcttcggtggaggtggaggagcaaactgaaggggcaggctactggggtggggtagctttcgggaaagggaataaggagcacgatgcaagggcgctgtggcccccgggtgatctcccaccacacttactgtcttcctttatctctgtggacttgtatatattctggaaggggaaccacagtttcaccatcgcccgcccattctactactcaacccctcccccccaaggtatttccagaactaaacccttcctttccctctgatgggtacactgaagcccctgctccacagagtagattgcacatggagggagggagagggggcgtgttgaacatcctgcagtcacagggtcaggggtcaggtggttgtagtctgtgcctgaagtctgtgtttgtgttgtcgtggagacaaggcctttgagccccacccttgtcctagaacctaccccctctcaa

SEQ ID NO: 11159 - DNA, 1292 bp, Artificial sequence
  DNA replication origin
tccatgatcaggtcctactcaaaggcatgacctccatctcgctgcccagtgtcatggacccaggcgcctttgagactgtcctagcctccgcttacactggccgcctcagcatggctgctgctgacattgtcaacttccttacagtggggtctgtgctccaaatgtggcacattgtggacaagtgcactgaactactccgagaaggccgggcctcagctaccaccaccatcactactgctgcagccacctctgtcactgtccctggtgctggggtgccatccgggagtgggggcactgtggcccctgctaccatgggctctgcgcgctcccatgcctccagccgggccagtgagaatcaatctcccagcagcagcaactacttcagccccagggagtccactgatttctcatcttcctcccaagaggcatttgcagcttctgcagtgggcagtggggagcgtcgaggaggtggccctgtattcccagcccctgtcgttggcagtggaggggccacatctggaaagctgctgctggaggcagatgagctgtgcgatgatggtggggatgggaggggggcagtggttcctggggctgggctccggagacccacctacacaccccctagcatcatgccacagaaacactgggtatacgtgaagcgaggtggtaattgcccagcgccaacacccctggttccccaagacccagatctggaggaggaagaggaggaggaagatctggtgttgacctgtgaggatgatgaagatgaagaactagggggtagctccagggttccagtggggggagggcctgaggctaccctcagcataagtgatgtccgtaccctgagtgagcccccagacaagggggaggagcaggtcaacttctgtgagtcctccaatgactttggcccatatgagggtgggggtcctgtggcaggtcttgatgactcaggggggccaactccctcttcctatgccccctcccaccctcctcgaccgctccttcccttggacatgcagggcaaccagatcctggtcttcccgtcgtcgtcttcatcctcatcctcacaggctcctggccaaccaccagggaaccaagcagaacacggggcagtgaccgtggggggcacgtcggtggggagcctgggtgtgccgggtagcgttggtggggtccctggagggactggcagtggggacgggaataagatctttctgtgccattgtgggaaggccttctcccacaagagcatgcgggaccggcacgtgaacatgcacctcaatctgcggccg

SEQ ID NO: 11160 - DNA, 940 bp, Artificial sequence
  DNA replication origin
gtcattggaggactcacagaagttgacctgctcctcccccttgtctgggggctcactcagggtacggacatcacttatgctgagggtagcctcaggccctccccccactggaaccctggagctaccccctagttcttcatcttcatcatcctcacaggtcaacaccagatcttcctcctcctcttcctcctccagatctgggtcttggggaaccaggggtgttggcgctgggcaattaccacctcgcttcacgtatacccagtgtttctgtggcatgatgctagggggtgtgtaggtgggtctccggagcccagccccaggaaccactgcccccctcccatccccaccatcatcgcacagctcatctgcctccagcagcagctttccagatgtggcccctccactgccaacgacaggggctgggaatacagggccacctcctcgacgctccccactgcccactgcagaagctgcaaatgcctcttgggaggaagatgagaaatcagtggactccctggggctgaagtagttgctgctgctgggagattgattctcactggcccggctggaggcatgggagcgcgcagagcccatggtagcaggggccacagtgcccccactcccggatggcaccccagcaccagggacagtgacagaggtggctgcagcagtagtgatggtggtggtagctgaggcccggccttctcggagtagttcagtgcacttgtccacaatgtgccacatttggagcacagaccccactgtaaggaagttgacaatgtcagcagcagccatgctgaggcggccagtgtaagcggaggctaggacagtctcaaaggcgcctgggtccatgacactgggcagcgagatggaggtcatgcctttgagtaggacctgatcatggaagtaaggggaggaggcagccaggacagcccgatga

SEQ ID NO: 11161 - DNA, 694 bp, Artificial sequence
  DNA replication origin
cagggacagtgacagaggtggctgcagcagtagtgatggtggtggtagctgaggcccggccttctcggagtagttcagtgcacttgtccacaatgtgccacatttggagcacagaccccactgtaaggaagttgacaatgtcagcagcagccatgctgaggcggccagtgtaagcggaggctaggacagtctcaaaggcgcctgggtccatgacactgggcagcgagatggaggtcatgcctttgagtaggacctgatcatggaagtaaggggaggaggcagccaggacagcccgatgagcccggaactcccggccctgcactctgatagatacatcgcagagctggccctgcagacgctgctgattgagggactccaagagggcactggtcacctcagggaaggacacatgtaccactgcagctgctggcaggggtagtgggggcggagccagcgacagcggcaggggaagtgctgccccactgggagacagaggagatggctccatgttgtggagggaggggatacccccccagccacaggaacaaagaaaggaggagggcggccgggggggtctctgggaagaaaaagagaaaagaataatgataacatctcataacgacacagcccgttacaactcaaaaatatgttcacgctcattatctgtgtaactccccacaacagtgaggtaggt

SEQ ID NO: 11162 - DNA, 807 bp, Artificial sequence
  DNA replication origin
agtcctgagctcccagcggaggaggggacctgatcttttaaggtggaatgtggcgatgtttctttaaaggcaaagtggccgagtcggccgagtattgcccagcggcacgggcggggtgcccggctgtgcctttaaaggcggaggggcgggaggcggagcggaggcggagggcggagggagtcggcgcaagatggcggcgggaggggcccaggttgctgctctggccgccgagtgaggggcggggggggcccgggggcgcgcggcccggtaagcggggacgcgcgaggttggggggcgccttccgggtgggagaagaggccgaggtagcgcttggggcggagcgggggggggcggggtccgttgtgggcggaggtagacaaggggcggggtcgaaaggcccgatagtgggcggggcacgggggggtgggcctggaaaggggcggggctagagaagctggggcgaaagggggcgtggtcggcgagagagcttggggggcatagcctgaggggagatggagcaagcgttggttttcagtagcagagctgccctgccccctcccaaaaagtgggtgcaaaacaccaaaaaggtagattttggaatgtcaggctctcaggtaagtcggaaatagggtataattccgaaggaagccactccagcccctaagagcaccttatttctctaacctccaaggaaagggcacaagatttgtcagatacctgtgtttgctggcgctgccacttgctgtgtgaccttggataatctcttaatctttctgagctttagtttcctcatctgtcaaatggggt

SEQ ID NO: 11163 - DNA, 1231 bp, Artificial sequence
  DNA replication origin
ctccggcggttgggccccaggcaggaagtttctgattggcggagtcgtagaagcaccgggtgaaaagagctccactggctgcgcaccggagtccgggcgtagccagtgccgtacggcaaaatggcggcccccagctgctttgggacgcctgggttcggggagacaaactccgacctggaagagaccgctgactatgtgggccgcactggaggtgttcgcggggcgggcctactgtcacctccggccacaggaagcctgtgttccgtacgacaatatggcggcgcttagttgcatgaaggcggaaactctgtgacttccggtccgtagtggggcctgcggtgggagtgggaaggaaggcggagggaaccatgcgaggttctgagaattgcggcgagggtcgcctcgagagacggtttctgaggtgggggccggacggtgcggggatcagaggcgggggcggggatatagagggagaggtattggggagagctgggcgctgagtctgaggggaaagctgtggtaccttcctgtccctgaaagggagtggagcggccgggggctgaactgggggagggggatttggcgggaagcgcatctagcggaccggccggacccacggttgggatctaagaggaatcgcgagagcgtagcgcggtgcggggggacttttgatcagttacgggtcaccgagagaatggggaaaattagggtggggtgaaagggaggggacttgggtaaaatatcttcaacctaaagccccagtttgaggagactcatcggagggtgaaatatggagataattcaaggaggagaaaagagaacggactgttgggagggaacctctttcacctcagagagtctaggagttggggtgatcattcaggatagggtgggtgtggggttgacttgtttgagagcagagggggcaaacacatgaggtggcgcccacaggagtgtgttgtctgtgcaagggggtgtcaggacgatttggggtgcagtgtgggaggaagaatcaacttgccaactctaagaaataggggggaaatgcaacagaaagaccggaaatcgacgtgaggggtggagcagaaggtggcaacttaaggtgtgggggtggtttgccccccccccacaccacttgaagggccccaaaaagcatatagaactaatggttattgaaatcaggtggtgaagacagtgttggtcagggctggatgttactgaaacccaagga

SEQ ID NO: 11164 - DNA, 647 bp, Artificial sequence
  DNA replication origin
gggctgggtcagccgaataagccgtggaaatgggaacctgggggacaggaaagcagggccagatagcttgccaatagcccaactgaaagaaaaggttttacttcccttttaagagacttctgcccttccctgaaactctgcacagctttggaaagcccaattcctaatccaccctgttcggttcccctgcccctccttggaaacgaggctcggtcctccctacgcgctactctccggcggttgggccccaggcaggaagtttctgattggcggagtcgtagaagcaccgggtgaaaagagctccactggctgcgcaccggagtccgggcgtagccagtgccgtacggcaaaatggcggcccccagctgctttgggacgcctgggttcggggagacaaactccgacctggaagagaccgctgactatgtgggccgcactggaggtgttcgcggggcgggcctactgtcacctccggccacaggaagcctgtgttccgtacgacaatatggcggcgcttagttgcatgaaggcggaaactctgtgacttccggtccgtagtggggcctgcggtgggagtgggaaggaaggcggagggaaccatgcgaggttctgagaattgcggcgagggtcgcctcgagagacggttt

SEQ ID NO: 11165 - DNA, 866 bp, Artificial sequence
  DNA replication origin
cccttcctccgacctgagattcgcccttggggcacgagggaatcccccctcccggcagcccgcctccggcctggtcccccgccccatgccacatccgttagctgccccaccccccatggtcactccaagtcccgccccccggccccagttcacagccccgccctccattcacccttctcgatgcccccaccacgccctcctccctcgcgcgccccgccctccccgtgacgagtcgcgccccacccaccgcccttttgcgcacgcgtgtcccctcctgcgcgcggcacctgggaggactgagcccctccttcaccgggcggcggccgtcggcggttggcgcgagggagtcggcgggcgtgcgcgccgcttcccgtggacgtcccgccccgtgcttccagggctggcgcagacgaagggcgcgaggacccaaggcggtgacgccaccgagagccagccaatgggcagcgagcgggcagagccccagccgttcgaacggaaaggcagggaaagggcgggacgggaggaaagagccaacagtttgggagcgcgcgctagccccgcctctggactctggggtccggtccccatttgccgacacccaccaaaggaacgttcttccctggggctggggtggccggcggaagggtgaaagttacctataactagtgaccaaggagggggcgtggatagctagagggcacacctccctgatgtgacggacggggtagggggtattagcagaggggaagatgatccaggccaaggtccagaaccggtgatagcagaggggagaaaagacgaagccctcagcccccgctcccgcctcccacgtaaacgtttggcagagggtacagatcacagctccc

SEQ ID NO: 11166 - DNA, 1045 bp, Artificial sequence
  DNA replication origin
ccccctccggctcctcctttcccccagtcctcccctcccaccaccctcccccccaaccggtccgtccctcccctccctccctcccccccgccgcctcctcctcctgccgctgccgctgctttggctgctgcgtcatacgccccagagccgccgggacggaggggctgggcctggggaccccccggcctccgcctgcacgcccccccacgcccggacgtgccctctccgcgcgggggactcgcctaggtctcctacgtctgcccctgcccggctcccggcggccccagctgtcaccggtaaggaggcggcaggaggcgctggtggggggcagggagccgggggtcggcgcggggcgcgggcgggagagcctcgccgccttggcctcgggtccgggctgggccgacacaagtcccttctcggacttgccgtcctggggagtagagaccgggactgggacacgcccccctcccggggcactcagagaagttgtctaacccgggggcagggagccccgaatttgagggtgacctgacataacctggcaccaggatgattgttcttaatgagacgcgcaggcctggggagacagccgtttctgctctggaaaacatctccagaaaaggtcccaaaacacgtctctgggcaacaggacaccctaattatgatacctctaaactgagtagcctttgcttctacaaccataatttctcctaaaatttcaaggccagtatataatatcccaggagagctctggaagctgggaaactagcaactaggtttggggtcggggggagggctgttagttaccgagaggagagccagtcactagagttggaagaggactcaaaaagctggtgatgggtgcccagtggtttcctatcaaggtgtctcagggatttggagatgggggcacagatacttcattcttgatggcaaaataggcaaagaaaatggggaggctggccgggcccggtggctcacgcctgtaatcccagcactttgggaagctgaggtgggtggatcatgaggtcaggagttcgagacc

SEQ ID NO: 11167 - DNA, 1602 bp, Artificial sequence
  DNA replication origin
gtctctctctggtgtgtttttgagtcaggggtctctctctctctcacaatctgggcctcccggagtaggggtgggggctgcagagtctctccctcctcctcctcctcctgctctcttcgctctcgctcgctcccccgccccccctctctctcggctgccgctgctgccgttggctcttattctcctcctcctcctcctctctcctcctctctgcttctctctgctcctctctcctcctctctcctcctcctcctcctccacctcctcctccttctccccctctttctccccctctttctctcttctttctcccccgtccccccgccccctccccccaggcctgatgagcaggtctcgagcctccatccatcgggggagcatccccgcgatgtcctatgcccccttcagaggtacgtggtggggggagggggagggccatatggggggcaacagggggaggggcagggggcgggggagagtcggggccgagggaagggagcggctgaaatggagggagaggggaggaccgggaaggcaggggtgggagcaaccgggaaggagggattggaggccagagggataggggtagataagggatggaggggccaggaaatgggccttgaaagggggctgaagggaaaatgatgaaggggaaagaaagcgccagaaaggggtgggaaggtagaaggattgggttggggaaaaagctgcagaaataatttgggggtgggagctgagtgatgaggaaaacatcaaggaaatagagggacagagtcttgggagaggggctaggaaggagaaatgaaaacataggggtgaaaagagaagccaagaagatgtggggggataatttggtgggggactcagagtatggtaaggggcggaaaaagagaggaggatggagggagagaaggggccagatggagagagagggaggcagtggggggtggggggatggagggtccagatggagggaagagagaagagagagggaacggtgggggaggggagaccagggcagggggagggccaaattatgtgtgcttgggggggtggcagtacaagtaagatgaaatgatgggagtaggggacaggttaggatcctgccccagactctgaccctcttaaaggctcttgaccagtaaaatgtaacctctggggtcttaatgctgtcttcacttcatcacttttacccccttcccccacccctccaatccttatttccattccccctccctcctctgctgtccatcacctatatctttccccccatatggtgtccgttccttatatgagtcccccttctgtccttcccctatatcagtcccctctctggtgttcattgcctctctcttatctcttttctatgtggtcgctcccttatatctctatcacttctttactagtccgtcttgaccccttctcatagcctccgcattaggtctgcctcctttgctctgacacatgtccagtcgagcccttcaggtgtattcccttgcccctgggcatttaccatcatttctgcctccttttctatctactcctattatttgtctcccagaccattccttgtcaccacaagtctgtgcctacccactttcc

SEQ ID NO: 11168 - DNA, 2508 bp, Artificial sequence
  DNA replication origin
tttcctgaagtagatggagagctccttcatctttctctgcccccaaacgtgtaccttctctgtcatataattcccatccctgaacctctgcatttcttcccccaagtctccagagccttctgtgatgtgatcctctcctcttttcccctttgtataaatgcttgtcttgtgttcctttagagttgccaggtgtctcactttcaactgtgatctcctgaaggccggtagggtccccttctcactttgtggactctcttcttgccattttaggcctctgcttccaaatgcatagagcctcccttactgtttctgtgtgtctctgtcctccagatgtacggggaccctctatgcaccgaacccaatacgttcattccccgtatgatcgtcctggttggaaccctcggttctgcatcatctcggggaaccagctgctcatgctggatgaggatgaggtgagtgtggtgagaaggctgggaaaacgcatgtgggagaatggggagagtcctcattagtgaaggggagagagacacaaagaaggcagacaaagaagaaacatttgcaaatggcaggagggtggccattgagacttgggttggagtgtgacaagaggggtagtcattctctcatcttgggcagggagtctttgagggttatgagctgtgttggggaggagatgtggttctgaagatttcgggggtggggaggctcctgttttcacactgtccatattgtaggataggttagaatggggaaggggaactgaagggtttggagaaggggtgaagacatggaaggccctcccaaccaaagcaatcctcaggacccctctctgctttgcccactgagcaagactcccagtcctttctccatcagggggcagagtgcaagaagagaaattgcaggacgcagagaaaaggcaggggatagaggaggttttaggtagctggaggatactgggaaagaagactgaggtcagtggatcttggcatgatggggtgaagactgggagagtgattgagatcaaggtttagagagacactgagagggcttctgcaagggagtggttggacatcaggaaggaatataagggaggggaactgggagtatgtggagttatctaaaggagtacaagtggagtaggggcagggactagccagagtaaaggagatgaaacggacagaggcctcttatgggaggtggtggccaggtatggagatctgagagccagggaagtgtgggttctgatttgggagctgggtcagcaggagtgtccattggaggaaatagaggataaaaactggaatggtgccccacaagtgtgagtcagggaatgggggtgatttgggggacaagctttaaaaaatggtagggtagcctggaaaaccaaacgtggtgagagatggaccctgaaagttattgggaatggtgtgatgaggaagggttagaatttgagtcagggctaactagagtgtcaagggacctatgggggcaggtgagagtgtggagagatggctgggtagacagcttccaggccacagagtaaagtagaggtgttaaggagaggatatggtgactttgaaaggagaggtggcttggggagtctaagttttggacaccattgggagacatttgagtgactgtggtcaaacccctagatcaaggtttggagtctgtaggagaaatgggggaaactggaacccagagtggggactgttatagggatgaagagggaagacaatggattggggtaatgaaggaatgacagagatagggacagactgaagggaccagtggccagcaagttgaggggcaataggaatggccggtctggagcaggaagggcgtgtgtgtgggaggaggagtagatagaattgggaaaatgagcagcctgaacagacgcagggagttggaattggatgggtggtggaactggggctgggggatagtgaggggtctgttcctgtggctctttgtagaggtggaggagactgcaggggtggaggtgtatggaggtagggatggaggtggacagggggagctgggtgtgaagcttagggaaaggtgatggctgaggggaagaagggaactgagagatgctgggtcgggtgatggaaggagatgaaaggtgggggaaggtgaccaggccctctggcgggaggggaggttgggtcccagtctggccgcaagccgggccgtgggagggagacaagctgtggatcctgattataaatgcagcttctgctacccccgtgacaggctcggagggagagaagggggtaagggaggtgggaggttgggaggaaagcagggagaatggaggaactgaaggtcaagggaaaactggattcaggaagtagctaacttctgaggagttgcagaagagctgagtagggtttgggagaattctccggaaggtgtttcaagacaaatggagggagaaaagagggtgggacggcaaagaatgagagagagagactgggggagagaagggagagatccagtcaccaa

SEQ ID NO: 11169 - DNA, 838 bp, Artificial sequence
  DNA replication origin
gatggtatggggtttccatgacaatgacacacatccctgaccacccacccacccacccaaggtccccaaaccggcccacaaggctagtagggcctggacctatcagaaggctggaaggagccaaaggatggggacaggtcactggctctctaagggagagaaactggtagcttgaattcctgaagggagggggagctggtgggaaaaaggggtcacctgggggttggaggaatggggaacctggatcgctaggtccgggaagggaaatgaagtggaagggggcagtgacgagggggtttccgggggctgagggcgtctctctgcaccttggctgcagatctctgttctctgccttcatctcccctcactgttcccatggaaaccttttaagcgaacttctcaggaagacaaaaatctttttttaaatgactaaagagggggttgggggggcagaaagggggagggaggggaagagacagatggagagagggagagagttggagagacagaccgcgcagatagctctacagacagaaaggagatgagatgggagtctgatggactttcgccgggagcagaggggagggacggggtaatcaagaggggtacagaaaataagagaaatcagggaggaaagagaaagggtgatacaattgcagaaaatagaagcagctgatgagaggagaaaacagggggtaataaaaggagacctcaaggactgaaggtccggaagaagaatcaggagcataggggtggggaagaggtctggggggagggcaggaactaggtcattctttccaagatcccagaccaggggctgggaggggcaggggcagga

SEQ ID NO: 11170 - DNA, 1230 bp, Artificial sequence
  DNA replication origin
cctccccctttctgcccccccaaccccctctttagtcatttaaaaaaagatttttgtcttcctgagaagttcgcttaaaaggtttccatgggaacagtgaggggagatgaaggcagagaacagagatctgcagccaaggtgcagagagacgccctcagcccccggaaaccccctcgtcactgcccccttccacttcatttcccttcccggacctagcgatccaggttccccattcctccaacccccaggtgacccctttttcccaccagctccccctcccttcaggaattcaagctaccagtttctctcccttagagagccagtgacctgtccccatcctttggctccttccagccttctgataggtccaggccctactagccttgtgggccggtttggggaccttgggtgggtgggtgggtggtcagggatgtgtgtcattgtcatggaaaccccataccatcggggtgtgtgggtagcacatctctgtgaggcaaagtcaggtggtggtggagtgtatacagagaatgtgtgtgatgtctgtcacatctgtgtgtatatgtatatgtgtgtatgtcatgttcatgtctggggaagatgtgtgtgtttgtgtgcatgtgtgtacacctgcgtttccaggccagaatggtcacatgctcacagagcatgtttatcatgtgtcctgtggttggcagatctgcccacttattccccatctttctccttatcctgagtcctcagggtctaggggtctctggcgggggtctcccgtgtgttttgggtggggacaccgtgtgtgtttggagttgaggtggcatgtggaggttgctgtattggggttcagtaggggctgggaggggttccaggggcatatgtatttggggggagggcttagtgaaagttgatgggggtgaacgtttagggtcttcaggcagacatggaatgtgtaaagggcatggaggatgtgcagtggacataggggtcgttgggaccttggggacttggcaatgccaaggtgtttgctgaggctgtggactctccagcccgggagaggtcgccggacctttgaggggcattggaatcctgggctcctcctctgctgggtggagccgcgaaccctcgttctctccgcggttttgtgtgtgtgggggggtcctgctcaggaggggatggtgggtggcctggtttgttttgggggtccccttgcccccctcccccgtctctctcgcg

SEQ ID NO: 11171 - DNA, 2117 bp, Artificial sequence
  DNA replication origin
ggggtccccttgcccccctcccccgtctctctcgcgctgtctccgggcgacagggctcgtgacagaggcggccacggcagcagcggtcgcctagcaacggcggcggggcccgggcaacggcggcagcggcgggagcggcggcggagggagccgttcccgcggccgtcaccgcgcggccgtcccggccgtcccgggccccgccgccgcccccaccgcgccgggcggcgcgagccgggccgtaccgccccctctccctccgcaccccgcccttcccccgcgcaggggcggggcccctcccccaccggggacacccctggcccccccggggggcggtgcgaggtaagggcggggccgggcggactaggagcgcgcgtagaggggggggcgccgcgcgcgtggggcgggggcgcgcgtgtgcgtgggcgcggggaggggggtggggaagccgcggtggcggcggcggcggcggcagctgctccctccgcatgttctcgctgcatcttccgagtggggggagttatggtaaccggagggggacagcggaggacgggagggtcggggaccggcctcgtgcggacagggtcttgagcacgcgggggcggccggtgtgtgtgggatcttggagcccctggtggaaggggcagcccgtgtgtccgcgtgtgtgttcgtgcccatgctcgtgtctcctgtgtgtcggtgccatgtgcacacgggggcccagttcctcgtgcacacatgtgcagccatccttgtgcaagtgtgtcctgtcttatcttgcctctgcctgtttcctgcctagggggctgttgggccagccacgggcttgtggggcagtccgcggccttgctggtccatgtcacctctgaccctgagcatgcatatccctggctggggctcacctcctgtcaggcttctgtgtgtgggaatgtgtggccctatgagcaggattttctgtgtccctggtggcaggtgtgtgtctttgcatgtgtgttccagcactggcctgagtatctgtgtcaatcccagcatgggtgtccagggcgtgtctggatgtgggtggtgtggctggggggagtaagtgtgtgaatgtgttccttggaattctactgtgtatgaaacacctttgggctgggcaggtgtaagccctgcttggtcagtaagtggggacagaaaagcttaaaaagggaagaaatggggtaaagaggaaaagtggggaggggataggagagaaggaatgagagaggcttgaagaagagagcagagagcagcaggccagggagaaagaatagctggagaatgggaatgtgggagaaagccaagccagacttagaagagagaacaggggataagagcttaagatggggaactggatagagatggtgggagaagaaggggtctgggagctggggaggcagtggggaggagagagtcaggccttctggtaaagtgatctctgaaagaagaaagggaagaagatgggagaaggcactggattcttgtaggccttgcaggatcaggcttggttttggatcagggaaggccactcaggcatacgggctggctcacagtgaggcctgtcatagcagggactgtcattagaggttcatatccccagcacagagctctgtctcccatttctctgctctgtgtccaaccctgttcttcgcccttctctggcaacctccctcctctggctccccttgagagctgccagctgggtgtggagaggaagaaaggccaaagggaaggttagggatttggagggcagggggagattctgtgggtgatggcaagattagagatgttggaggggcaggagtccaagcccttgctgtgtgtgtgtgagtgccattgtgtgtgtacacagggtgtgtacatgtgtgggtgtgtgcacaatgcctgtgttacgggtttgtgtaggtggctgttatgtgtgtgcatgcgtgtatacatcgtgcaggcatgggacatggagacccaggatcacagtttgtgcttttcaggtttgctgtgtgtgtgtgtacacgggtgtgtgttgttttctctgtacatgtcactgcatgcagcattaataacaggatgttctgtgtttctgtcactctgccccccctttcctc

SEQ ID NO: 11172 - DNA, 1288 bp, Artificial sequence
  DNA replication origin
ggagggggaggtcttggaagagacctgtgaagagtagcagggggagaagctggggacagaaaatccaaggaaggggcaggtggggggaagggagaaggagccggttccacgtgcactgcagtggcaggggctcagaaggttggtggggggaggggaaaagcaaagaatgcaggggaatgggcagggagcaggaaggatggacagtgggggttctcgggactcccaagtaaggatagggaaaggaggaggaggggaggtgaatgcggatgcagctcagtctgccaagagcctagagggatggcaagcgctgaaaaaggaagctgaggctcggctgcaagggaatttagaggggccgaggggctggaagagaatgtaagtggggggatgccaagctccggctccagctccagaatggctgcccaggcctgggctcccccctcagccccacagtcaccactgcagccaatgggggggcaggtgctgcatcggggcggggccaccatctccacggcaacaagaagctacaggctggaaggaggggggtggaccggaagagctgcctgttaaccctctaggttccagaacagaacaagggaggaccacaattatattttcactgtctgcttccagaattgcaaattgcctgcaaactgccctagaatcagtcctcagcttccctttacctgtaaaacccaggtgttaggaggtttgcatacaaaaatgtggaccccatgacacgagaaccctatcactccctcaggaacaggtgtatagtacagaaacatatactgagctatggaggtacgtgtatatgagaaccacaatacagaaaaataactggggatctatgtgcttttgagacatacagacaactgtgagcacgggcatagcacggatccacattctgagaccctgaggcccacacaccccacaggatacatgctttgacatatgtgagctctgcaacaagggagtacatacttgaacccagtgacccacatgagagctgctggtgtggactttgtggcccaagtctcttgggcaatcatgtggacagcacactacagaaatggacctataaccctaagacacacatatccccatgcaggggaattccagtttaacccctgaaatacatgcttgagtacaccatgatcctgaccacagaaaggtatccccatatctcagaagcacaaacatcctttcattcacgtgaaaagtacaaccacatccactctgtctcaggacaaccccctttcctcccccagcccttctctcactctaacac

SEQ ID NO: 11173 - DNA, 828 bp, Artificial sequence
  DNA replication origin
gcccctcagctccggcctcacctaccccccggaaagcagcaggaagagcagcgacggcggagaggctggcagcgggaaggagggggcaaggaacctgagcaggagccccctgagggggatggggtgggaggccttaggcccatgactggggctggcagtcagcaggggagcatggctgagagggtcagtaaaaccccagtaatgaaggacaccaaagatccagggaggctaggtccctggtgcccacccaccccagaaggggctagctggggggaaagatgggttaaaggtcattgcccataggcaggctttcctcttccccctggtgggcacatcttccacctgccccccacctcctggaacccctgtctgtctggagggccagggctgcctcccatgaccccctccctggactggagggggaggtcttggaagagacctgtgaagagtagcagggggagaagctggggacagaaaatccaaggaaggggcaggtggggggaagggagaaggagccggttccacgtgcactgcagtggcaggggctcagaaggttggtggggggaggggaaaagcaaagaatgcaggggaatgggcagggagcaggaaggatggacagtgggggttctcgggactcccaagtaaggatagggaaaggaggaggaggggaggtgaatgcggatgcagctcagtctgccaagagcctagagggatggcaagcgctgaaaaaggaagctgaggctcggctgcaagggaatttagaggggccgaggggctggaagagaatgtaagtggggggatgccaagctccggctccagctccagaat

SEQ ID NO: 11174 - DNA, 1098 bp, Artificial sequence
  DNA replication origin
ctgagaaagagggcaggagggggagagagggagtgagagtgagaaaaagagtgtgtgtctgtgtgtgtctccccacctctttggtttcccccttcttggctctgcccccctgcttctgagaccagccctcccaccttctccaagctgtgtgtgtgtgtatatgtgtgtgtgtgtgtgcttgcactgtacccgtgggagcaaggaagacaaactggtattagggttcctatccccctttcctcgcctctggagacttcccttttccccatcccactttcatccaggggctctctaccagctgagggatgagtaggtagaactgaccctgccccaacccaccccatccccatttcccccccagcaaggcttcctgagccgacggctaaaaagctccatcaaacgaacgaagtcacaacccaaacttgaccggaccagcagctttcgccagatcctgcctcgcttccgaagtgctgaccatgaccggtacaggggctggagcatgtgggatgagattgatgtaatgtagggtctcctgtgtgagatgcagagggagggggttatctgtgtgcaaaggttgaaggattcaactcaagttggttgggggatgtcatggcacaggggacagaacagaaaagaactagaatagggatctgtgagcagcaggagaggggtagggtggcagagagaagacagacagacaggctggaaagggaatgaaggtgaagccaaggagggactcctcagggactcctcaggccaagaaggatgggctctagcccaggatcaaaggagctgtacaggaggagagtgaccctggaggaatgtttaaggaatgcagggaaggggttggtaggtgagtgagcaataggctgtaggtggaagggtgtcagggaaggtcaggaaatacaggggcagcaggttggagtggggctgggggtggctgaatgaatggatgatggctagggctcaaggacctcatcagtgagggaagagacagtatagagcatggcagagaaggggaggctgggacaggtgtgcagggtgacagaatgggaagcaacccatggactgaggcatgaagaagcagccagcggagaa

SEQ ID NO: 11175 - DNA, 1504 bp, Artificial sequence
  DNA replication origin
ccatggccgcctgggggacctggcccatcagcagccatgtggaagagagggttctggaaggagagggggattcgcagttgctgggcagggacaccgtctgtggtgacacccatctggctgaggcgcatgccagccgccgtgatggatgagccactcccctgggagaggcgtccggcaggcgcaggccgtagccccaaggctgctgtcagcgaggcctggcttgagtgcagcaggtcccctacggccgccaggttcgaaacactgctgctgttgaggcggccaccaggcccatcaccctgtaagtccagcatggacacactcttgttgacactcagcatcttctgctctggctctgtgatgtccgagctgctcgtgcagtatgctggtgaggaacgggccaggggtggacggcttacatagaacaggtctttaccaccaccaggcggtggtgggggtggcttttccttggttggggaggggaggcgagccatgtccatagagctgtcagaagggaagggggcacacaagcagaaggtaaggtcagggctcctagcaattgaaccttgctgtggtctggcacaggccttggggtgaaaagtgggacccagagggaagggctgagagctagcggtggcagccctgaagagggcaggcagggaggatgggaggggacaggtgagtaaagggaaaggacagggcccctccgggaagggggtgaggcctagaggaggggagatgggggcagcaagagaagggatgggggcagggctgggcacatatggaggagatgaggtccatggaggaggagaggagaggagtagggcgaaggccagtggagtgggagagggaacagacaggagaggagaggagggcgggggaggggagagcccctcacctgttgaggcctcgagccatgaaggactgaaggtcgatggagctggagagagatggaaagaggggcgagcacagacagagaaggagagagatgtggacaaatgaaaggagaggcgggaatggtgggatgggtatggtgtcatggaggaagacacgggcagaggaaaaagcagggccatcatcaaaataatgagcagcaaatgaagcacgggcaccacctatcagaatggaggctgggactctggagcaggctgcaggccctgctaggcttctgctgtcactgctctaagtgctggatcatggggaggtctgtggggttgtggtcgggggctgggggaagtgcttattcactagctattactgagatgtttgaacattttgacacatggctgacatgacatgctggctgaacctcagcctggggactagcatgggcaggcagagggacagcaaatcagagcttgcagcagggatgctctaggcttacaactaagccgtgagttggtggagcctcagccctattcctagagctccaaatctctcactccctcaggctgtaaagggctctcagcctaccactgactgtacctgtctccttatcgtctcccct

SEQ ID NO: 11176 - DNA, 834 bp, Artificial sequence
  DNA replication origin
tggggggatggcaggcggggggagcctagcagtcagagcaaagaggagtatgggtaggaaaatgagcagaattttgggaaagcaaggggtaagggtgcagaagggaggtcctagaagctggcttgtgagaagagaggctgggcagcaggcagctgggaaggtctgagggccagagtgggagggaggccagagggaggctggacttaaatactgagggcaaagggaggttacaggatggaaggccttcaagatctgaagagtcaggaagaggaagctatgcaggagctgccaaggagacaggaaaattagggagccaagagaacagaggtgatgggtccccaagttttcagggtaccggccagggcctggagaaactacagatcatactgccctgtgctctattccagaaaacggcagcttctagccctctggcccaagagcgcagaggaagctgaacaacgtggcttgaataggagtgagcaaagaaggggcaggggttcttggaactaggtggggtctaggggcagaaagaccaaggttctggtagagaaggtcctgagatgcagagaggagtgggaagactggatgggaaggcacaggagttgggctgacgctgccaggagtgacaaaggcacagacgatgggatgaagatggggtcactagggggctgccaggagcagccagtggacaaacagcagactatgagagacagatggtgatggggctaggtggctggtgtagtgagtgcacgaaagacagtgggatggatggggatgggacacggagaagataaatgacattgtaatttccacctgagcgtcgagcagcctctt

SEQ ID NO: 11177 - DNA, 1276 bp, Artificial sequence
  DNA replication origin
ctttttaggtagggtgatgtgtccggcaaggccactcgatggcaggagagggggagtgagtggcatcagcaacctggggatgtgagctgtgaagagtacattctttaccatgctgttcctggcacctctccctgggaatcaacatgcctactgagcccacgatctgatctaggaggatgtctctccccatttctaaactcccaggccacatgatcaagtccatgtcctaacatctgcctgaggttcctttcttgctccttcttgttccatccaccctgcctaatgtcaggacatctcaatagcattttttccagggtatctcaagtctccctgagttaactacccactcctaattcccacccaatgggggctaatatgagcttcagatgccttctgcctcacagatataaggaggaggaagagagagaatcaggtgaggagtggaaaggagggtagagaaccaagattagggaaggaagagggaaacccaacctacctgctgcagtcagcacagcccctatagccaagatcctccaacccatcattgcctccaccccattaacaaacccacccccagcccctaaggacgctctggtgaaatggggggtgacagacatacactggagaggtagaggaagaggagggcttagagtcaggaggaggctgggagggggtgggttttgcagggaagtgggtgtgacctgtgaatgtgctgggcccatctagggcccaactcttggtgttgctaaggtattgttggacagttctgggaagcagcagcaaatgctctctttgggtggtgtcttgggagatggatctgtgcaggtgtcggagggctggagtctgtggaggttctctgggtgtggagggcagcagtgagaggggagaggctccggaggtgttggagggagtgggcttcacgaccaacctgcagtggtccggagtcacctccccctgtgtcctccgcccgtggccaaagcggaaccaggagaattacctgatgaggagctgcagtgggagagagtggggtcatggggtcaggagccttggtggggggatggcaggcggggggagcctagcagtcagagcaaagaggagtatgggtaggaaaatgagcagaattttgggaaagcaaggggtaagggtgcagaagggaggtcctagaagctggcttgtgagaagagaggctgggcagcaggcagctgggaaggtctgagggccagagtgggagggaggccagagggaggctggacttaaatactgagggcaaagggag

SEQ ID NO: 11178 - DNA, 645 bp, Artificial sequence
  DNA replication origin
cgccccctccctgccccggtggccccctccaccccatctgggttctgggtggggagggagtaaatttaagagtggtagaaggagaaggagtttgtgcgtgctgagcccccccagacgctcctgagaaatcaaggggtaatagggccccctcacccggggtcccctccccataacaaggggggcaggggaggccaaaatggggcggtggaggggagttagattgtcagctctggttactgctaaaaaaatcaccctgaagttgaaagtttggaggtgccacacccccagggtgggggtgagggtctgtcccccagtgctcaggggaacgatgaggcagaggatggggatagcaccccggagtgaaggggtctgtacggggtaggcggtgtcctggggcaagggtccctgggggtcaaagagagggcagcaccccaatgggaaggaaaagggggcggctgagggtccccactctccctcctggaaatggtgcagtggtgggggtgggcaatcagtgtgcctcccagggaggcattcggggaggcaatcccgctgttcctcggtgatgtccaatcctggtggttggtgctgttacagggtggggtgcacaggaaaggaagagaaggtctctgatgctgggtgggctag

SEQ ID NO: 11179 - DNA, 1011 bp, Artificial sequence
  DNA replication origin
tggcctcggactaagtgacacagtggtgaggggagagttagattggagaagtttggccggtgcaaaactcctgctctaaaatataaaaaatctcattgggaggggagagtgacattctatgaggagagtgtggcatcaggtggggatatacggttttcctctcaggctgtcagcttcctttcagaaagcagatcttaccaccgtacaggtctggagagccctgcctaagaaagtcggcacagcgataaaagaacaatctccgtttattaaacatgtttttttctgtttcaccacacactccagaaaaaaaggaaatggggctgggagtggagaaaaggggacagtgaggggggatagataaggctgggagtggggtggggagggagaacgagaaaacaaaataaaacaggtaggaagagcaactccctacccttgaggtggtgggtggggagggaagcagaggggcggggggggagggggccaggaagctctgtacagaagggttgcccccagcccacacacacacaccccggatatgtacagtacaaaccccagataattacaacagccaaagaagagagaaggaaggttggggagggtccaggggtagggcctgaggtggggaaagggcacagggataaaatttcacatatttacaacttttatataagtataaatttggccccggctgggtgtatgtgtagggggatgggactgaaggggaactgtccatacaaaagaaagaggagtagagtctaggagagtctcaataccaaacgcaaaaggatgaagggggcaaggctgggtaggggacagcagtcagggaagagggggtgccaaggaggggcttctcccctcccatggcctacccaccccaaaccccatccatcctacctcccctatcccgccagaaaactatgtacagagaaacaccgaaaaatcgtggagctggcgggagggagggaggtggaaggagattgggagggggaggatgagagggaagcccagccc

SEQ ID NO: 11180 - DNA, 1190 bp, Artificial sequence
  DNA replication origin
gggatgtgaggagcccctctgcctggctgcccagtctggaaagtgaggagtgtctctgcccggccgccatcccatctaggaagtgaggagcgcctcttcctggctgccatcccatcaaggaagtgaggagcgtctctgcccggccacccatcatctgagatgtggggagcgcctctgcccctgcccgccaccccttctgggatgtgaggagcacctctgcccggccgcgaccccgtctgggaggtgaggagtgtctctgccctgccgccccgtctgagaagtgaggagaccctctgcctggcagccaccccgtctgggaagtgaggagcgtctccgcccggcagccgccccgtctgggagggaggtgggggggtcagccccccgcccagccagccgccccgtccggggggggggccggccccccacccggccagctgccccgtccgggaggtgaggggcgcctctgcctggccgcccctactgagaagtgaggagcccctctgcccggccaccaccccatctgggaggtgtacccaacagctcattgagaacgggccatgatgacaatggcggttttgtgggatagaaaagggggaaaggtggggaaaagattgagaaatcagatggttgctgtgtctgtgtagaaagaagtagacatgggagacttttcattttgttctgtactaagaaaaattcttctgccttgggatcctgttgatctatgaccttacccccaaccctgtgctctctgaaacatgtgctgtgtccactcagggttgaatggattaagggcggtgcaagatgtgctttgttaaacagatgcttgaaggcagcatgctcgataagagtcatcaccactccctgaacccaagtaaccagggacacaaacactgcggaaggccgcagggtcctctgcctaggaaaaccagagacctttgttcacttgtttatctgctgaccttccctccactattgtcctatgaccctgccaaatccccctctgcgagaaacacccaagaatgatcaataaaaaaaaataaaaaaagaatatttgaagaattaacctaggcattaccattcaggacataggcatgggcaaggacttcatgtctaaaacaccaaaagcaatggcaacaagagctaaaatggacaaatgggatctaattaaactaaagagcttctgcacagca

SEQ ID NO: 11181 - DNA, 1644 bp, Artificial sequence
  DNA replication origin
gcacatcttgcaccgcccttaatccattcaaccctgagtggacacagcacatgtttcagagagcacagggttgggggtaaggtcatagatcaacaggatcccaaggcagaagaatttttcttagtacagaacaaaatgaaaagtctcccatgtctacttctttctacacagacacagcaaccatctgatttctcaatcttttccccacctttcccccttttctatcccacaaaaccgccattgtcatcatggcccgttctcaatgagctgttgggtacacctcccagatggggtggtggccgggcagaggggctcctcacttctcagtaggggcggccaggcagaggcgcccctcacctcccggacggggcagctggccgggtggggggccggccccccccccggacggggcggctggctgggcggggggctgacccccccacctccctcccagacggggcggctgccgggcggagacgctcctcacttcccagacggggtggctgccaggcagagggtctcctcacttctcagacggggcggcagggcagagacactcctcacctcccagacggggtcgcggccgggcagaggtgctcctcacatcccagaaggggtggcgggcaggggcagaggcgctccccacatctcagatgatgggtggccgggcagagacgctcctcacttccttgatgggatggcagccaggaagaggcgctcctcacttcctagatgggatggcggccgggcagagacactcctcactttccagactgggcagccaggcagaggggctcctcacatcccagacgatgggcggccaggcagagacgctcctcacttcccagacggggtggcggccaggcagaggctgcaatcttggcactttggggggccaaggcaggcggctgggaggtggaggttgtagcgagccgagatcacgccactgcactccagcctgggcaccattgagcactgagtgaaggagactccgtctgcaatcccggcacctcggggggccgaggctggcggatcactcgcggttaggagctggagacctgcctggccaacacagcgaaaccccgtctccaccaaaaaaatacgaaaaccagtcaggcgtggcggtgcgctcctgcaatcgcaggcactcggcaggctgaggcaggagaatcaggcagggaggttgcagtgagccaagatggcagcagcacagtccagcttcggctcggcatcagagggagaccgtggaaagagagggagagggagactgtggaaagagagggagagggagaccgtggaaagagagggagagggagaccgtggaaagagaggaagagggagaccgtggaaagacagggagagggagaccgtggaaagacagggagagggagaccgtggaaagacagggagagggagagggagagctcttcaaatattctttatgcctctttctatctcttctgtttcttacattctcattatgcctagattgacatgtttaatggtgcctcacaagtctcctaggctctgttcatttctttctttctttctgtctttctttctaccttccttccttcctttccttccttccttctctctttctccctttctatctttttggagaaagggtctcactctgtcacc

SEQ ID NO: 11182 - DNA, 1609 bp, Artificial sequence
  DNA replication origin
agctgggctcctgagtcgggtggggacttggagaatttttacgtctagctggaggattgtatatgcaccaatcagcactctgtgtctagctaatctagtggggacttggggaacttttatgtctaactaaaggattgtaaatgcaccaatcagcactctgtgtctagctcaaggtttgtaaacacaccaatcagcactctgtgtctagctcaaggtttgtaaacgcaccaatcagtgctctgtgtctagctaatctagtggggacttggacagtttttgtgtctagctaaaggattataaatacaccaatcaggactctgtgtctagctcagggattgtaaacgcaccaatcagcaccctgtcaaaacagaccaatcagttctctgtaaaatgggccaatcagcaggatgtgtgtgtgtgggcggggggggggggggggggtggtggtggtgtcggataagggaataaaagcaggctgcaatctgctcaggtcttttcaacattgtggtagctttgttgttttgttgcttggaataaattttactgttggtcactttttgggtccagagtgcctttatgagctataacacacattgagaagatttgcagctgtagtcctgaggccagtgagaccatgaacccactgggagaaatgaacaactccagctgtgctacattaagagctgaaggtctgcagcttcactcctgaacctagcaagaccatgaagccaccagaaggaagaaactgtgaagacatccgcacatcaaaaggaacaaactccgcacacaccatccttaagaattgtaacactcaaccgtgagggtctgtggcttcattctctaagtcagtgagaccatagaacccaccaattttggacacagtatgatctgactgccttgggaattctctgactgtaaattcatgtattgctaactaaatcactgctgctgccaggtgtggtggctcatgcctgtaatcctatcactttggcaggctgaggtgggcaggtcacctgaggtcaggagttcgagaccagcctggcaaacatggtgaaactccatctctactaaaaatacaaaatttagccaggcatgatggggcgtacctgtaatcccagctactgggaggctgaggcaggagaattgcttgaacccagaaggctagaggttgcagtgagccgagatcgtgccacggtattccaacctgggcaacacggtgagactctgtctcagaaatcattggtgctgcccattgttggtagtggtctggtctaaaggttccagttttgttgattttagtttctaaatccgtgcaagctgcgtggtccctctccatgaaaagtggagtattcctgcttcccgctaatgctgggttctgctatttcccttgccggaaattggacgctttcttactttcttgtgctgagtcttgactgtcacctcccggcaccccagtgattttcactggtattgaagccctgccctgtggagttttacttcctggcctattacagagtagctgtgtctgtgctttgccaccaagttctttcttttttttttttttttttttgagatggagttttgctctcattccccaggctggagcgca

SEQ ID NO: 11183 - DNA, 1017 bp, Artificial sequence
  DNA replication origin
agtttccaactggaggttttaatttgaaaactcttcctgttcttaagcagttggtcctggggtggctgttacaggatctgaattggggaccttctcaggatggaggccccagctccgaagccctgatcatgaatttcaggctgctcctccatgttccgccaccagggtgccatttccctgatgatgagccaagagggacatgtgaggaggagggggccgggaccatctgccttgccgccccaccccttctctgtggccatacccaggggcttctcaaaacggtcacagcagcctcccttaaagctgggcatggggcgtatggtgacctacacctgcaagagcaagaaggcctggcggagaggtgaagtcagttctgcccatagcaagccaggaggtgttgggcaacctgcctgagaaggaggggaaggagccagcaggggacgcctctgggaaaacaggggcctcagacaggtgaggggctggaattggggggtacccaggttggcaaggcctgggacagaggtactgagaagaggcctggacatgagatgggggaagggcatgggcctgagatgggggacccatgctggggagggtctggggagggaggccttgggtgggtaaaggtctggaacagggcacctggtggggaaggacagggagatgtgggtggggccaacggacagaagcatctggtggggaggaggctggagatggggatttggtttgggaaggagggagagatggggtcctcccacaagtgaggggttgtggatgggggataccagatatgaaagaggacaggctagggagtagaaagggaatatgccagggccagagggacggggggtcctgttgctcccagctccttctacaggcctggcagccatcccctgtgaggacagggacccacctctctctgttccccaccccctcatcaccctacttttgagagcgataatccccctctatgatgaggaccccagatgcagagcagggggctgatgggagaggaag

SEQ ID NO: 11184 - DNA, 950 bp, Artificial sequence
  DNA replication origin
ctggctcccactgcagcaagctcatatgacggcagacaagtctcatatctctctgaatctcagtctccacgtctgtgcaatgggtgaatgaagagctgcttggctcgtagaagattctcaaagaatccgtggggccgggcacagtggctcacgcctgcaatcccagcactttgggggccatggctggtggatcacctgaggtcaggagttcgagacccgcctggtcaaaatgatgaaaccctatctctactaaaaatacaaataaattaactgggcatggtggtgggcacctgtaatcccagctactcgggaggctgaggcaggagaatcacttgaacctgggaggtggaggttgcagtgagccgagatcacgccattgcactccaacgtgggcgacaagagtgaaactccgtctaaaaaataagaatccatggaaccatttttatgaagcatcgactacatcctagtcctgttctaggcactggggaatagagcaatgagcaagacatacacaacctccactttggggggcttacattattgctagtgagataaacaacagatacgccagggtgagaggtgctatgaagaaagctgagactggatagttggggggatatcacagagggatgaggaggccttgctgaggaggtcgtgtgccggaagccagggagggagccatctgggggaagggcagccatgggcacagcaagtgcgtcgccctgaggcaggagcaggactggtgggtttgaggaaagggatccgtggagctggaaaggcatacgtgggagggggtgggacaggaggtgaggtcagaaaggaaatgtggagatgcgctttgctgatcatgggtttgggggtttgtttctttctctttttatctctgtcgctcgggctggagtgcagtgacgcgatgacagctcactgcaacctccactcctgggctcagg

SEQ ID NO: 11185 - DNA, 787 bp, Artificial sequence
  DNA replication origin
agagagtatgagggggaaccaagagggtacttaccactaaggggagcgccttggccagcacctctgctcagtggggagccaggccccgccccaggtggtaccttcccccttgccccatatgaggggcttgtgggggactttgtctccatcatccgcagggtggagcggggcggcctgggacctggagtccgggaagagtcgaaggcctgtgggcggccgaggtcacgcgtgggcgcctgcggggggagggcggaaccaagaggttggcaccgcagtgcctgtgcgcaccgaagtgcagcaaacacgtctcggccacgactgccaggccaccccaggctccagcggagcgtgcgtacctgcgcaggcgctcgcatctgagaactgccgaaccgtgccacatttccgttccctctggcctcgccctcaggggtcgaccggcggcggagcgcggggcctcctgtgctgaaggcagctccctggcctccagaaactcacagtcagtggtgggagggccgtaacagacccgcgcagttaagaaccagatgatgatgttgctgtagtatagtttggagagtgcagagaaggaagcaagcaatgccagcagggaggaatccagaaggcttccaggagaaggcaccatttatgatttgggcttgtatcaggaggaggaagttgacaggtgaaataaggggagggcatgcctgccaggcgaacagtctgtgattgggaagtgtccagtctgcaccatgaccccactgtccaccttcctgaccaagtaggaaccatt

SEQ ID NO: 11186 - DNA, 1159 bp, Artificial sequence
  DNA replication origin
agagatggagtttcaccatgttggccaggctggtctcgaactcctgacctcaggtgatctgccctccttggcctcccacagtgttgggattaagggcatgagccaccacacccagcccacccatttatgtttagcttattttctctctaccatctatcccgctcaacacccccactctcactgcctttgctggagccctaaatcaccgccctagccttccatcctctcactgcatctgcctcaccactgccagggtgccgttggctctcttcctctctccccctctataacccctacccatcctgtacagctcagccatggcacctactccagccctggtttcctcacagctccctggttttagggctaacaggattcactgcatgtgtttacttgctctccccaggggagacaaacacagcatgaaggcaggccctgggggtgcgggcgggggttttgggggagctttgtttccattgtctgcagtgtccagcatggtgtcagattcaatatatggcactagactgaatgagcagagggtggcttgcagaaggacgcttgtgaataggggtgggtgagagcgggggaagcaggcaggggctggattacatagggccttaaaagccaacttaagcagcttggcgttcatcctcagggcaatgggagcgagggccggagacctgggagagtggcctggtaagatgtacagcgagggggcaggggctaatgtggaggccttcacaatggtcacagtgagagaggagtggacctgagctgggacagtggcaggtggagtggacaggaaaacagaggagaagtggttctcaactgggggcaattttacccccgcccctcgaaacatttagcattgcctggagacatcttggtgtcgcaactgggggagtgctactggcatcaaatgggtagaggccagagatgctgctaaatatcctacaatgcacgggacagccccccatgacaaggaatgagctggcctaaagtgtcaacagtgctgagggtgagaaaccctgccctagaggaaagcccagagaatcgcctgctggatggagggaaatggagcgcatctcagcctgaactcttggagccacgctgaggcctgactcttctgtattttagccatgtaataaccctgagcgag

SEQ ID NO: 11187 - DNA, 1065 bp, Artificial sequence
  DNA replication origin
tgctgggccagcctaagaacagaggagacctgactgaggtctgcaggagtgcaacccccaacctccagccaggcaccagaatgccgaggcaaccagggcactcagaagcatccccaggcgctgaggccctggcgctgcaaaaatcctcaagagtctggccttcaaagttgggcaggttttctctggaaggggctctccagtctgtggttgaccaaacccagcctctaacttttgagacaagcaatctggggtggagggctgcattctgccacttgacaaatatttattgagtctgcactgtgtgccaagtgctgtacaggatgctggggtactatagtgaccccaagtagacgcagccctgccctcttggaattcaagtttgggtgcaggtctgaatcacttacctaagttatattgcaactttgccatgtgctgtgggagagtacggtgtgatgatacaagactggagctctcccaagggaggctagagcagtaggggatgggtggggaggtagggagaggcaggagggattccctgaggaagtgacacttgaactgacattccaagcattggggaatggaaagtgaaaaggcccagaggcaggaaggaacacagtgaacacgctccaggaaggagcaagcagcgcagctgtaatggagcaggaagggccccggcaagagatggggctgaggccaggcaggacctggagccacaggaagggattggtctttgtcttaagcaatgagaagccatggagggcttttgcctgggaggactggctggtagctgggttttgaagcccactccctgtctctgagtgcagcactgctgggaggggctgccacagggtccaggcagcaggtgctggggctgggtgtcggggagggaaacaggaaaggagagaagggggcagattcaagggagtcaagagcaaattacagcggtccttggagataacaggatatggggtgtgaggatgacttttctgccctctggggcccctagactgagggggtgatggggcatgtcacagtgtaggagctgacagaaccagacaggctgtc

SEQ ID NO: 11188 - DNA, 1459 bp, Artificial sequence
  DNA replication origin
caaatcccgcccgggaggcggggaggccacaccccgccccccctccccccgcagctcgcccgccggcacccatgtgcacccgcctgccttcccgcgccccgcgctcctcgcgcgtccggggcccggcctcccggacgccgaatgcgccgccagccctcctgatctccagaggcgtcctgcaaggcaccgggtctagggggctctcggagctgccatccctgggaggcccaggcgtagtggggagctctccgccctcggggttcccggactatctgcacccgggccctcggctggctaagagccagtgcaggcgcccgcggaagggggagtccagctctccggcgggcgtcaccccggagccgctcgcggagggcgcgccctggagcgccctggccgcggccgccctgcggccaccgcgcggtctccgcgcccagctgagagcaggctggcgcccagaggcgcgctcatccctttgcagagcaaattcgggattcatttttctcaacgtgaaaagccttttcattgcacaatagaaagtgctcaggcttggaggggaaatgaagcaatggggtgggttttgttttttttctctccgcattcctgtgtacaaagagatccaacttccgaatcagttcagccgctccctctccaggagttggctccaaaactcttggctccttccgtctttcctttcaaaaaaaaaaaaaaagcagggatgaaaattaccttcgctagttgacagagcacccaagcgctaacgatgccaagtctgggtgccggccccctgggagtgacccgctgcggcagcgccgccaggctctggctcccgaagtcctgccctcaaattcgcgtcccgggctcgcttactttctgttctgttccccggtgcttgggtgtttgcttcctagtcctttatttgaacgcctaagatagggtgcccattgccaccgccatccgatcacttttgctcccttcggaccccccaaccccacttcctgagttgtgggggggcgtttgtccctgggagagagggaggaggggactcggtgactgaagcaggaagaagagaggctaggggaggggtggagacagctaaaagcaaagagacagctgctgaccctgggaggagaagagccccaggcagtggtttttttgttgttgttgttgttttgtttgtttgtttgtttgtttgttttacgaagacccccaggaacgatgtgggagggaaggacacctccaggatcgctaagtaccgtgttttacagttttgttttgttttttcaccatggcaaacagtaacaagttttacagcagaccagtccacaccttcgtctatatataagcaaaacaatagatcaccaaacaatacttacttttatgacctttgatgcatgctgatattttctattctatttcagttgtgttcttgttgttgctttaatgctgattgtaacccact

SEQ ID NO: 11189 - DNA, 1969 bp, Artificial sequence
  DNA replication origin
cccagacttcctgctccttctacgctgcaggtacgcgcgggccgggcggggcgggcgggcggcgggcgcgccaagacgtgggcacctcctcacccggaccccgggccccgccgagccgcctcctggctcccgtggccgccagcccgccccggccgcaccgagcgtcgggatccgaggtgggagcgtacccctccccgctccccggacgcctcagtcctccgcactgagcttggccacgcgcccctaggcgccccccacgccctgggccccggagggccgcagccatgagtgaaatgtccagctttcttcacatcggggacatcgtctccctgtacgccgagggctccgtcaatggcttcatcagcactttggggtgagtgagccgagctcgagaggggcgcgggtaaagagggggcgccgtgggccctggtgccagctgcgtgcgtccagccgccgccccccgatagaggcctggacgtccccctagtctcaaggagcgggaacggctcgcctccttcttttacagaaaggaagtgaagtgtttgctcaggtaggactcgggctccctactggagttggcaggaggagcctccctcggcggcgcagcctctaccctcccgcgcacgcctttggagggggcggagggacggaggcttcctttgcaggtggtcccgggggcgggcaggtgggtggctggaggctgagttggggaagggcagccgggccgagacgtgcccggctctgagggtagggcggagctgtcgggagtgggcaggctcagcttggagcccgtaatcctctattaccgatcccgtggtgcctttgaggggtcgcaccttctcctcacagctctctccctgttcttcccagcttcagtaggagtgtcttctcagccctccccttccaggcttcaaggtcctggccagctgccccttctccccgcctctcccattcaatttcctgcgccggtcatctggcgcccttgggtccttggttctagcttctctccagcacttcacaaacattaattaattctggccgccacctcccagggtctgggctggatgaacagggaatcagttcacgtccctggagagggccaggcctgtagcagggagagggcaggagagaaattaggtagagaggatgggtttatcttcagaggagcagctggatgtgattcgctggatgggagcgtaggtggtttctccagccagaccccagggcagggtcggctatctttgtcccgtttacagtctgggggcctgggttaaattgtctcatcctcccaaccacacatggctgtcctctagggtacacccaccctcctctgctgatccactgagtgggaccagccagccgcgtggtgccttctttctgatggccttggaggacaacctggcaccctcagctcaggactgatgctggacagggcccggctcaccccaagcctgggaggtgaggggtcactggtctctcccagggttgctgggagtttagctttcatcttggtgtaaagggaatggattgtgggattggagggctggctctgccaagcagggagttctcacctggcattccagcctgccctgctcgccttctcgcagaaccatccaggtccctcctggtgccctccccttcacacgtggaatccctgcctatttgtccccacttccactagatctaacttcttcccagctccctagaggatgggggtggagccacatctgggccagcatttgtgcaggcctcctccagagagcagtgactaggccctggctgccctgaggccagggctgcccacagtaggtacagagtaaacacctctgataaagctgagggaaggaggagagggtgtggggactgggagggacatagggatctatcgtggaagtcccctcctagtgtctgaagagcaccagggacttttgggaaatgaccacctctgttgcttagtgcctggcttggg

SEQ ID NO: 11190 - DNA, 1209 bp, Artificial sequence
  DNA replication origin
cagtctgtcattccccctcccatggtgctctgatggtggccaaggtggtaggttttgagtcaggctccttgatagtcacctgccccacttctatctagctcccttcctcctccttatctaatctttccagacagcactgacccaccctgctacctttcccatggcgcccacctggatctcaaagtccacgcagggtggaatggggcagaatgggatgcagctgtcttcctctcctacctcagatcaaggtcttggggtgtagaccccgtgggcatttcagggactgtgccctcctgcaaccctagaacaagctgtcaaccagctcctctccagagggcccagaacagccctgcctgcccacaggcctccagccaggaccctttccctgtagccccatcctcctgctccctctgctgttcagactggtcttgtgcctcccagtggatggaaggcgcactgcagggactgttgtcctctgggctcctgagcctctgctgggctggtcctggaggggagaaggggacacacaggtgtagacagggctcctgtcctcggcactcagcgtggtcgcaggagatcccagagggtggggaccacacccagcacatagtaggctcgtggtgaggtctgtcgagtagatggaggcctgggttgtgtctgtgccattctctgaccagctgtgtggctcaggggttccatccactctgtgggcctcactctggactgtggtaagaacacaatgagatactggatgtaaaaacgattgataaactatagagtcgcgcgatggaggggcagtttttttgtgatcttggctggggtaccaccggcctctaggtgaggggcgatgccggtggtgggcgtagcggggcgtgggcagggaaccacacgggagcctcagcttggccttgagatggcaggagtgggatggggcgtcatcctagtagaggctggacagtgagagatcggtgggctggtaaagggtgggaacaggtcttttctggggcccgtgggtggagggaccttgtggggaggcgttggcgagaggggggtgaagcgaagcggccacttacccctgtagagcgcggctctggtttcagcgcccggtgcgcactcagcagggcacctgtggtccggctagtttgataaacacaggtgcccgccatgaggaagagtcggggtggggcgctaaggccagggacgtcggtg

SEQ ID NO: 11191 - DNA, 1710 bp, Artificial sequence
  DNA replication origin
aaaattgcaaactgcttcctgccacactcagtatgcacctccctgtgtaattgttatccacagcctttatcaccacctggttggctagctagtttacttattttgtttactatcccttagcctgaccccatggaatgttaagtgccgtgagggcacagacgtgtctgttttgctccctgccgtatcctcagcacccaaaccactgtctggtgcagagaggggacacacaaaatacatactgagttaattaattcattttactagctgtgcagtaaagtacacaagaagcaaaagacaaggtccccgcctcaggtagtttaaaatctcattgggaagacaaatcacatactcagaagataaataatataaagaatatgtatcagagccgactggtggtaccagccgtgggtttcgtccgaattcagggaagggagaggtcactgcttggccaatcagagaaggtgtgggagaagcaggaactgctcagagccttgaataattcatagaatttcctgtaagatattagtgaatcagattagctggttgtctcttagcaaagccctgaagggaggggacacaggatggatgaattttgatggcgagagaaagaaagcattgactggggtgatggagccgcagggcagcatggaggttgtgcagctgaagagaggctggcggcagtccccacagcccccatcttgaccggtacacagggccttgtagcgggggaaagaggaagaggccgcagagtccccctcctcagagggtccctgtctgaggaaaaaactcatcctcatccctgacccctccacgcctctcctgggaactccttgtctgggtcacacatgcaggaaagacatgcaaatttgggggccaaagcgtttttcctcacccctctggacaagcccacctggtcattaggtggatgtccatttgtccgagcccacgctggcacagcttctgaagccccgcctctccagctcagcccctccccatgccagtgcccagcagtccacaaagcaaggagtgcaaacagaagccacttagagaagggagggaccggtcagaaggggagcacggattccggaggggaattcaaacaaggctgggaaggaaaacatcccagatgtgcagctgagcagacgacaacggtctgtggaagggactggagcagagaagcaagccctgggcagggctacggaaagcagggagggtcggtcaggagtgaggacttgggaggcaggagatgggaccttgggcattttctcccgggtccgccaggaccagcaaaacaggcatcatctgggaatgctaagctccattctgtgtcccccaagaacctccaagaggtggcaccttgccaccttgccttccttgttttattctccagaagttgagcgcagcccccacctggtgtgtgtagataaagaaggtggccctgggcagatgtttgcagggtcccaccgtgcccccaagctcccctcacccgtgtctctgtgcgtactcattaggcctaagggatcccatgaaggtgatctctggcgacaggggagcaggaggggacgggagggagcgtcgcgtgaagtcattaacagataagcaagaaagctcttatcagatggcctgtcgggagacctggggccagagggagggccgagggccgggacacaagttaggcaagtttgcatggagagggagcctcaccgggcg

SEQ ID NO: 11192 - DNA, 712 bp, Artificial sequence
  DNA replication origin
aaactacctgaggcggggaccttgtcttttgcttcttgtgtactttactgcacagctagtaaaatgaattaattaactcagtatgtattttgtgtgtcccctctctgcaccagacagtggtttgggtgctgaggatacggcagggagcaaaacagacacgtctgtgccctcacggcacttaacattccatggggtcaggctaagggatagtaaacaaaataagtaaactagctagccaaccaggtggtgataaaggctgtggataacaattacacagggaggtgcatactgagtgtggcaggaagcagtttgcaatttttaataaaaatgggagagagggtctccagtctccatgggaacaggcttgtttgagcccagatctgaaggaggtgaggatcctggaggtagagggttctgggcagaggaaggagccagtgcccactcccctgggggattgaggagcctggagggggctccagggctggagcagaggggtgaggggaagggggatggggaggagatgcgatcagagatgtgagggggtggaccacgtgggtctttcaggccatgtaagttctttggttttattctgagatgggtggttctggtgagttctgagtggagtgctggcctgatttgacttaccttttaaagggatcccctggccgggttcggtggctcacgcctggaatcccagcactttgggaggccg

SEQ ID NO: 11193 - DNA, 1079 bp, Artificial sequence
  DNA replication origin
agcagaggggtgaggggaagggggatggggaggagatgcgatcagagatgtgagggggtggaccacgtgggtctttcaggccatgtaagttctttggttttattctgagatgggtggttctggtgagttctgagtggagtgctggcctgatttgacttaccttttaaagggatcccctggccgggttcggtggctcacgcctggaatcccagcactttgggaggccgatgcaggtggatcacctgaagtcaggagatagagaccagcctggccaacgtggtgaaacgctgtctctacaaaaaaaaaaaaaaaaaaaaaaaaaaaaattagctgggcatggtggcaggcacctgtaatcccagctacttgggaggctgaggcaggagaattgcttgaaccttggaggcagaggttgcagtgagccaagatcatgccactgcactccagcccgggtgacagagtaagactctgtctcaaaaaaataaaaaattaaagggatccccctgcttctgtgtgggaaataggctgaagggagtgaagggggaacccaggagaccagtgaggaggtagttactgaaatccaggtgagagctggtgggagcctggacaatgtggtggtgagagtgacaagaagaggtccaattctgtacctgactgtgtattttgaagatgcagcccacaggatttcctgacaggttaggtgtgaggtgtgagtggaagggaggagccaaggataggtccaaggtttttggaccaagcagttggaaggatggagttgccatcgactgagatggggaggacctctggaggagcatgttccggtgggaggccaggagctcagcttgcacaggctgagtttgcgatgtctgtggacacccaagcagagatgccgagtaggcagttagatctccgaggctggagttcatgggaggtgaatgtgggagttctcagtgaaggttttggaggtgcttttaagttcatgagtgtggtcaagatgcccaacgacgtgagtgcagatggagaagggaagagggccagggactaagcaggtgctggaggccgggagagaaaaggagaca

SEQ ID NO: 11194 - DNA, 882 bp, Artificial sequence
  DNA replication origin
gaactagactaaatcctcctactagatggcaatctagcctccatctgcagcctcaacgccctcccatttctgactccaggagaggcccaggcctcctttctctacccgtccatccttcagggaactgggacaggcgaggtcagacctgtgcctccaagtgagcacattaaacccacagagcctgggctccactggggagattctgggtgggtcacaacaacaggacatggagcagccaggcctgagtgaggggcagggcaagaggacgctggggaggggccctgtgcatgcattgattactcaaatgtgctcggggatctgccgtgtggcagacactgcaggtaaaacagcaaacaacaacaacaaaaacacagaaatccctcccctggtggaactgacattctagtggggcagaaaaatggcaaacacaaataaataaaatacactgagcacagcagattcatgctacagagaaaaagaaagcagggaagggaggtggggccagcagtgcgattttgtattgagtggtcagggaaggcctcgctgaagatgtgagacctaaagctgctgagcatctgggctgcgtggatatttggagaaagaacgttcagggcagagggaacagcaaagatgtggaggcgggagtgttgctggtgactgtgaggaatggcagggaggctggtgtggttgcagggaagtgggagggggcaagggggagaggatgaggtggagaggcagcaggggccaacggtgtagggtgaaggggccttatggtggtgcggttcgtccagggccagggcagttcccacctaagacctccaccagccaaaaccctcactcagagccccgtgatggaagcaggaacagaattgcagacagggg

SEQ ID NO: 11195 - DNA, 660 bp, Artificial sequence
  DNA replication origin
agcctaaaaagctgtctctaatgggatgcaaaccaaatcctcaaggccaccagcagtggatccatcagactgggatgtgaccactcagggagggctgcctggaggcagtgggctgaatgcacacagttttgggagggaaggttgcagaggagtgggggtggtggtgggagccaggaaatggcaccaagcagcccctgccagcgtttggactgggacaagggtcccgtgtctggggcattgggagtctggtgaggtgggggtgggtggtgagacacacacagctttaggttcctgggggggtaaggggattgcgggggatgctcaaggtcctgctggcatgccctctccaggggaggtggctggggagggttagggatttggctccctgggctgtgtgtgctgtgagacctcaggctgccttctgcactcagagtgcagcactctgggtgcagcaccaagagctggggcaggggtccaaggggtcctggagtccagggtgactgtgtgtgtgtgtgtgtgtttgtgtgcatgtgtgcgtgcatgtgtggggctggggtatgtcttcctctaggagcagcttctgagcccacccttcacttctgtgtgtgtctgtgcagcatgcggcgcagatggagcagaagcaaaatgacacggagaaca

SEQ ID NO: 11196 - DNA, 1041 bp, Artificial sequence
  DNA replication origin
aggaagtccaggtactgcacatggcgcccgtgcgtggccagcaggtgcacgaagtgctgcaacacaggctcgctgatctcggagcagagctgatagttgttcaggaagatgtgctgcatggtctctgcctccaggagctgcagtggggggcatctgtcagaaagagatctgggccccgcccccaccccccatcccccgcctcgtccaggtgctcccagccctgcaccctcacccctggcgtgaggaagaggtgcaggtgtttgtgcagcagggcctggttgccggggttccctgcacagaacttctgcaggaactggtgcgtgtagcgcaggatctccatcatcttggcatcaccctggacacaggagtcagggagagggtgctgggcccaccaaggagggaggcgaggccctggctgagctctgacaggagcaggggtgggtcgggcttgggactgggaccgtgaagaggccagcgtaaagggaaagtggggcccccaggtcaggatggaaatgtgtgaggggcgggagctcaatggccaagatgaggctggagttggggcaaggtgaagtgtcacggtcagcgtcaaggtgaggcctgggacatactgagatcaagatcagtcatggcaaggggctgagggtcaaaaggggagatgagactaagattggagtcaggagccagggtgggcctggggacaggtcagcataagatgtcaggatgaggaatcaaaaccaggggtcaggacaaggccagcattgatgtcatgggtcaaggagaggttgggttcagttagggtcaacatgggtcaaggtaaggaagctgagggtcaaaggttgagatgaagctgagattatcagggttaggctggagagggggaagaaaagggagtcaaggtcaagaatcagcataaggctggggtcaaatcaaggtcaaagggaattaggatgaggggtagagggtcaaaggttgaaccgatactaagacagggttcaggggtcaaggtgtgcctgcaaacaaacagggcagtgtaagaggcca

SEQ ID NO: 11197 - DNA, 1876 bp, Artificial sequence
  DNA replication origin
aagctgtctctggggtactccacgtccgccttgcccctgggagctgggccggttccaggaggacgaagactgaattagctcggcttgcagagaaaggcgagcagcgcccctacacggagagtagcggtgcgcctacaaagtcgcgcatgcccactccggcctcccgctccactcctaaggcaggcggcgaggcttagtgcgcaagcgccattcgtcggcgccgactcctcccgctaaggcgggaacacgcggggcccaagatggcggccagccggtaccggcgttttcttaagctctgtgaggaatggccagtggacgagaccaaacggggccgggacttgggcgcttacctgcgacagcgggtagcacaggcctttcgggagggagagaatacccaggtgaccggcggggaggcggctgggacgaggggaggaaaggacgaggcaggggcggggccaacgagcgcgctagcagggggatctgcgcatgcgcgcgccctctttccaggcagcacgtgagcgcggaccccctttttcccccagggagctactgatagcgacgcccgttgtattcagcgctctcccccggctgcaccttggaattgccgaagaagctttttttaaactccagatgggccgggtgcggcggttcacacctataattccagcactctttgagaggccgaggcgggaggatcgcttgagcccaggatgacctcctgggcaacatagtgggactccgtctctacaaatcaaaaaacaaacaaaaacttcaaatgcagaatctctaggggtggggtcttgacctcagagttttaaaagctctccaggtgattcaaggtgcagagagagttgagacccacaccaccagtggcagctggtgacagcctcagctttttgcttccttgtcacggtagcattacctcattatttcgcagtgttgtgtattgactgagctaatccccagttaactctgcaggtccccgctaagcgtttgcgttcttcctgagcccctgtaagcctgtgcagcaggtttgggtcctcagctcacgcagctgtgtgtgagtagtaggcctatgttcttgctttcctccaggttggcgctgcagctctgggattcattcattcatatagctcgtatttattgagcacctaccatatgcctggaacggtgctagggaaacagcagtgttaaacaggtgaagtcctgcccgcatgaagttttacattgtagttcaggacacaataagcaggtaagtgtacgtaagacagataagtactgtgatcgatagaaaatagggtagcgtgataaaagggtaatgttattagtggggcctttctgaggagatgacacataggtgagacctaaggcaagaggatgagccagccatgtacacttggcgggaaggacattccagacactgcacatgtccagaggcaggaggcagattgacatgtttgaggacagaaagaaagccagaatggctgcagggtagtaagtaaggtggagtttgctaaggtgaaggtccggagccaggcacagtaggatattatctgttctgattagctttagacctcattataaggccagtgagaagtcactggggatgtttagtgaggggactgatgtgccctaatttactttttaaaagactattctggttgtatgtggtgagtgggctatagggggcaataacaaaaaaagaggctggagagaagccgattatggtactataagcgacagatggtggggggttggatgaggacggcagcacagaagatggaagtggttggattcaggttatgcgcaggttgagtcagcaggacttgctgatatatgggatgtgggataaaggaaaagagaggaaccaaagata

SEQ ID NO: 11198 - DNA, 868 bp, Artificial sequence
  DNA replication origin
cctcccagattttgcaatctgtggctcaacagctcatcctcccacattcccggctgtagtggtctgggccggcccttctaccccagtatcttcagctgttggggagcccgacagggcaggctctgatgcaacgacctgaactggatccaacacccaggctggaagctcccaggtggggctgggagctaggggccaggtcaggccagcagggatgtgatgatagggaagccacaagccgcctagccacaaggcccccccttgctgcaaagggctggacagtgacctctctcagggcatgctccatcctgcactttctagggagtggggcggcggggaggagaaggaaggggaaggtgctatgccaagctggggtgcagcgagaggggagcccagcatgggaggaggggctttactggaacctgggcaggtctgtagccgccacccatgtttacactgtgggaaggggtgatgacatgtcctagaatgaggtggaggttgttgtctctagggcaggaacactgggtcatgggagcagggacaggggcagctgttgaggagggatgatgccacagagccacagcaaccgagccaaaggcccccattaactggggtcagggagaggaaaggaaaccgctgttgtgcaagccagagcatggcgagcccaggagggaaagccagagacccagaatgtgtccacgtgtttatccactcattcattcattcaccaaacaagtactggaaggctggcgctgggttacatgctgaggacatagcgttgagcaaactgagccaagtcaccatccccaaggaagagagacaggcaaggagcaagtcacacacataaatatgcaactacagctggcataag

SEQ ID NO: 11199 - DNA, 1056 bp, Artificial sequence
  DNA replication origin
ggatgaggagactgggccctgggaaggccagggatgcaaccctgtccccagaccctcatcccagctggctcggccagacagagacacccaggcttctccctctttggccctgcaggcctgcagagcatggggcctgagacaaggctgccctggagagaaggtgacaggcagagtatgaaactgtcccccactctggagaggaggggagagcctgatacatccctgcagcctgccctggtgcacaaagcccccagagcctactactgggggccccagcagaagatgaggggcttattgctgcatctgactcttggaggctcccattcagagagagcagctgcatccccagcgactgaggtgggctaagtccaggtaagagctggcactgtctcacagctgtggagtcagatgcagaggtggctgggatgccctctgcccactgcggcctggccagccccggcccctcaggagtgggggtggatctttcctggcctcccctgggggaggctgtatcagagcagggcaggcaggagagaaggggacgggctgaaggctcagcagagagggcatgggtccctggcaggtgggctactttggagcttaaggaagctgatgtcccccacctcgactcccaccccaggaaatgctctgtcgaaaggggagagtgacccagctgacagttccaggagggatcttagggcttcagggtggctccagggacacaggggaggttccctgccaaaaccaagccagagccaaaacaaataaaacctcccctaagaggaagaggcctgaaatcccaccgttaaagattcattcctttagcttaacactttgtcctttttaaaaatgcaaacctctcagagtctcacctacaagtaggtttgtcaaaggagagaagaggatgcgtagtctcgtggtgaagaagaatggcagaggcccatcgagagagcaggcgggggctcccaggacttcctttgtgggctacacagctctggctaacggccagctctaaaaacatctgcaggggcccaggcgcgatggctcactcctgta

SEQ ID NO: 11200 - DNA, 1273 bp, Artificial sequence
  DNA replication origin
tatccggccctccgcggcttcctgggtagggagccgcggcctcgcctatcctgcccgcccggcgcaactcaggcgccgcgcctcggtccggggcagctccgaggaggacgaggacgcccggacgcccgacagggccacgcagggcccgggtctcgcggcccgccgctggtgggcagcgtctcccgccccggcgcggctgccttcctccctcctcggtcccgacccgcgcccgggcctgcgggcgactcgagcgggccctgctggcgcggcgagggcccggcctgaggtggggcgccggctggagcgctggctctctcggcttctgctctgggccagcctagggctactgctcgtcttcctgggcatcctttgggtgaagatgggcaagccctcagcgccgcaggaggcggaggacaacagtacgtcctgggccggcgcaggggagggccctgggcgcgcgtgtgtccgccggaggaccccccgttcctgtcggcgccaggccgcgcacttccggccttgtcagctgcctctgactgtcttctcatttccaggcctgccttcttccagctgtgggaagagagggccaaggctcctgcatctgcaataatttctgccttcactttctcctgttctccttttctgccccagccctcccttctaacgtctccctttcaatcacaagctgtagtcactgctcctccaacctctggttttctccctggagaggaagccacacccccctctaacagattcaccccatccgtttgggttcttcccttttgacctctggcttacacatttagtgcctgtttgaaggcactccagatttcagtggcccacagataggatctggttgggggtcccacctttgtagcaccaaaaagtccactctccacttctttgaatcacagggccgccgctttgtcaacaggagaatctaccagccttgcttgccagacaggttaaactgatcgcaactggaggcccttatcattgcttgtagcaccctcatggagtgtgttaagagagagactacgactcaaggatgctcacagccatccttctggccacatttaagttacatggttagatatgccaatgagaggtctgcaggatacagtatgtatccggaatagctgaggattgtgtgttttctgaaaggaaacatagagatcatttcattatacatttaggtataaagggccactgtagttcaccaacttttaatactctttacaaagcacgaatgtgactaatactgttcccagcttcc

SEQ ID NO: 11201 - DNA, 1397 bp, Artificial sequence
  DNA replication origin
ctgctttcagcacccagggaggtgaggaagaggagggaaggaactagaggctgggctgctttcagcacccagggatgtgaggaagaggagggaaggaactagaggctgggctgctttcagcacccagggaggtgaggaagaggagggaaggaactagaggctgggctgctttcagcacccagggaggtgaggaagaggagggaaggaactagaggctgggctgctttcagcacccagggaggtgaggaagaggagggaaggaactagaggctgggctgctttcagcacccagggaggtgagggaggggaggggacaagagactgggctgctttcagcacccagggaggtgagggagggaaggggaggggacaagaggctgggctgctttcagcacccagggaggtgagggaggggagggagggactagaggctgggctgctttcagcacccagggagatgagggaggggagaggaggggacaagaggctgggctgttttcagcacccagggaggtgaaggaggggaggggaggggacaagaggctgggctgctttcagcattccctgcatcaggctttcactgggcagcttcgggatatgggccctcccaaggcctcctgcaggcagatgaagagcagaaccatgttttggagccaaacagaaaattatttttggagactcagggcagaagtttacctctggtgccctgcagacctcagctgctggcggccaaggtcctccttttgaagcctaaataaaagtagctgaagctagtccagcctccgcagctggggcgatgacagcgaagtgaacgtgggcgcggatgttccagggaagagggcttggggctgcagctccaggcgaggcctgttgaagtgttaatgggcaccatctcgaagtgagagaattagccccatggggcagccaaatgtaaaaagcctgggaatttagaaagaaaatgctgccctggaggagaggcaaaatgggagagctccggatgctgagctgagtggagaagcacgttctggacctcgtctggcacaagcagcagggaacccctgacactgcactcagatgctggttctcaccgctcccctagaggcttggtgagctcccagatggccatctcagcagactcctgtggggcaggtggcaggaggatgatactgagatccatgcctctttcaacaagcagcagagacaggagaaagctactttggccacaggggcaggggcgggagcagttgtgagccagcatctccagagggagaccccaggcagagaggaggctgaaggacctgcctggcaatgtaggctgagagccccactgtgtgagacactatgctccctcctcaccccctccgacctgagcagaagcaagagggtctgggaagcct

SEQ ID NO: 11202 - DNA, 890 bp, Artificial sequence
  DNA replication origin
cgcccatcgtctgagatgtggggagcgcctctgccccgccgccccgtctgggatgtgaggagcgcctctgcccggccgcgaccccgtctgggaggtgaggagcgtctctacccggccgctccgtctgagaagtgaggagaccctctgcctggcaaccgccccatctgagaagtgaggagcccctccgcccggcagccaccccgtctgggaagtgaggagcgtctccgcccggcagccaccccgtccgggagggaggtgggggtcagccccccgcccggccagccgccccgtccaggaggtgaggggcgcctctgcccggccgtccctactgggaagtgaggagcccctctgcccggccagctgccctgtccggaagggaggtgggggggtcagccccgacccggccagccgccccgtccgggaggtgaggggcgcctctgctcggccgccccaactgggaagtgaggagcccctctgcccggccaccaccccgtctgggaggtgtgcccaacagctcattgagaacggaccatgatgacaatggcggttttgtggaatagaaaggggggaaaggtggggaaaagattgagaaatcggatggttgccgtgtctgtgtagaaagaggtagacctgggagactcttcattttgttctgtactaggaaaaattcttctgccttgggatcctgttgatctgggaccttacccccaaccctgtgctctctgaaacatgtgctgtgtccactcagggttaaatggattaagggcggtgcaagatgtgctttgttaaacagatgcttgaaggcagcatgctcgttaagagtcatcaccactccctaatctcaaggacccagggacacaaacactgcggaaggccacagggtcctctgc

SEQ ID NO: 11203 - DNA, 990 bp, Artificial sequence
  DNA replication origin
cagttggggcggccgagcagaggcgcccctcacctcccggacggggcggctggccgggtcggggctgacccccccacctcccttccggacagggcagctggccgggcagaggggctcctcacttcccagtagggacggccgggcagaggcgcccctcacctcctggacggggcggctggccgggcggggggctgacccccacctccctcccggacggggtggctgccgggcggagacgctcctcacttcccagacggggtggctgccgggcggaggggctcctcacttctcagatggggcggttgccaggcagagggtctcctcacttctcagacggagcggccgggtagagacgctcctcacctcccagacggggtcgcggccgggcagaggcgctcctcacatcccagacggggcggcggggcagaggcgctccccacatctcagacgatgggcggccgggctcctcacttcctagatgtgatggcggccgggaagaggcgctcctcacttcctagatgggatggcggctgggcagagacgctcctcactttccagactgggcagccaggcagaggggctcctcacatcccagatgggcggccgggcagagacgctcctcacttcccagacggggtggcggccgggcagaggctgcaatctcggcactttgggaggccaaggcaggcggctgggaggtggaggttgcagcgagccgagatcacgccactgcactccagcctgggcaccattgagcactgagtgaacgagactccgtctgcaatcccagcacctcgggaggccgaggctggcggattactcgcggtcaggagctggagaccagcccggccaacacagcgaaaccccgtctccatcaaaaaaaatacgaaaaccagtcaggcgtggcggtgcgtgcccgcaatcgcaggcactctgcaggccgaggcaggagaatcaggcagggaggttgtagtgagccgagatggcagc

SEQ ID NO: 11204 - DNA, 1255 bp, Artificial sequence
  DNA replication origin
ggcagagacgctcctcacttcccagacggggtggcggccgggcagaggctgcaatctcggcactttgggaggccaaggcaggcggctgggaggtggaggttgcagcgagccgagatcacgccactgcactccagcctgggcaccattgagcactgagtgaacgagactccgtctgcaatcccagcacctcgggaggccgaggctggcggattactcgcggtcaggagctggagaccagcccggccaacacagcgaaaccccgtctccatcaaaaaaaatacgaaaaccagtcaggcgtggcggtgcgtgcccgcaatcgcaggcactctgcaggccgaggcaggagaatcaggcagggaggttgtagtgagccgagatggcagcagtacagtccagcttcggctcggcatcagagggagaccgtggaaagagagggagagggagacagtggggagagggagacgagagggagagggagagggagagggagagcgagtgcatggttttgtatgtacacataggcataagtgtgtgcacacaggccagtatgtttgtgtgtgcctgcgtgtgggtacaggcaacttacagagggaatgcaccctgtgtctcttctccctcacccactgcatcttctctctcttgccacaaatcctcggcctaagctgtcttgagattgcctctttctccacctcctccaggaagccttccttggtgaagccaacatacattccaagccaccctttcttgttgtcaccaaaacaatttccttggccatctgtatttgcccgtgtctccatctcactgggagtttcctgagggcagggttgtgtctccatcatcacactgggaagtccccgagcatgggaacggcctctcccatcaggccaggatctcctggggactgggactctgattctgtcttccagactgagccccactactaatgccctgagaggcggtggagaactgaggacctcactcccagccctgcactcagcccttttcctggacgctgagctgtgggctggctgtcagggggcctgggttccaatcctggctctgaatgtgacttgggaaagcttttgctttctgggctccaggtgactcatctgtaatggaggggactaagcagacggcctcggggcacctcactgccctgtgtttgcctacagagctctagcgaagttcagtctccagggtcctctgtggccccttgccgttccccatgactgttgcccacctgcccatccccatt

SEQ ID NO: 11205 - DNA, 1634 bp, Artificial sequence
  DNA replication origin
tccccatacacccacctcggggggtacctcaggaacagagtaaccgtcccgcggggccggctggtggagtggggccgttcctaacggctgcctccgtcctgcctcgcggtctagggaaggggtctcggccacctcctcccgcagccttccaaatcaagatggactcgcaggagactacaccctgcgtctgcagaacctcagaatacagaaccaccaggggttcctggcccatggccctgggaggattgctgttggggagatgggaaggaatctagggaggccgaggcccgcaacaaccatccccgaggacctcagagcacagtcttcccccctcggggttggcaggggcagcctggcgcggggtggggagaggggccggggcggggccggggcgagggggcggggccggggcgtagagggccaccaggtccctccccacacgcccgctgtccacgcgctgcggccttggagtaactgctgttcttaaaggctgcctccgtcctgccgcgcggcctttagagggttggagctggcagaaccgtaactccctctctgagggtgaatacgggccttgattgccagaagggccctcggccggggacgcgggatgatgcggggccgggagatgctttcctggaggctgagaaacctggagggagacccccaaaacttctcagttcgccgaccccttggtcccagagggagaggaggtgggctgtgcctcagcagggtcgcaggcattgcaggggcatcacgttagtcagagcatgttggcatggaggccactcagcccagggaggcaggactcacgccccaaatggaaggcacgcagtcgtgcctgcctagaggcgttaatattgtgccacactttgggggtgaggatctggcaactttatacctttttgagttgtcttttcaagtctgtaggatcagcccacagcttggttcctgtgaagtgagcttgctgtgactgcttcttcagggacaactgtggtcatcttggggagatgccttggggtctgtggcaagaggcaaaaaggagaatgtgtgatactcagaatgcattaaagcgtgctcttacagagcagaagtcagtggctgctcaccagagaggggcctgggggttgagaaaagcaaaaaaatggatgggcttctatcagatttcaacactgatgaactccagttggggggcaggtgccagccagggctattaaataataacaggaggggctgccataggatgacaggatgggggagggtggggaggggaagaggaaggggacgtgctccaagaaggcacccagcaccagtggtctcattagctttttgctatcagtcctcaactacatttgggggacagttcctgaccaggcaatctgtcagcaaaggggtgctgcaatctgtcagcaaagggaagaggggaagtttggggtcttaactggctctctactaagatacccagaggaatgccttcatttgcataataaaccagaggaaaatttgagtctgcccctgagttccaaaggttctgggtaccagggcttgaatccagcagtgtgactattcgtgcctcagttttttcatcctgaaatttggaaagtcgttctttccattgtgatattctctagctagaa

SEQ ID NO: 11206 - DNA, 782 bp, Artificial sequence
  DNA replication origin
caggaggctgaagtgggaggattgcttgagcccgagagatcaaggctacgttgagcttatgaagctggtattagacaaatgctaaaatgacagtgagtgctgtggacagggaagtggggctgtgagcagggtggtggcaggaaggaggtaagctttttagatggggtggtcaggagggcctctgtgagacggtgacctttgagcagaggcctgaagcaggcaaggagcctgtggctatctgggggaagagcatccaggtagagggaacagccagtgcagaggccctgaggcaggagtgaggttagctgcttgaagagcagcaaagaggctaagtggaagttcagtgctggaggggagcgggagagggggtcagtgacgcaggaggggcacaggcctcaatggacactgtttcacttgccagaagtggacagcagggcagggttctgagcaggacagcaacagtattggacatgcttttgccagggtttctgagacttctgaggggaaactgagagcagagcacaggcgaggaaaccagggaccagtgagaagactatgactgtccagggggaggtggtgatggggtcctgggctagggtgggaacagtggaggtgtgggaaagcctgggattctggatatgttttgaaggtacaagggacaggaagcggagacccagggttgagtctggggtggtctccccaagacctgccaccaggcttctggcattcagctcctccatgcagcacatccccctccttggctctgttggactcctccttgc

SEQ ID NO: 11207 - DNA, 1067 bp, Artificial sequence
  DNA replication origin
aagttctgctgggggagggcgacacagtaactactgtcagggagtgatgaaatctaggagggaagatgaagccataggtggctgcagggatgcggggtgggtgctgtctaaggtgggccagtcaggaaatgcctctctgtgaaggcaacttagctcaggagagcctgccagaattggggggaagtgcgttccctgttgaaggaacagcagccgagtgtttggaaagagtgaggaggcccaagtggctggagtgagaaagagaaaaaaggaagatgaggctggagaaatgcccggggactgggccctgcagtctcatagactgggtttaaggtctcatagactgccatggagggtcttcagcagcagtgtggaaggatccattgacatttcacaggatccctctgactgctgtgtgggggtctgactgacggccaagagctgaagcggggatccgctgggagggcccctcagaacccaggctaaggatggcagtgatgggaccgtgtggagggaagctgttggattctggaggtgtcctaaggcaaggcaagggcagctgcagacacatggatgaggagggtgaggaagcgggaggagccaaggttggccccaaggtttctgcccatgagggtggtggggcctttcactgagagcaggaggggagggaggaggaggaaaagggggtggagggtcacctggaggtgcctggcagagctgggggtaggcagtgggccacacgggtcaagttcaggtgcaaggacagggctggagaggcacacttcggagttggaaccacaggatctgatgagatcccccaggtagcaagcgcaggagaagcaaaggattctgtggtctgagcccagagacacaaacatttcacaggtcactaagggtgtgtgtcaggccccatcctgcttaaagcctcccagcggccttccagtggatgcctaggtcccggcctctccaccctcacttcactccgccctccaccccaatccctctgtgctgcttcacgggcctccttcaatttcttaaacttgccagaccagcccccttcccaccccagg

SEQ ID NO: 11208 - DNA, 1124 bp, Artificial sequence
  DNA replication origin
ccgagggcggagctccccaccagtgccatgccgtccgccagcactcctcagcccttgggcggtcgatgggaccgggcaccgcgaagcagggtgcgacgtctgtcgcggaggctccggccgcgtggaagcccacctggggcgtggggggcggcttgggcatggcgggctgcaggtcccaagctctgccccgcggggaggcggttgaggcccagtgagaattcaagcacgacgtgggcgggtgggccagcagtgcaaggggacccagcacaccctccgaagctgctggcctgggtgctaagcccctcactgcctggggctggcggcgccagccggcggctcccagtgcggggtccgccaagcccgcgagcgccgcgcggagccatggttcccgcccgcgccactcgtcccacacctccccgcaagcagagggagccggctcctgcttctgccggcccagagaggggttcccactgtgcagcggcaggctgaagggttcttcaagagtggccacagcggatgccgaggccgaggaggtgctgagagcgagcgagggctgctagcacgttgtcacctctcactatgagcaagccctctgaatataggataaagtctagggttgaaggggcattcagaaagtggaggaggacctgctcttgagctggggtaatttggggagctctttcaacaccagatctttcaaaacttacctgtcccctgtcccacaccttaagggcagctggtgtcttgatgctgaattccagtatggttgctggctggttgatgtgttttgggagaacatgccttggctcagaagcctgaggctttaactgcagaattctgggcactgacgctggagttgggaagatatttgggggcagcgggctccctcaaaccatgtgggcagctggccggcctgttccagctggcctgcaggcttggagagtgatttcagatgctcaaggaaggatcacccactgccactcaccagcaccaaaataatgacggaaatgcatctcctggtgcaaaaagacagcccttcacctcatagtcagaaagaaagaagtgccctgagggcagataccagttgccctgcagtcagcaaaccctttcctgggggtggagct

SEQ ID NO: 11209 - DNA, 952 bp, Artificial sequence
  DNA replication origin
acgcagggacagagtatgagagtgtgtgtataactgaggctgggacattgaatcatgccaggtatgtcttctccatcagcccactcttactcctggcctgggcatctcacacatctgtgcataggaaatctcttcttccctggggtctgtgtgcagcacctagtagatgctcaataaatgtttgtgtgagggaaggagacaggaaaggaagtgtctcgctgatcatcttgcggaatggttcctaagacctctgcccaggaaagattccacccagtgctccagcccggtcaggcagaactaggttgccagatcaagggtatctcccaaaagcttccagggcagttgggggtgggggggtggggggtagggatggggaatgcagaagcgggtgcagccagctctcccccagggtgactctggcagcacccccatcctgggcaccctgcctgctctgtggctcacgcccctcctgaagtgactgatgctctgaggcccaaggctaggtccagggcagggcctgcaggggtttcatgctcagtccaggacttgcctaggtccccctacatctgtggggcccccatctaggttctaacaggagaatcacctctccaagggggatgctgcccctcggctccccttggctctcaggaggggccctcagggactaccagtcccctgccagtgggaagaaatagccctgccctcagggagcttccagtgtgatgggggagatacagcagactgtgtcccaaagtaaaatgactgttagaatgaggtgggtggaggagggaagccttgggtgggtgtgactttgggcatctgagcctggggtgcagaggtgggctctgtgggcctgaggtggacaggagggaaccaggccctagcaagacttttgccagctagacctgctgcagcagttgggagggtgggtgctgctggagtcctgggtcca

SEQ ID NO: 11210 - DNA, 963 bp, Artificial sequence
  DNA replication origin
cagagcataccccctaattaggggactactaggtgctgattcctggaatttcctgcaatgtccctgccccttacctgggaatctggcccctccatgcccaaggcctcaccacaccacactagatcccagcctagggagcagtctccacagcccccaagccctgggtctccagagcccagttcccgcttccctctaggtctaagccctccagctgcaggctgagcctgtggtcccatggcaggaccctcagtggatgtggagcccgggtgcaaaaccatgtgtttatttttattagaaatgttcttggtataaaaacaatcatgcgctacacattgtcgtcaataaccatcaccaaacacccaggcactgaactccgtgtggtcggcaggaggggcaggcgggcaggcgggcaagacagacggcagacgggcggggcaggcgggcaagacacacggcagatgggcggggcaggcgggcaggctgcgggccacagggacacacacagaggccaccaggaggacgcagcacttggcaacacactcgagatttgttttcgttttggcttttttgtgttttgattttttttccttttttctcttttgcaacatgtaaggtttggtgaactggggaagggtggcagggagaggggagcaatggctggacgagaatgaagcagaggagaacaggaaagaaaacggcagaaaagtgacactggtgggacccaagaaagcaggaggagctgaggacaaagaggatgagagagagaggcggaggcaagagccagaaaggagacacagaaaaggccaagagtacaagcagccggggacgccagagagggaaaaggtgaaacaaagagataagagaacagaaagacagggctggagacagacagaggggtcgccaacagcacagacagagacgaagggagggagagatctagcactggggcccacacgacctgag

SEQ ID NO: 11211 - DNA, 1169 bp, Artificial sequence
  DNA replication origin
gatcctggagcaaacacctgaaggccgtgagagagagagccatgtggagacctaggaaagggcacaccaggcacagcgctcagcaagtgcaaaggccctggggtgggctcatgcctggcaagcctgggggagcaatgaggaggccagtgtggctgaagcagagagagcaacaggcaggagatagggtcatgggggagcaacgggcaggtagtgcagatcatgtgggccttgtgggcagtttgtaaggatttagttttttatgcagaatgggacaagccattgcagggtttgaaagaggattgacgttacctgatttatgtcctaatgagatcactgggccactaactgctcactcctctctgggagcgagggcagagtgggagaccagttaggaggctggtgctgtaatccaggtggggatgatgggcctggggcgggtggtggtcatggaggtggtgcgaaggggtcagattctttgtaaactttgcagtgtggccgtggtgtttatggaaggattgaaggtgagagagagatgacagaaagtcaaggatggcttcagcattctctgctggaacaaggagatggatgaaatggccacgcactacgatggggtgggcgggaggaggagcaggctgggaaggaaggcagggctttggtggagaccatgtggagagtgggatgcctgctgggacccacgtggccttgtggagtaggcgctggagtcagggagaggctggagtggccatgtgactagggaggtggcagagtacagatggggctggctgggagcaccaaggagtgtgtgtggctagagaagaggtcccagtgagccctggatgctggagtgttgggggcagagagaagggggccagcatggaagctgagaaggggcagcctgggaggcagcagggcccagagcgtggtgtcccggcggcgataaagagaggactggaggagggagtgactgtctccatcacatgctgtccaggggccaagtgagacaagggctggacggggccattgtatttagccacctggggggcgattgtgacctccacaaaagcagtctccttagagaggtgggtgcaaaagccagactggagttggtcaggagacagaggagagaaactgatgacagtgagcagaggcacctcttatgaggagctaca

SEQ ID NO: 11212 - DNA, 839 bp, Artificial sequence
  DNA replication origin
taaacattgctgtttactatgtatccactgtgttcagacactttaaagacatcatctttaaaatgtgaaagacatttcactctcacagcaactctaggaactcttaagattcctgcactctagacgaggatatggagagtcagagagaccaagtgacttgcccgaggctgctcagcaaatgcctgcatcaggcagtaatcacaatagaggtgtgagaagtgaaaagatgcctgggtgtggaggctgagccctcatgggtggggtgaccgtgcatcctgtctcccgtgttctggtgtaattattgagagcatccccttcggttcttggaagtgcccaggcgggatggaaaattgtatgggcaccctgatttagatcagcagacctagatcagatcaggggtgagggtggggatggatgaggtggggatggggtggaaagactggaagtggtggcaagatggacagctggtgcctcctggacccagtgcctaggctgtcgaggggtctgggttgtcaaggggaagggctttctggaatcttctctttgagagggacaggaggggagaaggctttggtcagttcctgtaggctctgtccagactcctagtccttggggcaggattcaagaaactctccagcagtcctaagggaggcgtttggtctgattgtcagctcaggtggggaaggaggactggagcagggttcagaagagcacagagctcggctgggcgtggtggcacatgcctgtaatcccagcactttggggggccgaggcgggcggagttcatctgaggtcaggagttcaagaccagcttggtcaacatgctgaaaccccgtctc

SEQ ID NO: 11213 - DNA, 915 bp, Artificial sequence
  DNA replication origin
ctccagtcccagctggccgcctcctgcacaggcccagcagccaccccccagccctggagtctgtgccctggtcctcaccaacggaagggcctggacagtttgtagtatcacagcctctcacttgctgtgtgactgtgagcaagttccttgcctcctccctacctcagtctctttttgtgggagctgggttaggggaattctgcccattcctccttgtttttcccctctgagatgtctttgaggggccacttaattcatgcctccatgaagccctggctgagcgcttgctgtgggctcctcagccccgggctgggctcttgggtccctggtttgatttatattaccatcacaggcagactgggctgtgtgtgagcactgggcagctggctccacacccatctccctccatcacccactcccactcagggtgtggggagcagctctctgaaggacctggaattttggcacagagggcggtgaatgaagagggagctgtgggcagaaggcagcatgtgcagaggggtgagggcggcggttgtgtgatggtggatgcgtgtgagaatgggcaaggaatgtgggggtggatgagccaggaaggcatgcgtctcaggggaccggggctgggcagaggtggttgtggggcctgagtcagacgtggggcgggtgtggatctggaggggagaggtgtggtctttgcagggacagatgtaggcctggagaatcacgctgggcctgcagcaggcgtgggcccaggggcaggcaggttggatgaggcggtagccatgggtctatgagcaggtgagggcagcgggtagggggaatccatggcttggggtgaaagcatcggtgctgggacagttgtggaccctgggcttctgggggtgagggacgtgggcccaaagcaagtgtggccag

SEQ ID NO: 11214 - DNA, 3437 bp, Artificial sequence
  DNA replication origin
gccccgttctcctggcaggggaagggatgggcaggaatggagagcctggtggcagaggtggggtttcagaggcaagaggagggctttgccttaatgttctggccacagagccgctccatgaatagccgtgccatcccctccatccagttgctggaccataggcccctccatggtcaccccagccagtgaggaccaggccaagggaggaggtgctaatggtgctgaggtgtggctgggcccccaagcagtgtgaggggtgtgagcttctgccagcccctggtgcatgctagggcctcgcagggcctccgtgggaaaggattcaggctaattggggcattcactggggagactcagcaaggaggcgtttctcagttaagaagagatgggctggaggggtgctttgttcacgtgcggtgactgtgtgagagccaccaggcagtgtgagggtgggggtgtggatgcttcacggtgggcaccgcctgcttgtgcttaatggagcagggttggccatggtcaggcaggcttgttatatgtgactgtccagggttacctgtgtctgtgtgtggtgtatttgtgactctgtgtgtggttatgtgtatttgtgtgtggtgcgtatctgactgtgtatggtgatgtgtggatgtgtttctgtgtgtggtatgatggtgtgtgtgtgtgtgtggtgtgtatgtgactgtgtgtgtatctgtgtgtagtgatgtgtatggtgttatctgtgtgggggtgtgaatctggtgaagtgtgagtgtgtgtgtgtggtgtgtatctgtgtggtgatgtgtggatgtgtgtgtggtatctgtgtggtgacgtggtatctatgtggtgatgtgtgtgtgtggcatgtatttggtgatgtgtgtttgtgtgatgtgtgggtgtttgtgtaatgtgtatttgtgtggtggtgtgtgggtgtgtgtctgtggtgatgtgtgtgtgtgtgtgtggtgtgtatctgtgtggtgatgtgtgtgtgtggtgtgtatctgtatggtcatgtgtgtggtgtgtatctgtgtggtgatgtgtgtgtgtggtgtgtatctgtggtgatgtgtgtgtgtggtgtgtatctgtgtgatgtgtgtgtgtggtatgtatctgtgtggtgatgcatgtgtgtggtgtgtatctgtgtggtgattgtgtgtatgtatctgtgtggtgatgtgtgtgtggtatctgtgtgatgatgtgtgggtgtgcatctgtgtggtgattgtgtgtgtggtgtgtatctgtgtggtgatgtgtggttgtgtgtggtgtgtatatgtgtggtgatgtgtttgggtctgtgtgtggtgtgtatctgtgtggtgtgtggtgattgtgtgggtgtggtgtgtaatctgtggtgatatgtgtgtgtggtgcgtatctgtatggtgatgtgtgtgtgtgtggtgtgtatctatgtggtgatgtgtgtgtgtgtggtgtgtatctatgcggtgatgtgtgtgtgtgtgtgtgtggtctgtatctgtgtgatatgtgtgtgtgttgtgtatctgtgtggtgatgtgtgagtctgtgtgtggggtatctatgtggtgatgtgtgtgtgtggtttgtatctgtgtgatgtgtgtgggtgtgtatctgtatggtggtatgtgtgtggcgtgtggtgagtgtgtgtgtgctgtgtatctgtgtggtgatgtaagggtgtgtgtgtgtgtgctgtgtatctgtgtggtgatgtaaggatgtgtgtgtggtgtgcatccatgtggtgatgtgtgtgtggtgtgtatctgtgtgatgtgtgtgtggtatctgtgtgatgtgtggtgatcgtgtgtctgtgtgtgctgtgtatctgtgtgatgtgtgtgtggtgtgcatctgtgtggtttgtggtgattgtgtgtctgtgtgtggtgtgtatctgtgtggtgatgtatgggtgtgtgtggtgtgtatctgtgtggtgatgtgtgtctatgtgtggtgtgtatctgtggtgggtggtgattgtgtgtctgtgtgtggtatctgtggtgatgtatgggtgtgtgtgtggcatgtatctgtggtgataggtgtgtgtgtctctgtgtggtgtgtatttttgtggtgatgtgtgggagtgtgtgtgtggtgtgtatctgtgtggtgatatgtgtgtgtctgtgtgtgctgtgtatctgtgtggtgtgtggtgattgtgtgtctgtgtgtgctgtgtagctgtgtgttgatgtatggttgtgtgtgtggtttgtatctgtgtggtgctgtctgtgtgtggtgtgtatctgtgtggtgagtggtgattgtgtgtctatgtgtgctgtatatctgtgtggtgatgtatggttgtgtgtggtttatatctgtgtggtgatgtgtgtgcatggtgtgtatctgtgtggtgtgtggtgattgtgtgtggtgtgcgtctgtgtgctgatgaatgggtgtgtgtggtgtgtatctgtgtggtgatgtatgggtgtgtgtggtatgtatctgtgtggtgatgtgtgtgtgtgtgtggtgtttatctgtgtgatgtgtgtatggtgtgtatccgtgtggtgatgtgtgggtatgtgtggtgtgtatgtgtgtggtgatgtgtgtgtgtttgtggtgtgtatctctgtggtgatgtgtgtgtgtggtgtgtatctgtgtggtgatgtgtgtgtctgtgtggtgtttatccatgtgatgtgtgtggtgtgtatgtgtgtggtgatgtgtgtgtgtggtgcggtgtttatctgtgtgatgtgtgtgtgtggtgtgtatctctgtggtgatgtgtgtgtgtggtgtgtatctctgtggtgatgtgtgtgtatgtgtgtggtgatgtgtgggtatgtgtggtgtgtatctgtgtggtgatgtataggtgtgtgtctgtgtgtggctaggggttgtctgaaattataattggatgcaaatatgtgtgaggttggggatttacatgacttgcgtgcccgggtttgtgggtgtgtatgtggaggatgtgatgggattgggtgtagtgtgtgtgtttgtgcgaggctgtgtgatgactgggtgagcctgtgtggctgtgggactatgggatctgtgactctgtcagtgtgtgcgtatggccctgtgcccatctttgtggctatgaggctgtacgaggttcttagtgggtccataagtgtgatgggagctgtgtccctggtgagcgtgtgtgaccgtgaaactttgtgagcttgtggtggtgtgtagtatgtgattttgtaagggtgtgcattgccgtgtgtgtgtgtgtgtgtgtgtgtgtggctgggggtgtggcgggggtgtggtgggggtgctgagagccttcaggagggaaaggatgtgtgtgctgccttggataatcctggtgccctggtccccccgcccagctgtagacctccccagccctgggt

SEQ ID NO: 11215 - DNA, 707 bp, Artificial sequence
  DNA replication origin
atctgtcctattccaggctgtacccacagaatctaggacagctcctggcactggaggttgctgagtcagtgacagtgactgctctgtgcctggcagtgtgtggatccagggcccagcagtggccactgctggagtcagaggctggtgggcacagaggcatctagtcccgtaactttcattcactgtgcgaagtgcagtgattgagacattgagattgttataggtgcccaggggaggaggagcttggggatacccataaaggcttcctggaggaggaggcccgagctgaatccttaagaacagatggagctgacttgaagaaaagagtctgggaaggtgaatcagacatcaaaggcagagcaaagagtctgactaaaggctctgatgtatgttggaaactgcaggtgctgttagagttgggggtgggagaggaggctgggggtggatgaagtcagtcctgcagggcctcaggacagggctgaggattggacttggccctgagggaggtgagagccactgaaggtgtgagggatgggagtgaccaggtgggactagagttttggtggaaagttgtaagggccaggctgggtaggctgaggtttgtgtggcaggtgtggggctgtggtctggaaagatggtgtcgacaggagtggaggtgcgccgtgaattagggcctgaggggtcagctggctgctaccaggtgtggc

SEQ ID NO: 11216 - DNA, 1102 bp, Artificial sequence
  DNA replication origin
tgagagtaaggaggggcagccttcctgaaagagcagcaggtgacgtgaggcgggtgggctggccctggcagagagcgctttccccggcctgctggacttgccttgtgtccatggatgagccactgttcctcactggctcttggtttctccacctgtagtatggggacaactgtattccgactttgctggttattgtaagaattacagagataggaattagccaacagaaaggcctagtgagagctggagggagtgaggggctgcctctgaggcctcagacctgggggtgcgcctgggcctctctcagcctcccgttgtgaccgtcctttcctctctccctcacttacatgctgccccattatatctgtgccccattttgcggtagacagaatgatcatatggatattctatgcaaattctgctttttaatgagccagaaggaaagctaacgactcttgcagacggcttggggccccagggaggccttgggatatggggaggagaggaagcaggacaaagtgacaagtaagaggagaggagggagggagggcggagagtgaacagagggccacgcagtaggggctgcggaggggtgcgggacaggggacagtggaggccctgtgaccatctccctgagcctccatgcccaccccatttcacaggtaggaaacaggctgagagagcagaggccacttgtcaggtcaacccagaaggcaggaagcagagaggacggtgagatagaaaggtggaggtggggaagaagacggggtggaagaagggaaggtgtggaccgcagcactgggctctggctggtggggcttggtttccttatctgtaaaatggtcatcatacctaggacctgggtggactggaaggagctcaggagacaacacgtagaaaggttactctactgggagtgctgtgtgaacatgaggggctgtgcaatgatcgaagagagtgtgtatttggggggagacagagaagaagcagaaggtgggcaggagagagtaggggaagacaggaagcgcagaggaacaggagctggagatgggtccgggagccttccggacaataggtcaaatgttagttaattaaccaccta

SEQ ID NO: 11217 - DNA, 854 bp, Artificial sequence
  DNA replication origin
ttgaacagaaatcggcttttgagactgggcagcaggcattgtggaggccttggaggactgggcagggctttgggcctccctttgaatgtactctgcagatgcccattgtctgctggtgcccgggaggcctggccgtgcctgctgactggggtgggtggcccctctgcaggctctgctccagaggcagcccctgcagggacccactgaggcctgggttggtggtggcagagctttgtcaaccttccaccttttatgaagattctggggcaggggcctgggtgggtgggacagggtgggaggggctaagatcaacgaggggcttccctctcagagtgggtcagctcagatcaccagttgctggcaattggacacatcgaacctggacagggggagccagcgggcatctcctgcctgtcccctcattgtctggacaggacccagatgtgctggtggctcttgctggcaggggaggagggaggccaggcagcagcaaggaagggtttcgatctttggcattgatgggcctaggcttcagtcagctgctggcagctgaggatggcaacttctctctagtccccaggtcctcaccccgagtggcgggtgataattcctactgggaagggctgctataggggtggcatgaagggagatgacggtggaaagcactatcacaggtgggtcccctggaatagacctgagtgagggttgcaggcactctacctgggaggggacctcgaggtgcaccggtacaggacgggaggtgagaggcagggatggggggctggtgccagtgccttcgtgagcaggggacctcggtgggcagccaggagatggcggaagcagatcctcaatac

SEQ ID NO: 11218 - DNA, 1147 bp, Artificial sequence
  DNA replication origin
acaatgtagggaataaataattcagcagtggctgtgttgtgcctgctgtcctcacccacgggggtggccacacgcatgcacacacacacacacgcatacacgcacgcacgcacacatgcaagctgtggagtgggccaggagctgctgttctggctggtggctggcccagaggcagcgtgttggcgtttaggcagggccctgaccacctctcaaccctggtgaacctctttgcacccaggcaacccctgaggagaggttagcagcatctggggacagctgctcctggatgcagtgattagtggcacttaaaggtccgtttgtcctcagaccagcctgagatgctggcaacctggaggaaaggcttctcttaatggacatgcttcctgggctgtgttttgaatggattccatttgattcagcaaacatgtatggagctccaagtttgtgcaagatactggagcaggtggtggggatgggcaggattgccgagtgaataaatctgggtccttcctggatggggaggtgtgatgggcatgtgatttgccacagctcaaactggggtatgggagggctgtgagggggtacaggtgagggtctaggggctcagaggagggcgagggcagttctgacaaggcgtgcatggggcagcctttgtcagaggtggagccgggcagtgtcctcagggtagagggtgggcaccggtgggaccttgggcttgtctgtgacagggatgtggcatgcaggagggttgggcagagggtgagtggagaggggctggaggaaattggggggcttaggtcaagaaggtggacttgatcctgcaggatggtgcctgcttggatttgggagttaaaagtattcctttgggtgtggactggagggttggttgcagggcaaggcctgaagctgagagagtgatgaggagatggatagaacaattcagcctggaggtgatggtggcccggatgatggccttatgcatagtgacatccattggttcatatatccaccaaatagctggtgagcatcttttagtagcagatgttgggttgggctgagaatgcagcagagtgagccaaatgcataccgtccttgcccacatggagctgaccttctggagtgggaagaaagacaggagacatgatgt

SEQ ID NO: 11219 - DNA, 1807 bp, Artificial sequence
  DNA replication origin
ggcattagcgcatcccggtctgcggagaggcgggacaggcgggggcgcggggcattatttgcacctcttcccggcagtctcccggcgggagggcacccagcctcgcgcgcctcggctcctttcccaggcaccgcgtccagctcccgtgcccgccccagcgccgccttcgccagcggccggagcccggcaaccgcttgcccgtggcctcggcaggttgtgggggtctctagggtctggggtctccctgcagccccaggacttcagggtcaggctctctccggacactcgggaccgtccctccccgggaccgtgatgaacctgcgcgtctacgcggccgccgggcgagcggaccggcagtggtctctgtgtgtgcatgtgtgtacgcgcgtgtgtgctgggggtccccgctccggggtcggtcttccccggcgctcgcaggtgggaggcgtctcctccccgcgcgggggcggggccgggaggtggaggcctcgactgcgagaggcgcccccgcaccagggcggtctgaggctgtttgtgctgagatggggcagcagcatcggcggcggcagggagtcctgaggcccgaacgtacgagcgccccctgcccctaggccttgagtgacatcccgccctcagactttcagtccctgtcggaggaggcgccttgcttctttctcccctctccgcaccattgccggcccctggcgcgggagaacgcggcctttccggacaccgactgagctgggcttgcctagctgggtgcccgaagccacgtgtctctcagagcggtggctgcccctgtgtcaatctggcagaaagcccgaagtgacagggagggaggggcatgtatgttcccatcatagtccctcgccttgtccgttctggggtgagtgggggcctagggcaggcagggagaccagtgctcccagggtctccatacggagcaccccatcccacaccctgccattctgcagcgctcagcctcccgccccggggccagccaatggtggacgtgaagaatgctctcatacccatctgcccacactcccgggatgcgtcctgggctagccccactttcccccggatcccaatgggatgctgaacctcaggctctggttctgcatgctcagctcctcagagcccagaagggcctcagggccttccggcctagggtagggggaagctttcatgaagaggggaggactagcaggagccctttcggaggtggcagaacttccgcagaggcctctgggtactctggggtgtgagcacccatagcgcaggggcctcgtcacctcttcttggcaggccctggggactgctgaaccggctctcgaaatgggcctggctgcggtggagagtggaggttggagccttgtcccctctctcacttcctggagggcttcaccagcccttagtcagatcctgtccttggggtgcggtgggcggggggctttgaggatggtgcctccaagcctctgctcagcactgggctgggcgtgatgtccgcttgtgaattgggtggccgctgtctttatgttcctccaacttctgtccttttacacataagcttttgcctacctgccaataccttcacacctgtcagggacaaaaatacctcaaaagttatcccccccacaccccgcaccttagccacttcagggactaccctttccaggggcatctgcatttaagagagacgggagaggaagatggcaaggcttaacccaaaggagtgctctaccctactcatggattcttaggcattttcaggagcgagatatattggtgggggggtggcagcatg

SEQ ID NO: 11220 - DNA, 2021 bp, Artificial sequence
  DNA replication origin
cgccggaggccacctccccgagccccgatgtccccgccgcagccctcgccccaggaggccggagggcacggtcccctctgtcggtccccctcgggccacaactcaccgcgcgccagcaaggtttaagccgcggcgaggggtcggctgcgtgccggcctgccccgggggcgcaggcagtcgacggccggaggcacggttctcgcggtgcccagagcccgggccgcggcgggcagcgctgacgctgcggacccagcgcgccgcggagccgcccggagtccgggacgcagcagggatgagctggcggccgcccggccggagccgccgccaagcgcgcggcgttcggctgctgctccggcaagcgagcaagcgagagggagatcggcggcaacccctgctcctgctgcggcggagcccggcgtccgagccggaaggagcgggagaggcggcaagaggagctgggtctggccgagagctccgggctgggaagggagcggagcgggagcgaccagcgagcgcagccggccgaggtacgggcgcctggcggcgccgcaacagcggcaacagcagcaggaaaaaaaatgagagcgagctagagagcgcgctggagagcgagcgagagagggagcgagagacgagagagcgaggaaggcgctgagaggggaggctgcgggagagggcgggagagccgggaagcgcaagggggcgagggggccgcagccgcttgccccggcgcccacagccgctgctgcacccgaggaggcacgagaccaatccggcaagtttgcgctgaaagtgcgggccaagctcacggcgcttctgccggccttttaaagagagagcacctggagcccaccccctaccccacacctccacctccggaaggccagggctctcgcggcgctccgccacccctccacacccgccctgctggcagctcccccttccaccacaccccaccggcgccctcttccggaagccccccccttcctcctccccgtgcgcgtgccagctcacctaccccgaggacatggcggggaccccttctcaccccagagggggagggtcaggaacatagcctccctaacacacacccagaaaagtacagcaaagcacagggacgcagaggggcgcgctactcccaccctggtgcgtcactggaacctcacacatccgcgcgcacgtggcgtatgcccccatgtggcatgttcatttgcacaccccactgctcctgattcaagtatataacaaggggagaaactgaggcccagtgaggtgactccacttgccccagatctcacagcctgtccaggggacactttccacagagcccccttaccacctcaaaaccccaccaggctagggaaacaccccacccgctggtctccctccagcactggatggcaaaagtgtaacaggtggcctcctggtcggcaggctgcagtgagactcgggaagaatcccttagccaaccataaagccagctcgcccccttcccagagggggcttgaaaactctcaggagagtgttgctagaggcaggcagcgtggaagtgagggagccacgcagccctcttaggattgcaagagcatctcaccccagactgcagaagcggcttcaattagagccgtgatgtgtgactgtccttgtcctggggagggagcacaacactgtgccagagagctgggggaagaaggtggcaggcagcagagctggagaggttggccagaggcctccctccccatcagtacctcgacccccggctgacctgccaagtgctaccttgtgcttgacgatgcccaggcctggcaggactcggccaaccctaatttctacaggggaaattaggtgaggggaatgtctgggagggtctgggaataacagggacagacccccatcccttgcaactggactgccctttctccctccttgcccttttccatgctcctgccctttcctgaagacctgcttaggctccacctcctccagatctccagactatgctaggccaaaaccacatctcg

SEQ ID NO: 11221 - DNA, 1139 bp, Artificial sequence
  DNA replication origin
aggagagcaggtgagcctggccgcgcacgaatccgagggggcggccgcccagctgggaagcagccctgaaatagacccccgccgcccccgctgcctccttccggaatctgctcaggtgaaaaacaagcctctcaatccgggcgtgtccccgggcgtgggacggggaggtgcccagcactgtgggaggcgtagactgggcctgggtcccgctcggacccgccccaggcccggccgctgggtgcaatgagggcgttcggccaccgggcggcggtgctggcccgcgatggggagcctggctggtggggcgctaggctcgcgctcgggcgcgcgggaatcgaggctcctcacgttcttctcagcgatcttgccgcgtttctggggtggctgaactggccctccatcctgaggaggccggcgcaaggggcctgcccggggcagtggcactcccttctgcgggcacagagagccgggccggggtgccgactcccccccacgtgtctgtctccctgccctcctgctgctgctttttgtcccgcatttcccacgagcttcctgaagtctaagagtgtgtgtgtgtgtgtgtgtgtgtgtgtgtgtgtgtgtagtcaggaccatccgtccatctaacctcccatctgtctgtccatccgaccacccacccatgtcacatttgttgcccaaggactgtaaaccagctggaccaaagaaatggggtgggaagggacacattccttccggtctgggaaggcagaccagtgagcgggatgcctcggaattctggactaggggtgctgcttaagctgggccttgaaagttgaggagggggcttttgggtgccgaagagaaggtaatttggccacagaggtgagaacgagagggcccaggggctgggctgggctggggtcggggagcaggaccgcggtgaggggaggtgtgtgcggggagccgtgctcaccatctcacagggccatcgcagcagcctgagctgtgggctttatcttcctctccttaccaatgaggaaacctgggctggagaggtcaagtgcccacgcagtggggaatgtcacagcccaggctgaatacggctgaatgtggctgtggaaagagcctagcctttaacacagagcgtgacacttggg

SEQ ID NO: 11222 - DNA, 815 bp, Artificial sequence
  DNA replication origin
ttctccacacatacaacggcaggccataggtgcaccccaatcaagatgaccagtactgtactgcctaaggcatcggccccaggcggagctctgccagtgccagtgtctttgggtccatgttccgttctccccgctccctttcacaatgcaggaggcgcaaggtgcactccgacgggccgcgcacggagggcgtgcagcacacttgatgggccgcagcggtccccaggctccttccacaaggacgcctctgtggccgcaccgggatgccaggcagccggctcccctgtaaactggggttcccgtgcggacaggagttgagagggattcgacttgcagcagtcagcagcgtggaggcacgggcgccgtgtgtgccgacttgggaagcggaagagtagtgcggctggtggcccgcgtgggcctgaccctgggagtctcgcgtggctgcctggcgccccctcgcggtcgtggcccgcttcgccgcgcctattcagcggagctgctggagggcgcgggtggactgggcttgggacaatttgggctcttgggctgcgatactgcgacaaactcccaaccccgtttcctgtcttccgagggagggaaaaccaaggctttgagggtcctctgaggcctgcggcgagccgggaaggctgggaaggaaacacccagtgaggcaggttgggacgaaggaccctcctggagctcaggaggccgcccagcgtccacaccatggctcagattccaccgtccagtcccgcagcctttcagttgtaaatctgcggcccaggctggatacccaggcgtggagatgggcttga

SEQ ID NO: 11223 - DNA, 1115 bp, Artificial sequence
  DNA replication origin
cgggcgcctatagtcccagctattcgggaggctgagggaggagaatggcttgaacccgggaggcagagcttgcagtgagcggagatcccgccactgcactctagcctgggcgacagagcgaaactgtctcgaaaaagaaaaaaacaattaatactcctggaataatcatagtttattgagcgtccacacacaacaggtattttatgtcatgcatatggtttcgcttctccagggtgagcatgaggaaagttaaatgatgtgtccaagatcacacagccagtagtggcagaacccgctttagtccagatctccagatctctgaggctccaaagcccctgttctttctatgattcctcttcctaggacagggcgtgtcggggaggtgggggggggcggggggggggctgaggggggtaggggggctgagaggggtaggggggtggggtcgatggggaggactccagtactggggcgcgcctatcctggggatccagcttgctcaggcagcaggagcctgggcttccggtcaggcacgtgccaggtacctgggctgattcctggtcagcacctctgcctttccatgggatggaggagcccaggtgtggaccgggagctccaatgccagccccaccactggtgagctgtgcagcctgggcagggcagaaaatccctccaggttttggtttctccacacatacaacggcaggccataggtgcaccccaatcaagatgaccagtactgtactgcctaaggcatcggccccaggcggagctctgccagtgccagtgtctttgggtccatgttccgttctccccgctccctttcacaatgcaggaggcgcaaggtgcactccgacgggccgcgcacggagggcgtgcagcacacttgatgggccgcagcggtccccaggctccttccacaaggacgcctctgtggccgcaccgggatgccaggcagccggctcccctgtaaactggggttcccgtgcggacaggagttgagagggattcgacttgcagcagtcagcagcgtggaggcacgggcgccgtgtgtgccgacttgggaagcggaagagtagtgcggctggtggcccgcgtgggcctgaccctgggag

SEQ ID NO: 11224 - DNA, 1490 bp, Artificial sequence
  DNA replication origin
ttcttcctgaggccccgagggtgcaggctgcagagatgcccgggtcctgcgccagggaaggtggctgcagttgcacctgggagctcccaccccaccagctcagaaggggctcagttcctgcttgtccccggctcctgcctgctccatgtagcaagaggtccaggtctgcagccaccggtcaggtggttgcagctgcacccaggagggcagctcctgcctgctcctgaccccctccaagagcacagggaggctccgatccgcagccacagtttgggtggctgtagccccgcccaagagggcggggcttctgtcggctccatggagccggaggcccgggtctgcctccgtttggtttgggtggccatggtttgggtggctgcagcggcaccccagggcgctcctgcccccaactcagaaggggcggggctcccactggctccatggagtgtgcagccccagccgtacctccctgctgcagctggcgtgatggcagcagccaccgccaggagtgtggggacatggcaagagatgatatttaatttgaaccagcaaacacaggtgcaagtgagcacctgaggaactctggaagtgacaggctggaaagaaaaggaagcagagaaggagcctgaggaagagaggccaaagacctgaagaacagcaggagagagaggactcaggaagccaaagggactgagtgtcttgagaagaggatgtggccccgcacgccaaggccagtgggaggcttcacctgcccacagcctaacctgatctgtattgatgcagaagcaggaaaagaatggaagaaaactaaagtcaggagtcagcggcctgggttctggacctggcagcaataccgcccactctggaacccagtccctatctataaaatgcggacacagcactaaccctaccatggcagatactgctgttgtctctccaacactattcctcctgactccctagtagaaccccagatttattggggtaactgtggcacagaccaccaattgccccagtatacattctccattcttaggtagaaatgaaaactttaggccaggtgcagtggctcatgtctgtaatcccaatactttgagaggctgaagagagaggaccgcttgagcctaggagtttagaccagcttgggcaacatagtgagacctcaactctacaacaacaaaaaataattaattttaaaaataaatttaagtagctgggcacggtagctcaggcctgtaatcccagcactttgggaggctgaggcaggcagatcacctgaggttgggagttcgagaccatcctgaccaacgtggagaaaccccatctctactaaaaatataaaattagccaggtgtggtggtgcatgcctataatcccatctactcgggaggctgaggcaggataattgcttgaacctgggaggcggaggttgtggtgagccaagattgccccattgcactccagtgcaacaacagtgaaactccgacaca

SEQ ID NO: 11225 - DNA, 1462 bp, Artificial sequence
  DNA replication origin
gggagaagtgggtctggggtctggcagtaggtgagcaacgctagcttttggaagctggaaaagggactgccctgtggaggggccgggtccaggctgctggaccctcgataccccgctcgcccaaccccacagggacgcgcaggcccgacccgggagtgcgggcagcggccgcgtaccgtgagccggccgggggtgtgcgtgctgctgtctgcggggagggcgtgggtggggggggtgtgtgcagctagggctcacacaaggtcactgtgtcaaagcagcgtttcgaacactttctctttccctgcgattcgactgcagctccgaaagccccttccgcagggacttccctccgcgcctgactcacgctgcctcatgcgtgtgactcaggccggcgccgcgccagcccgggccccgcccccgcctgccacccggcccgccgcccagcgcaggggagggcggcccggcaggggcggggccacggcgggcagagggggcggagctcgggaatggcaaagaaactgagccttaggaggatgcacccttgtgagcctgctatagggaaagactgagggaaatgaagacagcgactgagtgagggagacaagaagactgagaaaaaagggagagacaaagtggggaagcacacagaggaaaggggccacagccttcttgagaggaggccaggggaggcccagctaaggcagacagaaggtgggagggtgggagagctgagcagtgaggggagggaggagaaaggagggagaccgggagcatggggtgctggcctgctccgcgctctgctcgcgccttgaggctgggattgtattaggaggctgggcggagggcctcagagcctggctctcctctagctccaccttcccagctctgtggcagccggcaggttacttcatgtctctgggcctcagtcttcttatctgcgaaatggcatggagcaggataatcctgcttccctatgcttgttattcttccttcgccccgccccttcccctcccatgccgacttcgtggcccgggctcccttaccagctggctttctgttgagcagcacccatgcagccgacctgaggggaggcgagagagaagtcagggtactcctggccctgttttggtccttggtctgactgtggctatgccccctcatgatgtcagctcgggaacactgcattttcccattgccctttcagcccagaagttgcagtgtcttgtcatcactgccggtcccaatacccaggttgatccccttcaccctgcccccacccctgtcgtccttccattaaagcctcttgcaccctttggttggattccatttcctgcctgggccctgtttgctatacagcagggtgagcactaagtgaggcagcacaggacttagcatccattaagtgctcaataaatcacagctcttaccatcatcatcctgcttcttcaagaataggggtgtg

SEQ ID NO: 11226 - DNA, 1359 bp, Artificial sequence
  DNA replication origin
gggaaaggaagtcaccaaagggcggcccgaggggaggggagcagagggcggcggggcccgcgaagaaggctgggggaggggcggcctgcccctttgtctggtgggtgggggtggggcgggtggatcgcgccgctccctccatctttgtgccctgggcccggagcgcgcgcttagtaggccgtgagtggtggtggctggagggcgttcggtttcgagcgcgggaacctctgcggcgtggcatggaggcgcgattcctcagcctccagcaccccgtcccaggtcacaggctccccgccagcaccttgggacccaggtctgggctcgggctgccccccagagccgcgcgcccctccacttcgcgctctccaaggccgcggaggctgctaggcccgggcaccgggctggcggcctggcggctggggaggtgcggagagggtcctgtccgccctctctctcgggtacatctctccccgtccgtgtgggacgtgtggccgcccctgagacggggaggggagagggacttccgcctcgagtgggctgtggaaaacttggccaactttttggcccacttgtagcaagccgactcgatcttatttttcctactcttattttcctctcggcctgatttcctcagcgacttgttttttaccttgtattgtgtgtatttttgtcagccacctcaaaccctttctggaaggaggcaggtataaataaattcgtaggcaaataaatatagtagcttgttcctctccaggattacccacacccttgaaatccaaataactctctactcactgacccccacctccacgctttctggattgtcaatgccctgaattcactgtctttcctttctttcccctttaaataagtattaagcagaagagcgagtggtagagataaaaagatgggtaggatctagtccttgtcccagcgaatttcacgtctagggaaatcagaatcaggcctgcactagagaaaactgaatagcagtacaggagatgccatgttagaaaacatttcattcagtagttattgagaacctactctgtagcaggaactgggccaaattcttggggtacaattaatgaacaaagtcccctgcactcttgaaacttggaccaaggggtcaggcgcttacagacttaggaggaaatacaggaggagaggatgggagcccagggtggtcagggaagtcctggaggagacgggcttgagcaggccttcgtgagacttggataggtgggtggctgaggagttggggacagggcaagcaggaagagggagctattccaggccaaggacatggtcaaggcccggggggttgagttggtcgataccagaacccgtcttccccac

SEQ ID NO: 11227 - DNA, 1181 bp, Artificial sequence
  DNA replication origin
cgctggtagcaaatgcggatctgaaaccgggagagagcagaggcgctcagagaccgccgccgccgcgtgctcgccgcccaggcccccgcggggtatttatgtgtcacagccaggcggggggacaaaaatattccccctcccccgaaggatggcgaggggcaggaagctgggcacggcccgtgcgcggcctcaataaataaataatttaattaaattatagatataaaaaaaagaagccaccggagcggccgcgaactcacgccttcttggagccgcgccagcgccagaaatagccccggctcggagtcccaattagaggagcgcagcaccggctcaggggagcttaaaaagagcgacccaggggcaggggggacgggcccgcccgcgccagccgtgtcactcagggggcggggccatgcaaatgagcccggggatttaaaagggcggccgcccgccagccgccgccgccgctgccgcgcgggtgggtgctgacggcagggaggggcgtgtgggaggcctgggctgcgaactcgagtcgaccgcccactcctcgcagtcccggacggaggaggtgtgggaaggcacgcgcagaggagtcacgaaggagcttctggcggggggtggtgacgggtggcggtatccttcctccctggtacaggggtcccagggagagtcacctctaggggcttccagggcgtgtgggcccggccccccccccagggcgtgtgggggtggacgggggtccacgcgggcccagggggtgaagagaaacgcgctcgttagagaattccgcggcctacacgccgccccctaactaaaatagagagatggtagatttcccctgggcggacaggtgtcagcatgtgcctttcagtgtcaacccgcgtgtggctgattggtgagatacaagtcttgtgaaattcaaacgtgaaacttgtgaaatccaaagtgttttattaatggccaccagcgagccatgatcaaggtggagccttccagcgaaaccaacgattggctcgttggcaggtacacccaagggaggcttcataccttgaggtgacttagatggtgttctggagatacgcaggcccacttggggacctgggcccttccgttgggactgtaaataaaaataaaaggtgggccagaggtcgcctggaagcgctttgagggcaggggcc

SEQ ID NO: 11228 - DNA, 833 bp, Artificial sequence
  DNA replication origin
gcggcggagccaggccggtcctcagcgcccagcaccgccgctcccggcaacccggagcgcgcaccgcaggccggcggccgagctcgcggtgagtcgtccccggggcccgcggcggcggcggcggaggggggcgcccgcgcccccgcccgcacgtcgcccctcctgcgagccgcccggggctgcagcgcgcgccgccggctttattcccaggccggggcggcgcgagccggcggcgggggagggccgcgcggcgcgggggcgggcggcggggcccggcggcgcggggaggacgcccgcaccccttcccccgcgccgcgggcgccctgcggggggcggggacccgggaaaggcgcgcggtgggggagggggcgcgcagctgcggcgagcgcgagttgtgcacccggcggagcccggaggagcccggcgcacctcgcgcggcggccgctcccgctggagccggagcccgagcccgagcccgggcccgggtgaggggcggggagagacacgggctgcggcgcggcaggagagtggggggtcgggcgccccccgcagctcagggaagttctggaagtgagggagatggggaggaacccccaaattcggccctacgccctctcggcctttctctcgcgccccctccgcagatgaggccggagcgcgggcctgggtttggggcttcaccccgaccccacctctggcctggcccgcgcctcttcagccccaggggccgggcctgccctccgcccccacaaactggtttcgctgctttgctgggctctgttggaactagtccctttgactccccgtttctattttattttcttctggggctt

SEQ ID NO: 11229 - DNA, 1380 bp, Artificial sequence
  DNA replication origin
aaattcggccctacgccctctcggcctttctctcgcgccccctccgcagatgaggccggagcgcgggcctgggtttggggcttcaccccgaccccacctctggcctggcccgcgcctcttcagccccaggggccgggcctgccctccgcccccacaaactggtttcgctgctttgctgggctctgttggaactagtccctttgactccccgtttctattttattttcttctggggctttattttgcggggaggggacggagggagggggctttcttcctctcccccgcgcccgcgcgcgccaggtttcctgccccaaggcgggcttgggtgccccctctggcaggaagtggggccgggtgcacccgcgtggcggtgcatgcggtcggggtgcgctgctttcccgcgcctgcaggagcggcctgcgcccctccccccgcgcgccctggccccgggtcccgccggccggcctgcaacggccgggcgcagacacttgcagagtcaccctcgggccgggtctggagcctgatgcctcgggggtttagccctagccgctaggcgggtaggcaaagtgtcgggttgaaagggtctccgggaacctacttcttcctgctcgccaacttgctgtgtgaccttaggcaactcaaggcttctctgggctacttttttacgggggacggggaagaaaacaagggaacccccaagataatttcctagggcctttcctgcagagtccttaagtatttgaggagcacagtttgcatgcacagtgtatggaggagacaggcttgaggcccaagcgggcttattacaaagtgagggattggggttaggccctaaatgtagttcctccaagacaggcctctgatgttcagaaacaggtggaaaagacgaacgtttcttggcctcactggaaagggcctcgggccttcatttagttcgtggggggttggctgaggggattaaagggtccccagcagcaagaggtggggggaggcaccagatggtatgagagcttccagggagacccgccaagatctccaggcaggccgggccaggctctctgggattccggactggcttcgcccaactggaaccccctcgatgagggggccccaggcagaccttatatgaggtcagcactcgtttagttgattaattttgatgtttagtttgaagggggacctgtggtgtaatataagattctaatcactgcctgtaattgcagagcaggccaagccactaatgacggagcaggataaatcaccaaccaccttgtttaaaagggtctccaagtctgaaacattataagatagaataattaccaaagtcctgctgtctggagggtctcttgatgcttgaaaatggaggtcctgggccct

SEQ ID NO: 11230 - DNA, 1007 bp, Artificial sequence
  DNA replication origin
aggggggttgggagcgggcagggtgagctccttgttattggtgccccatctgaggagggggaaatggctgagtggcggaagcaaagtagggttaggggagcagccccagcccacctcaggtggcggccacagggctcttgggcctcacctggacaataagtgactgcatctccatcaccacaatatgtactcagatcccaggcggagggcaagggggctgtggccacagtgaagagggagtaggggactcacccctcctgccttcctgtaaccgaagggggctgtccaacctagtacggggactagggaagttggggaaggatgaaaagtgagccccacgtggtgacaaagacagtttggctgggggaatcctgggggccagcacccccctccattggccacacctgctgctgccagggcagtggagtagggcgtgccaggatgagatggggcttgggccccttttaaggccaggggaaccctcccaggccccactatgggaagccagagggaacagtgaaggagcagagagggcgcccccaaaccaaaagcccagagagcaatgtccccaccaccaagggagtggggacgcagcaggtgcagggtgcggctaagtgggatgttagccttgtccaggagggcatgtgtgtatgcgtgggtgggcggggggagctgggaactgaggccaggggaaaactgctccccactcagcccatgggagccctgcagcggctggtgtgctgtgtagtgtggtggtgagggcacaggtggaagatgggggtggcggccagaggcggtggtgatggtgggcctggggaaggggtgggggcggtgggagcggagcaaagctgtccagtcccagaaggaagctgctcctccagtgaggagcaggcggcacgcatgggtcactgctcctcctccgaggactcctgcgagatgccctcctcttcctccttctcctgtgaggtgggcagttgttggtgtgagctctggcccggtccccctct

SEQ ID NO: 11231 - DNA, 1180 bp, Artificial sequence
  DNA replication origin
cgaagggcctgggctcaacgttagagcgtggcgcgaccctattctggctgcaacgagaggggtgaatgaagtgggcgccggggacctcccagaatcggagctccagacgcgggcgggccaggggccgccggaaaactgcgcgcgccccgccctaccccgtccggccccgcgtcgcgttctcctcccccactgcgcagccctcggctgccccctgccgccgccgggcggaccctgcaagccccgctgtccccgccttcgcaccgcccacccccgcctccggattggcggctccagaaatctccaggccaccggctttccgctaccggattggctgcgtccgggtgctgaggcccggcccatttccccgggtcctttgatcacgcgcctgacggcttttccggggcccgggagccaaccgagggcgttcctgtcggggctgcagcggcgggaggtaaggcatggccaggccggctgggctgcagagcgccggcacgggtccacgcctcgggtgacgggcttccaggatgttcgggcgcggggcggcccatccgcatcccccaacacccccacctccggcctgagcctcccagcgccgtgggaaccacctcctgtccgctgttgctggcccgcatcctagcagcggcctgacgccctccccaccctggcatgcccccttgacctgggacgatgagcatacgactgggtaagggcaagctcgatgccccgtgccctacggacacgggggtaggtcgctcataccttgccctctgatagagactcaagcgaacctgggtcgcggaccttgggccatcagcgtgcaaactgccccaggacgatctctttgcttctgtcgatggggactgaccctctccacctctgcctgtcagctcaggccaggaggggagggacctgggcggagccccgggtggagacaagaggaaggtgacatcatcttgaagatacaatccagctttacccactcgtgtccaccctggcacacgagacagatgggggagagggtgtttgggctgtatgtctgaggtgacaccagggacaagggcatagaactcaggcatggagcccatcgcttgaagtgggattggaccaggatggaagcgggctccttcagatgctcccatctcacccctggctgcagtgcaggtccttcctttagacctca

SEQ ID NO: 11232 - DNA, 1266 bp, Artificial sequence
  DNA replication origin
ccaaggctggagcccactccctcagcttgcagggaggtgtggagggagaggcaagagcgggaaccggggctgcgtgcggcgcttgcgggccagctggagttccgggtgggcgtgggcttggtgggccccgcactcggagcagccagccagccctgctggccccgggcaatgggggacttagcacccgggccagtggctgcagagggtgtactgagtcccccagcagtgccggcccaccggcgctgcgctcgatttctcgctgggccttagctgccttcctgcggggcagggctcgggacctgcagcccgccatgcctgagcctcccacccactccatgggctcctgtgccgcccgagcctccccaacgagcaccaccccctgctccacggcgcccagtcccatcgaccacccaagggctgaggagtgcgagcgcacggcgccggactggcaggcagctccacctgcagccccggtgcgggatccactaggtgaagccagctgggctcctgagtctggtggggacgtggagagtctttatatgtagctcagggattgtaaatacaccaatcagcaccctgtgtttagctcaaggtttgtgagtgcaccaatcgacactctgtatctagctgctctggtggggccttggagaacctgtgtgtccaaactctgtatctaactaatctgacggagacgtggagaacctttgtatctagctcagggattgtaaacgcaccaatcagcgccctgacaaaacaggccactcggctctaccaatcagcaggatgtgggtggggccagataagagaataaaagcaggctgcccgagcccttgttggtaaccctctcgggatcctttctacactgtggaagctttgttgtttcactctttgcaataaatgttgctactgctcattctttgtgcccacactgcttttatgagctgtaacactcactgggaagatctgcagtttcactcctgagccagcgagacaacgagcccaccagaaggaagaaactccgaacacatctgaacatcgatcagaaggcacagactccagacgtgccacattaagagctgtaacactcaccgtgagggtttgtggctttgttctttaagtcagtgagaccaagaacccaccaattccggacacagtatgatcatagctcactgcagcatcaatttcctgggctcaagtgatcctcccacctcagcctcccacgtagctgagactacaagtgcatgccaccatgcccagctaagtttt

SEQ ID NO: 11233 - DNA, 1018 bp, Artificial sequence
  DNA replication origin
cggcagccgtgacggtggcagcggcggcgcgggacctgggcctgggggaatgaggcggccgcggcgggccagcggcggagccgtgtagcggagaagctccccctccctgcttcccttggccgagccgggggcgcgcgcgcacgcggccgtccagagcgggctccccacccctcgactcctgcgacccgcaccgcacccccacccgggcccggaggatgatgaagctcaagtcgaaccagacccgcacctacgacggcgacggctacaagaagcgggccgcatgcctgtgtttccgcagcgagagcgaggaggaggtgaggcggcaggctgggcgggccggggtcgccgggtctccggccccttcgggtggaggcgcgaggggcgcggccgccggaggagggtgtgccagggccgccccgctcgggcggaatgaagttccgatggaatttcctgaggcgaaaaaagggggaaggagaaaggacgttggggctgaggggaagcgggtttgagtgcggctgcacagggcgcgccgggcggagggggtagccggcttgtggccggagcgcttcggttccgccgcctgttaccggggagagcggccgcgggagaaggcagtgggctgggaagagtgcggctttcggtccaggccaacggctttgatcctggaagggccgctccgcagttgtcagccaggcacatgtgtgcggaggccggcgtgcacgaggcgcgggccggcctttgtggcagagaaatagtgcacttcattggcaggtttggggtttgccgagggattatatgtctgtgagcccaaagctgaggggtgggggtggggtgtcttcggaagatttagggcgttgtgcataagccatagccagctgtttattttacagtgcgctgggtagcctttatggtgtagtctgagaagaaaagacatttgatataataatctttgtgtgctgaaaatgtttcatgttaattgggaagaccaaaagcggtatttaacatttttgccctgacg

SEQ ID NO: 11234 - DNA, 1127 bp, Artificial sequence
  DNA replication origin
tgggggtgcggtgcgggtcgcaggagtcgaggggtggggagcccgctctggacggccgcgtgcgcgcgcgcccccggctcggccaagggaagcagggagggggagcttctccgctacacggctccgccgctggcccgccgcggccgcctcattcccccaggcccaggtcccgcgccgccgctgccaccgtcacggctgccgtctccgctgccgccagggccgccgccccctctgccgccgccacccccgacgacgaccgcgccgccatcttgggcgcgatgcgtcagcggcgtaaggctgcaccggcctgcgggacggccgcgcgctcgcagcgcaggccgcgttcgcgaatcgcgccctcccagttcgcgcggtggaaaccagcatctgaaaggagagggacgcgcgactccaggcgaccgctacgccggcagcgtaggcgtagaactggtggggtgcgcggaggaagccgggggagataagaacagcggcgcaggacgcctagcggccggagcggagaccgagcggtccagccgcgcaagtctgcggatggggaagcggggacttggccaaggtcacgccgcgtctccgcggccgaggatgaaccaaggtcacgccacccgcccctgggccctgccggtcggtctcgaaggggttgagggggaaggtttgttggaaaaaggaggatgtagttaaaggcaacggaagctgcagcctgagacatctgggatttggaactgcaaggaaacggcgcatgggaggcgtgtgcactttgcgttgatagcctgaacctcaggatgtcttaggggctggtgcatgtcgcccattacaaagaacaaatatttattctgcaatcttttattgatgctaaaggtaattgcttcctcttatggtaaacaagagggccagaaaggaacacgcgcgcgtgcgtgcgtgtgtacacacataatgtaaatcataaaacatcatcgtttctggcaataaatgaggagtgtgtgttgtggatgtcaaacagattctccaggaaaagatatacagacagaagctctccagaaaggaaaactggtgtatgacctgtgaatgttctcagcaacccagaacaaaccaagtaccatgcagatgcccta

SEQ ID NO: 11235 - DNA, 907 bp, Artificial sequence
  DNA replication origin
ggaggtgggggggtcagccctctgcccggccagccgccccgtctgggaggtgaggggcgcctctgcccggccgcccctactggcaagtgaggagcccctctgcccggccagctgccccgtccgggagggaggtgggggtgtcagccccctgcccggccagccgccccgtccgggagggaggtggggggggtcagcccccctgcccggccagccgccccgtccgggagggaggtggggggggtcagcccccctgcccggccggccgccccgtccggggggtgaggggcacctctgcccggccgcccctactgggaagtgaggagcccctctgcccggccagccgccccgtccgggagggaggttggggggtcggccccccgcccggccagccgccccgtccgggaggtggggggcgcctctgcccggccgcccctactgggaaatgaggagcccctctgcccggccaccaccccgtctgggaggtgtgcccaacggctcattgagaacgggccaggatgacaatggcggctttgtggaatagaaaggcgggaagggtggggaaaagattgagaaatcggatggttgccgtgtctgtgtggaaggaagtagacatgggagacttttcattttgttctgcactaagaaaaattcctctgccttgggatcctgttgatctgtgaccttacccccaacccggtgctctctgaaacatgtgctgtgtccactcagggttaaatggattaagggcggtgcaagatgtgctttgttaaacagatgcttgaaggcagcatgctcgttaagagtcatcaccaatccctaatctcaagtaatcagggacacaaacactgcggaaggctgcagggtcctctgcctaggaaaaccagagacctttgttcacttgtttatc

SEQ ID NO: 11236 - DNA, 1302 bp, Artificial sequence
  DNA replication origin
gagctccggggaccatcggcggcgactcggggcgaagcgggacgtctggggcccggcctcaagcccggccgacttcccgggggaggagggggctggcgctgccgccgccaccgcgtcgctctgggatctcgccggggctgcgggaaggaggaaggtcagagctgaggcggagaggggggaaggatgaggaggaggcgtgcaccgagcagagcagattagagaggcatttttagcgagccaatggtagcgcgggcagggcggcgcggtggctgcgcaggtggacgcgccgcggctgccggggaggcagcaaccagtttggcaggcgccgggggtggcgggtggcgggtggcgggtggggtccggctccccgctgcttcagccgacccctgccccagcagtcttgcctggctccctcttctgggggctgcccgcggccccgcgcgtgccgggagccctccggtgcgccctcctccccagccctcccagctggcgcgctcggagcccgggatgttgctccctgcctctctccccatctccccatcgccttggcctttcctcctctcccgagcctcggcgtcccttggtgcgtgcgggtgcctgtgtggtgggtgtgttgaagacgtgcgtgtgagctgacttgggagcgacaccccctgcaccaccgccccactgatgcccacccctgcccgcagcttctgccctgtgaccccatggggcgggatcgctaaccctcatgtcctagttccagcaggaccggctgtcgccaaagcaaactccaggccatgtcgttggagctctctagggggcttggggcctaataggggaccctcaacggccttcactcttccgaacttgagccctgaatgctgcctggagcctggacgctgcagggaggagcggggcacatacctattgaaggcctgttctgtatcaggcactgatgaggggctgggctgcagcagaggacagaacagaccaaaactctgccatctcatagttcacatgtgtgagggaagatagatactcaatatcagcagctaagagtgttttgtttggtttttgttgttgttgttttgttttgttttgagacggagtttcgctcttgttgcccaggctggagtgcaatggcacgatctcggctcaccacaacctccgcctcccgggttcaagcgattctcctgcctcagcctcccgagtagctgggactacaggcgcgagtcaccacacccaactaattttgtatttttagtagagatggggtttctccatgttggtcaggctggtctcgaactcccgccctca

SEQ ID NO: 11237 - DNA, 1364 bp, Artificial sequence
  DNA replication origin
aatctgctctgctcggtgcacgcctcctcctcatccttcccccctctccgcctcagctctgaccttcctccttcccgcagccccggcgagatcccagagcgacgcggtggcggcggcagcgccagccccctcctcccccgggaagtcggccgggcttgaggccgggccccagacgtcccgcttcgccccgagtcgccgccgatggtccccggagctcctgcccccaggtaggaggtctggcccttgaatagagggcgggggggttgtgtgtgcgggtgtccagttagggagtgcgtgttggaagtgggcgccgggactgacatctccctgggccagagcccgggcagggttgggcagttgcctggagagaagcgggtgcgcgttcggggatgccttcaggggacggagttcgcgggcatcacccaggcagtgccaggatgccactgcgctgggtcccttgggggagcgagctggcatcggaggcccttaccccaggaaaagcgccggaaataggttccttgggaagctggggcctgggcccgggcggtccgggtctctggactgctaccagaaggggtgggtgggctggtgccagcttggtgcataggctatttatggatcagagtgggctggggagaaacacagcagctgatgcctgtctggcttatggttaaaggtatttccttctgtcccctaccccttcccccacagctgggatgggagcggggaggggggaggaggcaagaaggaggcgataatgctaaaaggccccgcagatacagaagccatgggctgctgggcactgccctcccctgcaagccccaggccacttgctgcctgttggagctgcctctgccccttattttcaccttacaagaggctatgaaaaggttaaagggtcatcagggtgtaggagacatggtggcaaacccgggagcttggccagacccagcttcaagccccagctgcccctacccacaacagcccaggtctgcaccacataggcagtgacacatatggccgcttatttctaggcacaaccataaataacccacattgccccagcccctggcacagctggggtgcaaacaggactgtctgtcagtgattttgcttccatcctccatcctggcctttctatcacaagtccaaatcatcaccctccagcagcttccctgataccccaggtgagatccttgccccctgccctatgttcttggactgccttgtggctgggttatttgtcttgttcatctccttctagaccagaagtaccttcaggctgggaatctgattcatctctgtcattgcccctgcaccaaagcagggtttggcaccaagaaaatatcttgtggaatgcatga

SEQ ID NO: 11238 - DNA, 1061 bp, Artificial sequence
  DNA replication origin
gggcgaaagtgggggtcaggatcatgaatcagagacttaaagcaaaggaaatgcgccctgcagatgtcaagggaggagcatcttgggacaggaagccgcaggtgctagccccgactcagggaagaggaagcacagggggtctggagtggagtgaggcgtggggagtggttggaggtgaggatgagtcaacaggttggggcccaaaggcacagcgatcctgttctcagattggtgagtcactcgctggagggtttcagcaggtgtgtgatgtgtcaaaattatatttatgtttttatttttcaattttaaaaaaagccagtcaaattgagcagtggggggttgtgtatcaactttagtgacattatttatgttttaaaaagatgactgcagctgccgtctggcagatagacagtagggggtgagggtggaagcaggagggctcattaggaggccacgtagccctccgagtgggacagggggctggggcagaccctggcatctgtggccgacaggtgagaggtggctggattctgggtatattttgaagggagagtcagcggggtgtggggtgagggagattcctgagttcttgggtgaacagtggtgttgtgtcctgagatggcaaaggccagcgttggagcaggctagggggcagtcatctggggacatgtggcctgtcccatatccaggtggggccgttgaggaggtgggtagatttgtgaggctggagttcaggggactctaaggccacggccccgatgagatcccagagggagtagacgttgagtggagaagagaagaggtcccagacctgagccctggccctgtgagggcccacccagggagaaggagttgtgacacagagtgggagtgtggtgtctgaggagcccagaggcggacagcatgctgccaaggaggaggattggagactggccatgggggtcagcagtggctggggagggccagaggccaactggaaaggcttcggagggagtggagatggggaggatggacaggcctttccaggagtgtcctctgccaccagagggaggagacacatg

SEQ ID NO: 11239 - DNA, 1028 bp, Artificial sequence
  DNA replication origin
cccactcaaggcactgctaggctctggccatttgggataagcagactctcctcccacccccgatgacaccagagcctccctgctggccctggatggtctcaggcactgggcttagagccccctggtcaggtcagaggcatctacctcctgccccaacctcaggcccttccccttcctcgttctccctggagacttagtgaactgtccccaatcccagatctcccaaaggacccccatgcccatccccagcaagcccagggtctccaagttggggtaccagggagcaggcctctgatggggtgggagtgcctgtggccctccctcctgcgctccctgtccctctgctgcattgctcctggggacagactcgctgctgctgggggagctcttgggcactgccactgcggaggagcctctgccagctgctcaggagggggcagggtggggtgcaggggaggagctgggccctctgccccaactctgggcagggagggggctggagggggcccacaggagttcacggtggggcacacctggtccagttttgccctgaatggagctgagccaccttgggtggcatagggaggagatgctagcctgcaaggggcagaaggttgatgtgtgcaactatgggcgtgcttaaggtcctgcccttctccacctgctttctctcccgcaccccctgagagcccagctgggtctttcactggaccacagtgtggggtgtccccttcccatgggcactcgggtcagagggcctggtgcaggggctgaggaggggtcacatgatgggtaggggcatacacgctgagaagctggcgtggctctgctcatttctgcaaacgttagacgcacattcacagagtgctggactcaggggctcccactttgggatcaagggcctaggagggagaagggcaggtctcggggatggcagaaacgggatgcagattcgcctgtgcgcactgacactgcctgcccctgctcctccgaaccccgcactctcctccttcctgaccagggtggga

SEQ ID NO: 11240 - DNA, 979 bp, Artificial sequence
  DNA replication origin
caggtaggtgggcatcatcttcccctgtgaggacagaatcataggcccccacgacagcacagatgctgagccagcccccgagggagacactcctggctttacactgcagccctgattctcagggtgcagagctgggctacagcagtgaacaagacagaaaaccccctcccttgtggggctgacattctagagaggctgagcaggcaagaaacgagataaataagtggtaatcaaggatgttagaaggtgataagggctgtaaaggaaagcaaggcaggggaggggacagggagggaagatgggggcgaggagttgtgcttttttatggaggatggtcagagaaggtcattctgagcaggtggccttggagcaaaggcctgaggaaggtggagagggagccaggcagagcactcaggcagcctgaacagcccatgcaaaggccctggggcagaagccggctgccaggcttgaggagcaagggggtcatgtggcctgcgcagatgagggaaggggaggggtgaggctggagaggttgggggagggaactggggagggccttgtaggtcagagggaggcctttagctttttctgagtgagatgggagccattgcagggtttgggaagaggtgggatgtgatctggcttctgttttaaaggatctgtggctgctgggggaagagcagaccatggtggggcagagtgggcagggaagctctaggaggtggctgcagtcccccaggtgagggaagatgggggctcagaatgaggaggtaatgttagaaggagcgggaagaggctggagtctggaagtgctgtggcattccagccaacaggatctgccgatggtttggatgtggcggtgagatgagaagtcaaggatggctcctgccagagcagctggcagacagagctgctgtttgctgagctggggataccgagggaggaacggcgttggggggatgggagctcagttctggag

SEQ ID NO: 11241 - DNA, 1018 bp, Artificial sequence
  DNA replication origin
ggcccaacagtcctggaagggctctgggggtattagctgaggaggggagaaggggagccaggtgatccagagagatgaggctcctgtcatgaaggctctgtagctgttaacacccataatactgcaggtgaactctgggccttctgtgcactgggcactcatttcctcctacaccccatgggggtaggtgctatcatgggggtaggtgctatcccatggggtaggtgctatcatcacctccttttgcagatgaggaaaccgaggcacagagagtttaactaacttgccaaggtcagtggcagagcagggatttgaacctcatctgcagatattctgtctggcctcttggtgctgttagctattgtgctaatcagctttttgggacagcaggttgccactcctgaaccagcaagactgtttaggggagggcatgcctaagaatggcaccacagtgttggtgtcagatgaggggaggggtaggcgagggctggggtatttggggaagacttcttggagggacagggactgagctggcccttgaagggaagcagaggttttttggggaggggtgagtgatgggagggaggatggcatgtgccctagcctgggttgtggggagacatgagcaaaggggcagaggctctagtggacacggtgcatctcagctgactcaaatcctccccgctgcattgggagccccagcagagatgggtcagtccctgtgtggccccaagccaggcgctgtgagcctgtcggtctatctctgggtaaggcgaggagtgggttggggggcactgctgggaatatttgtaggacctgagaccctgggggataggcaggcagctctggtttccccatgtccctgtccctgagctgagcctgttccgtggggagaaggccttaggccaggagggctggagtgacacccacagacagccaggagcaggggcaggggaaggacccacccctgggtctgagtctggctctgcctccttcctgctgtgtgaccttggacaag

SEQ ID NO: 11242 - DNA, 802 bp, Artificial sequence
  DNA replication origin
tatcctggtggtgcgccgtcataatcctggggaggtcccggtcccatccgacccccagcagagtcacactaaggtccctggctggggaggaaggatgagcctctccctccccaagtctggaggcccctttctacccacccccaaccccggctgctgagaggtgggagagcagaatctggcagggggcacctcccaggctgaaaacatgcaaactagccaggagaaggagcttggcattaaatgtcaggaagagcccagggcaactcggcttgtgcaaagtttgctttgggaagagttgttccacctgacaggccactcgcttggctgggggcacagggtggggcatgaacggggtgggggtggggaccaggggagggtcccagaaaaggtttgatccctgactctctgctctctagctctggggctggggccagtgactcagccccctctgaggctcatttttcttgtctgttaaatgggctgtcaagagtatgtcttaaaggggttgtggagattgagatggagggtgaatggaaatcatttatgatgggttgagtgtacatgaggggggccctgggcacaggtgaggggatcagctggagaagaggaaagagagagggaatggggtgaggaagccggggagcaaaggaagaagcggaaggtgatggggagtagagggagtgggcgagagagtggagtctggggggagctgaggatggtggtgagggaggctggggccctgtcctgttctctagcccagtccaggcagctgcaggcttcacccaccctccctgccctctag

SEQ ID NO: 11243 - DNA, 974 bp, Artificial sequence
  DNA replication origin
ctggcatggggtctttccctgccagctggggggtgggcgactgcaggcaggacttggagggggcgcactttgccagctcagagctcatctcccagtcatcagtgaccctgtgacctggatccctttaccctcagaattccttgccccctcctcatgctccccagactgcctctctgggccaactctacatgctgggtgagcccccttgcccggcaaggcctggggtcccccacactgagcccagtctgcccagcctgaggggaggccgccgtgcagatgcagagccccggcccctgagacccagccagttctgcttggctggagaaacacaagcggcttgctgctgctgccaacccagctgctctgctgaggaaagggtctccctggtgccaggccaccagtgggcaggggcttgctggagcttgatgggtcagggctaagtctaaggccgggtccagttcgggacaggggagacaggtccagagcccagtagctgggctgggcagggatgggcacaggaaccagggggctggggtcaccgctgagcacacactctgagcccttggacactgggggaagctgagagccttgggtcctggtcttggcacacaaggaaagcaacagtagcagtacctcgaaggtgctcatttctaagatttgccagatttctgcggtggagagaggaagtgggtggtgggatgacagggtgggaagctgaagggcctgggcgactgggtgcccctgaggctggtggaggtgtgtgcgtgcgtgtgtgtgcgcggaagtatgtgtgtgtgtggtgtgtgcatgtgcgcgtgcgtgttgcatgtgcatgtgtgtgtgcgtgtgtgtgcatgttggggaggggcaggccaagatccctcacctcacctatcagctggggccgcccagcagcccacacccaggccatgagccccgcgtagcctgtgtcctttatgatggccatgggcttt

SEQ ID NO: 11244 - DNA, 1689 bp, Artificial sequence
  DNA replication origin
aggcgagaggcggcggaggcggcggagctggggggggtgggaggggggggagagtgagtgagtggcagagtgagtttacccctatgagactgtgagaggcccggggcctacctcaaaggagcggggtcgcgaagctagctagcagcggcccccctccaggtccccgggcccggcggcgcggcggcggcttggttgtgaagaggcggggaagcgggtgtccggtccccgccatggagggcatggacgtagacctggacccggagctgatgcagaagttcagctgcctgggcaccaccgacaaggacgtgctcatctccgagttccagaggctgctcggcttccagctcaatcctgccggttgcgccttcttcctggacatgaccaactggtgagccggccccgcagtgccagcgctggcagcggcctcgggggccccgaggggaagggaagggacacttgagcttggcggcagggcgagccaggcgggtactgagggccaccccttcccgggacggggaggacgagtcggggagccccgtgggcatagggagtatttgggggctgagcagggctaaaggagagttagggaccacggaggcaggaggggcggaagggagatggtgggggcgagctcctaaggtttttcgaggattaggggccaagggacgtgggatgaggggaaaagacttgggcatccaggcatagtgggtagacttgggaggaaaagggttatggtgttggctgagagtaaaaagcacaggagatctggatttggggagtggggaaaaaggttggggtttggagtgaggggctgaggatgccaggattgggcggaaactatagggaaggattaggtgctgtggaacaacctgagcactggagagcttgggagttaggagctgagaacagattaatttatgtgtctgtctctttccatctgaggatagatagggaaaagggggtgatattatgggggaagacaagggggtatggtgagggagatgactttcttgagagttatgccagggaggagtaggatctactagtaaatcgacacatggaggacccggagtgttagacttgggacagggcctgggaaccaccttaggaaaagtgggggaaatgagatgatcttgggggaaggaactttctgaagggacaggactcctggcagagggttcatctggggtcaccagaatgctgggaatggagaggggcttatctgaaagaaagctaagttgacagatgtttgggaaaatggagaacttaggctgggagccaagtatttttggcttcaccttgtagaaggctgaattgggacagaagactacccgacgtaaaggagtgtttcttggctttggaagtagcacttgctgtcgttgttaagcaacgcttccccttgtactctgaatagaggttgttggattcactcagaggcagagttgcagtggagacgattagactttctttgaaaggatttcaggtgaagcaactaatatttctttgggcaaaaggcaaaaggttcagtgccctttgctctgttgggcattcagtctcctgacatgtggaatcttgtttctcttggcatcacttgcacaaccaacctctcttttattccttatccactgaatgcctcaagcaacgctggaaaagaggctgtaagcctactttttatcccactcctaccta

SEQ ID NO: 11245 - DNA, 1393 bp, Artificial sequence
  DNA replication origin
ttctttctacacagacacagcaaccatctgatttctcattctttttcccacctttcccccttttctattccacaaaaccgccattgtcatcatggcccgttctcaatgagctgttgggtacacctcccagacggggtggtggccgggcagaggggctcctcacttcccagtaggggcggccgggcagaggcgcccctcacctcccggacggggcggctggccgggttgggggctgaccccccccacctccctcccggacggggcagctggccgggcggggggctgactcccccacctccctcccagacggggcggctggccgggcagaggggctcctcacttcccagtaggggcggccgggcagaggcacccctcacctcccggacggggcggctggccgggtggggggctgaccccccacctccctcccggacggggcggctggcctggcgggggctgacccccacctccctcctggacagggtggctgctgggcggagacgctcctcacttcccagacggggtggcagcagggcggaggggctcctcacttctcagatggggcggttgccaggcggggggtctcctcacttctcagacagggcggccgggcagagacgctcctcacctcccagacagggtcgcggccgggccgaggcgctcctcacatcccagacggggcagcagggcagaggcgctccccacatctcagacgatgggcggccgggcagagacgctcctcacttcctagatgggatggcggccgggaagaggcgctcctcacttcctaggtgcgatggcggccgggcagagacgctcctcactttccagactgggcagccaggcagaggggctcctcacatcccagacgatgggcggccaggcagagacgctcctcacttcccagacggggtagcggccgggcagaggctgcaatctcggcactttgggaggccaaggcaggcggctgggaggtggaggttgtagcgagccgagatcacgccactgcactccagcctgggcaccattgagcactgagttaacgagactccgtctgcaatcccggcacctcgggaggccgaggctggcggatcactcgcggtcaggagctggagaccagcccggccatcacagcgaaaccccgtctccaccaaaaaaatacgaaaaccagtcaggcgtggccgcgcgcctgcaattgcaggcactcggcaggctgaggcaggagaatcaggcagggaggttgcagtgagccgagatggcaacagcacagtccagcttcggctcggcatgagagggagaccgtggaaagagagggagagggagaccgtggaaagaggggagagggagagggagaccgtggaaagaggggagagggagagggaggccgtggaaa

SEQ ID NO: 11246 - DNA, 1202 bp, Artificial sequence
  DNA replication origin
gagaagtgaggagaccccccgcctggcaaccgccccatctgagaagtgaggagcccctccgccctgctgccaccccgtctgggaagtgaggagcgtctccgcccagcagccaccctgtccaggagggaggtgggggtcagcccccgccaggccagccgccccgtccgggagggaggtggggggtcagccccccacccggccagccgccccgtccgggaggtgaggggtgcctctgcccggccgcccctactgggaagtgaggagcccctctgcccggccagccgccccgtctgggagggaggtgggggagtcagccccccgcccggccagctgccccgtccgggagggaggtggggggggtcagcccccaacccggccagccgccccgtccgggaggtgaggggcgcctctgcccggccgcccctactgggaagtgaggagcccctctgcccggccaccaccccgtctgggaggtgtacccaacagctcattgagaacgggccatgatgacaatggcggttttgtggaatagaaaagggggaaaggtgggaaaaagaatgagaaatcagatggttgctgtgtctgtgtagaaagaagtagacatgggagacttttcattttgttcagtactaagaaaaattcttctgccttgggatcctgttgatctatgaccttacccccaaccctgtgctctctgaaacatgtgctgtgtccactcagggttaaatggattaagggcggtgcaagatgtgctttgttaaacagaggcttgaaggcagcatgtccgttaatagtcatcaccactccctaatctcaagtacccagggacacaaacactctgcctaggaaaaccagagacctttgttcacttgtttatctgctgaccttccctccactattgtcctatgaccctgccaaatccccctctgggagaaacacccaagaatgatcaataaaaaaataaaaaaataaaaaaaatacaaaaattagctgggtgtgatggcacatgcctgtagtaccagctactcagtggggtggggagagggttgaggtgggagaattgcttgaaccttggaggtggaggctgcagtgaacgtgattgcgccactgcactccaacctggatgacagagtgagaccctgtctcagaaaaaaaaaagaagaagaaagaaagaaagatttgcaaatgacataccaaacaag

SEQ ID NO: 11247 - DNA, 1158 bp, Artificial sequence
  DNA replication origin
ggaggaggtcggagagggttaggaagggcccaggaccgccgggggccggcgctggcgctctcaccgggacaggtgtttcaggatctgcttcttaatgatcccggccatgccggagccgcggcccgcgtggaaggcgggtgggccggcagctgtggcctcctcagttgtggagaagaggcggtcccctcacctcgccgcggcgtgagcaccggacacagccgccgccgccgccatggcgctttctcgcccctctttgggcgcctggcgctccgccacgatcccacccaccagcgcggcgccgcggccgcccgcccagagcgacgcgaagatcgcgcgccacccgccggccttgcttgcggcggccagaggcgcgcgcggtgaggggcggcggcgcgcgcagcgccggggctggctggctcgagcttcctccctccgcgctcccgtccgcctctcgggtctgaaacgcttctttcgcctctgaggggtgtgcggttcctttcgcacccggcagtcgccttgaaacctaggagaaaggcggggtagttgtaatttttgcagaaattcgttagatcattgcgcagctcccggatgccagcgtccgcctctcatttatttccctcacacattcactcagtatttgttgagcaccagctgtactccaggtatcgggctggggactgaaaagtagtatcaaggacctcacagacccatagatgggacacgcgaaccaaccgctgcggtcacctgcgaagggctttgtgctggagagctgggaagggggcgcccgtcaccctcttggtgcctcccttagtctcgtctcctgaaccgatgggcaaaatgtatttactcaagacctgagcggctcactgcagaagcactccctcccaaatgtggggtcagaagaaactgagacggtcaattgttaaaatgacctaggactttagagatcagcttcttcactgtgcaaatacggaaacggaagccctgggaaataagagctttcccaaggtcacctacttagggccacccaggactagaacccaaatattctgactcccagtcaagtgttagatgcactctatttcatccatatgcttaaaagtgtaacccgcatgccggcgacacccgtagacccaatggcaaagatggaaaggtgac

SEQ ID NO: 11248 - DNA, 898 bp, Artificial sequence
  DNA replication origin
tgcaagcctgggtgtcccatgttgaccgacatctcccctcacccctacctcctgaaaaccactgaccactgtgcagccaagccctgggtcactctctacttgagatacaaaggctggttaaggtattaaccatcaccaactccagcatggaataaggagtgaaaactaagtgaaacctagctcccaatttttgtggccactggttgtgacaacctgcaatcgcaacacggggttcagcagtcactcggctacacctgaaaactgttttgccggccagcctcctcatgccaaattactcagcgacataacattgcttaataaaaggctgcaaagcagaagcggacgttgttggttcttttcacaggctgtcaaaaaaacctccacatcttaaagggaaggttgcggaaactttatccccaactctcatgacctttctccaattaggctatgtaatgaaaagaaaagcaaaagagggaaaaagaagtccagaggaacggccctgggtgctgggcttttccaagggtgatgcaacagggtcagacagaagaggaggaggtgggagctcctgggaaagagaaaaccagcctcagcgttggaaatctaaggggaaatggcttagcaggactggtagcagggttatttagaacgggcaggggcataggatctgggagaggagggcggtcagaggcccaaaggaaggggcaggggcccgaaggccagagaaagcagagagaagacagctggttcgggcaggcaagagtgggcttcgtgggggcctcggaaagacggtcaagggagcacggggtgacctgcttggaggtgtgggaggtggggacagcaggccagaagggccttgaggggaaagaaaaagtccagggggttgttagagtggggagag

SEQ ID NO: 11249 - DNA, 944 bp, Artificial sequence
  DNA replication origin
ctggcgcgtacccacctgagcagactggagagggggtggctggaagagccgaggccgccgccgccgccgccgctgccgccgccgccgcccccagagccaccgccgccgccgcccccaaagcctgaggagagccgcttcccggacagcagcttctccaccgccgggaggtgcccggtgcgggccgcctccagcagctcctgctccttccccatccccagggccgccacccgctggaccccctccccgaggctgcagccgagcctgctcgggctcccaaactttccgtctccgggcaacgcaccccccaaaccggctggggacaccaccccctccctgccttttccccacgagcgcgtcacttccgggatccggcgtcacgcgtcaccgcgcccccgcgccccgccccctagctcacctagctgggcggggctccgcggaccagcgcaggtggactttgctgtgccgagacacgcctctcggggcatggggacagcgccttgtgggcccccattatgcaggtggaaagggacaaacaggcccacctgtacgcgcctcccgaagtgcgctccttccccaaaggttttgggagctcctgggacaggaaatacggtaattcgtccaggcagcgtagaaacaaagagataaatgtaacgcgcacctacatttccaagtccattctttcagcacgcataaattaaatatgtaataggtgcggggacctagtcatacccaggtgaataaaacgccctccccctcgtatctcaatgagggaagagaagaaaattttaaaacagaaatatcctcaccacttcatcctcccagtacgtgaactagttcattaaagtgaaacgttcaaaggagacaccttcctctctttaggctttcctcttagttttaatgagattaaccaaactgatagaaaagtgtcagacttgtaaaaacaa

SEQ ID NO: 11250 - DNA, 1032 bp, Artificial sequence
  DNA replication origin
aaggggaaggggaagggaaggggaatggaaggggaatggaaggggaagggaaggggaagagaaggggaaggggaagggaagggaaagggaagaggaaggggaaggggaagcacaagggaaggggaaggggaaggggaaggcaaggggaaggggaagggaaggggaaggggaagggaaggggaaggggaagggaaggggaaggggaagggaaggggaagtgaaggggaaggggaagggaaggggagggcaaggggaaggggaagggaaggggaaggaggtaagaaagagtaagccaaaacaaagctgatgtgctccactacctaaggtcaaattgcttctctaccattaagacccaacagctgaacaaaatctcccacagggccttcctaggtccagcccatagggggcttcctttgctaaatcactatttctcaaaagcatgaaatatctgccttgtgtttggaaacatacagaagtaccttatgtttctcttccccaaggcagctgttttcagaacaagtaaaaggtagctaatgtggataatgtagtgtcttgagcacactccagactgttgccaaaaagcaaacttcatctgaataaaatctttgaccaaaaccagcgggtgagagcaccaaggaaagaggctaacaccatcacccaatgaacaagctctgctgctcagatgtggtaaaggctgaggggcagacagggctggcctgttcatcaccaggcccatcagactactctttgtcccagcctcacagggagggagactaaggctcccttggtcctgcaacatagtttcctatttcagaacgcttcctgggtcaagagtgatcaagcagagagaagctaatggctggagatattgggtcgtggttttaaagcatcaggcagagatgcacaaactccaggagatgagagaagagtcatgcaacagcttttaaaggaataaaacggatcaaccatgtcctttcctccacatctccaccattagctattgaaacctgaaaatcagattccatttcaaaa

SEQ ID NO: 11251 - DNA, 1507 bp, Artificial sequence
  DNA replication origin
ctcccacatgtgaggaaagagcgcggcccctgcgcccctgcggcacacgctgtgaaacaaccctcctgggtgtggctcggcttctcggctgtccaaacagcctgaagaaaagccccatgcatgctctggcctcgtctcagcagttccaggccatccttctcgaggggcgggagctgaccggcatgaaccggccgcagcgagccgctcgaggcctggttggcttcgagctcaggagggacgcacgagcctgccgcttccggctctggcggggggggcacgtgccccgtcccgttgccccggcgaccgcggcggtttgttctcaggccccggcctttctcaccgtgcgacgccccaacccgccgctccgccgcggtggtacgctccaggccgccaggccgcgaggcccaccgagcggacgccagtggatgacccgcggcgggggaggaggaggtgacggcctgggagccggaggcgggcctgggccggcgtttcgggcgaggggggcacctcgccgcgaaggaaggggccttcccacgcttcccgccctgcgccgggcttctgtggctttagtttcctcgttgccgcccagcgctccacttctgtcccactctcgacttccgctcctccacgctcctttgcccctttctgcccctcagcacccccaagaccctgaggccgctaccccccttcccgccgcccccagggacccccttggcaattggggaggccccttccccgacgccaacaacacgcctttctccctcacccagataccatcagcaaaatgccagacgtcaaggagagtgtgcccccgaaatatcctggcgactcagagggcaggtcctgtaagcccgaaacctcaggacccccccaggaagacaagagcggctccgaggacccccctccctgtaggtccagctcggcagtccctgtggccccctagggggtgcttagtgtggggggtccgcaggcccccccatcccccaagttttctctcttcactatccctctctcgtttgtctttctccgtttctcccccacccgcctttacttacaggcccgagggcagaggtcttcaaagagtttttggttctagagaaagaagtgacccaagcgtgattacttgaatctgacaagatttgagactgagtcggttcaaagccctcctttgtattgtattttgaatatgtaggggggattggcagatagatctgggattgattttaaagaacccaaatgatcccagacgggaattgggttttctcagcgctttgctaactcaagaaatagtagtgtcctgggcccagtctctagctcggttctgtagtgggtgttcttttgtgttcttgttggggcacaaggtcttctccgcgcttcgtggtaggtccagtctcactgggactcatgctgtatttctcttaatctccagagaacgtaactagtcatcaaactgaggagctgtccgtgtgcaacaactcaagataaaattcttgactattgaaatgcg

SEQ ID NO: 11252 - DNA, 1750 bp, Artificial sequence
  DNA replication origin
gcagaaaggggcaaaggagcgtggaggagcggaagtcgagagtgggacagaagtggagcgctgggcggcaacgaggaaactaaagccacagaagcccggcgcagggcgggaagcgtgggaaggccccttccttcgcggcgaggtgcccccctcgcccgaaacgccggcccaggcccgcctccggctcccaggccgtcacctcctcctcccccgccgcgggtcatccactggcgtccgctcggtgggcctcgcggcctggcggcctggagcgtaccaccgcggcggagcggcgggttggggcgtcgcacggtgagaaaggccggggcctgagaacaaaccgccgcggtcgccggggcaacgggacggggcacgtgccccccccgccagagccggaagcggcaggctcgtgcgtccctcctgagctcgaagccaaccaggcctcgagcggctcgctgcggccggttcatgccggtcagctcccgcccctcgagaaggatggcctggaactgctgagacgaggccagagcatgcatggggcttttcttcaggctgtttggacagccgagaagccgagccacacccaggagggttgtttcacagcgtgtgccgcaggggcgcaggggccgcgctctttcctcacatgtgggagaagcggaggagccgccagggctggggccaggctctgcccactggggttccgcccgttgtcgccctccgcctcctgggctctagcccttgcctttcttgactctaagtctactctgtcgcccttgcagtgatgtgaagacctggagtgcccctgcctgagaaaatagaaaggaagcgtttcctcttcacctgctcccgtctctctttattactgtgtcatgacttcttaccataaaagtgtacagtaacaaaacaaaacaaaagatgaaagtattatggtaagaatccgggcgcggtggctgacacctgagtccagcagatctcctgtcaggagttcgagtccagcctggccaacatggtgaaaccccgactctactaaaaatacaaaaattagccgggcgtggtggcgggcgcctgcattcccagctattcgggaggctgaggcagagaattgcttgaatccgggaggccgtggttgcagtgagctgagattgcgccactgcactccagcctgggcaacagagcgagactctgtctcaaaaaaacaaaacaaggccaggcgcggtggctcgagcctgtcatcccagggctttgggaagccgaggcgggtggatcacctgaggtcaggagtttgagaccagcctgaccaacatggagaaaccccgtctctactaaaaatacaaaattagctgggcgtggtggctcatgcctgtaatcccagctactcaggaggctgcagcaggagaaccgcttaaacctgggaggcagaggttgcggtgagccgagatcacgccattgcactccggactgggcaacaagagcaaaactccgtctcaaaaaaaaaaaaacaaaaacaacctttgccttgttagtgtggagtgtggatgtttcttgcacaactcttgggtttggagggggaaattataaagacacccaaaagcatttgtgcttaaaaaaagtccattccaccttgaggcccaggcatataccaggggagtggcctagccaagttactgtttatccagagcatctcagactcatccataccaaacctaccccttcctcctcctcgccctctcctgctatttccctcagggatgcc

SEQ ID NO: 11253 - DNA, 1412 bp, Artificial sequence
  DNA replication origin
ttctccgtctctcaggctctttttcttcgcctttctcctcctcctcctctttctcctcctctcctcgctccttttcgttttcttcctcctccccctcctcctcctcctcctcctcctccttctccaccacctcctttttcgtgcccttttttctttcaaatggggcctcggcgcggtggccgctccccctgcgcgcccgggcgcggtggccccctccccaggctgccgggccgctgcctgcaggaatttacaatccggcgatgggggagcgggcctggtctccatggagacggcttccccgggagcagggaggtcaggcgcagaccgcgcgcaatcaatggatcaatgcaagctccgctcggctccagaccaaacagcaccgggctccgactcgtcctcgctcccctaggaaagagtcggggagcgagggtgcgtccccgcgctcgctcgcgaggacggccgtgcggcgccaggtttgaacgcacacctccacccgagacaaagagggtgcgaggtgttggggaggctggggcagacgtggacacacggacacacgggcactcgggcgtgtccaccgacacagcctgacaggggacataggacctcggaacacaccgcctccgacaccaggccgagtaacaacctctcaacttttacacctaccacacccccaacctcaagactcagtccccattcctagatgcgagtccactttgaggaccaaaaagaaagtagcctccgcctgctaaaactgccagctccagggcagactcccttgcagttaaggccttggaggtaagcctaatgaaccaccctacccgcagagacatggactcacatacagacactctcatgtggtcagcacaggggcgaaagctaccccacagaatcatgtctatgtgtataaacacagagacatagagacaggtacaagaggctcctccaaacctgcaccccgcttcaagaggtggtcctgactggtccattctgaacccttcatccttccaactgaggggaagcagaggaaagagaaaggatatttttaaaacaggggcaaaccgcagaaggagcagggtcttccaaccatggatgctgcctcttgactgttcacccactctgtatcttctttccttccattgtaagggaaagaggaaagacctcttgaaaggctatgaagactttcttggagtgtgaggctgtgttcagaatgagaccaggccaggtccagttttctacagggaagatgctgctaggacccagactagcctcacagagccctcagcgtacccaggaggaagaggcaatgaccaagatctcctcaaaggtgattcagttctgagaccttccatattggctgcccacatcagctggggcaaggggaggactttgttggcaatggtgctgtccaccag

SEQ ID NO: 11254 - DNA, 1593 bp, Artificial sequence
  DNA replication origin
accttcccggggtcctgcgcccgcccggcctcccgccctgggcatggttggcccactcctcccgcagccaccaacctgacagcccccgagggcgactccgccgacagaccgccatgcaccgggccccgccaccagcgccggccccacaacccgcctgcgccatagcccgcccgcccgcgcgcagcttgcctcgcgcgatatccaggttccagggccgccgcactttcctttcctcttggcgcgcctctaccgggccccggaacccgtatagaaaataccgggcacggtccaccccgccccccgcttcgccgcggcagccatccaacttatcctggttccggggctcctggagcccaggcggccgggatctgaaccgagctcttcggagccccgcccccaccaaggccggggtgacgcatggccagcgaggctgagcgcccagggaaggcgtgctgacgtcacgacgcccgggtcagggcctgggcgcggctcggagccgggtcgtcgctatagcaatcgggaaccgctacctgtccattccaaggattcggtccagcagaagcgtgaggaggtggcggaggccccgagggctttgcgtcatcacttctgcggcctgcgggcgagaaggtgcgcttcgggagtagcgcgggaggacaggaggcgcaggttgtgagggacgcaggccctggggcttcggtctctgtcctccgagctcagagcctccaggcttcttcccggccgcgcgctcagcactcactgtcttacggtcccgaagcgctttaaggtgcgcagtccgcaggccttgcctactgatcttccagccaccccttgaaggaagcagttgcaggtattaagagctccttattgaaaaggacgatgtagaggggcggtgagggactcgcctccgcagggagggcgccctggcggtcttctcaggttctctctcattcccgcgtcagctccaccgtcaggctcgaaaccgactactcccttttgtaggcttgctttgggttgaacataaaaaccaagcccctttactatttccctgctgggaggggctgcgattgggaaattttcagaaacctgagggaaaattaaaagggagcgagctttcggtaaaaaatcaaattaaaaaggaggggcgttagagaaggaactggtaaagattgccttttaggagaggaactgggtggctggaagaatgaggtgagaaactttcccctctctatcctttcagactttaactggtttcttttgtatcttccccgccccgaaaacaatttaacttaataagaataatttttaaaggacgtaaactagacacagttacaaagtacggggtttggggcttgtggtagctaaaggtgtctttggggatgcgggcatccttttcctctcctgcctgaagagcttaactagaaagcccccctttcggtcttagacatcccctcttcctgacttgttctggctgggaccagagttcagtttaggtaggccagtgagtgacatttgatggttagaattcctacggttagaattaatcccttctgtatctcctagtatggaaataaactgcctggccactatgctgcc

SEQ ID NO: 11255 - DNA, 961 bp, Artificial sequence
  DNA replication origin
ttcagatcccggccgcctgggctccaggagccccggaaccaggataagttggatggctgccgcggcgaagcggggggcggggtggaccgtgcccggtattttctatacgggttccggggcccggtagaggcgcgccaagaggaaaggaaagtgcggcggccctggaacctggatatcgcgcgaggcaagctgcgcgcgggcgggcgggctatggcgcaggcgggttgtggggccggcgctggtggcggggcccggtgcatggcggtctgtcggcggagtcgccctcgggggctgtcaggttggtggctgcgggaggagtgggccaaccatgcccagggcgggaggccgggcgggcgcaggaccccgggaaggtcccgagcccggcgtgcccacctccctccggccctagcagggcggcctggccgctggaccgcggccgggccccctcccccacccagggtccctgcccctcttttccgccttgcggctcctcccccgtgactcccaaacctcaccccgtgacggcgcccgcctccacccttgtgaccccacaccccacccactgaccccaagacctcaccaggtaaccgttggttattattcattggctgctaacccaggaatttccccagcacttctcagagacccaccaaccagtgactccctcagttttaatccggtgactcacatgaccctgagatccccacactcctccttagtgacccccaaacctgggtaaccctcctggcccagtaacccccccgattctaccttgtgttccccacaaactcggtgactcccctcaaaactctgctggcgactcctaagccctactccaatagttttccacgcactcaccttgtacacaaccctcagtatctttatcctgtagccgtatgaccctcgttccacgtctgcctttatcctaaaatcacccccactggcatctctctctgcgatc

SEQ ID NO: 11256 - DNA, 1660 bp, Artificial sequence
  DNA replication origin
cctggggggccccatcttcttcagtcaccatcgccacctgggctgggatgtcatctctctcttccttcacctccgaaaggtaagctatccggggtcgtttgggtggcggactctcctcggctgcagaggcggctgggagaggagagccaaggctgacatctgctaccagatgccatggggaggcctggcttgtccccactctcaccctctgcccactccccttaccctcaagttgctgctgctcatagagggcctgctcgctctcctccgtggcctccagctcgccgtgggcactgcgcttgtgcatggccaaggtggaggtctgccggtaggtcttgccgcaggtgctgcaggtgtagggcttgcagtgtgtgtgcaccacgtggtgcttatacaagctcgagtactcggtgaagcgtttcccgcagcctggcaccgtgcaaacgtatggcttctcccctggggacactgggctgtgaggggggtgggaactggggctggcaagggggaaactaaggggacaggggtgagggacagggttggtgaagggagagccagagggagggagagggactgagacctgagactctgaatggacagggttggggaagatggccagtggaacacagagaggacacaggtgttgaaccactgaatccagagacaaggcggaaaggaaacgggggacagggcaaggctggggctagtgaaggggctggtagggggcactggggcttataaggttgagggtgggaggttgagaatggtgaacagcagaggcaagaggcaaggatgactgaagtatcagttgtgatgggaaagaggggacacacatgctgagacacaacacagaaagctggatgaggggcataacactggggagggtgaggatacacaggagtcatggacggcggataaggtgaggagttgaaggtgacagttcactctgcttcttccccatcattcctgaccctggcctcttttcaagagttcagtcagagttggagaactcagggtgggtgtagaggggtggtagggagctgagggaccccagagaggactggcaatacctttcagattggacctaactggaaattgaggaattactcactgcaagcagagttgttctggggataccctacccccagaccagcctggaatggctggcacagaagggttctgggctgggagttgggaatgtgtcttagatgggaagcctacagtagaggggttggggcctgagtgagggtagtcctcgcatgccagctagcccacctgtgtggatgcgcacgtgattcttatagttggtggcgctggtgaagccgcggccacagtggggctccgggcaggtgtagggcctctcgcctgtgtgggtgcgcacatgtaccttgcggatgttagatgtggtgaaggagcggccacagccctcaaaagggcactggaacgggcgttcacctatgcaaatggtgggatgtgaggaggggtgtgggaaagagggccatgctggagcaagctggggatggcactgggctccaggtctaagtctgaaaggcaagctgaattccttttgcccagggaatggggttggagtgggcagggcccagcataccagtgtgggtacggacatgcttctgcaggtctcctgaggtcttgaaggcct

SEQ ID NO: 11257 - DNA, 971 bp, Artificial sequence
  DNA replication origin
aggcgcctcatctgtgaaaagggggtgataatactttgtccagcgggaggttggagagtggactcgggaaactcctaaggcccctttcgggccgtgtgcgaggatcctactgacccgctcccgctcttcggcagccatccagatggcgatccggctgcaggccgaggggaagacgtccctacacaaggacctgaagcagaaacggcgcgagcagcgggagcagcgggagcggcgccgggcggccaaggaagaggagctgctgcggctgcagcagctgcaggaggagaaggagcggaagctgcaggagctggagctgctgcaggaggcgcagcggcaggccgagcggctgctgcaggaggaggaggaacggcgccgcagccagcaccgcgagctgcagcaggcgctcgagggccaactgcgcgaggcggagcaggtggggttagctcccggcgccggggacgggaccggtgggctgggaggctggccaggggcggagcgccgggggcggggcctgggcagagggcggagctcctgggttgaggggcgtgcactggggtggagcttgaaatgagggattgttgggacagagtccgcgggtttgaaaaagagatttgggatggggcttccgccagggacagaacctggggctaggaaaggggtgtggggcgaggtccgagcccgtggatggatggggcctggttcggagaccttggctgtgggttggggcttgggcagaaggagccgttgaagaccgtgtgattggggattagactggaccaagtttggactagacttgaactaagtttacagtgaaaccagtttgagaggcaagcgggacgcgtatggaggcggactaggtgtgcagaggcaattagatttaggatttaagaaacctggatctggagtcagaaacacgtagattcaatcctagctctgcttcttacgagccccgtgatcccaggcaagttcat

SEQ ID NO: 11258 - DNA, 2306 bp, Artificial sequence
  DNA replication origin
tctgggccctgggggaggtcatatgatacatggcaaacagtttaaactcacccctcagaagttttttttttttttttttcccaaggcagaagaatttttcttagtgcagaacaaaatgagaagtctcccatgtctacttctttctacacagacacggcaaccatccgatttctcaatcttttccccacctttcccgcctttctattccacaaagtcgccattgtcatcctggcccgttctcaatgagctgttgggcacacctcccagacggggtggtggccgggcagaggggctcctcacttcccagtaggggcggccgggcagaggcgcccctcacctcccagacggggcggctggccgggtggggggctgacccccctacctccctcccggacggggcggctggccgggcggggggctgaccccccacctccctcccggacggggtggctgccgggcggagacgctcctcacttcccagatggggtggctgccgggcggagaggctcctcacttctcagacggggcagctgccgggcggaggggctcctcacttctcagacggggtggttgccaggcagagggtctcctcacttctcagacggggcggccgggcagagacgctcttcacctcccagacggggtcgctgccgggcagaggcgctcctcatatcccagatggggcggcggggcagaggcgctccccacatctcagacgatgggcggccgggcagagacgctcctcacttcctagatgtgatggcggccgggaagaggcgctcctcacttcctagatgggatggcggccgggcggagacgctcctcactttccagactgggcagccaggcagaggggctcctcacatcccagacgatgggcggccaggcagagacactcctcacttcccatacggggtggcggccaggcagaggctgcaatctcggcactttgggaggccaaggcaggcggctgggaggtgtaggttgtagtgagccgagatcacgccactgcactccagcctgggcaccattgagcactgagtgaacgagactccgtctgcaatcccggcacctcgggaggccgaggctggcggatcactcgcggttaggggctggagaccggcccggccaacacagcgaaaccccgtctccaccaaaaccagtcaggcgtggcgacgcgtgcctgcaatcgcaggcactcggcaggctgaggcaggagaatcaggcagggaggttgcagtgagccgagatggcagcagtacagtccagcttcggctccgcatgagagggagaccgtggaaagagagggagaccgtggggagagggagcgggggagggggagggggcccctcagaagtttttagaagtcctttccacacccccagctgaggttttctaactggccctgcaccctctagcctcctccaaaatcactaactctccctcctgccccaccattctctcctctgtcccaccctctctggagaaaacacaaattcctctggctttctacggagaaagagaaagcgacattttaaccgtatctctttgttgcttaagttcctgccaacactcatgctttgcagatctgtctacccctaataggcttatttcccctgtaaactaaaaacaaatcctaagccccctaactaattgaatggaccctcttggccaaggagaccccagaaaaaccttaaaaactgagtttccagccatgacaggtcagggggtcagacatgcctggttatactccctcccttttgcagttcagacacaacatctgaccagcatcaatgttaaaatagagatcatagactaacagaatgcactctttatggcaataagataccaaattataatcaggacctaaggccgtgtcaggtaagggttaagtcacacacgcctacacctaaagaataaactatattttctgccaggcacggtggctcacgcctgtaattccaacactttcagaggccgaggggggcagactgcttgagcgcaggagttcgagaccagcctggacaacatagtgagaccctgtctcttaaaaaaaaaaaaaaaaaaaaagaacggcggctcacgcctgtaatcccagcactttgggaggcctaggcaggcagatcacgaggtcaggagatcgagaccatcctggctaacatggtgaaaccccatctctactaaaaatacacaaaaaaattagccagaatatgtatgtttagccaacctgttcagcataaagctcctgtcccagcccctcttcctttcaagtacctgcaacaaaattcaacaacccttcatgctaa

SEQ ID NO: 11259 - DNA, 1085 bp, Artificial sequence
  DNA replication origin
ccgcccatcgtctgagatgtggggagcgcctctgccccgccgccccatctgggatatgaggagcgcctctgcccggcagcgaccccgtctgggaggtgaagagcgtctctgcccggccgccccgtctgagaagtgaggagaccctctgcctggcaaccaccccgtctgagaagtgaggagcccctccgcccggcagctgccccgtctgagaagtgaggagcctctccgcccggcagccaccccatctgggaagtgaggagcgtctccgcccggcagccaccccgtccgggagggaggtggggggtcagccccccgcccggccagccgccccgtccgggagggaggtaggggggtcagccccccacccggccagccgccccgtctgggaggtgaggggcgcctctgcccggccgcccctactgggaagtgaggagcccctctgcccggccaccaccccgtctgggaggtgtgcccaacagctcattgagaacgggccaggatgacaatggcgactttgtggaatagaaaggcgggaaaggtggggaaaagattgagaaatcggatggttgccgtgtctgtgtagaaagaagtagacatgggagacttctcattttgttctgcactaagaaaaattcttctgccttgggaaaaaaaaaaaaaaaaaacttctgaggggtgagtttaaactgtttgccatgtatcatatgacctcccccagggcccagagtaccctaatgtctttgtactcgtcaatgttttgtgtgggaagggtgcgggcagtccttagggagagctgagtttcctctccagacttctgaactgtggtacgcaacagcctggcaaaagcagaaacccagaggcagagatatttaggagaatataaatccccagatatttgcaaatatgttaagggagggactctgactttcaccgtccatttttacctcaatctcaaagggcaaggaggttgacatctaagttacaaatataatgcacaagcatttcaaaaagtaggggaaaaaaaagaaaaagaaaaagagaagcagaaagaagggggaaaaaatcactcatccctgccaggcacg

SEQ ID NO: 11260 - DNA, 1514 bp, Artificial sequence
  DNA replication origin
cctgacaaggtctaactactgcagccccacagcccaccagggtagttatcaatctgatacctcatactatgcctgggcaaagggaacagagctctgggattgccgttcctcctggatacagaggaaattaagctcccagggaaaaagagggacaatttggattccctagattcagaaaagaacaaagaaaaaagagggagaagagactccaagagaacatgttcagtgaccaacatcagaggcacattcagttggccaaagattgtcaaagagatatgagagaaaatcagcagctgtttcaagccaccaataataaaaggggacagatgcccgccagccccagggctatcaggccagcaatctatttcaaaactcaaacgggaaaaaaaaaagttctggagccagtacacagaaaaaaggttgaggaccacaagtattttctggagcacagcttctggagaattctcttagtcctttcggatggagcacagggtggagggtgggagtgagggcagagagaggctggggtatcatggtataagtgtattccacacatccagagtggaaagacacaaaaccccggttcctggaaggggaaaagaattggacaaagcctccggctacccgtggcacacatccagctcagcgccgtctcccccaagggttcctggaagtcaacagccccataaaggggaagtattaaagctgagataagaagaatggcctacaaattggacatcatctctgatgcaacacccacgtacattctcccacacaatctgttatttcctttagtcaatcagcctcttaattcgatcaaggtctgaacacctccacccccaccccatggttatgtcaactgcaggtcaagtgaaagtagagtagagtgtggagctaaggcttctccctgaagcaggggaaaggaacagggagagaaaaggaggtgggcgacaggaatgtaggggacagaattgatacgaaggaaatcggaaaaaggagcaaaaacagggcctctcagggaaccaaggtgagagtcttagggagacagggactgcaggcacggagttggaaaaagcctaggaacaccctggggaagaggatggggacccataatactaggagggatcagaccacagataagaaggggacagggatggggagagagagtaaagcctgagagagcaaggatgggaggatgaaggcaggagacaaggataacgagggggacagaggaaaagatcccagagaagactctcgctagatagggcagtggattcaggaacaccagaaacgggtgaaggaagaggtcagaggcaggggaggggaatgggagaggcccccgggcctgagacggggttctcacaagtgggagaagacgaagccaccaggcccaagagggggcaaagagtagggtggaaggaggcccgtatttcggactcactcaagcagctatgggggtccaagggcgggggggcgcagggtcagcggggcgcctacatggcaacgcacgacgg

SEQ ID NO: 11261 - DNA, 1466 bp, Artificial sequence
  DNA replication origin
gctcctcacttcccagtaggggcagccaggcagaggcgcccctcacctcccagacggggcggctggccgggcgggaggctgacgccccgacctccctcccggacggggcggctggcctggcggggggctgaacctacctccctccctgacggggcggctggccgggcggggggctgacccccccacctccctcccggacggggccgctggccgggcagaggggctcctcacttcccagtaggggtggccaggcagaggcgcccctcacctcccggacggggcggctggccgggcgggaggctgacgccccgacctccctcccggacggggcggctggcctggcggggggctgacccccccacctccctccctgacggggcggctggcggggcgtggggctgacccccccacctccctcccggatggggctgctggcctggcgggggggctgaccccccccacctccctcccggacggggtggctgccgggcggagacgctcctcacttcccagacggggtggctgccgggcggagaggctcctcatttctcagacggggcagctgccgggtggagggtctcctcacttctcagacggggtggttgccgggcagagggtctcctcacttctcagacggggcggcggggcagagatgctcctcacctcccagacggggtcgtggccgggcagaggtgctcctcacatcccagacggggcggcggggcagaggcgctccccacatctcagacgatgggcggccgggcagagacgctcctccttcctagatgtgatggcggccggaaagaggcgctcctcacctcctagatgggatggcggccggtcggagacgctcctcacctcccagactgggcagccaggcagaggggctccccacatcccagacgatgggtggccaagcagagacgctcctcacttcccagacggggtggcggccgggcagaggctgcaatctcagcactttgggaggccaaggcaggcggctgggaggtggaggttgtagcgagccgggaccacgccactgcactccagcctgggcaccaccgagcactgagtgcgcaagttacccatttgtttgctgagctgatcaccatatgcttctttcccctcctgccaccccaactgctccacctctagtgcttcccacccaagtcaatgggacaccatcccttgggcacacaggctgaactccagcaccagtgggtcctccctcaccactcaggtatccattctcccctttccttgactggccaggttcaagccctgcccactcctcacctagatctgcctctccactcctgtcagtgacatttctaagcccagccatgacctgtcacacccttgcccacaaaatccaactccttaatgtggcatccaaggctttccacactctgatacgggtgcagtcgctgcccagtgggctagtgggctagcactaccagtagcac

SEQ ID NO: 11262 - DNA, 827 bp, Artificial sequence
  DNA replication origin
gtgggggggtcagccccccgcctggccagccgccccgtctgggaggtgaggggcgcctctgcccggccgcccctactgggaagtgaggagcccctctgcccggccagccgccccatccgggagggaggtgggggggtcaggccccgcccggccagccgccccgtccgggagggaggtgggggggtcagccccccgcctggccagccgccccgtctgggaggtgaggggcgcctctgcctggccgcccctactgggaagtgaggagcccctctgccaggccagccgccccatccgggagggaggtgggggggtcagccccccgccgggccagccgccccgtccgggagggaggtgggaggggtcagccccccacccggccagccgccccgtccgggaggtgacgggcgcctctgcccggccgcccctactgggaagtgaggagcccctctgcccggccaccaccccgtctgggaggtgtgcccaacagctcattgagaacgggccaggatgacaatggcggctttgtggaatagaaaggcgggaaaggtggggaaaagattgagaaatcggatggttgccgtgtctgtgtagaaagaagtagacatgggagacttttcattttgttctgtactaagaaaacttctgccttgggatcctgttgatctgtgaccttacccccaaccctgtgctctctgaaacatgtgctgtgtccactcagggttaaacggattaagggcggtgcaagatgtgctttgttaaacagatgcttgaaggcagcatgctcgttaagagtcatcaccactccctaatctcaagtacccagggac

SEQ ID NO: 11263 - DNA, 1403 bp, Artificial sequence
  DNA replication origin
cgagcaagcgaccccagtcgaagggctcccagccgcggctgcccagcgcccggagcacccccaggccgcgccgcgccccctcaggccccgcctgcagcgcctgcagcaggaggcgggcgggggcctccagctgcgcccagggcgccggctccacgccctcagccccagggagccccgcgtccggtgtcgccatgccggggcacgggtgccgcgccgccccctactctggtgtggggcctcagctcagaggctgaggggaacggaggactccagcgccgtccctgacgcggcggtggcgggccagctccagcgcctgttacaagctctcctcggcgttgggagaccggagaaacccggccgcccgaagccgcagccgttcccgcgctgtcggaaagggaaggagggaggcgcggccgggggcggagcctgaacgtgaggccggcgcgagggccggtcgcaaggggcagggccgggcacaagtccagccggagtaggtgggcggggccaaggcctggggcgtgcccatgggagggggcgtggacaaaacaagtggttagtttgtgggcggtgtcgggccagggagcctggagcggggcgggggcgggggttgatggaggggtggatccgccgctgacgaccccaaccctctccctttcttcatcactccccaaagtagtggaatggagtggatgtcaggggttctgttgtgctagaggacccgcgctgtatttacgctgacggcatgttgcttgtcatggacttcaccatagaatttgaccacaatttaccaccccacttagcttcatctcttccacaggccaaaagtgctatcatttgggtttcagtcctctccagaaatagtatttgatatacaaacatccctgagaatgacatggtcacagtaaaacctaacactattaatacggccaaagactttcttctgaacttcctcccaaagaccaagcagtaaccttgctctgggtcgtttatagggggccaggtgtggctccacttcctagggttcagtttaaggaagtccgctggagaacttggcttccagccaagggtgggatcactgcaaagcgtaggaaataagcgagaagagccccacagtgcctcctaaaccttgctttgggggctagcttgtatttcctgtcccagctctgctgccacacacagcccttcattcaggaaatgtttactgagcacctagggactggggatactgggaacaaaacaaagatcctggccctcattgtcacacaactggggagagacggaaagctaattaaacaatgtttgtgatgtgttcaaaaagaacataacaccgacacacagcacgaagtgcttttaaatagggtggtcaggcaagatgaatgtgaagatgaggttggcaagccaga

SEQ ID NO: 11264 - DNA, 916 bp, Artificial sequence
  DNA replication origin
cccactttcttgggcccactgagtcacctcgaaacctccaggccggtagcggggaggagaggaggagcaggcgggggtgccaaggtgtgggctgcgccctggttagggggcgagcccggcttgtttatgaggaggagcgcggaggaggatccagacacacaggcttgcgcgcccagactcgcccggccagcggctggcggcctccgacgtcaccaaaccggttgggtgagagggcagagagcagggggaagggccgcagtcccgcccgcgccccccggcacgcaccgtacatcttgccctcgtctgacaggatgatcttccgccggccgcagggcgggtagatggccagggcctcctggaagctctgctcgatgtccgggctccacacgccctccgcatcgttgtccagccccttgtccaggccctcgggcccatcctcccgggcctccccggggctgctgctggcgttccagctgttggacgctattgtgctggttgctctgggctctgggcctgagcccactgggcggctgagcctgggggacagacagacaggaactgggaccagggtcctcctcgaccacagcaatctcctatcccacagccgctggctctggagctccgcccccagccccaagcccaccctaggagcaggtgctccaggtggaacggaggtaaccagaggaacaaccacagcttgttcagagctgtgtgacctgggatgcacgcgctacttcacctctctaggcctcagtcctgtaaaacgagaaaagggtctccttgaggagacctccttgaggttgtgagggttaaaatgtaaatgagctcatgacaaagtaccaaccacatgcccagctcataatactcaagaaataggtaatcggtaacaacaatgcctcataccaacacagcactt

SEQ ID NO: 11265 - DNA, 1075 bp, Artificial sequence
  DNA replication origin
atgctgaggggggaggctgcatgggagtctgaggcaggagaatcgcttgaacccaggaggtggaggttgcggtgagcagagatcgcgccattgcactctagcctgggcgacagagcaagactccgtctaaaaaataaaaaacaaataaaaaatttaaaaaagaaaaaaaataaccgaataactggctgacattcagacctcccaggccctccccacctcattctactagtgatcccctcaagcctccctaagcaaacaggtggctctgcagagagagtccaccccgactcaagcagcaggacctggaattcatcttcctctccctggcttctgacggtgtcccctacatctccacccctcccctttccctgctgcccagagctaagtcccaggatccagccatcatgggctcttaggtttccaggaccctgaatacattggacatgtgggttctggggctgaaggggatttggggtgagtcttggggttgtgagtgatagggggcctggtggggtgtggtccaaattaatagcctggcaggttcagggcactcacagtttacagagccctggcccacatgtaggatgggccagggcgggggcgggcgtgttggtggtttacgggctgctgtggggcctggaggtgcgggaacaggaagtgggatagaggagcgggtgaggttgagccaggctgttggccaagcaccttctctgctgctccctcaccagttccctttttgtaattcctggggcagttcctgccctacattaggccccttggcagagttctggttagttatcgatttgggggaagataaaatggtgcccttctgggtcagggactctccttgtcccctgaggggtccttagcagggttgcactgatgctggggcgagagtgaggggtggaggtccctgactggggatgtggacactggggaggaggagctgacagggagagctgaggaaacacagccctgctcctctgctcctcctctctgtgctcctcagcatgcctttggcagctgcgtgaccttgtgagccttagttttcatctctggataatgggctttattc

SEQ ID NO: 11266 - DNA, 1304 bp, Artificial sequence
  DNA replication origin
cgctggcagctggtgagggggaggggaggggggacggcccaaaggacgtgtcaaggagagaataggaccaccgtccctcccttcggctggctcctagacgcatgcgagactcactttctaggaacgctcctggggcagaggcaccaacacaggggcaagtggcactccccacacacagccatgcacaggagcacactgtgcagaggggctgtgcgagtgctcgggaggacaaccacgtgagaatgtgcacccccaagctgaggcacacacatgggcagtcgtgggcaggcagctgcccccgtctgggggctggaccggggtctcagtggaagggagtctgcaggaggcgtgagcactggctgctctgttctcctagagaccagcatgtgcccgccttcttctccctagatcctctaactgctgggacccaggccgggctgagagaggaggctatggctccctggacaggtgcgggctgggctggggcaaatgtgggactctggcttggtggaggggtgggacatctagagaaagctgactgcgggcgagagggcaagccctgggctgctggctgatgatgcccaggtatctagaaactctgcctcgctgtgctgtgccatgaagaggggtaggagagagaggagacccaagtgagggtcaaggggagggagaccaaggccggggtggggcctgagacagacaggaggggcaggggagacaggctgggggagagtctggggcaaagagaagctgaggtgaacccagagagaaaacagaccagagacaggagagtcccagtgagtgacagacagaaagcccaacccagtgggggacagaccagagccccgcagagtgaagggagagaccccaggagagatgtggaggcagggcgggggagtgctggaccctcagacccacagactgacagacagagccggtggggggtgaagggagaaggggagaaggagggcaggggaggggcacagacaaggcaaccaacaaagacctagaaagagacacacagcagagaggggtagaccagaaactcagatatgataggcatcgagggaggggcagaccaggaggggatggggagaaagaaaaagacagggacaaggacagagacccagaggccaaggcaaaacagagggagggagtgacaagggaggccactgccaggggctggggctggccaccatccaggacacccccactcccatctcaggggctcctaccctccacctcctctcagaacccctcccatctgcctctgcagaggagtcctgttgtacctgtcctgcaaa

SEQ ID NO: 11267 - DNA, 2188 bp, Artificial sequence
  DNA replication origin
gccgggaggaggccccgctcgggagaggtggtttggttggtcggctgggctggctgggggggcgacactcgagggggactgggtccccgagctattgtccagccggagctggagccccggatcggggtgccgggaagtttagagggaagggggaaaatctctccgggaagccccgccccccgccctccccacccccccgcgacggggacgagttggtccgggaaggtggggaagccggggagaccgtgtcccctgtgccgtcgcctgtcccgccgtccgtgcttggggggtcggggcggggatccgggggccgcacagtgtggagggcctgcctgccaccctggagctcatatccggggcgcccagtcccgggccccgccgccctttggactcccggcccgcgcgctcccggagcccgcccggcctcagctccacgcaggcctcgggcccggcctcccagcgcccaggccggtttctgcgcgcggtgccgcggctgcgctgggttgtggagggtgtctgggaccaaagccgcgcgccccggccgtgtgtcccctgagaggcagggaggggctcacgttcccttcagttctgccgcctgcgtcggggtgctgattcagagttccagccctgagcgctgtgagcttggctcggaggggtctggatttggggccttttcttccccacacttgctcagggcccttgtttagacttgacaaggtttgagggtggctggtctcccgcttcctaccccggtccccaccattgtctgtcatgccctttattcctgctaggggagggagggctgggagcgctggtctggatctgttttccagcccagctgggccctggggcagtgtcattgagaccccgctctgtcaactttcctggtgaggggccctgatccagggctgagagattctttcagtgcgagggggaaggaggccttggggcggacttctcaggggctgtcttcttctgtgtcttccctctttccaggtaggggcagaaccaggtcaggcctggacttgttgtccggaagaacagggcataggggtaggggctggacacagctcagaggggctggtgcccatagcggctctgcgtatccagtctcttgtggcctggttctctgtacacatgttccaccccagtgctggggccacctggggcaaggaggggaggctttcctcaaaagttggagatttgggggaattatgtcctctcccttctagactcctgtagcccccctcccaccaagacccctctcgtaggggcactccctaaaggatgtggttctgtggtcttctgggtccctgctcacccagtgggcagagtgcacagatcttccaggacaaggctgtccagtaagggtaacttcaggggccctggatgccccctcctcagggagagggtaggagccagtatgagtcccaagctcttgggccttcccctacccccccagggagggaacgtcattaatgctaatgagcgcatctgggctggggaatggcttgttagagtggtcagtggttgccaggacagagcagcacattaagtgtacagaagcatcacatgggtcctgagccctgctcccatcctcacccaaaggtttgtagaccctggcactttctgccaactgaaggaatgttaaaaccgggaggatttgatattctcaacaatatcaaaggagaagatatctcaacagaggtggtcaagaaatagggatctggtcccctccggacctttaaccagttgcgccatcttggcaggcccctttgggcctcagtttccctgcttggaatgaatgacttctcaagtcccttttctctgagctcctcccagagtctgtctcccagtttgccttccttctcccatgatggaacctgaacttggtggggtctggagaggcgggtgggtgatccagtggcccaaagaagaaggcaaggacaaaccaaggggtgactgaggagtagctcagccagatgaacagggctgaaaaggtggcggggggcaggtgtcaagggacaggggggcttggtggattgggggatcttgcctctgaagtggtcatgggttctgttagggctgaatggcacaaagggtgctcagaggccgcttgggtggctctaccctctgccccactcccagacacctgtgggggtcccagggctcagtgtggaaatcgctg

SEQ ID NO: 11268 - DNA, 1670 bp, Artificial sequence
  DNA replication origin
gtgccattattatccctatttggcaggaaactaaggcacagagaggttaagcaacttgcccacggtcacatcactagtaggaggtagagctgacagtctggatctccagtggccatgctcttaatctcttcaagatggttgccttttaggggcagggaatattaagcatttttgagtgcctactctgtgtcttctctcaagtgaggtcaaaggactaccctggaagactcagggaaacaaggtgtccctgttacaagccttggttggaaaggcttccttcccactagggtgaggaagtttggggatggaagggtatctcccataagtctctgggttcacagggttggaccaacattgagcgagccccaactgcatcctagggatgtgcccccagtgccacctgtcctgtggctgtgggactgctctccagatcacgtttctggtggagcctcgtccacctgagtttgggggtatttttagcaacttcctgtccctatggatcctgggggaggtgctgaggttggggctgggaacctggatcattgaagggagaggtgcccagtgaggctgaggaagggaaccaggggctagtcaaggggtggagctggggtctaaggtgggacttcgtggctggggataggaggaaagactgtggccagaaacaacagagaatttgggaaggaagaatgctgggcttggataaatttgacagggtcctatagttaatcaggtgcgggctctaggcatggcctgtggcagcagcagaaaggcaaggtccctgcccccaggagattatagtgtgactgcaaagccacgtggtgctggtgtggagtgagatagaagaagggatgggtgttgagtaactgagatggtggctgagggttggagccccaaggcaagggacagactgcccccaaggttgagggcactgtctgccaggatgggggtccaaggaggtctcgggccgcccccaccccgtcttgtgtccatagccgactatatcgtgctgcagttcggccgcgtggcggaggacgccttcaccctagactaccggtacccgctgtgcgccctgcaggccttcgccatcgccctctccagtttcgacgggaagctggcctgcgagtgaccccagcagcccctcagcgcccccagagcccgtcagcgtgggggaaaggattcagtggaggctggcagggtccctccagcaaagctcccgcggaaaactgctcctgtgtcggggctgacctctcactgcctctcggtgacctccgtcctctccccagcctggcacaggccgaggcaggaggagcccggacggcgggtaggacggagatgaagaacatctggagttggagccgcacatctggtctcggagctcgcctgcgccgctgtgcccccctcctccccgcgccccagtcacttcctgtccgggagcagtagtcattgttgttttaacctcccctctccccgggaccgcgctagggctccgaggagctggggcgggctaggaggagggggtaggtgatgggggacgagggccaggcacccacatccccaataaagccgcgtccttggccaagcggagcggtggttcctcagcgcgtgcggagaacgaggcggcaggaggcgtccgaggcgcgagctggaagtctcaacccccgtcccactcc

SEQ ID NO: 11269 - DNA, 1030 bp, Artificial sequence
  DNA replication origin
gggtggacccccagggtgtgggctgcggaagggaggggcttgagggccggcgcgggtgtcgccgagccctggaacggggtgggggaggagggggcggggagtgatgagaggggagggattggggttggggttggggttggggttggtgtagaagggggtggcgttggggtagaagggggtgggaagctgaatggaagccggggagaagtgttgaaagtggaaacccaagcccaggggagatccctagggtgaggagcccgagggggtgcgcccaggcttgggggtagcgggtagaggcgctgcctcgcggacccgcggatgggaccctgtctgaaccccgcatctcggctcagctgggcggacggggaggccgcgggaggagccttccccagacccagcccaggcccgggcgccgcagacggtctacgccaggttcctcagggaccccgaggccaagaagcgcgacccccgggaaacctttctggtagcccgtgccccagacgcggaggacggtgagagagggccccagggacgcgggtgagggggcggtggagctaaggagagaaggggctggctggacgggaacggcccagagaggcagaaaacaactgtagtcaaatagcccccacttttctggccttatctttgagccaggtattgtgctaagcaccaactatgagagggtgctttgttccccccctccaccattgtacagatggagaaactgagtcatagagccgttaagggtttttgccttaaccagcagttaggagccagaagtagcccagatgggtctgactcaaggtcagaaacagacaaggtcagggagaagcacagtggatgcagggagatggggaaaggaggcaaggcgagcgtgtaaggagaggagggtctcaggaggagagagggagggcatttccccaggacaggattcctccaaccccagccactcccctgatttgcagaccctgaaggctgccagtcaccctcattcttctgggaaggtgccaggtctccggttcttgtttca

SEQ ID NO: 11270 - DNA, 1046 bp, Artificial sequence
  DNA replication origin
tttgctgctaaactctttttcttttctttttcttgagatgggatccactctgtctcccaggctggagtgcagtggtgcaatcatggcttactgcaaccttgacctcctgggctcaagcgatcctcccaccttagcctcctgagtagctgagaccacaggcacatgccaccatgcctggttatttttttcatttttattgttttctgtagaatggaatctcactattttccccaggcgggtcatgacctcctggggtcagcctcccaaagtgctgggattacaggcgtgtgccacctcccttggcctaaactcttcaaggaatgaggagtcatctcattccttgaagaatttagtcgtggaatgtctgcagcaatggtactgtcaaataacatgagattgaaagctgggggtttgggggaagagggggaagctcatgttctgcaagtggagcaaggagggcccccatctgccggcccagtggcaggggagggagggagggagggaaaacagtcaccacctgggctcacagtaggggaagcagtgtcagaagagccagaaggcgaaggaagagttcaaagaagacctcccgtgcctgagttccggggacttggcagagagtttcagtagctgggggtggggagaagggaagcagagccagatggggattagatgcagggaggagggctgagcagggatctgggcttcttgtgatgggcgatgtgaacagggataaagacagtaatgagattagtcccgtgtctgcagcagagtggtggtggggctgaggggctgccaaggttgtgagggagaaaagcagagtgcagaggcgtgcatgtgatcatgcaatgcaaaaacaaccccatacaggcaggaggagggggtcttgccaggagcacactctaatcttggctaccaccttcagcacagattcctgtctggccaagggtacgaggagagacaaagttttcagactctgatccctgccaacacctttctaagaatggtcaagaaaatgatgaaaatgtcagtgaaacagaagaggaaca

SEQ ID NO: 11271 - DNA, 1168 bp, Artificial sequence
  DNA replication origin
cgcggcttcgcagcccaggagccgcgtgtcgcgggggagcggggtccggaagcctcgaggggagcgcgcgggaggcctcggccccactgcggcgcccctcgccgcgccccaggggccgcggggccggtgctccccgcgggaggcgcggagactagtgaccgcgggcgccgctctccgcccccgccggcctctcccggcagaggcgaggcgggtcgcgcccgcccgtcctcactgggcttttgtttcccgcccgggatgacaggtcccgctccgcctccggtctctggcccccggctctccccggacaggcggccggaccctcagccggcaccgctgcgggcgggagccaaacttcgctttcgggtccgggcgccgggacaaccggaccccagggcgagccgagcgccgggacgccgcgggcgcggggcggattcgcccacctggcggggctgtgaaggggatggtggcggggtggccgcgctccgggtgtggacgggcggtccccgccttcacctgccgcctcgggacaagcgttggggaaccgcatcgccgctgtcggccgcttgtggaggagtccgcgcagcgccgtctaacaggtgatccgcgtcactcccaggccataccgaagcggctgaacgctgtgccagggctccttatgctcttctgttctgggacgtgaaaacgtcttccgccttattggtcgtccaaaaaggtgcaccggtcacagtataagagtcaaaaaccagtattaccaaaaagacactacgagcgtcagggtgcagagtggctttcttcgattaacgaaccggcaggaccatcgtagtctctaaaatcgggttctgcagtggtggcgaaagcgtagtaagtttcaagttgtaagcggagatgcagaattgtagatacccttcagtgtggttcaggacagtgtgttcagcgtttggccgccgttcagtaaattctgcatgaagcagtttgagctcgtggttttggatttacttttcaggagtatgttttccagtggaataaggcttactactgaatgggagctttctttgcctctctgagtgtagacaggagtgtttattttcattgtcttcccattttgttagattgtggacaagggaaaagttaaagcatattttggttaagtatttttaatagtctggga

SEQ ID NO: 11272 - DNA, 1593 bp, Artificial sequence
  DNA replication origin
tttgtttttctgcgttaatgaacaaatacattgtttcagtgactcccctcggcaactggtaaacagggaagcttctaggcactgaggacagacaaatgactgagacagaacccctgccctcgaggcggtttcagtcttggctttatttgtcttttctgcagacatcatcaccctttttttttttttagaatggagtctcgctcttgttgcccaggctggagtgcaatggtgcgatctcggctcactgcaacctctgttcaagcaattctcctgcctcagcctcctgaatagctgggattacaggcatgcgccaccatgcccggctaattttttaaaattatttttagtagagacggggtttctccatgttggtcaggctcgtctcgaactcccgacctcaggtgatccgcccatctcggcctcccaaagtgctgggattacaggcgtaagccaccgcgcccggcgcccaggcatcatctcttgaaggcagcatggcgatttctggacgaggctcttcataaatgtttgaatgcagtatagtgcaaagagagcaggtttggagccaggagacatgagttctaatctggctatgggatattaggtttccataggtaactattaggtcccacgtgtaactagctatgggacatcaggtttctgtttccttaaaaatgagagagttgattagagattccctaaggcccaggtgcagctcctgcatctctatgggagtaactcagaggtagccatctggttggcagtctacctttcggagttggcggaagaactcagccgttttgtttttgtttttgttttgagatggagtcttgctctgtcaccaggctggagtgcagtggcgtgatctcgactcactacaacctctgcctcccaggttcaagcgattctcctacctcagcctcccgagtagctgggacggcgcgcgccaccaagcccagctaatttttgtatttttagtagagacggggtttcaccatgttggctaggatggtctcgatctcttgacctcgtggtccgcccacctcggccttccaaagtgctgggattacaggcgtgagccaccccacctggccgaactcagccgtaaggcctcttcctgttttaatctcctgggatctcctgcttgaaaggtagcaagccaagagaaagtatggtctttacagtcactgggtgtccagagggaggtgatatctgctaaattggttctcgaggtgggatttccccagtcccgactgggcatcttagacttaatggggttgcttcctagggctaacctggccagctgacctaacaaacagcctggcctgcccctctccggcctctaggtaggccctgtggacagataggaggggcagtgccttcagagagacgatacagatgggaagtcaactagcttgcttaggcattaatttctcgggaggtaagagatgtgagggggtgtcagtttccaccatcccttctctatggcccccacaaagggcaagggccagacacgtgggctggcgtggggaggtggaggagcaaatgatgggggcggggcctcatttgcatggacggcgcgcggccaccaatccg

SEQ ID NO: 11273 - DNA, 987 bp, Artificial sequence
  DNA replication origin
gtcacgtccacccctcccatctcctcctcctccacacacacacacacacacacacacacacacacacacacacacacagctcaaggcctagaacctcctgggatctttctcccatatctttctccctagaaccaccttctttcttctgagtccctatagctattacacacatttggtactcaccacctgctggcttgggttattatttaacctaacatccagcgtgtttgtctcttcaattgcccaaggggaggatatcatttcaatacacccaatatttattgaacatgaactccggtgccaagcctggcctgtgggggatgagttggaatggtggtgggaggcgggggcagtggaggagagggctcaaagaagaagcagactttgtttctgcctcaaggactttctaatctggttagaagaacaggattagtaaacagatcgctagaatatgagacaggccacacgctgtgccgtgagaaaggtacaaactgagtgtgctgggcgttcagaggagacaggaatcagatttggctggcactgtttcaaggaagctttatgagctggagcagcagagatgggtagacagggaggacaggcactcctggcatgagaaatggcacagcaaactgtggaggtgggaaggagggagaacaaaggacttcaggactgtgtcttaacctcatggtgacattctttagcaggacccaatacagagccttccacacggtaaacgtgcgatataaatgctttgttccctccttggtttggagagggtgggatctttaggaccagcacttagtgatgtctttccacagaaggatgggtaaggagaaaacgtggctctgaataaaccaggggtttggagctaaacacagggaagggtcagattccaggggcagtttggggtcgtcttccttggccttgcccttctttcaccctgtcgtccacacccactcgccagtgtctgggctctccctactcccg

SEQ ID NO: 11274 - DNA, 1203 bp, Artificial sequence
  DNA replication origin
actgggagggtcatggtgggcaatggggaggagctggtatgaggggcatgaatatgagttcagtcacttctaggccatgtaagggcaggtgtcctgtaggtgactggacttggagatagggaagtccagaagagcagtgggctgctgtctgagagtgtccctgtcacagcctcgagcaatcactgacctgggatcacggacagatttcaagcatcaggaagaaggtgggagtagatggcagtgaaggtgcctctcgactgggagatgcagtgtgcattggctgggtaagagcctgtgtgggaagcgtgatgtgtgtatgggaagggggtccacggcccaggcctgtgttggcatctttagccacagagggtgccagagatgccaccagatggcaggaggcccaggtgaggcacttcagcagcctgaggtccctcccctaggcccactctcaaaggccctggagcccaggcctatgctgcctgccagggcctttcccggaaccactcctccccgcctgtcctggcactctccaggcacaaagcatccctcagggcactgcgcaggcaccccaggaagctgggacgtgagacaggtccccacccccaggaataaccctgctctgggctgctgtcatcctcacaatggccccacaagacgccaggagacagcatagggacagcataagtccccagtggggaccccaaatgggaccccatttcccctgcatagagggggaaggaggagctttgtggctaggtggcaggatctttattgggtctttattgtggtttgggggtgggggcagaaaagcagggtctcgggcttcaaaacaccacaccacctgcctctccctccctccgaggaggaaatcttcaggggcctagtggttttgaggggagggggcaggaagagactctgaactctgggtcagctgaggacagagataggggagatcctcttgccctatgtccctcttttctcctaggatccccttcctcggctccctactccaccactaccccagaacaaactcctacctctgtttgcaactaagagttacatcccccatgccaagaccttccgaggcgtcccagaggggtgagatttggggaaaacaggacatgtacacagcagctgtgtgcctggccacacctgtcgggtggggtgaggagagtgcttctcccaggtgggcagagcctgctg

SEQ ID NO: 11275 - DNA, 1419 bp, Artificial sequence
  DNA replication origin
caaaaattagccgggcatggtggcgttcaactgtagtcccagctactcggggagctgagacaggagaactgcttgaaccggggaggcagaggttgcagtgagccgagactgccccactgcactccagcctgggcaacagagcaagactccatctcaaaaaataaaaaaaaaaaaaggaaaagattaaaggcagctcacaggctcagagggaagccactagttacgccactctcctttccaccttctgccctcctctgtggttttgttctcttactgagcaggcatctgccctcctagcaggcatctgccctcattctactctgcacccaaggttttgcagttggtatttgccacaacctccctgatattaacttggatgtcagcctctcccttccccaccagccaccaccccccgccccccaccaaagattttggggaaatgaaaaatagtggcacttcaaacaaaagggccccagtgagcaccagtaagccaataggcttgatgggactggggagaccaaggcaggagagagaataggaaggatggaaagggaacaccaccaaatgaatgggtcacgaggaacatttgctgccctactgctgtgcaggaggcactgcactaaaccccgtggcctggacatgccatgaatgaactcaggtcccatcacagagagtacacaggttagctagtgtactcactgtgcttggttgaggagtctgaagttgataacatacacaataaatgatgtttgagaaagattattccagcagggtgtgtaggaggaaggaaaaagaaaggacagtgtggcagatgctgtgagaatttgggccaaaggtggactctatggggctggaggggaaagggtgaaggagaaaagtaatgaacaaacaatatcttttgaaataaaagcaacaaagggaagaatttgataagagatcagacataaggatggtgaaggagagaaagcagttaaaaattaatctacctttgcagtgagttttaggactgggagggtcatggtgggcaatggggaggagctggtatgaggggcatgaatatgagttcagtcacttctaggccatgtaagggcaggtgtcctgtaggtgactggacttggagatagggaagtccagaagagcagtgggctgctgtctgagagtgtccctgtcacagcctcgagcaatcactgacctgggatcacggacagatttcaagcatcaggaagaaggtgggagtagatggcagtgaaggtgcctctcgactgggagatgcagtgtgcattggctgggtaagagcctgtgtgggaagcgtgatgtgtgtatgggaagggggtccacggcccaggcctgtgttggcatctttagccacagagggtgccagagatgccaccagatggcaggaggcccaggtgaggcact

SEQ ID NO: 11276 - DNA, 1135 bp, Artificial sequence
  DNA replication origin
tcccgcccgccccctaggacgcggagcgacggggctgcccgggaaggggcgggcctgggctgagcgctgggcccaggttctcaggatctcgtggcccgcagctgttggagagggctcactgggagccggcactctctagaacccccgctagttcacccgggtgagggtgggggtggaggtgggtacccacactcgagacaactgcgcgcccgagaagggcggccaggcgggcttagttagatgctggcccggcgggaggcgagtacggtcaaaggccaccaacctcatcctccccccaggttcggatgcggaggggcccagggcaccaggagacgatggagagaggccacgcccctcgcgacgtcactgatgtcaaggcaactgggggcgggacggtgggctagagaagggcagacctcggggaattgaggctgctggtggctctgggacggggtgggggtgggggcgcagcgggggcgggcttttcaatttgcttcactcaatgatgtccaaaaaacggagtgagggtcagcttctgttcgctcgttgattcaacaggcatttattgagcgttatgcttggggctgtgcttaggcactgggatattgcgtgctatccgaaccctgccagttgttgtgaactagggtagggtggctctgcgtccctggaacggacgtaattattaacagtgccccttttcaagtttaaagtgtcccagtatgggcagtagttaaggaacaccttcctcccaatttaggaaaggctctaaccatacggggaaggaatataaactattgggtacaacagacactttcctggtgctttgtattctctgtaatttttgcccctcattctgcaaaacaagtgtcactagcgacttttacagacgaagaaactggctcagagaggttaagagacttacccagggccaaacagctaagtgttggaaccaggatccagacccaagttttatgtgccctccaaagtatttcatgcccacttctcaaaataagtaaatggtatcaaataaataaaagacactgtccctgccattaaggagcctacagcccatgggagaaagggtttaaaatactgcaggacataactaagcaataaaatatagaaaagattaggc

SEQ ID NO: 11277 - DNA, 885 bp, Artificial sequence
  DNA replication origin
tggcctaaagggtctttttattatcaccacttgatctgctctatctcatttagtcctcacaacaaccctatgaggggggttactattactgtccccatttgacagatgaggaaaccgagctggagaggttcattgacttgctgaaggtcacgcagttataagctgtagagacagcccaggtctgtcttactccaggcctggtactcttggttctggtccccaagaagtttaagtccccatccttcctgcatcctggtgactcccgattctcatacccactccctgcagaccaagggagctaccaacatcatctgcccttgccggatgggcttgacgtgcatatccaaggacttgatgtgttcccgccggtgccatatgatttagaggaagatgcaggctggtcactgctcccttggggccataggccctggttgccaccaacttgctccaaatccagctcctgagacattaaagtcacttcctgtccttggcctctgtctgtactttctgggcgaggggacctggtggagattgtaccagtccagggggcaggcaaaaggggagactggaggcatgaatgagcttctaatgggatttggccctgtccggaggtcagggtagaactgcaggaagggaatggcacagggagggtgtggtggagcaggggctgggtctgggaaagggctgattctctggttggagggctgtgtgggagagacgggattgaggaatgtacctggagagtgtatgttggggtgcctatggaggggtgtgtggtagggagagactaggtggaggtatctgaatgttttgcggggcgggttgtggggcacaaaagggtagagatcattagagagttggtgagaatgtgcaaagtataaatgc

SEQ ID NO: 11278 - DNA, 945 bp, Artificial sequence
  DNA replication origin
acactcctcagcccttgggtggtcgatgggactgggcgccctggagcagggggcggcactcatcggggaggctcgggcggcacaggagctcatggacggggtgggaggctcaggcatggcgggctgctggtcccgagacctgccccgcaggaagacagctaaggcatggtgagaaatcgagcacagcgccggcgggctggcactgctgggggaaccagtacaccctccgaagccgctggcctgggtgctaagcccctcctcattgtccggggccagcagggccggctggctgctccgagtgcagggcccgccaagcccacgcccacctggaactccagctggcccgaaagcgccgcgtgcagccccggttccccctcgctcctctccctccacacctccctgcaagctgagggagccggctccggtcttggccggcccacaaaggggctcccgcagtgcagcggtgggctgaagggcttctcaagtgccgccaaaatgggagcccaggcagaggaagcgccgagagcaagcgagggctgtgaggactgccagcacgctgtcacctctcaaaagcatacagccagaaacaggtagtttttacattctttcataacattccacatacattcatcaagcatcaagtaggtagggtatccaacagctttctatgtcctggagatacagcagtgaacaaaaatcaaacatctcagcctttatggagctatcattccaaggtgtggtggagcagacaaaagtagcaagcaaacaaacaaccaaaaacaaacgcctctctccctcccccagtgaatctcaggtgcattgccagtgggtgtataaatctcccaggggtccactcgaaggaatatactgaaatactggtgtctggattaaaaaagtaaggaactttaatgaccaagtaacacatctttttgtaagttaggtagc

SEQ ID NO: 11279 - DNA, 1706 bp, Artificial sequence
  DNA replication origin
ggggccaccctgcccacagcggccccaggcccagcgacactcaccacacagagccataggcgccagagcccactggagacaggttctggtaacgctcgggcacctcccagattgtcttgttcagctcctgccggtagaacgtgggcctctcctgagacattttccagcggcagccgccgggcaagaaggtggccctgtggggcccccgcctgcacccgcaccctctccccggcccttgctgcccgcccagccgggcggggaccttgcgctggtcgcccgcgcaggtgcggctgccgcgaccccgcagactcccgcgcgcgcggctgctgtcagccgcagcggctggatgtgcccctgcgactggggcaagccccgctaagggcagggacgcgctccggcgctcaagactgcgcccgccgcgatctccctgcaccttcgcccctacaaggccgactccgggctgcgtcgcagtactcccgttccagctgctgcgcccgctaaggctccagtggtcgcggttccaagagccagcaaacgggagcctcccgcagtactctcgcgagaacagctcccgggactctccgagagccgagattttacccaatatggaacctctccgcgggcggggcttcgtgagagaagaggatgggaggagcagttctcgcgagaagagaacaataactggagaccaaaggcagaaactcccagggactgtctccttaagggcgcgaaggcggaccggggaaggaagagagaagctggcagcacacgcctcgcgcgcctcaccgtggccggcggggcaaatacctggctctgtggtggaaaacgacactgacaaatagcgtgtcggggaaagagtcaaaagatctttaactgcgagtagttaccagcagcagagcacctgctcacctgaacccccaaattccaaaaaacacttgcataaaaaagagacaagtggccgggcgtggtggctcacgcctgtaatcccagcactttgggaggccgaggcgggcggatcacctgaggtcgggagttcgagaccagcctgaccaacatggagaaaccccgtctctactaaaaatgcaaaattaaccgggcgtagtggcgcgcacctggagtcttagctattcgggaggctgaggcaggagaatcgcttgaacccgggaggcggagttgcggtgagccgagatcgtgccattacactccagcctgggcaacaagagcgaaactccgtctcaaaagaaagaaagaaagaaagagacaggttccggccagaaggctgttgcattcccatctgctcaaggacatatgggttactctttgagatgctgacgaaatatgtcccaaaggcaaatgttaaccctgcatcaaagctgaggctttccaggggctgggctcagtggctcacacctgttatcccagcactttgggaggccgaggcgggtggatcacgaggtcaagcgatagagaccatcctggccaacatggtgaaacctcgtctctactaaaaaaaatacaaaaattagctgggcgtggtggcacgaccctgtagtcccagcttctcgggaggctgaggcaggagaattgcatgaatccaggaggcggaggttgcagtgagctaaaatcgcgccactgcactccagcctggcgtcagagggagactccgtctcaaaaacaaaaacaaaaacaaaaacaaaccgaagctt

SEQ ID NO: 11280 - DNA, 1017 bp, Artificial sequence
  DNA replication origin
cgtgcctgggccgcacctgccgcagtggctccgtcgggccgggcggaagcgcgggagcgcagggctggacaggcccgggcgtggcggccccggcgcacctgggcgagccggcaggtgggagcgtagcagcccggggcccccgccctcgcgcgggggaggagcgggcggcgcggggcgggcgcagcgggggtcggggcgctgggagcccgttgggccgcgaacgcagccgccacgctggggccgccgagatcgggtgcccgggatgagcctcatccggaaaaagggcttctacaagcaggacgtcaacaagacagcctgggagctgcccaagacctacgtgtccccgacgcacgtcggcagcggggcctatggctccgtgtggtgagacccctgggccgctggggggcggggggcgggcgccaggctctcccctttccgcccagcccgccctgggctggcccctcgccagcgccaccttgaccgcggacctcaaggcccagcgccctccccggggccacccagcggccatctcccttttctcaccgagtggctgagtgaggtctctgggggttgagttgggactgggcctggttctccaggactgtacacttgcaagaccccagagttcatcgggcagatcctcactgttacagacgagtacaccgaggccccaagagggggaggtggctcgccaagttgcagacagagtgagactcccgccctgccgtggatcccgtcgcaatgagacgttgctgcccctggcgctgtgcccctctctcagctcctgcctggcttcctactccctgccctgcgtcccgcggctcccccatattctaggtggtgggcctagtcccctctcagcccagctgcccagtgggaggggtcagggcggtctgggagatacggcccaggaggagagcctcgcctgctgaccggcctgtgcccgacagctcggccatcgacaagcggtcaggggagaaggtggccatcaagaagctgagccgaccctttcagtcc

SEQ ID NO: 11281 - DNA, 1208 bp, Artificial sequence
  DNA replication origin
ttctcctctccattctccttggccttcaaggctctaccttaggcctccctccaggcagctgttctccatcatcccccctgggctgcaggccctctgtgggcagcatttagtgtgtggtttggcctccccttcccattgcccactgtgagcaaatacctgtgcgtgaatgaataatgagtgaaagatgtcccaggggcctgtcggtcacttctttgccccgaccaggccaatgtcatatggaaggtggcagagagcccagcaggaagcagaagtgggcggccctgggctgtacctttgagctgctctcctgaaaatctctattatttcagactcccagaccccaccccccgcttcatcctctggtgtcctcctaggccatccccactccggaattaaacctcagcccctcccacagagttttctcaaatctgtgaagtttcttcaaaaggcggtggaggtgctcagcagtgcaaggtggggggtggagggggtggggagtagagggagtgggggttccacgggtttgggtcttgcccagtgggcacatggcctgtgtaataggaaacaagtccattctcctgctgtggggggcagaggagctggcggggcgagggagggggagatgtgggctcaggtattcttggtggatgcgcttcgttctgtggctgatggggtggcttaaaagatcttaacagagagagatcaggaagccagactgcaaggtgggggacatttcctaagagcaagtgtaccctccattccctcttttgaggaacaaagagtatctttgctggggcctgagtcatccatgaaaacagacagcagcggtgtcccagggcagggcttgcctggcgtggattggggtggtgctgcccccagtgaggggcagcacaaggggagacagaaatggaggaatagcccccgtaagggcaagcccagtgtgcaccagtgcccagagctgcctgatggaggaacagctccgtaagggtgaacccagtgtgcacgggtgcccggagctgcctgcgtgaggctgggggctagtttggatgagggcatggctcaactttcacttggcacattgaaatagcttttgctgtctgctagggtgtggaaaactgtttttccatggccccaagcaatgctatagctacagctgaggagggaggaatctctccctgcctctcctcccaactcttggcttttgcttc

SEQ ID NO: 11282 - DNA, 1005 bp, Artificial sequence
  DNA replication origin
ggcgcggcccgggaagcggagcgcggtcttctcccgcgcctgcctccgtggcctccgccgtgccccctcccggcccgcgctggggccccggcccggccgccgccgccgctcccgggggaggagggggaatggagccgccgctgctgccgctgccgccacggagcccggccgaggggagggagggatcagcccccaggcaggatccgcccctccggcctccccccgccacctccaccccttccctcgctccctccctgactctgcgggctctcccgctgaacaggagcgagagcgcgaaagagggggaaacgggaaaaaaatccccccgcccgtgcctggcgcggcggcggccggggcggtgcggagaggagcgcggaggcgccgccgccgccgccacggggcaccatccccggctcggcctcacggtggcggtgcgggcgcggcggggacaccgagcaagagaccgggtctgcgcccgccgcgatccctgcgcaccacggccctgcccgccacggggcgagcccgataagagggctgtggacgttcgggtctagttgggagagacaggggtccctgactcttgagcggtcagtcatttcctccccagtccttgtgggtgacgtggctacggtttggagcagcaagccccctccccgaactaaagggcctctccaaaggttaagccagggcagtcattgaggtcaaaaccaatatgtagtttcttgactgcaggtgcctgcacgactcccagaaagtcgcgtctcccctaacccccatgcccaggacctgaggacaaaggtctagcgattgtccatcccctcccccagtgaggacagccgggaaagacctgcctttgttgtgtacaggtgagcgtcttgttccgcaccacacatcttttaaaaaaaaaaaaaaaaaatctgactttccgtttaaaaggagtaaacaaaagtttgacagtctgcttaagcatgcctggtaactcgtctgtcactgtgggcatgggaa

SEQ ID NO: 11283 - DNA, 1528 bp, Artificial sequence
  DNA replication origin
ggcacgggcggggggatttttttcccgtttccccctctttcgcgctctcgctcctgttcagcgggagagcccgcagagtcagggagggagcgagggaaggggtggaggtggcggggggaggccggaggggcggatcctgcctgggggctgatccctccctcccctcggccgggctccgtggcggcagcggcagcagcggcggctccattccccctcctcccccgggagcggcggcggcggccgggccggggccccagcgcgggccgggagggggcacggcggaggccacggaggcaggcgcgggagaagaccgcgctccgcttcccgggccgcgccgacctgctcggcggcctgcccgcccgcgcccaggggccccgaacggtggggccgggcaggcggctgaggtaatgggggcggcagcggggccggacagagcgggggcgggggcatcggggccttcggggaccagggactgcacggggggaaaccggagaagcggggggctttccgagcagggcgggggcggtgcgaaagctctctcctggagcgagggcggcggcagggaaggagaaggcgggtgagcgggggagctgagaagcgaggaccccctcccgcagccgccatcttgtctccccccccagccctggattccgagccgctaagccccgcccccgccacgccttccaattggcctggccagacgagagtcccgccccttgagcggccctaggtcccctgggtccctctgacgggcaggtgacgcagccaatgggttctcgcctctccgccccgctcattcgctggcgctcgctttctctgtctgagggtcggactccacgtcaggctgtctctggtgcgctcgcccctcccctctgaggagatgttatttccctcctttcttctccgaggggtcaagattcttctggaagaggtgcccccttaaaggagcaggagccttggctggggtcctccttgtctcctgagtatcttgtgtgaggtgcaggggatacagtctaattgcagaagctcctcattcttcggggacctggatggggtgggtgagcgaggggtcagggggtgccgaggggaaatctgggggggcgggggttgttggagatattttggaggtgtgtatgtgggaagggctgtgtaggttgagaaactcccgccaaaaaactcgtctagactgtaagctccttgtgggcgaaactcttttcatttccctcatcagcagtcccttccccctctagagtttctccccggtgtctggaggcgtgggtgggacaaaacacgtctgtgtagagtcttgcatggtcgagagatgcttgagcagccgaggaggtggcaggtggggaaggagaagatggagcggctttcatgaaagtgggcgccgcaccgcctgtctgcgctgtttggggtcggtgtggaggcagatgttctcacctcttctagggcctcggtgcctttggaggggtgggtgatgaagcaggtctgttggccctgtctgcccccagggacttggcatttg

SEQ ID NO: 11284 - DNA, 901 bp, Artificial sequence
  DNA replication origin
cgcggtaagtcggggggatgaggccacagtacaccgggacgaagcagctgcagtatagggcctgtgcggagagaacagggctgagatgctggaggcccgggggtggggtggggacagctcacctgtcagcccctgggccacccaccaccagcccagacctccttaaattctaggtgaaggtgccacactgggaagcaaagctccgagttcagttcctggcctggccttcactaattgggtccttggtaacctgcttggtccatctggccctgatgtcccagctttaaagcaggagggggtcctccatagcttcggggttccttctgatgctgaactttcatgaatccagtgggattcaacaaccattaatgtgtgtcagccctgggccaggccctggaagcaaaggaggctgagaggcccacctttgggagtgccctatgagagggagtgagcaagtgggtgacggtgcagtggggtgacaggggcatggtggaggtgagcatgggcaccgtggctccacaagaggggtgcaggcagggtgggaggggatgaagggaagtgccctggcaggagggactgggtttcagcagcaggcaaagcagtgtgggaaggagggaggggatcccaggcagagggagcggcaggtgcaaagacccagaggcctggcttgtgtgtggtttgctagggttggcatggtaggagtggaaggtgggggagagggccgggaagagaaaactgcagcagtgggcagtgaagtcagaacgggggtgggcgtgaggaggcagatctggaagagctggctgctgataaacccagggggcctgagggacggaggtggtgtctgtgcccactgcctattcatccctcatccccaggattactgccaggccagtatgggatg

SEQ ID NO: 11285 - DNA, 995 bp, Artificial sequence
  DNA replication origin
ttgaagaggccagtggctgtgcaggtggctgctcaagtggagagactggtgctgaaacaggtgactcgcatgtgaattcaagtgtctgcacaggttgggacacaggcggaccatggctgccccttccatcccctttgggaacccactccttgtgaggttgtgtggctccttccagactggcctgccgtgctcgaaggcttggttgactgcgttcagggcactcattgccaagggcgagttctatctggcagtacacttccacccgggggaaaatcactctcttggaggaagaattaagataaacagcatctaggataaacaatagcatggggtgttactcagccctggcagcagcatggcctttgcaaaaatggtttcttgagttattttcctaaacaggaacagtgcttttcaaaggtctttctgtacttacttgaatttacagtgagtgaaaacaaacgtgatggtttctggcacttacggtgtagtgtggggaagcaggcgttgcccacccaaattatctagagtttcaactgaggcaagtgcaggaagagaggaatgtggtgctgtgagagagggcaggtcatctgagggattggcagtgagtagagatctgaagggtacgtggcccaggatggtcagggcggggtggtgagggtgtttcagcagagggaacagcacacacaaaggccacaaagtttgaggacacaccaggtggtcgggggcctgaaaggtcagtgtggggcgggggtactgtgctgggggaggaggctgaggaggcggcaggggccggaccatgtcagggctgtaggcagcagctaggatccttagttttcatggcaagcattattgtagcatgacttttaggcaggggaggtaatcagctgaggctggttctgagaaggtcactgtggctgtaagactcattgagaaaggtgaaagggttgcctgagcctgggaagctgaagcttcagtgagccatgatcgtgccacta

SEQ ID NO: 11286 - DNA, 1658 bp, Artificial sequence
  DNA replication origin
ccaggggccctgtatcccatgtcctctccatttgcccaacgagtatttattgagagccttctatgaaccaggcattgttctaagaatcttgagcatatatcgctgagctcccaaagcccctgccctcagggagcttatatgctagttgagagcaggggagatggacgattaaaataaaaaggaaacagaaacagtatacaatatgaggtgaaaaaaataaatcaccctaaggcagatagggaaatctgggaaaggagcaggggttgccactttagagaggctgctcaggcctccctgacattagcatttgaacagacctgaaggaggtagaggagtgagctctgtgggtatctagagcagagaggggatgccaggcagagggaacagtaagtgcaaaggccctggggcaggagcatctcagacttgtccagtgaacaagaaggcccgaaggcccgtgtgtctggagcagcaggagcacgggggagaaggctgggaggggaaggcaagggcaggagtcagcggaagaactgcacttggactccgagtgagaagggagctgctggaagatgctgagcagacaagtgacgtgacctgacttctgaaactctctgtgctgtggagaatagatcataggaggtcaagagcagaagcaaggagaccagtgaggacgttctccagaggcaatgggggctggaatggggcagcaggagaggagtgagaagaggttggattctggacagatttgaaggtagggctgacaggatttatggacagttgggatgagtgggggtgggggtagaaatctaagatgacatctgagcaattggaagggtggaggtggggtttgtggggctggggaagactggaaagggcaggatatcaggcatttggtttaggggctgggggtgttgagaggcctactagatgccccagtggaggggtggggcaggcagcgtgggtgcacatatctggaatttggagaggttgaggaagacatatattggaatccttggcaccacatggtgtttaagacccaggatcagatgagattgcccagcatctgaatgcagatagagaagcagagaggggtaccccaacatctagaagcaggggagaagagtagaaaccagaagaggaggtcgaggagacaccagtggggtagaggagaccaggtgagtggggtgttctggaagccaagggaagaaagagttttgggggaaggaaggagaggtgacccccagggtcaaaggctgcgagagaccacagtaaatcaggactgagagtggccatggaatggacatccttattttcaggtttctggagaccttgacaagtggtttccacggagggctgcagagaggaaattgagacatgatacaaacaactctttgctggagagagcagagaatggggaggtgggaggcatggagggtgcagcacagaggaagggcggccaggaacgccccagagcaggaggtgggggtggggcgggaggggagcttgcccacactggccacctctttcattgcttcgccttgaggatgtcctgccctcccagtgaggctgatttgagggaggtactccgagcaccacagagagcttcctcaccttccggggggactggagagtgctgggtgggcgtcttcagcctgaagatc

SEQ ID NO: 11287 - DNA, 905 bp, Artificial sequence
  DNA replication origin
cctggcgctgcacgagcgtattctacaattccgaaaactactaacttttccgtctgcaacctttaataattgagagggtatgcgcaactcagaaaagtgcgcccgctgaggttgggtgcagagtggactggaggaaaggcgacacccatttacggtgcggccccggacggggtccccagacacggccttcccggcgtgccacgcgcggaggggactcttaacgtgaagcgctgggtgactcagccgcgtggccgcgcggtccggggcggggggcgcgcgccgctgcggcacagccggtcccggctgcggcttctggctgcgcggcctgcgcgcgcctcccgggcggattccagccccgagcgggacagcgcggcggggagcgacgagtaagtggcggcgcggtacggtttcgggcgcgaagaccgggcagggagagtgtggcggcgggcgtggcccgagtcttccctttgtggccgagggggcgtctcctccggacgcggcggcggttcggacccccgagtcgaaaggccgcggggctgagctgggcgcgaggaacctgtgggcagcggcttgatgggctcctgtttccgcgcggagggcagagtctggtgatcctggggagggaggcgacgctgcgcccaggtggtgggcacagctgaagtgtaacttgactgcttgactgctttttgcaggcctcgggtggttcatcccgccggagaggaatggcgagaacctggagtgttgactggcaaaacatttgcagacgcggtttttctggcaattaattggctccattaaaaattaggtagttggtggggacttcctcctgaactctggagccgagcgcattttgctcggtcttttcagccctgtttccgcgtcttccttccctgccacccgcaaat

SEQ ID NO: 11288 - DNA, 928 bp, Artificial sequence
  DNA replication origin
gtcccaggcataattcatctaaacaatgcatagggtgactaactgttcgggatagcgcagaattgaggggcttccaaggacacaggactttcaatgctaaaaccgagccagtcctgggcacacagggacggttggtcattctaggtgtacgtaggggtgtgtaggtcagatgtgggtgtgatttcgtttggcgtggtacatataagtagtgtgtgctgaggtgtggttacacatgtgattattcatgtttggcatagagggcttagtgtggatctggtggcacatttggatttgtgtgctgggtttacgttgctatgtatgtgtccatgttgcttgtaagatgcatgcatgcgttagggcttgtatatatagtgtgttggatttagcgtatatgggtaaccttcgtacgcatgccatttgtgtgcaatgaatgtgttttttcagtagtggtgtaaatgtatgttttgtatttggtgtagtgtggaatgtacatgtcgttcgtgtgaggagggaagaatgccagtggtgtaaatgtatgttttgtatttggtgtagtgtggaatgtacatgtcgttcgtgtgaggagggaagaatgcctgtggtgtatatgtgtctggtgtgaaactcgctatgtgggtgctagtgactcgtgtagtctcttgcctaaatgcaggtgtttgtagtgtgtgcatgtataagcactaatgtgtgtattgtgtgtgctgtgtttggtgtgtcaagggacatattcaggtcattggtgagcagagttgagtgttgtgtatatattgtgagttgtgtttggtgtggaggctgagatgtgtgtgtcatttgcgtgcagatgcgtttgtgcgacgctttgcgcatgctgtgtgtgccgccagcaagatgtcggggtgtgcagtggtgcgtggcctttgttgggctc

SEQ ID NO: 11289 - DNA, 1221 bp, Artificial sequence
  DNA replication origin
agagtgggtcagcggtgagccagaaagggggctcattctaacagtgctgtgtcctcctggagagtgccaactcattctccaagtaaaaaaagccagatttgtggctcacttcgtggggaaatgtgtccagcgcaccaacgcaggcgagggactgggggaggagggaagtgccctcctgcagcacgcgaggttccgggaccggctggcctgctggaactcggccaggctcagctggctcggcgctgggcagccaggagcctgggccccggggagggcggtcccgggcggcgcggtgggccgagcgcgggtcccgcctccttgaggcgggcccgggcggggcggttgtatatcagggccgcgctgagctgcgccagctgaggtgtgagcagctgccgaagtcagttccttgtggagccggagctgggcgcggattcgccgaggcaccgaggcactcagaggaggtgagagagcggcggcagacaacaggggaccccgggccggcggcccagagccgagccaagcgtgcccgcgtgtgtccctgcgtgtccgcgaggatgcgtgttcgcgggtgtgtgctgcgttcacaggtgtttctgcggcaggtgaatgacgggcgtgggtcggtgcgcgctcggcttgcgcacacggtgtctctaagtgcgcgggtgacgagagtcgggatgtgccggagaccccggggcggagagcgggattacaagtacaggaatccctggtcacgctccccgcccctggaaacccagctggggcgagggagggcgtggacgggaccgttctgggagctcgcctttggctgcggttggctccaggccccaggcgcagtttgctcgcggcgtggggatgaagtccgtgtccctggaggggcccaggaagggcgaggaaagcggagtggagtaagttcgtctaggatcggtcccgggtggctctgggatccaatctgcgccgccctggcccaggtcccaggttcaggtcctttacgccactgtgtccaccacctggctgagcgctgaggtcagcgcgggctgtttcctggcccttgggaatgtgccaggacccgtcccctaaggactagcgaggaggtgactcactgtgacaaggagaccccagggaacggactgtatgaggtcagaaccccgcccgggatggggtacagcgggactccagaagccctctcccctgccccttcgcggtctccgtcctccc

SEQ ID NO: 11290 - DNA, 1030 bp, Artificial sequence
  DNA replication origin
tggtgaagcagagattctgtttcaaggtatctgactccaaagccacactatctgccctccatctcctttcctctccactggagtagagggtgcatgggtctgactcagggtgggaatccctgccctcaaatgcttacacagttgctttgagaggggagggatgacgtctgcacacctgagacgtctcaagaggtttcatcctcagtatgtgagtgaccctgtggcccaggctgagtacctagggcccacgggacacagaagacaatgatttgagctgtgtgtctcatgggtgagaggatgcctgaaagtggggagcgtgaggccaggcttttcaggagtggggggatcatgaacttggggagataaaggaagagtgaaatctggatggggaatgggctgttcagaggcttggaggtgggaaggatcccaagacaactgaagatgacaggcatgattgaaggctgggagggagtgccaggcgcagggatgtgcgtgcaggagaagggtggggaggccgtgctgcttttgatggctgaggaggtgagactggagctaatgggccatcaggaatctcccagcagagtaatgacaagatgcaaatggcgttgggagatgatcctgacggcatggtgtatgggacctgggagctatcacaggagcccccagagggcctggcttaggggggaagctacgttcaaccagactagccttcactgccacttatccccaagtcttcaagagaaagtcacactgagtccttccctccttcacgcccctgcccagactctccagctctacctacacctcatcaatgccacaactttgtaatacaggactggggggcaacaaggttacctctcatggagggtctgaccaaggagcaacctggaagaggatgagatgggtgatttcgaacaagggcacagccagggctccagaaatgctgtcggtgatctggggcagggggcatggcctctgtgggggaacctcaaagtgggtgatgcttgcgtggcagcacatgatcctaggc

SEQ ID NO: 11291 - DNA, 912 bp, Artificial sequence
  DNA replication origin
ccgcgaggaggctaggggcccagtggggaagggcaaggagcccagggagcgggggcacagcggggaaggcagagaggggcgcggggagaggggctcggggagagggcaccgggagggaaacgcggagtcgtggagaggggcaccaggagagggacgcgcgtctgtgggcagaggtagaggggatgcagaagacagggagaggggcgtgaggagcgggaggcgccggatggggcgctggcggcgggggtggcggggcgccggcagcgcggagcccgagcgcccgggctgcgccgcctctccctgggtcttggcgccggcggcgacggggctgagacgcggctgcgagcgccacctcctcggctcgggcttcggctccggggcgcccgggctgcgggaaaatcaaatctgcccgaagccgcagcctcccgccgcccgggaacgccagagggggcgcccgcaggggccggggcggggccgcgggcggggtctgcgcgcagggtgagtgtgagcgtgtgtgtgtgcgcgtgtgtgtgtgtgtgcgcgcgtggcgggccgggggacgcggtccagatgctggggacgtggcgggtgacagcaagaggtggtcctggtcgcgcgcatcttcatttgcgcccgccccctctcaccacccctatctcccatcaggggtctccatcctgggggagggggagggttatgggaaccaacgggcgcctttttgagaaaggtctatgcagggttgagagggggcataagtgggagggaggtgtgcaaaaaagatcccctcccaggggcttgggtgtggagggtctctgctgagtgtgcgccctactcgggggcgggtctcagttcagaaacagaccctacatctccttctggggaggtgtgtgggggcgaccccagtgccaggag

SEQ ID NO: 11292 - DNA, 1263 bp, Artificial sequence
  DNA replication origin
cgcgcgcatcttcatttgcgcccgccccctctcaccacccctatctcccatcaggggtctccatcctgggggagggggagggttatgggaaccaacgggcgcctttttgagaaaggtctatgcagggttgagagggggcataagtgggagggaggtgtgcaaaaaagatcccctcccaggggcttgggtgtggagggtctctgctgagtgtgcgccctactcgggggcgggtctcagttcagaaacagaccctacatctccttctggggaggtgtgtgggggcgaccccagtgccaggagggactacctcggtttcccagtggcccaggtggggtcggtgcatgggcgcctcccccatccgtggttcccgccagccgcggcctcgccaagtcggctgccgaaaccacgcgccagcgcccttccactcccccgcccgtcgtgaccacacgactgagccagcctccaggtctagaagctcctgccacccagtctggtggcaaccagactgggagatcggcccgagctccctgggcttctatgcagccagcaccgagtaggcgcgtgctgtgtgcctggcgagcgaggggagagttgggacacctctcctgcagtcctcttcccagccaagcccctcgcgatcccccgccctagcccagccttgccctcccgggcatgaggttgcagcgcagaggcgtctccctgagtaaggctgcacacgtagacttgactctagcccatcctcagcctcagcctaagctttgccgagctggaacctccacttcctcgcccaccgcctggcacatcgaagccgatgtgcctcgggccggcggggaggccaaaaacctggtgctgggctgggcagagttgcgctctctgggccttgtttgtggcagcgggaccataaggggctcctccggattctgtttgaagtcaattcctggaacatcagatactgtcagtcaaagataaatacaagaacacattcctctgcctgttacaatttccccatggctcagaatcagctggactgggttctgcctcctggaacaggcagcaagggacagaggctgttaattcccctgacagccaggcacagctgggtcaggaggccccactccaaggagaataattctgtcttcccttcctgaggatgcaaaactgaactcggaatctctatgttccccatcccccacatacctggcataaacaatgctcaaagcatgcttgtggaatatgttctccattcattccaggagtgtttac

SEQ ID NO: 11293 - DNA, 858 bp, Artificial sequence
  DNA replication origin
gcctgcagaaagcttctatcctagtgggggaaacaggcaaggatcatgctatgaagaaaaataaaggcgcgtaaggggagtgagagcaacgtggtactatgttgggtagtgtgaccaggaaagcctcttcaaggagagggcattgaggcagagacctgaggggcctcagggacccaggggagagtggtccgggctgagggagtagcaaatagaaaggccctgaggcaggtgcctgcagggccagtgaggggccagtgtggctggaatggagtcagtgccagggcgagagaggagatgaagtcaggtcacgagcagagcccaaagcccagcaagtcctttttccgtagaatgagatgggagccaggggagggtcttaagcagaggagcgacacgacctgaccttgcttttaagtggatcctctggttgctgtgaaggttctggtatctagactgtaagcatggggggcctcccttacttggaaaagcaggagtggctggaaggaagaggaggccaagagaagtgagcagggagctggtgcccaccaggttgcagacagatgccagggccaggcagggtggaggggtggatcctgggggcagaaagggctactgggctggcggcaggagggccatggggcttcttgcccagatgcaacatggactgagctagctggcactgtgacatggcggaagggaggggcaacatgggctctggttgggatggtggggcattaagcagggaggctgccacccttccagcaggaatgagggactggcgacatggagagtcccatggctcgcctcttgccacacctttggagtcaggtcctcattgctcttgggtacctggcctcactg

SEQ ID NO: 11294 - DNA, 1579 bp, Artificial sequence
  DNA replication origin
aggcctgaactgggcccggaaggatctgagtggattgaagtatgtggaggagggtcaggaagcaaaaacattccagaatgagggcatgggggcttcccatcaaaaatgaaggcacagaggtaggaagagtgggatgtgtgcagaggaccagaaggaggttggctcagtggaggctgagagaggatgctgggaaacacaggcagtcataaggtagggcccgatggtgggggcctgaggcccagcaaggggctgagctctgatgctccgggcaatgggagccatgctgggttcctgagtgggaaagacacaggatgaaagtgatattccagagtcatcagcccagctggctgggctgacaggtgccaggggaggagtgggtgtggggtcaggggtggtggcacaagaaacttgggctgggtaggcacctaggaggctaccgagtcacctgggcatggggtcatgggaccgtccaccatggtgggaaatgaagacattaggagaggcgtgtggagatatatacaaaaagattgctgcagcatcatttgtatcagcaaaaaaacagaaacaaggaaaaggaagagcccctatgtccaacagtaggaaaatggataaacaggcagccgcatattgatacgacggaacacagcagggagaatgagtggcgtacatctgcatgcctcgacatcaacaaatctcaaaaacgaagaaaggaaaaaaacaaggtttagcagggtctaggctgcgctgttcaatgtggtagccactagctacacacggctatttaaacttcaactaaaattcaaaatgcaattcttcagtcacactagctgcatttcaagtgctcaaaagccatgtgccgtctgtggctgctgtattggacggcagacagagaacatttccagcatcacagagagttctgttggacaacactgatgttttgaaacacgtaaaacaacattacctattgtgtatggatacagaagaggctcacagggtttccatgaacaggtgtcgcctcagttggcggcggagctgacagcgggatggtgttgaggggtggtcagggtggtgggaacaggggaggcaaggctgtagctccgaatacaaaagggcagaggcagggagccgctcgacaatccaggaagtgccagggactgcgatggggatgggagacacttctagtctctgtgaggatcccagacataagccctgtaatgacagcaaagactagcctttaggtggggccattcccaaattgtccacctcatgatgacttcccaacaaggctgggcaaaaggagtcttggaaagggtcagacctgcccaggtggttggtccatgacaagctgcagacctcacatctaggacttgcctcaaacaaagtgagggctaaggagaagggcagagaagcagaagcagagaaaccagaggaggagcaataccacaattcaggtcgagaccacagaagcaattcaggagagagggagaagaaaaggaggcggggtgggcgcagctgtctcagaaatacaggtgtgaggccgggcatggtggctcacatctgtaatcccagcacccttggg

SEQ ID NO: 11295 - DNA, 1197 bp, Artificial sequence
  DNA replication origin
gtaacaacctgatctctctttcttttccccacatttcccccttttctattcgacaaaaccaccattgtcatcatggcccgttctcaatgagctgttgggtacacctcccagaaggggtggcggcggggcagaggggctcctcacttcccagaaggggcggccgggcagaggcgccccccacctcccggatggggcggcggccgggcggaggcgccccccacctcccggacggggcggctggccgggcggtggctgccccccacctccctcccggacggggcggctggccgggcggagacgctcctcacttcccagacggggcggctgccgggcggaggggctcctcacttctcagacggggcggctgccgggcagagacgctcctcacctcccagacggggtcgtggctgggcagaggcgctcctcacatcccagactgggcggcggggcagaggcgctccccacatctcagacaatgggcggccgggcagagacgctcctcacttcctagacgggatggcggctgggaagaggcgctcctcacttcccagactgggcagccaggcagaggggctcctcacatcccagacgatgggtggccaggcagagatgctcctcacttcccagacggggtggcagccgggcagaggctgcaatctcggcactttggggggccaaggcaggcagctgggaagtggaggttgtagcgagctgagatcacgccactgcactccagcctgggcaacattgagcactgagtgaatgagactccatctgcaatcccggcacctcgggaggccgaggctggcagatcactcgcggttaggagctggagactagcccggccaacacagtgaaaccccgtctccaccaaagaaatactaaaaccagtcaggcgtggcggcgcgcgcctgcaattgcaggcactcggcaggctgaggcaggagaatcaggcagggaggttgcagtgagcagagatggcggcagtacagtccagcttcggctcggcatcagagggagaccgtggaaagagagggagagggagaccgtggggagagggagaggcagagtgagagtgagagtgagagtggtttgttctttctttctttgctcttttggcagggttttgctctgtcacctgggctggagtgcttccgtgcagtctcagctcactgcagccttgtcctccccagctca

SEQ ID NO: 11296 - DNA, 878 bp, Artificial sequence
  DNA replication origin
ggagcccctctgcctggctgcccagtctgggaagtgaggagcgcctcttcccagccgccatcccgtctaggaagtgaggagcgtctctgcccggccgcccattgtctgagatgtggggagcgcctctgccccgccgcccagtctgggatgtgaggagcgcctctgcccagccacgaccccgtctgggaggtgaggagcgtctctgcccggcagccgccccgtctgagaagtgaggagcccctccgcccggcagccgccccgtctgggaagtgaggagcgtctccgcccggccagccgccccgtccgggagggaggtggggggcagccaccgcccggccagccgccccgtccgggaggtggggggcgcctccgcccggccgccgccccatccgggaggtggggggcgcctctgcccggccgccccttctgggaagtgaggagcccctctgccccgccgccaccccttctgggaggtgtacccaacagctcattgagaacgggccatgatgacaatggtggttttgtcgaatagaaaagggggaaatgtggggaaaagaaagagagatcaggttgttactgtgtctgtgtagaaagaagtagacatgggagactccattttgttctgtactaagaaaaattcttctgccttgggatgctgttgatctatgaccttacccccaacccggtgctctctgaaacatgtgctgtgtccactcagggttaaatggattaagggcggtgcaagatgtgctttgttaaacagatgcttgaaggcagcatgctcgttaagagtcatcaccactccctaatctcaagtacccagggacacaaacactgcggaagaccccagggtcctctgcctaggaaaaccagagacc

SEQ ID NO: 11297 - DNA, 1079 bp, Artificial sequence
  DNA replication origin
agaataatcgcttgaacccaggaggcggaggttgcagtgagccgagatcgcgccactgcactccagcccgggtgacagagtgagactctgtttcaaaaacaaaaacaaaaacaaaaaaggaaagaaagaaagggaagggagggtgggaagggagagaaggaagggaaggaaggggagagagagagagcgagagagaaagggagacagtaaggaaaggagggaggaaggagggagggaggaaggagggaaggagggagggaggaaggagggaaggaggaaggaaggaaaaaaaaaaagaaagaaacacagagctgggcgtggtggctcaggcttgtaatcccagcactttggaaggtggaggtgggcgattgcttgagcccagaactttgagaccagcctaggcaacaaagtgagaccctttctctatttctaaaaacttttaaaacattaaaatgaataaaataaaataaaaacagacttcccaaggaattaaagtgctgacctggcctgggaagtgctggactcaggaatggaaggacacagttctcagatgccccccgggtggaaccaggcactggcactacaggttgccctggtgtggtcatctctgtggcctctgcctccagtcatgccccttcaatagcaaggaaaacagctccgtagatgcaggacaatgggcagcattcattcactcaacaaaggcttacagagcctctcattgtgccaggcgctgagctgggtgaacaacagcaggaaaccaaccagcaaccacaggcagtgttgtggatgagagtgtggggcttaccggctgggtggcctggggcaggtgatttctctgctcactggcctgtttccacatctgtacactggggcttagaacagaacctacctcctaggatggttgtgagcattaaatgagttagtacatgggtagggcctgtgatcatccctggaacatagtaagtgctcattgagttagccagtattcacatacagcaggtccttgaataacgtcatttcattccatgtctttttgtcatgacattggtaagagaaaaattcgattcctgcaggggcca

SEQ ID NO: 11298 - DNA, 1044 bp, Artificial sequence
  DNA replication origin
ctcggcctcccaaattgctgggattacaggggtgagctacggcgcctggcctagcagactaggagcagccgactccgtcagagtcttagacagcgtattagctgcagtgagaggacaagatttgcaaagtgtctgagggggcttggagtgaagcccgcctacttgcagcgaggacgcttaggaggggtgaaggcagaggtggccccgcccagggagcacgtggccccacccccacgccgcgaggctccgccccgcctcgcccgccgggcccacacctgcgtgtagtggccgcacatctggcctgggctgcaggtggcggcgctgaggttgtagtgctcacgctcgtggtgccactcctccatggccagcggcacgtccatgccctcgtctgtgatggcgaacagattctcgccgcggcgcccgcgctccttgttgtggccccacacgcactgccgtgcgtaggccttggcgaaggcggccagctcctcgtcccatctctgcagggcaggtgagagaagggaggtgaggatgcccacagatgctgtggggaccaagcaaaaggtcgaggaggtcgtggggaaatccttccggcacctccttagcagggtgactcttgggcatggcctagaacaggtctctgctctgggtgggcgtctgtggggcggtgaaggatgccaccccaggccgtggagctggaccattcaccagctgtgtgactgcacggattgtctaaactttccgcaccctcagagggctgggaagagtggatgaggtggtgttggtgacagtgttattattaaaagcctcatgtgaaaaaggtggccatacatgcccctgcctacctcccagtcctccttgaacttctctgaagagcacaagatcacggtgtgatcgatgttgaggggctgggttgtttattcagcccatttccctacccctcaaccatgaacctgacttgagggccggcaccttcctctccctctaagcccccaccctccccttgggtcacccagcccccatgcctttaccctctgcaggctcccg

SEQ ID NO: 11299 - DNA, 2981 bp, Artificial sequence
  DNA replication origin
gcccgccaccattgacccccggcccgcagcccagtgtcctgctaggcctccaaccggccggggagccacatccggcgtgtcccacccgccgcaccacgctcccgagctcccccgcggcctggagtggtgcgccccggccccgccccctgacgccggtgagggggcgtggccccgtcacgtgacggggagtgacctcgccgccgggcgccatgggagcttcggacccggaagtggcgccctgggctcgcggcggtgccgcggggatggcgggagccggagctggagccggagctcgcggcggagcggcggcgggggtcgaggctcgagctcgcgatccaccgcccgcgcaccgcgcacatcctcgccaccctcggcctgcggctcagccctcggcccgcaggatggatggcgggtcagggggcctggggtctggggacaacgccccgaccactgaggctcttttcgtggcactgggcgcgggcgtgacggcgctcagccatcccctgctctacgtgaagctgctcatccaggtgggggaccagaggcgccgtagggagatgggaggctgatgtgaaggtgacaggccaggatttggaggattggggcgggcagtcaatggcgacggatttggggagaggggtggggacggcgggtttggggggccgagtgggtgggatgggagggaagccgtgagggagttgggaacgcaggggtcacgggttttaggatacagaaaggagaccaaggggttagagtaataacagatacgggagagggtggaaggaacaagcgatttgggggagtgccaaggagggagcgatgggctggaaaaacatatttgggagataaaggagtggggacgatggacttgggatagggaagggagcgaatttggggcgagggaagaagcaatagaattgggggaggggcaagaagtttgggtgaagagatggggaggaaggttgggggcccaggcaaagtgtttagagaatgaggagcacataattggggtagaggggaacggaggctctggatttgatagagatggatttaaaacgtcttggggtggggacaaagtgggcgccagggccagaaatttaggagggaaagaaggacaccagactgggggtggacagaggagacggaggtcttgggttgcattgtgatttaatttggtgggagagtgcgaaggcaaagacttttgcaggggaatgctatcggtttaccggagatgggggctctggatttgatggcgacgacggatttggtaggaggaggggacagggtgacgcgtatggggggaggggaacagatagggccagcattgggggaggggagtggcagcgatttgtctagagaggggagctaggaggaggctttaagcggggaagggggatgacgcatttggaggaggaaatggaagtcatagttggggtcagagagaggaatcacagtgcttgtatctgggcagatgaggagaaggggcacgggagtattgaaattgggcagaagggacagtggagacataggtggcaggataggtagggactaccagaaattgagaccgaggtagggatgtctctggaacagagggatgcataggcacttggcagatttggtggtggccagcaatgcggtacagatgaagtgtgctgcttgaggagtgagctggaatgaagggcgtgtggaggtgtgagaattaggtgggtgtggctgggatgggtacagttttgatgggggtcattaggccagaattttccagttaagaagcttggggggaggaaggtaaaaattgaattggagacccatccaagatttgagttgaggcaggtgggtgtcagattttaccatctttataattgaaccgagagaatgcaaaatacaactggaatgagaaggccttgagaatgagagtaattgaaatctgggatccgaggaatggtaatagatttgtgggtgtgaccaggaatatgacaaggaatgaggagattcagtcaggggcatcaaggtgcctgactagaccctaattgtgacagatttgaaaattgttgatggcggaaggtgtagaccagactggcatttggttgtgatttgggaatgagggctgtcttacagggttaagattgtatttacagcagttgaacttgaagtttgggagataaattggtgctttggacctgagaagtgagggttctggaaactgatggaatgagactgagtgagggctaggattttagggcacaggtgggagagtctgtggagtgaaggatactggagcacaagggctcagtgtgagggaaatgaagaagtggcttcatcatttggatgatggcagatctggtttgaaagaacattgaaatgagggtggtttgggaagggaatgggggaatgaaggacaccaaagcgtgagaagaactagatggtgggcaggtaaggatggatgagccctgttgaaggaccagaggtgcctgtctgatttgaacccagctggtgttgagtgtaacatatattagggtaagatcttcaatgggtatagtttgggaatcagagtaataacttgcagaaaggcaaattactgggagtgggggtgtcaggagtggagtgacagatttggggattgtctagattaggtgcgtaagaatgcagtgccttagattagtgcatgtggctgtcaggtttgggagtcggagattttaagatgacagactgtccctgctggtatctgatatagggccacagcatttgccgtagttaggactgggttaacagatttgaggttgaaattgggtttaatgacttgggaacaaataattaaaacttgaaggcaggaggaatgggggtgagatacagccagtgtgcctatgataacccaatagaagttaagaaaatagattcaacagatttgggagccatggggatatgggataacgttacaaatttaagtatgaaattggggtcagtgggactcccaaatagtgttg

SEQ ID NO: 11300 - DNA, 1564 bp, Artificial sequence
  DNA replication origin
ggcgggagggcgcgccagcggggtcgggcagcgctgagaacggcggggtgagcggctcgtggggctcgtgcggcagcgccgcggggcaggaggctagtggttgctgctgctgctgctgctgctgctgctgccggtcccgccgccgccgctgccaccgactcctctcgggcctcctcagccaccgcggccgctgcagcagacgcccggctcgccccgcagccaggagtaaaggggaggagcgcgccggcggggagggcgcgcggggagggcgcggcgggcggggacggggcggggcctctccgggaggccaaggcggggagcagggctgccgggccggccgagggaggagagggggtggggaagcggcgggactgggcgactcccctcggcccccgccccgcgcgctctgtggccgcgccccggccccgcccctgccagcgctactccagccaaccagaggccgattgatctgcataactcggcgcgccccgcccccgccccgcccagctctcgcggtcagaatggtctctacgccgccacgacgtggcgggaaggaaaaggcgccaaaatggagggggaggggcgcggggcgtgaggggaggcgggagctgggtgtagggccgcgagggaggaaggatggggaggggcgtatcgattcaaacccaaacaataacaaagccatcaaaggccgcccgaggccggctctgcggctctccgtttcgctgagggttttgggtcaagggctcgagccggagcataacaagttgcgcggagacgacgggcgttagtgtgtcaggcggggaggccggcgcgccgggtgtcggactgtgtgtggggatgccgacgagggtggtctttctgtgtgactcagacccgagacctccaagtcggctggggcgggctgacgtcgcgctgtaggctgggggcggattctgggggtttgtgtgttggggggcgcgtcgggggcgaaggatccgcaggacatgagtcacggagggagtggaggagtcaggcctggaacagaactggaggcgggagccccgctcctgcgggaaagggatgcagccctcagtcgttccggccggctaaaagctcagccacgggattcccattttagaaatgcaaaagcaccagcgaatcctgatttctgggaagggatgtgtgtcaaagggccgggtaaagaggaaatcacgaagcaaatgttagtgttgtgatgccagatgctgcctcagccccttctgtgagggcggaaaattcctcatctaaaacgagggtgggagggtgcgcttgatttaaccagttttcacgttgtagtcaccttttcatcagcctgttattaccaggcaggcaataccagcaattattggccaaccccaagtcttgtctcaaaggaaaccccccaccctctgcctcccttggaaataacccggaacactgaccaattccacttgcatcctttgtccttttaaacttcatgtagagttgataacgacgtgtgaaatgagtaaattaaaatactatataatccataaattgaattgtcagtggcctaagtaattgaaag

SEQ ID NO: 11301 - DNA, 776 bp, Artificial sequence
  DNA replication origin
tttcacatgacttttttaaaaagaggaaaggtgagaagaggttccagtctggggcggctaggactggggtgatggttctggaggcggcgagggaaggtgtgaggcgaggagacctctcgaatcgcgcccgccccgcccagggccggattggctcccaacccaccctctttgctccagggcggccgccgtcctcttgcgcaggcgtagtgctcctgcttcctggccgagggcgggcgagcggagcctgctttcgcagcgatcgcgagcgtgtggcgattgcttctgtctgttatttagatatggaagctgaggggatgcacagaggcagccagaacctaggtcagggtctcgctcggtgctgaccgcccccggggtcgagtaggcgatgggggagcccggcttcttcgtcacaggagaccgcgccggtggccggagctggtgcctgcggcgggtggggatgagcgccgggtggctgctgctggaagatgggtgcgaggtacgggggaaggggtcctgtggagcggagggcaggggctggagggagcggggctccggggagggaggaaggtgtcttgctgggctgaatgaatggcagagaggaggcgggcatcaggaagaggagcgaagtgtctgtggggggggtggattcctggggagagaagggagaaagcggttctggcgcgagcggctgaagggtctgcggtgggaggtgtttgggggagaaataggggccgagtgggagaaaggaagaaaagagagttcggctctggggagcc

SEQ ID NO: 11302 - DNA, 1237 bp, Artificial sequence
  DNA replication origin
ggccgagtgggagaaaggaagaaaagagagttcggctctggggagcccgggggggccacaagggttggggcgaggacggaggccctgacccgcggcctgtggggcgagaagcgggccccgtccagagaggcctgggtcagcgggtagctgggccggggactgggaggagagggacgcgcagggaacgtgaggagatgcgggggtgtcgaggaggggagggcgggggctggccagatcccgtttagggcgcacagagccccgcggtgccaggtcggggaacggtggcgggggccgcgagctgccgggaagccgaggcagggcccggcgcctgaactttctcgagtttgttttgaaaacgattgcaaattttgggttttgtcccttaaagcaatcaaactttcacgtagaaatgtcttcctccttcccaactctgaggaacatgggcggcttgggctgggccacatttctcctgtgaggctcggtacggccgagtggcactccctgaggtgggtcgggcaggtattcagagttctctccagaggctgcctgtcgtctttattaatgcagttgcaaatgaaaaatattttaaggggaaagatgaggtaccgttcctggcacggttcaagatgcaccagcgtggtgcatcttgaaaagacgagggaagggaggagggagttagattgcaatcaggttgagaaggagaactgggtcagggacaagcttgtgatgactgggaaccatttgggttttggaaataatctgtatgaaaagttctctttgcagtaaaagtggatggttggtcatgatgtaaattcaagaagtattttgagtctcatgtgtgttcaggtagatttttcctataagccgtactgcctcaattcagtctgccaggtatttactgagtatttaacattgtttggtgtacaatgaggacaaataaaatttctgcgctcgaagagtttaaggcttgagtggggagagaggatttatacaatgaagcagtcatcgtataaagaacatccatatgggctgtatgatcaagtgctaagatttggattatttagttccttcccagagcagtagttcttcaagtcagaggaggaattcatgtctaggcacaaatttaattgctagattagggagtgttataaagggttacttgtatgctgtggtttgaggaacaccaagaaaacatctctgcctccaaatacctcttctatccaggtattagtgccta

SEQ ID NO: 11303 - DNA, 1477 bp, Artificial sequence
  DNA replication origin
ccggccgcctcccagagctgcaggagccagtgtgcgccttctccgtcactccctctgcttgtccctcttgccctgttttaaatcgtttccctgtcaccacccaccgcccccaatcctcagggtcttcccgacgccagcttctttccagagccagctggtatggagcggagagacggggagggaagctattattctggaaagggcaaggctaactcctggaagcatgggggctgggcggggtggcgggtgctggagcagataagaccctctctcagaggaagctgctgctgctcccagcagccctccaagggacctgcccagcccagctggggtgaggggcctgtcgcagcctgacacagctcggcagcccctccccagcccccgccataggcagatgcacccctccctcagctccagctcagctccatctcccaggcaggtggcgcacagctgcggaggagacagcaggagcacaagccccggcagcagcagcctcagggagggctggggtctggaggtggagctgtcacgacaggaacaaaagatctcttgcttaagcccaaggtttcattgtgtccactggaagccagacacacagactcaagccctccaacggagacaggcgctgctgcctcagagatttgccttcacagttctttttagtaaccacttattaccctaccccagggcctctggaaacagaaaatcagatagcccagccagagaggcacagagaggtgaagtgactagctcagcacaccagtctggcagctgcaaggctgtagccaccatcagacccaggggattctcagtcctgaagagttagggaaaacagcaaggaaggaggaacgcaaggcatgcagagaaggtagtgtaagtgttgtggggagggggtgttttttaggtaccggattcccctccaaacaatggccaagtcccgtcctctgcttcacataccggattccccttgagattaaaaacaaacaaaccaaaaataaaacctggctactgtgcctctgtctggaagaagtgacaccactttaagaagcagtgaaagttgtccaggattggccagtggttggagggggcagagagagaattccaagcagaagggacagtgtagcaaaggcagagaggcacggagtgtgaggggagtggagacagctctatagtcccagggcgaaggtgcaagagaaagaggcagggctcagatcatagcgtcttgttcaccatccaacaagcttgcaacagggagccactgaagagttttgagcaggggagtcaccagttcagatttgtaatgtggagatgtattggagtgggtgtcagagactgggatgtcagttaggaagcttctgccacagtccagggaggggaacacggggtgggatgatggggaaccaaccatgtcagagtagtaaggattgggttgggggaaagggagagtcaataaatattctggacatccaagcatcag

SEQ ID NO: 11304 - DNA, 1573 bp, Artificial sequence
  DNA replication origin
tctggactcgaatgtccctgtaaattgggagaaggctggggaggcttgaagctgaaggttccttcagctctgggattcaatgaaatgagggagtggggtgtttctaagcaatgcagagaaagggggccccccacagaaaggtaaatggaaaacaggacacagccctgcttctgtttgtagtcctgagcatctaactctgtccccgccccaacactggggacccccattacccaggcctaagtgggagctccttaatcttcttccgcttcccaccccaatccttgaaccgggccccaccccagccaagaggcaggcaggtggcgggagctgcaagaccgagaccggcgtcttggccgggagcccggcagggcgtgggcaccgagcggcccacagccggcggagcggggcgggtggagcaagcggcgggctctgggcttcaggctccgcgcccaggggcgggcagcctgctccgcaccagcggcgtcggccggaagatgagcgggatctggctgcatcctgaggcagggggtcttagcgaggtgggctgggtgtcaggagcactgtagagcccagccaaagtcaggaaggacagagctagcccccagggaggatggctgcaaggtgcaggaggctgtaggtggacctgggctgggggctgctagaattggggcttggagggagactcctgccgtccatgaagccccagaggcattagaaaagccctgtccagccaggaccctctaccctggtggtgggcatggcgcagtccatccagaaggttcccaggaagtcactggccttgccctggacaccctgtcctggagggaggagtgagggtggaggttggcaaagggcggattctgtcccttcactcccttcatcctgagtccagagataaggacaggatcgggggtgggggacggaaagtcccacttccactctccctagggtgggaatttgagggttttttgtttgtttgcttttgtctaaaacttgaagagcagagaaggttctggatgggccaatctctccctgccgctaccctccttcaggacaggactcccctgggggctccagtggaagtggcattggaggggttggggagtgtgcggcatccgggtgacttctggcctctggactggagggaggtggggtccagatccccatcctttggtgagcaggcccgactctgaggaagttgttacccctcttctgtcagccttggccacaccttgcccccagggcctgtctggcacagggccacagctttggaggtttccacacatctttcttcttgtctctctcactcacctgtctccatgggaacaggcttcagggctggcagagatgactgaagtctgtggccctcagacctgagcagggtctggcctttcctggctggtgagaatccaatcagtttcgagatgctgccaaggtaataaggagtggagggaagctgtagtcaccccctccaatggccggccggattcctccttataatacccttccagccttgcttgaattctgccagtgaccaggagctcagcactttgccaggcttgcttactcactg

SEQ ID NO: 11305 - DNA, 2198 bp, Artificial sequence
  DNA replication origin
tggtggagaccccctggatgagacttaccctcccctctcccatacccttcttaagctcttgacccaagagttgattctatgttctgtgagcagtgctggctccctcccccacgaacccagcagacccttgcctgcccaattctcagagctgtgcctagagtctgggtccagaagggacagatccctagaacctccaatctcttgctgctatgtccaaaacttttctccctgcccctgaagaattgcctctaaaagggtcaacgtgtctaagccccatctccgacccttcctctggccttgatgagcatttccagggtcagccacaccacactccacctgcccccaggcccccgctcccccttggcccacctggcggatgctgagtctgtagttgagcacagggtcgacagcgtcgggctccctctgagtccactgcagcacgtaggagtagttcttggacagcttgtggctgcgggtggggttgggggtgtcgaagtaaaactccgggctgtaggctttggctaagagggcggggaggggggcattgggccgtggagggtgcaggggagacacaaagagaggaggtgtgggaaagggaaacaagaggatgaggtggaaaacagagaggggacggagaaacaaagagaaagggaatattgtgaggtggggaacgttgggagaagaggggattggggaaaacgaggatgggataggagggaaagtgggagatggagacagggagattggaaattccaagaggtgatattggtgagaagagaaaggcaggccgagaaaaaaacagagtaaagagaaatttaggaagacacagaaaagggatatgagggaagatggggaaagagattgggggaaagacacaagagtcagggatattgggaggaaagaaagagaagggagaggaggggaatagagagaggagtggggagacagggaaagtgtgggagaacaggggagaagggaaggaggtgggaaatgtcacaggggcctctggctggcagggctgggtggaggggagtggggaaagggccagtgacctgccgtcctatccccctgctgttgagtgagggattcaaacagaagctgaagggccacttagtcagttgggtgctgctgggaaagctgtgtatgccactgaatgggggacagacatccccaggctctgctccaggggcgctgccaccagcttttgcagggaggcggctctcctcacatggaggaagaccatcagcaacccaggcagcccctcttgttcccctaggcctccctcaccaccacctccacccctttctgacccacccattgccacctgcagcccctgacagcccacctgagaatgcctcgaagagctggggctgagaggggtttctgggcaccgaagggcctgcacctctagggtgccagctcacgaaacgtgtgctgtctggcccagtgccccgcaacaacgttccagagaagctgctgaggggcgtcttctctcccctaaactacacctcaggctcccgaagggttccccatctgtagcctcaggggtcaaggacgagcggggaggggctgagatggggctgtggcctgggcttgaggggctctaacgctggtggaagcggggctggaagggatgctgcctgctgctggaacggctggaagctgggattggaccgagctgaaaggggtggagcctacgccttacgcaggcggagcccagacgtggcttggatgggtttcgaaggggtctaggcctggtttgggtgctggtagagaggcgaagcctaggcctgtgggaaggctatgtttgaaagcggcgcggttgtcacacgcccaggaagcgggctgagctgtaatgggcggggcttaggactggtataggcataggcgggccttggaaggcgaaggcctcaacctcaagggaaggtgtgagtggaggggcgtggcccgcacctggagggcggggctgggaggcccaggttgggatccgagtggcacggggcggggcctggccttggcgtgggcgggtcttggaaaggccggggctaagcctggagtaggtgggcttcaagggggccagcaggcccacccaggcaaagaatcacccgggctgggattggggcagagcctggcccctggtgggcgtggtaggtggggcgggacccactggacgctcaccggagacctggaagaggcag

SEQ ID NO: 11306 - DNA, 1474 bp, Artificial sequence
  DNA replication origin
aggttgggatccgagtggcacggggcggggcctggccttggcgtgggcgggtcttggaaaggccggggctaagcctggagtaggtgggcttcaagggggccagcaggcccacccaggcaaagaatcacccgggctgggattggggcagagcctggcccctggtgggcgtggtaggtggggcgggacccactggacgctcaccggagacctggaagaggcaggcagccgagcccacatcgttggagacgctgcactcgtagctgccgctgctgtcgcgagttacggcgtcgaggcgcagctccgcgtgatccggcgcctcggcggcggcgggaacaacaggcggcggcggcagcagctgccctttgaaacgccacacagccgaggcgatgcgctgggggctgcctcgcagcagcgagcagcgcaggagcacgggccggcccagcgcctggcgcacgtcctgggaactgggctccacctccggcgggactgggggcgggagcggcggtcagcggggcctctccccagcgagtggggcctgaggagtggcccgtggggaggcaacgcgctcgcctctaatgccgtgagcccccgccaggaaaaatcccagggcggatgcacactcgcaacacatccctccaatggccacgatcttacctcccaacctgcagatacccactccctcctggccattctctccagccatgcttcccagacccggcctccagtcacgccctaagtgggcccctcaccccacgcccaccccaagcaatgaaatgcaggataacgcaggggtttcgcgcataatctctaaagctagatgggctgggttcaaatcccagccctgactctgtgagactttaggcaagttactcaacctctccgtgtctcgggttccctgtttgtaaaaatgggggaataatagaatctattatagggctgtggggggttcaatgagttagtgcattaaaactcttagaacagtgtttggcacatggtggtaattttcatcatcctgttatcagacagtgtttcccttgagtgtccttcctcctccttcaaaatcccatttccacctggcaaaatcaagtaattttttttttgttcaccgggtccctgaaaatgaagatgggagatacttgatgaaatggagcaaagaacacagacctccgtgtcctacagcatggggctgtcaaggagcattaggggtatcaggagtagctggtggggtttggttggactggggtgggtgagaggatgaagaggggacaggccggctgggagccagaaggaaagctgggaaggtagtccgggtggcgtggtggactcacactgcacgttcagctgcacctgggcctcacgggggcgcacgttgaagccattatagcgggccgtctggcagcggtaggtcccgctcatgtctcggctcactcgctccagccgcagcttcccgtccggagtctcctccaggggcagc

SEQ ID NO: 11307 - DNA, 1093 bp, Artificial sequence
  DNA replication origin
tttaaaagttgtttcagaggctcagcattataatcagatcctatggagcctgccacttatgtggtttctaaaattttagccaaaaaaggagaggaaacccttcagtgatggagaaaaaataagagactacttaagcaggagggcaggtattgcatttctcaatttataaatatacctgatgctaaagaaaatatgctcctaaactttatgtttcctgaattgatgcttgaaaaaaaagattgttcatccctttaagggatttaatgtgcttttgctcccaggggtgctcgccttttgaaaaggatacagaaagagaataaacaagtgactatttaatatgcagggtgttgatttgatgagtgttacgaacatgcatagcagggaaagggattgagcgtgatggaggtgggggcgggcgggctgtcttaaacagggtgttcagggaaggcctctcagaagacagctgaaggaagggatggagcaggctctggagagctggagaagagcaatccaagcagtggggagggggtggggctgtaagtgcaaaggccctgaggtgggaaggggccaggcctgcttgaagactgacaaagagggcaatgtggctggagtggggagggcagtagaatgggaagtggggctgggagccgatggcagagggcatggcaggctgttgaaaacgcattggctttgaccccaagtaggatgggagtcatgacagggagagcagaggagagatgagatcctctgcctgctggtggagaacagactacagcaggcaagggaggaagcagggaagacctatcaggaggctgctgtcacaagccaggcaggcctcgggagtgggggctaagactagggtggcatcgcagggggcagattcctgattggttctgaaggtcaagccgacagagcttgctggtgaattgggtgtggggtgtgggaggaggagaaaagtcatggatgactcccagatttctggctgatacttggttaacgggagacaacgtgttcccactaatacaagtgtagggggtgaggagtggctcccaacccttgggggtactggggggcagtgaaagttggctgctgg

SEQ ID NO: 11308 - DNA, 1138 bp, Artificial sequence
  DNA replication origin
atgacacagggaaggagggtagagtggaggacagcagcatgcaggaagggctctccatcaccctccccagccccggggctgtggtgagaaggcaaagacctcagcagcacctctcttaggcaccttgacctggggagaaagaagaaagtgaaaccccagtccactggcatcttcatctgccctggagaggccaaggcctccagtacctgccccgtggcctcctcgccccaaacccagcctctcccagtccctgctgcattctttcctgcctttcctggcctctgtgaggggccaggcagtaagagacacacaaactaattaagaagcagagtttggccagatgcctgggctagtcttaccagagaattaaggccaagccagctagctgggcagggccaggagcatgtcacctctcagacacccttcaggacaccccttcttcttgccaggcacaggcagatgggtcagcaccctccagggtgctttagcctcagcacctgaggctggcaaccagtagtcagtgcctatactaccccacaaagaacaggtcaacctcccctggatctaaaagaggaatcattagtccctccacccaacagaaaaggaaagagagaatcctgcccgccccagccacacatcactaaaaagggacctggacaaaccatcctgcagtaaagagaaagcaaagtaagggccactgggcccctgagaatgattttttgtgctgtggggttaaggcactgcgggaggctgagcccaggtgactgaatggatgatgcctgccccgggccttccctgggaaaacccacaggatggaagggggaaggggtaaccagagtctcccttggtaaccacagcgaggcgtgcggacgcaggagcaaggctgcgtggcaggaggcagagtttggacacgtatcccggtgggtgcgtgccgtgtttgcgttttctggggatggtggctgaatgtatctgtgtgtgcgcgcaggaaggaaggtggggttggggtttgtagccaagaaccggggacaggaagaactggttcagggaaggtccgaaaagggatgccggggtcgaaggcgccagggccaggggatgccggcatcctgatcagggtgtcaagccctgagtagaagaagcg

SEQ ID NO: 11309 - DNA, 811 bp, Artificial sequence
  DNA replication origin
aggcaaagccagcgagcaggcaggggcacgtggggggcctggccagagaccaggcaggggcgcgtggggggcctggccagggagcgggcaggggcgcgtggggggcctggccaaggagcgggcaggggcgcgtggggggcctggccagggagcgggcaggggcgtgtggggggcctggccaaggagcgggcaggggcgcgtggggggcctggccagggagcgggcaggggcgcgtggggggcctggccaaggagcgggcagaggcacgtggggggcctggccagggagcgggcaggggggcacgcgggcctggccagggagcgggcaggggggcacgcgggcctggccagagagcgggcaggggggcacgggggcctggccagagagcaggcaggggcgtgtgggggggcctggccagggagcggggggtggcctgggaggcattgcaaggacccaggctttcctctgagagaaagaaaccccttgtggcatttcaaatggcaaagtgacttggtcaacacacactgaaaagggtcactctggtggctctgttgaaaacggactgtcatgggagagacatctgggaactgcagtcatctggcagtggattagaccagcgggtgggagtcgtggagctggtgagatacataggttgaggtggaaccaaaggattcgctagtgcattagagtgaaagaaaggagctgtggccccagagcagtgactcacgcctgtaatctcagcactttgggagactgagatgtgcagatcacctgaggtcaggagttcgagaccaacctggccaacatggcg

SEQ ID NO: 11310 - DNA, 829 bp, Artificial sequence
  DNA replication origin
tgaaaacggactgtcatgggagagacatctgggaactgcagtcatctggcagtggattagaccagcgggtgggagtcgtggagctggtgagatacataggttgaggtggaaccaaaggattcgctagtgcattagagtgaaagaaaggagctgtggccccagagcagtgactcacgcctgtaatctcagcactttgggagactgagatgtgcagatcacctgaggtcaggagttcgagaccaacctggccaacatggcgaaaccccatctctactaaaaatacaaaaataagccgggtgtggtagcacgtgcctgtaatcccagctactagggaggctgaggcaggagaatcgcttgaacctaggaggcggaggttgcaatgagctgagatgacaccactgcactccagcctgagtgacagagcgagactcttatctcaaaaaaataaataaataaaaagaaaaagcaaaaaagaaaggagctgtggatgacaaccaagggttttggcctgagccactggaaggctttactgagatggggaagactatgggagaggcagttttcacagaagatccagagttcaagtccgaacatgtcaaccagaggcacagcggagaatgtggcggtgcatcccaggcgttgggaggtcagcccactacctggccccgaatgcacgcagctcccaagtctccccagctgggcaaagacactctgacttctcctcccatcctctcctgcccccttccctgttggaagttctccctccactctaactgaaattccctctctccttggaccagccccttctgctccccattgaatggccaag

SEQ ID NO: 11311 - DNA, 1268 bp, Artificial sequence
  DNA replication origin
cggacgcaccgaggaccgcgggggaggagggacacagacgccctcggcgggtctcaccgccgctccccagccagagagatgtcctgtgcggtggcgcagggaaggaccggagccccccgccggctccggagtcgcagcggccgctctgaagccccgggccctgctgtctccgtaacaccgtcccctcccccggaggctgcgctgaccggacaatggccgctccgccccctccccggcgtgcgcccctcccgaggagtcacaatggtctcgcccgggggagccaacgccaaagcccagccgctgatcagctgggatccgggcgtgccacttcgttccgcgcctcaaaggcggagtgcggggctgtgggagaaaacgagagcctcgggctgtcgcccggcgacgggcggctgaggccttcgtattcttagaacttttagaatctgaagcaaacttatcttccccctgtctgaagaaggggagcaggtttctgagtactccggggcgcggtgcctccccctaaacgcgaatggtgcgctccaagcgggagggggaggagcagattagttgtgtagggtaaattgggccagtcccagagtggcggcgcatgcgcccgtagaacccgtaaccgagtgcgaggaggggcctgggggagcaatgccaaacgcggaagtggagctctggcttcccgggggcgtcggagtcaaggtccctggagctgccgctctggctcctgggcgattccggggagccattctccccaatttgccaactccctgggcatctctctctctcttcctggtcccgccacacccaaacaactcttatagttccacccggtatactggtctcttgacaggaacttttgggaaatgcccctcccccagccccttgtctggggcaacttccttgtctcttctcccccaccggtgttggggagttccttgtctccactcccaaccacagagccacaagtacattatctatgcccaggcgagtccctatgcccaggctaggagagccgcacttcttcctacagctgacacgtttggtttttggaggggaaaggggagctgtagctgaatcagtaatggaaattggtaagtgaccaaagaagtttgagacactaaaaaaatgagtcctttaacgatcctagtccttgatcctgagctcattctgatctccagttagtcatgaacagagaaatcgattattgatgactaattcaacacggaggcaacatcctccagaccttttggagacccatcgct

SEQ ID NO: 11312 - DNA, 915 bp, Artificial sequence
  DNA replication origin
cccggctccgagccccggactcgcgcccgcccgcgcgcccgctccttccccctccccccgccccgagccccccgacgccgccgccaccgcctcctcagagcggggcccgggcccagccgccgccaccgctgccgccgccgagctccgccgccgccgagcaccatgggagacgctgggagcgagcgcagcaaagcgcccagcctgccgcctcgctgtccctgcggcttctgggggtaagtgcccggccgggtgggggcggggggcgggggccgggggcgcagacgccagggcagcctgggcaggcctcggggcccgggaggccggaaccttggaggctgggcccagcccgggcctacggggagggggtgggggtcgcgttccggggaggggtgccgggtggggagctgggggtgggcagagaaggccctgccgggggtgcgttgctaccctttgggactcgccggcctgaagctcgggcccacgggggcctcctgggccacgggtgaggggggcagggcggcggggagggatgagggggcggcgttgaccgctccgggaggagcaggggtgccccttccgtgggcatgtggaagccagcccttcctccctcccggggcgtgagttggtgcccaggcactaggagggtatttcctctgacttcttcacctcccctcctccccgtcctccggagacttgcatcatcacttcctagattatatcccagtgccccatttgcttttaggaagctattcacacgtcacccgtttgtaaaaaccgagtccagaaccaggctggggtaaagttataagattgttgaggtctcaccttcatgtaaaacacgtttcaggagatatgtaaaatttccttgtcaaaaaggaagaaaaaaaccacacaaaacctgaagtcagcctggat

SEQ ID NO: 11313 - DNA, 753 bp, Artificial sequence
  DNA replication origin
agggactcccagactaggaggagagggatctgctgtgtatgacaaggtgcccaagttcggggtgggggtggggaccaagacatagaccccagaggtaaagctctgggtctgcaccgtggcagccccattaggggcatcttccagcccacagccctggctagggtgaccttcattcaacacctgctatatgccaggcagcatcccagacactggggatatgatggtgacccaaactacagctatagggaacaaaataagggcagtgcaaagaatattagaggggtgacaggcatacacgatacgcagggggaagggagcagggggagaagcatagggtctgagggtctttgtctgcgatgggcatggagggccctgcctgccgcttgggggttcggtcaggctgccactgtgcgaggaacagcctgcagggagtgagggaggtacacagaccagaggaccggctggctggtccgggaggccagcaggaaggctcagtgctccaaggtggcagggaggtggtgagaagagcaagatcctggactgatttttgaggatggagatagcaggagtcgccgataggctgggtgtgggtgagagaagagaggaactatagacaatttctagtttggagtgtgagccgctggaaagatagagatgccgttaatgaacgacaggcaggagcgtgaagggggtgggatgagagcagacggctgaggtgtagacgagacacccagctagaatgtgtgtgtgtgt

SEQ ID NO: 11314 - DNA, 1947 bp, Artificial sequence
  DNA replication origin
tggttaacttccacctggtggctttggccgagcactggggctccaagtcaggtgctccatttccaaaccatgcaggcatcctttcgggagcacacccacctagcttcgatcttccagaactgacaacttgttgccaataattggctgacgtgagtgttgaacaagacaaaacccaatccagagagcactgggctttgtcctgccaccgccccgcccaggccactgtacccccccaccacccccccatgccgcctgcctcccaagtgctggggatggagcagggaggctgcccctcttgccctccctcaccttccagggagcagacaccagcgtcagtgtgaatgtggcccagcccatgtgcagagggagaggatgccgggctgggcgtgcatgttgaagtccgtggcccagagaggcttccagagaaggtgacagctgagtaaagccctgaggggtggggaacaagagtcgtggccctctgggggagacttccaggaggagggggccaggggaagaaggctcgatgcctcctggctggtgtggcggaggagggggaggggtggcgggccggtgtgaggcggtgaggaggcttcatggatccctatggaaaatcgggcttgtctctgaggtgggagccagtggaaagttctgagcacaggaggccctggtcggtttcacactgggacaggctcaccaggccgctgcctggagagtgcactgggggccgatggggctgggaaggattgaggatggcgacggtggggggtgagcaggggcggtggagggctttgctgtgcacggggaggtggaggctcttctgtgcggagaggggaggtggagggctctgctgtgcacggggaggtggaggctgtgctgggtggagggctctgctatgggagtgcgggggaggtggagggctctgctgtgagggcggcggggaggtggagggctctgctgtgccggtggtgggggaggtggagggctctgctgtgcggagggggaaggtggagggctctgctgtgcgcagcggcgaggtggagggttctgctgtacgtgggggaggtggagggctctgctgtgcgtgggggaggtggagggctctgctgtgcgggtggggggaggtggagggctctgctgtgcgggtggggggaggtggaggtctctgctgtgtgggtagagggggaggtggagggctctgctgtgcggaggggggaggtggagggctctgctgtgccggtggtgggggaggtggagggctctgctgtgccggtggtgggggaggtggagggctctgctgtgcgcaggggggaggtggagggttctgctgtacgtgggggaggtggagggctctgctgtgcgtgggggaggtggagggctctgctgtgcgtgggggaggtggagggttctgctgtgctgggggaggtggagggctctgctgtgcgggtggggggaggtggagggctctgctgtgcgggtggggggaggtggagggctctgctgtgcgggtggggggaggtggagggctctgctgtgcgggtagagggggaggtggagggctctgctgtgcagaggggggaggtggagggctctgctatcccggggggcccccccgcaggattgctgcacgcacggcctgagagaagaagcagaggcaaggctgacccccagatgggattgccgtttccggacttgcaaggctgcggaggagccgcttggaggtggtcagttttggacatgctgggtttaccagagagagaggaggtcagggagccagacttagaaaccgcaaacacaaaccccaacaagtaaagaaaatgacacaaattaaagttcacactagtctgtgatggaaaaacagcaacttcctcacattatcccaagccagaggatcatgccttgtcttcagacgtcagcagagtaaaaccgttttaacaccaggagtggggc

SEQ ID NO: 11315 - DNA, 838 bp, Artificial sequence
  DNA replication origin
agcctcctcaccgcctcacaccggcccgccacccctccccctcctccgccacaccagccaggaggcatcgagccttcttcccctggccccctcctcctggaagtctcccccagagggccacgactcttgttccccacccctcagggctttactcagctgtcaccttctctggaagcctctctgggccacggacttcaacatgcacgcccagcccggcatcctctccctctgcacatgggctgggccacattcacactgacgctggtgtctgctccctggaaggtgagggagggcaagaggggcagcctccctgctccatccccagcacttgggaggcaggcggcatgggggggtggtgggggggtacagtggcctgggcggggcggtggcaggacaaagcccagtgctctctggattgggttttgtcttgttcaacactcacgtcagccaattattggcaacaagttgtcagttctggaagatcgaagctaggtgggtgtgctcccgaaaggatgcctgcatggtttggaaatggagcacctgacttggagccccagtgctcggccaaagccaccaggtggaagttaaccaaaaacatggagagtccctagtgcaggttccaagaaaaaattccactgagaggagcagacccctgcctggtttccacgtgacaacagctcaggaggaggccaaggctccaggtggccggggtccctcatgttcagcgcatggagccttgggccccacatgcaccagcggagttgctggagactcaggcccagttgtggggtcacaggagagggcactggatcccagacggcagggcctgcaacactga

SEQ ID NO: 11316 - DNA, 1449 bp, Artificial sequence
  DNA replication origin
acgtgtggtgactcgacttacccggagccaggtgccggcagggcagccacaccctggggccccctgttctggaggggcagagggtcgggccgatgcgaaaaagccgcggaagctgccttaggcgactttctgggcctgcatcgccggacccagcagcccgctgtcgatcggttgctaagtgacgccagcgcgcagtggcgcgtgcgcggccacggcggagtgcgtgaaagcggacgcgcgccgcagcagccggggcggcggcgaggacggcggccacggaagcggccaagggggcggtggcgcagagaggggtgcggagcgggcggaagaggcgtctgtgtcgcagcttggtctcagaggagcatcgctggggtgagtagccgggtccttgcaggggaggtggggcctggccgcacctgcggcgcggggacgcgcgcccccgccgtatccgcgcgcaccgccccccgcccctccgccgctttttccgggggcgggggaggagctgggacggggcctgacgagggtcatttcttgggcccgggtgctctgggagagcggtagccgtcccgttcgcagtccacgaaggtgtagtgggaagtagacgtttcggggattcggggtggctctaccagcctcccaaagagaggagttcgaatcaggggcagcccaggttccctagcagtctcgtatcctgtctgagacgacgttgcctgggactgaggaggcgaaacccgggaccccggggtgggggtttggaaagtttgggactgctggggccctcatctcccctgccctggccagcctctgagtaggagctggttgttatggagagagttgtgaatcagtgcctgcgtgcggcatcagacacacccacgaccttgggagggcgacctgtcagtatagatccggggcagccaacctgttgcctagagtttctaacttcacatgtatgtgcatgtgtttccttggcgttttagtacattgttgttacagattttgagaccaaggtgctgataggcatcctcatttcttacttcctcatagacttagttatcttgctatatttcccagaaccgtgttgtgcttttgtcattagtagatccaaggaagtatggaagcatgttttgtttgtttttcctaaaggcagtacaggctgctattttctgggcagaaaatacggattctgttcactgtgtgggcggaaagtgttgatgatgggagaacccagcatgtaaaggtgtagctcatcctcagccctgtgctgtcttctcagtgctctggactctatcatgggtagatgtataggggttgtggttaccatacttgggagcgaggaatattggagacagggaagaagccagtcttttctttctgttgattaaggcaatttgtagaaccagtgaaaagataggctgtactgaaatctaatgttttgtgtaagaggataga

SEQ ID NO: 11317 - DNA, 1017 bp, Artificial sequence
  DNA replication origin
gggtttccgccgaggtggagtctgccctcaccaaggcaatggttctgggacaaacttcaaggttcgttcaggtccactccccacagatctcagttctttaggtctgggggtagcagtgggaggtgataggaagaacctgtttcctgacccaggacaggccacccaagtctatgtctcctctctgctcaagcaagtcccagcatctttggacagctcccctcttcaaaagcagctgaccactgtccctagcccaggatcccagggcaggaaaagcaacaagggcaagagagaggggctgcggtggtccacctgtggcctgctctctggtggcaccaaggagcccaggtgttcttgcgtgtcccagtatgccttctcttggggcctgctgtcagtgcaggatgagaatgggaggtcagcagagtgggtgagtgggggcgcctggctgcttccaggggggcactgagccttctgcctgtttgctacagaggctggtaggggacggggggtaggttccatctgggaggtcactgggaaggacaagctgccaccgcagggccccaggagccatgaatcaaaggctgtgctgggggctgatgagaaagggagaggagccgggtctccgcaccctggccctctcagctcctcccagggtcttctcagggtctttgagcaggtggattgtctggggaggcactgcgggagaggggtctgggtcagactgtggggcagagggagtccgggaggatgccgggctgtgccagggccgctgacacggtttagaaggagttgggaaagtgctggggacaaaggagaagcggagcagaagtcagcgcagggcggccgcggggcagcgggtgcccgggcagagggacccgggtggcgaggaagagggcgcctcgctggggttggggggaatcctctgtagtccaagccctcacctgggccttccagcccaggggcaccaagtctccagtccctactccccccgaggctttcggatgcccccgccagcggtct

SEQ ID NO: 11318 - DNA, 902 bp, Artificial sequence
  DNA replication origin
gggttatggaggggattgagacactggcccctgaaatggcaactttagtcactttagtcaaatggcagaactgacccatttgtccttggggatccagaagtgttttccagggctgcaggatagtatgagagaggggctgttggagaccctgggtctctgtactctagtgaatggcaggtggagtccagggctgagccttgatcagtgcggacattgttctaagctgggtttcctcctggacaggacccaggctgggggctggggcaggagcaaccaagaaaccacatcctgccctcgaatgccttgcaccaaggcaaaacaggcttcctcagctgcagcctgcccctaggaaaattcctatgtgtgtgtggtggtggtggtggttggaggaggggacagagatacagacaggtagtctgagacagaccagggggagaagggagtaggctatatgaacccccagttcccaggtatgtgtgagtgaccctgtgtgtaacagtctgtgtgggaatgagtccctgtgtgtgcaacatctcagcatgcaactgtacatctgacagtgtctatgtttttgtgaccctgcatatgatactgtgtctgtgggagggtctgtgtgtgtgtgtgggggggggggcatcttggtgtgtgaatgggtgtcaactagtgtgtgtctatatgtgcaggagagatagtgtgcatgtgagagtgtctgtgtgttcctctgtgtgtgtgtgttggggacagtgtctcagcatgcgactgtgtacctggcagtctgtgagtgattgtgtgtggtgggagagagtctgtgtcagtgtctcagtattgggaatgtgcttgggggcgtgtgtgatgatgcgtgtgaccgtgtgtccacgtgggggtttttgtgactgtaagaa

SEQ ID NO: 11319 - DNA, 1081 bp, Artificial sequence
  DNA replication origin
gggtgaccctcagtccctgtggaaggtccagggggtgatgagagagcgtgtctcatcatgggtcaggcttcgaggatctgtcgctcacccgagggacacaggggtcccccaggcgcggagactctttggaacttagtttggccggagacaaattggagttgattcccgggtgaactaggctccacggtgtttcagtgtgggtgtgacggtacctccctccttgggaagaggctgtgggacggataaaggcgtttatctttccctggagacgctcccggagtctgggagccaagcctggtgccatcccctcgtgtctccacctccccgctccagggccagtgccacgcctgccaggcttttcttaaggaacgtgaacccggcagagtggcgggagggtccctcagcccgagcctgggcaaaatcttccgcccccagcagagttccggagaggagctggaggctctgtggggcccgaacccacgggatgagggctggtgcctggaatgctggggacgcgctcaggcttccgggaaggcttatctcgcggagacatccttcaagggcttggagtaaaactttgtgaaagtagcaggttgcacaaacgaataatacccgcgtagtccctttatgatgggggaggagagtgtgtgcggaattggggtgggtgggggacttccctccgtgctgacattgggaaccgcttattttctggtgcacagcccgatgggtggcattgacctcactttggataaacgggctgcctatcctggctgagaccttggggcccatttggggaccgaggccctctaccccagtttctcgagggctcagcttcaaccatcaactcttcttggcctgctcccccagtggaatgaccaggacctgggtgaaagttctagattgcagcaggtagggagtaggggtagattgtccagggtgttaccttgctctcagggtgaaagatgccagaaaggaggtctgatgagaagcaacgtttagtctacagcagcacctcaatactttatgcctatctagtcgtcgctcattttccagcctccgtttccccatgtgagaaacggga

SEQ ID NO: 11320 - DNA, 973 bp, Artificial sequence
  DNA replication origin
tcattacacaagacagattctccatctccccagcagacatttccgtgtgtgtgtgtgtgtgtgtgtgtgtgtgtgtgtgtctgtgtgtgtgtggcggggagagggcacaatacagagtaaacaataaataaagttatataatatagcagagggaatttagtactaggaaggacataaagccaacgagggagataaggtggcgggggtggaattttaaatcagctggagcatatgtatgaaagtgggccgggcgcggtggctcacgcctgtaatcccagcactttgggaggctgaggcgggcggatcacctgaggtcaggaattgagaccagcctggccaacacggtgaaaccccgtctctactaaaaatacaaaaattagctgggcgtgatggcgtgcgcctgtagtcccagcttcttgagaggctgaggcagaagaactgcttgaactcgggaggcgggggttgcagtgagccgagatagtgccactgcactccagcctggcgacagagtgagactccgtctgaaagaaaagaggaaaggagaggaaaggagaagagaaaagaaaagagaaaagaaaaaaagaaaagaggccaagtgtttcccgtagagatactgtgtattgggggggcgcacaggggtgccacgaattgagctgcccactccttccagatgcagggttctcacccgggtaggtgagaacggggtgagggggaggaatcacgcgtgggtggctggattagttcctgatgtcctctgattccctacagcttcttcagccccgttctaacccccttcctcaggcttacaagaaagtgtgtggaagagagacacggagagactgagcattagacttttttggaagaaacatcagtaaatgaaaatggaattacaataaaaataacaaaagcaataaactcctgacctcagtcacaatcattttagttaacacgccagtcctaataacaaacacga

SEQ ID NO: 11321 - DNA, 953 bp, Artificial sequence
  DNA replication origin
ccaggggggtcctgaggggactggcactgcacacctcagggatgcagtatcaggaaatctggggctccccagcttcctgctctggtcttcttctctggacacgctcatgttgccataaggagagacagaaacatcagcaaaatcagatcaatgcttccaactgtatccctaacccctccattccagccagatttggagatagtacagatacccccctccccaagtaaagtgtctcttgacaccttggggttcaggccacagcctgggtacagggtgggtaggaggtgagaaatgactccccttcttctcgatggaaagaaaaggccttggccaggggacagtgctcagggactctggccactccagtacctgcccctacagaggccagagaagggcagggccagcccctggtacagagcactgaaaggaggttccccctccaacttctgactggtgctggttgaaagactgaacaaactaacccactgagcttttttcctcactgcaaagtgggtcgaatgacagggcctgcttatgatgcatggaagggattcagtacttcctggggtttacaagagctcagagaatggcagcaaggcgagttagaaacatcctgggcacctgtttttaacaaattcattcactccttcattgcacacatggttattgagtgtctgctatgtatgtaacaagcactgtggatacatcattacacaagacagattctccatctccccagcagacatttccgtgtgtgtgtgtgtgtgtgtgtgtgtgtgtgtgtgtctgtgtgtgtgtggcggggagagggcacaatacagagtaaacaataaataaagttatataatatagcagagggaatttagtactaggaaggacataaagccaacgagggagataaggtggcgggggtggaattttaaatcagctggagcatatgtatgaaagtgggc

SEQ ID NO: 11322 - DNA, 1039 bp, Artificial sequence
  DNA replication origin
ccggtgaggaggcagatgcctggggacacatccaaatttgggggcgaggacgactacggcagggggcgcgcgcgtaaccggccccgcccggcctgacccgggaaagggcgcgtttgagcctgcttgggggttggtcgcacccgcacccgtggcaaagagctaaacgccacacctggccgcttccagagggggaacccgggcgcacgtttgcgaactgggagctgggacggcaggggcgccgggtctaaggatgcgcaggagcgagggcgcggccgtaggagcctgggggaaggcgcgtttgtcccggagggtgggtggattgggcccgaggcgtgctggtcggggccaccctcaacgcagagagggggctcgacgtgcgcagacccgggttcgagaggagggcggacgcagggccgctctctggctgaacccgctttactccgagtcttcggacacaaggactgggcgcgccgccgccgcgcggctgcccagaaaggctgaaggcagggttcaggggaggactcagaggtaaatctgagcagaggctcctcaagggtggggcctagcagggcggaggaggccggggagggttctaggggtggcgcatcttaggactgaagcgacgccagactggcagctgctcgatttggcggaggcattgatgtcctgggtcctggcttggttccccaccccttcgtccaagagcccagagtccagacagctgcgcgccagcccagaatccccgtcttgcagtcctggtggcttatccgtccagagtctccagtccaaagccaatccccggaaggtggcagggaaccgtgccagggtgggaagggacccagcgcggagcggaagtggtgttctgaaccctcggactaggccgattcggtgaggtcaggaggtagccagggccaggcctatctctactaaggacctaaagtgattcctccagctccccacctgcggacttctgcaaatacagcccgactgctgggtcctggtgctgaggctgcctgccattacccttgcaaaggtggtg

SEQ ID NO: 11323 - DNA, 1218 bp, Artificial sequence
  DNA replication origin
ggcgagggtcttttcctccgaggtcccccaaccctctggtccccgcgcaggaacgcccacccccgttgtgcccgcgtctgcgttcccgacgtttccctgaacaggaaacacctgaccagggcctgaataggccccctcgccctcggcccgtacaccccgcggcccgctaccccatcccgccgcgcccaggccgacgccgctcgcccctgacccggatcagcgagtccagcgccgggcggtccagacacgtgaagttctgcaacagctcccacttgtcgcgctggaagctgcggctggagtcctgcgccgcgcggccctccagcgtccagaacacgccggtgcccagcgccaggtaagccaggtaggcgagcagcaggagcacggtgctgggcaccgcgcagccccggaccctgccctcgggagccgcccgggctcgcggtcggtacatagcgggagaggcggggagccggcgccgggagcggtggactaggacccggtgggagggaagggccaggcgtccagctcgtatctcctctcgcaaacgcctgctggtgcccggtttcgccggggaggaggagtgttggggaatgggacagcctggccccacccagccctgggatccaatccccgggacaaaaagaggctctgaactgtgggcatctggccccgcctcaaatgtgtgcggggtgcccacctgctaggcctaggccagggagaaggaggaagctgctgggtgaccgcaggcgctgagggaaggggcccagagccccctcacatttcctgaaatgaacaatgggagggacttctggaaaccgcactcagaggtaggagatagtagagaccaactttattgtcttggggcccctgcctaagttcttggactcgggggctatctccaaggacttgctgtctgtcaatctcaagaccaccttgggtctcccacacctctgtcctttcctttgtaccccaaaagagggaccccagctgattgccacttgtccatgagcttgggaggtaagaggagccttaaccaagaggcttgtccactccttgcttctgagaaggcccccgaaatccctctacctggagtggaggaagcgtctaggctgtgtgaagagtccgtgggtcctcagcttcccagtcctttcttggatatggggaagtcctggggtgtgacttggactcctcttgctgctgtagagcctctcctgggtctcc

SEQ ID NO: 11324 - DNA, 868 bp, Artificial sequence
  DNA replication origin
tagagacggggtttcagcatgttggccaggctggtctcaaacacctgacctcaaatgatccacctgcctcagcctcccaaagtgctgggattacaggtatgagccactgcacccggcctcattactgtaaatctttctaactctctgcaaatggctctaaataaaggtaaatgaataaatggaaatgagtgggaggctatgggaccgtgggaggttaggccaatcctcagggactgagccacccagagtcctagctagagacctctgttccattctgttagcaccctcccccacccctactcctaccccctacaagtacacggggctgagggcccagcagggtagcatacacaagaggtccaggaggagccgtaaggccagagggtggggggcagcaaaagacactggggtgatgctggccagcatccagttcccctgccatatgggtatagggggaggggcatggctggagcaggacattgggctggccgggctgccttgggaggtggaatgtgggtcctaggttctgtgccactaggtgtcagccaaactgggcttggggagggctccaggaggacatgaggtggggaaagccccagaaaaggagaggcaaacactttggcttcatggtgcagggggctggagctttcccctgatctctaagacagtccaggtgctggtgcaggagtgggatttgtggccagaactgtgcagtgaaggggggcggggagaagtccagagcctgtggctctcaagctgtgtagtgatggggtaggggttggtccccaggcagcctccaggtcagacagtctgtgtctcagccacacaggacatgtccctgtcagtcagaggctgagaatagacacat

SEQ ID NO: 11325 - DNA, 1300 bp, Artificial sequence
  DNA replication origin
ggccctgagaacgctccctgccaaagtggggaacagctaccctcattgtacgcctcgccctgccggtggcgctctccccccgcctgcgttcggtctgaaagtgtgaaaattacaaatcccaagaaactgcaatcagaagtctacctagggaaaattcagagtaaccttgccataaatatcccgctccaagacgcctgacgtcagagcggggcgggcggacgggcgcgaggccgggcctggaggggcggcagccgcggcttcccggggatagcgcggagcacgcagcagcgagcggagcgcgggcggcggcgccgtacctcgggctgcgggagcgcgggcgccctggggtcctcggagtaagtgcggccggccctggcgctccccgtcttggggcccgggccgcggggagccctctccgctgggctcccacacttctctccctctgctttctttagcatgccccgcggggcttggggaggcagcagctccgcaggctggcggttttgtttctccaaagtgtttgcaggagccgccgaccccggagtgggctcccagggcctgtgtgtgtgtgagttgtgtgtgtgtatgagtgtgattgcgtgtgtctgtactggcacatctggacataggaaatgtctttggaaaactttttaaaaatgttttttgcggctttgaaacctgacccctggttgtcacaagtggacaaacacagaagataccccgcaaaactgacaactttttggtggtggcttttccgggttcggcttgaaccttcacttggctgggctgaagtcttcacaagcccccagctcccacttgcaggcctggcctctggccagtgggcagggcagccgtaaggttcttgttctcagtggcagtgggaccctgggcgggggaaggagcatctcaggaaaggggtccccggactctggggctctcagcacctgcggtcgcaaaccaacctcatgccctgactttaccaggcgtcgggactctgacttaaccggggaatgagggacttggtctggcggcaggtaattttgtgaagaggatgagaaggaagagggggaggtggtggtgatggccaggacgctgtggccctgtgtccagccgtagcttgggagtgggatggttggttctgccacatggccacggtgaggtacgtgccaggttctccaggagtgccgcgtgtggtgccccaaacaagatgcaagctcctaacataaagagacgtgtctgagctgtggggtggaggaaggggggcggtgggggagagggagatttttatcaaaattgaaca

SEQ ID NO: 11326 - DNA, 1054 bp, Artificial sequence
  DNA replication origin
gcagattactattattattctcattttcacatggggaaactgaggcacagggaggttaagtaacttgccaaagatgacacagcagataagaagcagctctaggatttgcacccaggaagtctaactcctgagttctggctcttaacctctgtgtggcctctgccagggccacaaagacagtaaatgggtgggaaggtcaagaggcttgtaagaccccacctgaacagtccaggtctgtggcctggggggtaggcacgctgagggacaggtgcactagggggcaggtgcactgtggggacaggagcactggggaggcaggtgtactgagggggcaggtgcactgggggggggcaggtgcagtgcagggaccagagcactggggggtaggtgcactggggaggcaggtgtaccgagggggcagttgtactgagggggcaggtgcactggggggcaggtgcactgaaggggcagatgcagtgcgagggccggggcactggagggtaggtgcactgggggggtaggtgcactggggggtaggtgcactggggaggcaggtatactggagggacaggtgcactgggggcgcaggtacactgcggggacaggtgtactgagggagtaggtgcactgggggaacaggtgtactggggggacaggtacgctagggaggcaggtgcactggtgctcactcctctgcagctcccttggtgaggaaagggtagaggggccgacaggtcagttgcagttaaacctgggtgaaagtggggcttgactagtttgtgtcaaataaggagaggatgagctccccagtgagggggtcccagaggctccccttctcccctctcctcctatgccagccagcctccctgagccctccgaggactcagatctgaaacaaaagtgggactgttttttgctcttgtcctcttcttcccttccttttgtctatctgggaataacccacttagtggtggtgatgatgattgatgacataatagcagctcatatttattgaagacttactaaactgggcagcgaacatgaataacgacac

SEQ ID NO: 11327 - DNA, 1509 bp, Artificial sequence
  DNA replication origin
tgcctgatgtttgattatgggagaaacacaggatgctaaggaggaggaagggtggccgggatggcttccaacaggaagtgaggcttgctaggtgttccggctgaggttccaggggaggggctccaggaggaggggatctggggggtaggggtcccacggggagggttccatggggggaagctccaggggcagggttccagggggaggggcgctgggaagaggggctccagggggaggggttccagggtagagggaactccttggggaagggttggggaggggcttctagggcgagggttccagggggagaggctccagggggagggagtcccagggggagggttccatggggaggagctccaggggcagcagggttccagggggaggggcgctgggaagaggggctccggggggaggggttccagggtagagggaactccttggggaagggttggggaggggcttctagggcgagggttccagggggagaggctccagggggagggagtcccagggggagggttccaggggggagggaactccttggggaaaggtgggggagggcctccagagggagggcctctacatggagggattcctgggaggagctctgacctgagtggcttcggctgaatcagagaggctagagagagcttggagttctcagggcaggtggatcagatttcacatcgttcacaacttgaggagggagaactgagaaaaggcttctgaaggggtgacaggatggaaaaaggtgacacacagcaggcactttccaggatgaggtgggtaagtggcttcaacactgggcactgaggagggagatcccttcagtggcaataatcggggtagagcttgcaaggatgtctgggttgaaaaaaggcaatttagaaatggggagtccattcaaggactgttctcagggcttgaggattggcctgtgttctcagaggaaatctcagcttctgtagcctgaagtcctggagccagagtctcgtttccgtcagagaaagcatccctcaaagcacagagacgaaaaatatctcataccttttacatgcaagatgccttttgttgacagagaggagggggaaattaaaaacagaaatgaaacaaacaaatgaaaacatcctgcatttatctgagaattccaagacctgatttaaccatgcaggtttataaagaagcattcctttgccacttgctgagggtcacttgagaaacctattgagggtgcctggccaaggcctggatgccttcatggattgaaggacctgagtcattggctgggccatgaaggttcattcctggggtgttaaccactttctccactctgcctctccccacacgctgctgttagatgtcgttcctttaggaagagctcacggaggactgaggacctgctgcacacattccactgcgccaggagctattctcatggactcagagtctagatgggggagaagttaattggtataaaaaacatacacgtggccaggtgagatggct

SEQ ID NO: 11328 - DNA, 1093 bp, Artificial sequence
  DNA replication origin
taagggggatcatgaacagtgggggaagaaacagtaaaaccttgaaggttaagaagagatgaaggaggaatagaagaaaaacaaggatgagaaatcagcatgaaatgcaggagctgggggtgcctatggcacggctcccaccccacgagatccccaaatgacaagggtgagtggttacgtactgatgggtcacccaccgatgaggatcatgggccggttcttcatctgggaaatactgaacatgcctggggtgagggaaagatggggagggagaggaaagcaggggagggggagagggagaggaaagcaggggagggggagagggagaggaaagcaggggaaggggagagggagaggaaagcaggggagggggaggggagagggagaggaaagcaggggagggggagggggagagggagaggaaagcaggggagggggagggggagagggagaggaaagcaggggaaggggagagggagaggaaagcaggggagcgggagagggacagggcggggagaggagagttcactgaaacaaacgcgcttgacagccccgagcacatgcactcagctgtatgacaaaaggcccccacatgtgcactgcgaggtcgctcaaggctgagcccaaagaacagtctgtggacatcaggaccctgccctccctaaacagaaggccacgtgtgggatgagaaagaagcaatgacacccccttctccccacctagtaaaacagcccaagagaatctggggtcccctctcctgtgcagcctctgctatgacttttccccatggaaggagaagcatcactgtaccctgagtccagagggccaacagcagtgagtggtagtggggatgatgctgactctcgccagcttccccctaggtgttccttggtcatctcaccccacaactccacacctccctcccagggacaaggcccactcaccatccaggccagccctccccaccctgcacttacctgcatgctgccgcttcttcctgcccacagcagccccaatgattctcagcagctcctgctcagaggccccagctcgcaggtgatcccgcagggatacctcagagtttccaaagagg

SEQ ID NO: 11329 - DNA, 1064 bp, Artificial sequence
  DNA replication origin
ttgccctttgaggagagtgacctggtgggggcccgggggacttttggcagctccgaatgggtgatggagagcacggtctaggtgggggtgggcatgctccctttcctgtgcgcagggtgggagaaggggaaagaatctcactggcaagtgtttgtggagtttccatggtgatgtttacatccagggacagtttcgtctccctgtcaatggcctcgtgtccccccctaccccgcaacacccacatcacctccccaccacccggccggggtgtgctcagggaatgtggactcgctcaaatgccggactgagccctgagtgtttggaaaggcgagactccgcctttctaatcacaaatgtagcctacaagcaagcggctttggattgcttatgggtctagtgttgtttttatttcttaatttattttttttccatttcccagactcctcctcttcattcacacgaataatcgagagttaatcgtacatatgaatgtgtgttcccagcagccctggtagtgggtaattgttgccaattgacaagaggagggaattattctgtttccacacttgtttgggggaagactgtggggttccctgctcagagctctcattactcccaaccaccccacacccgacactggaaggggtgagtgactgacccccgatacctgacctagtttcctttgcttctcaaacatgacatgccacacccatcacagaagcttaaaccagaagggtaatttcctgggttcttacgtgtggggagggaggagggcttcatgctatagggcacaagggatcttaacttctggagttgctttgggcttgttgccactctttctgggaagctggcatggaaagtcccccttgagcatgtggcaggccaggagggcttctcttaaggaaagcagcaggggtggcagaaacagcagtggacttggagtccgaagttctgtgtctgggctccacagtcacatgaatagccagctgaataactggggcaagacccttttatctgttgggacctgaatttctcaatttgcaaaaatactgggattgtactag

SEQ ID NO: 11330 - DNA, 850 bp, Artificial sequence
  DNA replication origin
gcgcccagccaccgcctccaagcagcgcaccagccggggccccgccgcagggcccgccgaaggtggtggtgcgcaacgagctcctggacttcaccgccagcctggcccgcgccagtgactcctcttcctccagctccctgggcagtggggaggctgcggggctgggacgggccccctggaggatcccaccctccgccccgcgccccaagcccagccttgaccgcctgatgggggccttcgcctccctggacctcaagagtcagagaaaggaggagctgctggactccaggactccagccgggagaggggctgggacgtcggcccggggccaccactcggaccgagagccactgctggggccccctgcggcccgggccaggagcctgctccccttgccgttggagggcaaggccaaacgcagccactccttcgacatgggggactttgctgctgcggcggcgggaggggtcgtgccgggcggctacagtcctcctcggaaggtctcgaacatctggacgaagcgcagcctctctgtcaacggcatgctcttgccctttgaggagagtgacctggtgggggcccgggggacttttggcagctccgaatgggtgatggagagcacggtctaggtgggggtgggcatgctccctttcctgtgcgcagggtgggagaaggggaaagaatctcactggcaagtgtttgtggagtttccatggtgatgtttacatccagggacagtttcgtctccctgtcaatggcctcgtgtccccccctaccccgcaacacccacatcacctccccaccacccggccggggtgtgctcagggaatgtggactcgctcaaatgccg

SEQ ID NO: 11331 - DNA, 1545 bp, Artificial sequence
  DNA replication origin
cgccgccgcagcagcaaagtcccccatgtcgaaggagtggctgcgtttggccttgccctccaacggcaaggggagcaggctcctggcccgggccgcagggggccccagcagtggctctcggtccgagtggtggccccgggccgacgtcccagcccctctcccggctggagtcctggagtccagcagctcctcctttctctgactcttgaggtccagggaggcgaaggcccccatcaggcggtcaaggctgggcttggggcgcggggcggagggtgggatcctccagggggcccgtcccagccccgcagcctccccactgcccagggagctggaggaagaggagtcactggcgcgggccaggctggcggtgaagtccaggagctcgttgcgcaccaccaccttcggcgggccctgcggcggggccccggctggtgcgctgcttggaggcggtggctgggcgccgttggtctgcgagtacacattgctcacggccgctgccatcttgctgggggcctcgtggttgcagaccttgtagcgcaccatgaggatgacgatgaagaccagcagcgtggccacgatgatgcccccgatgaccaggatcatggtgccgcccagaatctggctgtgcatggactggcactgcgggtagtcagccttggtgaagaactgggcgcagcccacgatgttggtggccgtgagtgtcgtggctgtgtcatcccacatggccagcacacacaagtcgtagccagtccctgacaccaggttgttgaccacgaaggccttgttggaggctgggatcatcctggggagggaggtggacagaaatagtgaggggtggtggggtggaaggacagggtgatggggagtggacagaggtagaaacagagtgacagagatggggagggggaggggagggaggccaagacagacacggggacacagagagaatggggcagagggaaagaaagggacagaggagtgaagagacatggaaggagagagaaggagagacagaggagaggggaggagggaggggcaggggcaggcaggcaacaggaatagggcatagggaatagagaagaaagagatgtgaggagggagacccagacaagggaaccaagggacaggttagggtggaaaggaaggtgagagagggagattcagagatggagcatcagggagaggtatagaccgaggatgtgtcagagaccaaggatgtgtcagagaccgaggatgtgtcagagaccgggtgagagaaaatccagatatatggaaacaaaaacacaaaaacacaatgagtatgaagatgaagggaatgagaaaggaggtagttgaaagaagagaaaaggggaggcatttagaggtggagggaaagaggagtgggggagactcaagcagagttgagaggacacacagggacaggcagagggagagacagagaggcagagaggttaaagtgtgaagaagcagaaattatacaaagggacacccgctacttccctccttcatgcctgctacaagtattccctccgtctctgggatggg

SEQ ID NO: 11332 - DNA, 871 bp, Artificial sequence
  DNA replication origin
tcaagcagagttgagaggacacacagggacaggcagagggagagacagagaggcagagaggttaaagtgtgaagaagcagaaattatacaaagggacacccgctacttccctccttcatgcctgctacaagtattccctccgtctctgggatgggcagggtgagagtcaggtcagccctgaccctgtgccagcccaccccgaggcttgctccagccctcctgtgacctctgagattcatggcgatccccatcaacactttctgagccttctttctggaccaggtgctgtgctgtgtcagagacaaggtcctgcctggagaggccagcaccacccacacctccaaagggctttctcatgactcaggagggagagcgtttgctgctgcagactgagggagagggagtctaagcagaagaggactggatgcaggagaagggggcctgctgcttaggggtggagggacagtgcagtgttaaggactggggggcacttctgcatcccagaggaaagggacgattccttggtcctagttgtagtaggccaggctcagccaagaaacctgggggaagagtttctttagtagaagactttaactgctccttccacctttggggagggtctgatggggaagcactctccccacattgtggctggtcctctcctgcctggaactcctcaccctgaactctggacccttgtgaccttgttaagcctggatgcacaccctgaactccaagacccttgttgaggtatcatgccttctgctgattccagagatgatgcctgtgtcacttccataaacactcccaaagaaatacccaggcctgaaggtaccactgtgtagctttcttggtagttcctccactccca

SEQ ID NO: 11333 - DNA, 1074 bp, Artificial sequence
  DNA replication origin
cagtagttctgagatgtcgggcaatttttcccagaatgtgagtcataacccacttgtgggtcagcagctcaatgtagtgggtcatgcccagcattgaaacataatgaaagagtagagagcagaatgaaatggcacagaaaagagagtgtgctgtgcaggtaaggggtgagtgcatgcatgtgggtattctagggaacactgggctccgcaggtaaggggtgggtgcatgcatgcagatatgccagggaatattgggctatgaaggtaaggggtgagtgcctgcatgcgggtatgccagggaacacaggactgcgcaggcagtgggggtgggtgcatgcgtgcaggtatgccaaggaacactgagctgcacaagtaggagagctgagtgcatgcatgcaggtatgccagggaacacaggactgtgcaggcagtggggtgggggtgcatgcgtgccagtatgccagggaatactgagctgcgcaggtaggagagctgagtgcacgcatgtgagtatgccagggaacactgggctgcgtaggtagtgggggtgagtgcatgcatgccagtatgccagggaacactgtgctgtgcaggtaggaggggtgggtgtatgcatgtgggtatgccacggaacactgggctgttcagataagggatgagtgcgtgcatgcgggtatgccagggaacactgctgtgcaggtaggagagctgagtgcatgcatgtgggtatgccacggaacactgggttgttcagataagggatgagtgcgtgcatgcgggtatgctagggaacactgtgctgcacaggtaggaggggtgggtgcatgcatgtgggtataccagggaacactgggcttcacaggtaaggggtgagtgcatgtgggtatgccaaggaacactaggccatgacgggaatcctatgtgttactgtaggatatggccaaaaaacttgaaagtcacatacctagaacacataacttgagggtaaaatgagaatagcatcaagccaggtaaggctggagattcccaactgatgcctccctggtcatctgaagtccccctgtctttttcctg

SEQ ID NO: 11334 - DNA, 1277 bp, Artificial sequence
  DNA replication origin
agccacgggtggatggaaccgttgaaaacagcaggagaactttgccgccagaccactctgttgcatctccgcacatgcaaggcctggctagagccattgctgggggctaggtgggggcgccggggactccctgagctctgtggactgggtggggtggggtaaagccaagtgcggaagggttgatgcagagcggatgggaggaaggaaggcatggttgcagtttgtgggggcaggtagggcaggttcagggaccctatgctggcctcaggcagaaagcagatcagggggattgtgtgtgtgtgcagcttggggcatcagaatggcatgatgaagcaatatggaaagtggcattagccatgcctgggttcctaggtctctgtctcccacccagccctgccctggttctaaggttggcctgggcagggaggagggagagcagtagaccgttccgaggtggacagtgccttactttgcacagaccttctgagggaggtgtcctactcgtcttcccatcagcccggtacaaaggacagagacagagagttctagggagatagagcctctgaaaaccagagcaggagggagaagagagcctgagtggagaccgcagagggactgagccagactgttgccaaatgcacccggcgacagcagacagctgcagacggacagacacctgcagggacagggaacatgtcagagcctgcactcttgagttggagttacaggcatggctatagatgatgaccccctcccctggccacaatggagtgtgtgtgtgtgtgtgtgtgtgtacgcgtgtgtgtgtgtacgcatgtgtatgtttcagggaggtggcagctgtggcctccatggcctgattggccttctagtactgggggagggggaagcttcaggaatttgaccccctgctgctggggaggagcaaagctagggaggaaactgccattccctgggctgtgaagttcccaggggccagggctagaggttctatgtgggctgttattcttgtgtgggggccgatttggaactcaaggtggggagcaagggaactaggtcttggggttgtgccctggtctggtcgctgccctctggcaggagctttatatagccacacacagcagagccctgagggtagtgtcatttccttgtggggtacatcagaggctgaagggggtcagagtcctgtagggaggattcagaagctccaaaaggcctgcacttggagccgtcatcctccgccgaccatgccagctgcctgggcccttctgctgatg

SEQ ID NO: 11335 - DNA, 951 bp, Artificial sequence
  DNA replication origin
ccccccttcttcttgctaaatgccatggatataactgaataagcggctcagggctttccccgcgtggacgtccgaggccaccatctgcctgcattcgccggagccgccggagggtttagctcgagtctgtctcgggcggggaaggatgcgtggccgagccggggagcccgggcgccccgcggagccggcctcggtgccacccagccgggggtagatgctgcctcgcccaggtgagtggtcgccggcgctgcgtctttgcgatcccgggtgtccgcgggagctcggcgcggggctgaacgcacccgagggaaccgggaactttgcatccctttctttttctcttgaagactccccgcatcctaggtgctcatgcggacacccccttctcttttcgcccatccttatcgcgagagatttcctttcctttctttagtctttatttcctacagtgggggtgaaactctggcggggagcggggagagccgggtccatgtgagactggagagccggatggagagacggggagccacgggtggatggaaccgttgaaaacagcaggagaactttgccgccagaccactctgttgcatctccgcacatgcaaggcctggctagagccattgctgggggctaggtgggggcgccggggactccctgagctctgtggactgggtggggtggggtaaagccaagtgcggaagggttgatgcagagcggatgggaggaaggaaggcatggttgcagtttgtgggggcaggtagggcaggttcagggaccctatgctggcctcaggcagaaagcagatcagggggattgtgtgtgtgtgcagcttggggcatcagaatggcatgatgaagcaatatggaaagtggcattagccatgcctgggttcctaggtctctgtctcccacccagccctgccctggttctaaggttggcctgggcagggag

SEQ ID NO: 11336 - DNA, 830 bp, Artificial sequence
  DNA replication origin
ccccaggactgggtgggcgcgatcgccccagcccccactcccagcctagggccggcgcggtcgggttttcctccagcaggcggcgggctgacggctgcagggcgcgctaggcacgtgaggtggcagcgccgtcgccagctgcagaggtgcagccctggccgcccggctcgccttccgcaggggctgcccgtgccgctggaccgcggagaccgccctcccggttccggggctcgcggcctgcccacctccctccgcgactgcggccccagcccactcccgccccaccgtgcgtccccgcgccacccctgccaggaccgtgaatccctctggtttccgcggcggtgttggtcgtctcggaagcgggtgcgctcggcagcgggcagggcagcgggcgcagaggctgccttcggctcctgcagctccgcggttcgccactgggggctgccgcgccggagagctcggcggggacggtgcgcacggccgccgggttcctgggcgcctctggccgctgggttttctccactgctggccctgcgctgtctccgcagcccgcccgactccctcccagattggagcgtgtgatccgtgtgtgtgtgtgtgtgcgtgtgtgtgtgtgtgtgtgtgtggagcggagagagaaaccgggtacgcgcgtatgcgcgcgcgcgtggggggcagtgtgcatgcggggagtacgggggagtgtgtttgtgtgtgcgtgtgggtgtgagtgcctggctccctctcgctgagacacacatacactcacacatacacaacccggcaggctcgtctgaacttgaagacaccccacattccaagatgcccga

SEQ ID NO: 11337 - DNA, 1228 bp, Artificial sequence
  DNA replication origin
caagacagattataggataatgtgtgtaaagcatgtagctgggtgcctgacacttgttaattcaataaatgttatcaataatggtgacagtgcagtcatgatccctgtcaaggaactcagaaagcaggagaatactgagctaagctccagaaactacactatgagtgcagcggtcagggaagactttatcctggtgatggggctagagctggaccctgaaaacagggtggatttttatttattattattatcattatttgagacggagtcttgctctgtcgcccaggctggagtgcaatggcgcaatcttggctcactgcaacctccatctcccgggttcaagtaattctcctgcctcagcctcccgagtagctgggattacaggcacacgccaccatgtccagctaattttttatttttagtacagacggggtttcaccaggttggccaggctggtctgcaaactacagggtggatttttaaatcattcatttaaacatttatcaagtacctattatgccctggaaactgtgctaagcactatgatacaagatgaatgaggcatggtcccggcgcctaggagcgcacacactagtaaagggttcagagagcttgaaaaataaaggcaagtgttccttgtgccttcctgtaagaatccagtattgtataacacattgaagagagacagaaaacagctgaagcaagaataataatgaactgcgggcgttatgaccagaagtctgaactgagggatgcagaatgttctcttccacctgggaggggtgaactagaaagggcttcagggaggaagtgatggggaagagatcagccattttgttttggggagtagcagaggtggctgtgggtgtagtgtgtgcaaggcgagaaagagagaggcctgagctaagggggttcaggatgggagaaaggagagaaagcataaagacagggcaaggccaggtgctggatgagccagaaaggctcatggagcgtgggctggttaggaggtgagagactctggaaggttttagtggacgggagagtcgtgataaaaagccatggtttacagcaactgtttccttagtagtgagcaggatgttgtggcctaggagagagggaggaaggagggagttaggaggctagggggaggctaggggtgtatttggagtgggggaggtagagaaggcaattacagaacatcagaactgtagcaaacttagaggtcctc

SEQ ID NO: 11338 - DNA, 1892 bp, Artificial sequence
  DNA replication origin
cattcctttcacacatctggacaacatcctcaagagtggaactgtcacaactggccaagcccctacctcaggccctgatgccccttttaccactggtgtgatggtgttcaccccaggactcatcaccttgcctaggctcttagcctccaccagacctgcctccaagacaggctacagcttcactgctaccagcaccaccagccagggacccaggaggaccatggggtcccagacagtgaccgcgtctcccagcaatgccagggactcctctgctggcccagaatccatctccactaagtctggggacctcagcaccagatcgcccaccacagggctctgcctcaccagcagatctctcctcaacagactaccctccatgccctccatcaggtacctgtggggcctggggttgagtggcaccagcacttagtgcccaaacagacctggaggtgcaagtcttatatctgaccttccccttttgctccccaggaacccaatgtggcctgcttctgaatgtgaggtgggggactggaagtgacataaaggatggcaatggagaggaggggcaggagagaggaggggcaggggaaaggagggtcgggggtggggaggaggggcaggggaaaggagggtcagtggggaggaggggcaggggaaagaagggtggggacaggagggacaggggaaaggagggtcgggggaggaggatcagggaggaggaaggtcaggtgaaaggaggatcaggaaggatgagggtcagtggggagcggagttggtgggaggaaggtgggggaagtgtcagcagagaggagggtcgggataaaggtagggggagatgagggttgcagggatgagggcaggggactatgagagtcgggggcattagggtcagggggatgaggatgggggtaaatgaaggttgtgggggaggagagtcagagaagaaggtcagtgggaggagtatcaggggagaggggggctgcagagatgagggtagggggcaatgagagttggtagaattagggccaggggggatgagagtcagagatgagcatgtcaggggatgggtgtcctgaagtgtctgtggatggagaggagagggtgaggatagggcaaggatgcgcctcatggagtaggaagtggaaaatgggggatgctttaatttggattcctctagagaaactgactctgagtcagggatttgcgtcttatatgaacactggaaaaaaggtgggggagtgggacagggcagggaaggcctctaataaagagtacttaaccaagcagctgctgtgcacaacaagagcctaatcccaacggggagagtcagatctagcataaaacacacatctgaagggcaaaggagcccgcatagttacacaccaactccaattggttatcagtagagggctgcctgctgtgtgtggcatagagggctctagtgacaagagaaaggcctcagcctcccacccacagaaaaggaggtgctgatgatgtgtgcaggtggaaatgacacaggcaagaggacacaggcaggggcccgacagcatctgctacagaggatagagtgggggaacaggcatcctcagaccccttgaggagagcaagcatcttgatctctttagccacaaatgggagtctcctagaatcctcatcctcactgatgaacagatttgggggcataatggaggagaggtaccaaagtagagagatgttcccctctacctggggacgtcctcctcttaactccggatgtcacacttgcttctgtggccgggtctgtaaggaagagggtggccgtctaccccgggaagggcacgctctcagggtttctgctgctggtccgatcccaacgtgggttaggatgggggaccttggtgctcacccgcttc

SEQ ID NO: 11339 - DNA, 1129 bp, Artificial sequence
  DNA replication origin
gtggcctgggctctactgggcccctgcagttgtatccttgagtctaggaggagcactggaagaggactcaggaggcactcgagtctttggatgggcacccatccgagcctcctaagggtggacatggccatgatgcttcgggccccttcggctctctgccctccattctctttctcatgcctctgggacttgggaagggagcctcttgtggggaatttgaagggtagttttcagatccctgcccctcccagttctgctgcacagccctggaccccaagtctcagcagcctagggaatgcctttcacagcccctcttgactctgggactctgtgaaccggctgcgcaccactcctgctgttcaccttcccaggaagatccagacccacctgtgcttagagcccttggtggaggtggggaatggctgtctctggaaaagtgatggggactgttgaggtcgaaaaggcattggctgttggcgggtggtggggtggcgaaggaaaagaaagtagggttggaaccaaggctgggagaggaagtggggattatcagtgtctcgacctagcagactaggtctacatacctaactggagtccaggaggtggggagaaggggaaagaaggggaaagggctgggaggggcctggaggagagggtgcctgaggctgagtcattcctcgtcccagagactgccctggaaggtcctccctggagagagtcacaggcctatggacctgtgggcacgatcctgtcccatagaacactctctgaggctgtctaggatgctggccaggataaccctgtgctcagcctgggagaggtgtttgggacactctggtaaaatcctagacatgtgctattgaatgtgtcatctatggcctggtgctggtctacaaattgtctgtaacccttccacaacaagggaagtataaaaattgggagtaggggtttcaaaacgtttatatcaatttgatactgcctcaagatccaagcccgtgattagttaactcgtctcatctcattgaacaggatatagaccagcttgggtgttgtcaaattagcatggagggtcgaatatggagtgagctgtgtgctagtaacctatgccagagccatgttacagtgtgtgata

SEQ ID NO: 11340 - DNA, 964 bp, Artificial sequence
  DNA replication origin
agagacctcccttgatgctgcatgtgccgattccttaaaacccttgagatgaggggagaaatacatgaagtgacttgaatccgttctcacaccctgtccctttccccaagcctgcccctcctccagcaagccggctcctggcctgactgagttgtccctgcacctttcactcagccccacctatggttttttcccatgtgtccccttctccctgggggctgtttccctcctgtgtctaccctctctccctcaggactagaatgaggcagagtcctgggatggtggctttagggagtccctggacttgggcttgcctggaagggcaggtagtgggagggactttccagctgtgtaggtctgtgtttctgatggagggatgggggagtggaaggacaggggagagggaaggagagaaggagaaaggtagagggaagaagaggagaggagggaggggtagagagacagggagagaggaagggggtggaatgggaaagagggagggggaggaatggagagagaaagggaggaaaagggagcagggggaagaaagagagagagagggagagagagaggagaaaacacagagacagagaaacatggatgagattcctgcaagtttgcagctgaaggacaaaggtgagcctgtgtgacatgtcagatggatggactccatgagggctttaatttggagagctctgccgattataatttccacctctgttctctggccgattcccctctgaccctctatcctgggcagaagctgttccctgttccattttccccgagttcaacccacaccacactcaccaccagacgagcagggctgacagcaccaggctcttggctacgaggagtccacagaacacaggcaccagggcaatgggggctgcagggccagggcggagcgtggagttctgtggcctggaaggcagagggacaggaaggggagaggacgggctgg

SEQ ID NO: 11341 - DNA, 774 bp, Artificial sequence
  DNA replication origin
gcaggatcaatggatcatgggtccctgtggtgttgaagcaatactgggatcaggttagcaggactgaggtagggggtggtgggaatgagattaagaggggggctattggcgcttactgaccatctgcaatggtggctgaaatagggaagaggacgagaccactggggataggaggccaaggaactgtgatgccagagatttggaagaatcattcatgtagatcttgtctacgtgggcccaagatcacaaagaattatggcgggagcagtcagagtgacgctgagcctggggttgagacccatgaggaataaagagccgtgccccagattgtacagaatctgcagtgatgatgggtggtcacccacagtgatacagcctaatggcagaaagctacttgtggagtgctttagggaggatcagaagataggaaggggctgtgaggggcacagaggacactgaccccacccttgggctcaggagcatgaggcaaaggagaacaaaccgcctccctccccccgcaagagaactgcggagaaagcattgtcctcggagaacaggcagatgtcagggagagtaccgcggtgacgttcagagaagctgagcatacaggagcttgtgctgatgactgcgcacttcaggtgcagggtggaaaggttatgggatttgggacgagtgggaattggggctaatgtcatggatttacaaggtcttactgagttgggattctgggtgatgagggaggaccagggcatcctgggcatcttatggcaacta

SEQ ID NO: 11342 - DNA, 913 bp, Artificial sequence
  DNA replication origin
cacacacagagagagagagagagagagagagaaagagagagagagacgggacagcctcctctatgcactgcttcctcttccccagccctgctccctgcatccttccctctggtcctagtgtcctggtgtcttgaagatgctgggtagttagaccgacatccctctccctctctcaccctgggctctgggacgctggccctgcttccccagagagcgatcgccccggacttgtgcctgtgttccggcctagggcagccggaacctcccgatatccccagaggagtctcaggacagcgcacagggaagtactggcttggagctgcgtgttccttgggcggccggcggagggcgaagagcaggaagagcccgggggacgacggtagcagagtgttggggaggccacagacgcggactgcgtggagaaagcacgcacccgggccgcagtagccgggcagggggacggcggaaagcagccctctctggaacattttattctgatccccgcaggactcccccgcgagccccggcttgagcagtcgtgtaacaagtgtgcgattgcgcgtgcgactggtgtgtgcgcgtgggcacttacacgttcccggggaggctgggggcaggagcttcactgttcacacaaagagcgcttagaggaggaacatttaagtttgggggcaaagaaagaaaaaagagttaaaggtttaggagatgggggaggaggatggggcttaaggacgcggtgttgccgcggctcagccatcggggcgggaagctcggggagggagagcgcctgggcccgcttctcgcctattctacgcagaacttttctctcctccttcttccctcgctctgcctctctcggggcggtctccggggactgtctctcacatccattctcctctcctccttgatttat

SEQ ID NO: 11343 - DNA, 928 bp, Artificial sequence
  DNA replication origin
tggcggttcgggatggggccgagaccgctggggggagggggcaggaagggcgccgaggaccgctggcggaggtcccggcccggtggggggcgctggggatggcgggcgcaggcccagcgcgccgactgcggggtcaggggcgaaggggcaggcggagggcagcgcgcggggagccggcgcggcggctcgggttaccgcggcccgaccctgccacccgcagctccggcgcgggggctggggcggactccggccgtaccccgctgtttgcatttctctggcaggcggcggagcttgggttgaaaggaatcgccttcatttggaacgttgtttatttttcttaactagccagcgccgacggacgaccccgcgagcacggaggccggacccggccgatccagcgctagaaaggggtcaggactgggggcggccaggcgaggtggtgctgcgagcgcccgcactgggaatgtgccccggtgccccagcggccgggatgggggaagggtcgtggcgggcccaaggactttctaccacgtaggaaaacagactttctcctgccagagttatcataccttagctttgaccttgcctgagccggggcagcgaagcggttaagctctttgggtttggtgtttggtcgccttgggtttcagtttctcctcctcggtttttagctccacgaccttggtcaagtcacctttgtgactcagtttcctcgactctcaaatgggtatagtatagtgctttgctccttgagttgctgtcaggattagatgagacaatgcaccctagcgcaggagatggaacttgccaagtgcttaggagacgtcaattcattttgtgggggctgtggcgcagggtaggtggggtgggggtagccagcaagcgtggggcccacagagaaggggcttgagctggaaacccatgactc

SEQ ID NO: 11344 - DNA, 1721 bp, Artificial sequence
  DNA replication origin
agaccttgcggcccaggaatccgaattctaggcctccttctttaagacgccagggctgtgctgctggtttattagggcttcgtcctgaggtcaagaaagcgggcacgaagcgctgggggcagaagcgttgcaggcgtccccttaggccctgggttgccacgtgcgcgttccgtccctgtccccctggagcaactgcgttaggcactgtccttgccacgtgtggcgcccggccaagacggccgaggcagacactggacctgggtgccaagcggaagtgcttgagattccgccgtgagggcgtcgctgtgagccctggcagagaggaggcccgggccccttggttgggccgcgggacaaccgaggcccaagcctgtttcccgccgcgccgcgccgcgctctggtgcgctcggttggcgcgccacgtcccagcgccgctcctcgcccgcccccaagcctagggcgactttaacccagtttgtaacgattccctgctcggcctagagggcgagagacgcccccgacataggcggcgaatgtatgtcgtgtcagcaagtgcatgggccctaaaaggccgagcgggattcctggggattaaagatcagacacagggagccctgttctctccttctccgccctcttccccaccccaggaacaagaaaaagaaaaatctgttggaaacgcacttttcccccataccagccccctacccccaacctccttctgcttctgctttcaccgacttaaaagaaaaataaaatacattccaggaaccaggacggctgcagagcaaactcaaaccagaaaatgcttaaagatgttttaatgacttaaacacaggggccagtttgtgtctaaaagtttccacattaaaaaaaaaaaaaacccagcaaattaaatattaaatatcgtcccggccccctcctccagccgcgtgcccgcccctccggttcctgtagccttctgcgcgctgcacctcccgggtttcctctgagcctctgctttcagctgtgggttattagcacccggtgtgaacagagaccaggcccctccataaagtttatattcacattccaaaaacgtaaaaacaaggaaaagggagaaaaacaacaccctaggtacaagcccaactgctcctgcaaacagaggccaccccccacccccaccctcaagcccagggccagaggaactgttaactagcagctgacagatttttacagcaggaattaggccctcatttggctccggattagcccaaatcttccatctcattacagccctgccttgttggagccccccctttcttggagttggggagttgcagataggtctttggggtcccagccagcattctcactctctaaactggggtaggatggagcaaggagacagggtggacacaagtaactggtgagatatggggtcctgggcagggctggcagtggccagctggagggcctgcaggagttctctgaggccctcagtttctctgtttctctgaggcctcagtttctctgaggccctcagtttttcaggtggtgtgaactggacatctacctctatggtgaagatgaggtcatgtggtggagaggcaggtgctggtttagaaattggtcttcttatgagtccagggaaatcccaaaccttaggaataaaaataacaattgtagcacttactgagcagcctcgtatgtaacactctatattgagcccttttatattt

SEQ ID NO: 11345 - DNA, 1334 bp, Artificial sequence
  DNA replication origin
tgggggaaaagtgcgtttccaacagatttttctttttcttgttcctggggtggggaagagggcggagaaggagagaacagggctccctgtgtctgatctttaatccccaggaatcccgctcggccttttagggcccatgcacttgctgacacgacatacattcgccgcctatgtcgggggcgtctctcgccctctaggccgagcagggaatcgttacaaactgggttaaagtcgccctaggcttgggggcgggcgaggagcggcgctgggacgtggcgcgccaaccgagcgcaccagagcgcggcgcggcgcggcgggaaacaggcttgggcctcggttgtcccgcggcccaaccaaggggcccgggcctcctctctgccagggctcacagcgacgccctcacggcggaatctcaagcacttccgcttggcacccaggtccagtgtctgcctcggccgtcttggccgggcgccacacgtggcaaggacagtgcctaacgcagttgctccagggggacagggacggaacgcgcacgtggcaacccagggcctaaggggacgcctgcaacgcttctgcccccagcgcttcgtgcccgctttcttgacctcaggacgaagccctaataaaccagcagcacagccctggcgtcttaaagaaggaggcctagaattcggattcctgggccgcaaggtctgaacccagactcagaagagccgcggtcagagataggagccggatatccgcgcagaaactgtgctttctttgcggtggagacgcccaggccaggagtggggctgaaagttaaatgggatccccaggccacctctcgaaagtggggtagttaccccggtactgctctgactaggcgggaggattggcatccccaggacggagccctaccaggcaggcagagttggagttatcccatcagtggcgcagaactttatggcctcagcgaatcccagccccagtttcagctcctctgggaactccctcccctactgagtctgtcttttcatttgaataatggggaggcctgaacaccttttaggggagggagggaggaatgagcagttttccaaaaagcgttctttttcacaagcttggaaaataggatggaggcgcgtctgagagatgaggatttggcgggccgtctggagtgggtaatgggaagctcaaggcgtgtgtgtgtgtgtgtgtgtgtgtgtgtgtgtgtgtgtgtgtgcagagacacagtcgagttagggaaactcttcgtctaggagagcctcttgtaaggtgatccgtctcctccttcctgccaggctcagaggccaccagcacagatggctagt

SEQ ID NO: 11346 - DNA, 1679 bp, Artificial sequence
  DNA replication origin
attctggacatattttgaagacaaaataaacaagatttgctaaggcatttggatgaatgatgacagaaaaagagaggagttgagaataactccaagattttcttccccagcaactgggaagatgaagctgcccttttctgagatggagaagactgacaggtgggggaccggggtggagatcaggatttccaagtagaacaagttgagtttgagatgcctgctagatatccaggtgaagtaggaaactggatttatggatctgcaggtcaggagcaagattaatagtagagctaagagaacaaaaccaaaatctcacatctctcgactcccaacagagttcttttcacagtacgtagagtactctcccgtgggctggagaatttaaatacctgcgctcaaaacctaaaacgcaaagaggaaatacggtaaccctgagcgcactaccctagccctagctctagctctagctctagctctaccagcgccagagctggaggaggtcagaggagaggggccgtactggagggggctggctatcttggggaagttgggtgaggcccgagggggccaagggctcagcatgcaactgggccggagtgggggctgctgggcttaggagcggatctccaccgaggtctgggtttcttctctcgcaacggtcttgactgtttccttgagccaccgtcagatatttatttaacctcgcagttcagcctcctgggggcctgcagggaagggatggaggcagggcggagaaagctgggggagaaggggagcgaaagaggaaacattttcctttccatgcgcaggccgagctcacgcatagagtcccacccagggcccccagtcttctgggggccagcagccccttggattccaagtgtcaacgtgagaattcaggaaccacgacagtctacccatctctatttaagaacggagaaaccgaggggagaggtaactcgcccaaggtcccacggcgagtccagggcggcgctagactcccagtctctggggtctctcctccattctagcccgtcagatgagcaccggagaccctgtagtgtcggggctggagtcagaggacctgaattttgtgcgaagccacaacatttaccaggcttgtcattgggctagacactttgcctctctgtgcctcagtttccttgtctgtaaagggcatcgctcttgcccctaccttccttggcttgttgctggacaaataatgttttttaaaaaagcaataccacctgccaattgctgagccccagtgagcctggcactgtcctgggcgcatcgtccaagacctccgtgttctcccggctttgtaaatcccgccgcttctccagccagtgagaatgggggctaaagggaggggtggggggtgaggccagaacctggctgtctagccagaaagaagcccctcagcgcaaagcgggggcgcctacccccaggcctaggggtcggtgtcgggggcactgggagaggggaagctggggggtacgggagcggaagtccctgctgggaggcccaacttccccttcgcccctccccccggcctgccccggggcaggtgaagaggggaccgggctccgctccaggtggcggggcagcgacgggggtggggaaaggcccggcaacaatagcacttttatttgggactgtttggttctgagcgggtg

SEQ ID NO: 11347 - DNA, 912 bp, Artificial sequence
  DNA replication origin
tattatttgtagtactatattatgttacaaataatatattattatttactcttttgggagccccagctctcctttcagcttcagaatctgggctccagttctgcctctatttaaaaaatctgtgcctcccacgtgtgtggttcctcttcttagtggctccctgccgcagacagcagccatcactgggtggagcagggcagaggctcccctgtccattactcagggtttccaaggctctggcagggactccctcctcctcctttccaggcggctgcagggacaggaagtgggtatgtttggagggggagggagtcttcccccaggggaagacttatggtgggtgtccacagcatcccagagcccagagctgggaccttctgctgccctagctgcactgggacctgctccagcatcctcctcttccaagccctgcaccagtgccgatggctgcgcagttaggcaacctagcctgggctccagcacaaagttgctgtgtgacctaaggcaagtctcttcccctctctgggcctcagtttgctcctgtgataacggaggcgataagaattttatttccatgatttaatggtgtaagataatcggatggggaaagagaagaaagttaaggaaaggaaagattttaccagtagagtccaggcactggtctgcaagggaaagcgtttgggtgaattatctgaataacactccctaatcagccgggtgatcacaggagcggaggccgggtttgagcaactcccagagtctgagaacacatctgtccctctgctttcctcctctggttctagcccggccccttccaggggctttaaccctgtttacagaaatgggaatttgcatgatgaaaataaccccagccggactgcgattttactgcgcttggcacagggctcggaa

SEQ ID NO: 11348 - DNA, 1585 bp, Artificial sequence
  DNA replication origin
caagagccatagtccacctcaaaaaaaaaaaaaaaaaaaaaaaggaaaactgacagatataacgggcgccttgagtgatagattcaaggtcttgtaagtgccctgtctcttgtccactgtattgtcattgatctgcctgcaggatgatatcattatagggctcagcaaaggggacgtgagctttagactcagctctgagatcaaatcattgctctgccacctcggcaagtaacttaactcctctgaacttcagtttcctcatctacaaaacttgacatattttcaatcttttagggctattgtgaagattaaatgcaatagtacagctgaaagtgcctgagattgtgtctttcctctctctttctcagggcagaagaaaaaggtagactattgctgatctaacaaaaatatttattttgaagaaaagtggggtaaggggtggtcacatgcacctggggagcaggaggcctccttggcagagggtgcatgtcgctctttgagaggtgagctctcggagggggttttgataataatcggaggccaaattgtcattggggccagctgttgctgggcctggaaggtgctggatcctttaggggaggcctgggtcctggccttgggaggaagcttctgctctaccttggggatcttcacacaggaagctgactgaggcttcctccgaggctggtcccccaaagtggtgggcttttctttggatgacaaggaggggaagtcttgaggggtggagcaggaggctggggtggggcaggaggctggggtgggccaggggggtggagcatcacctttgtcctcaggctgtactcacagagggagggcccagagatggggggaagggagaaatattcttcccacctcggggcctgctccctggaggacttgggccaggccaccagccccccataccgactcctgcctgggcacttggaggagtgccttgttcctgagcaaaggtgaagggatatttggatcagagtggactgggagagagaagaggcaatgacagaggaatctggagagagagagagagagagagagagagagagagaggcagagaggagacagggacaccagggtggggatcagagatggagagacagcaaaggaggccgaaggcaagaacatacaccctgcttcctcctccacctcctctttgccacagatgtcctctgctgatggggtctcacacacaggtttggaggtggagctcacccaacgttcctcttaaagaaaaaaaaatggagagaagagaggggaccctcagaccaggaaggggaaccaggattgagagaagctcctgggtttggggaagatgtcagaaaccccccatctcctctcacctctcccagttagtcctctcgtcccaggttcctgttttaggtctgtgtattccaggctgtttgaatgctgttcccaccatccagaatactttgccagccccctctctgcctgataaaaattctgccagttatgcaaagccctctcaaagccttaaccgttcttcaccttgaaacattccttgcttaggtcctcctagcccctcgctcctttctgatggtcgtgagct

SEQ ID NO: 11349 - DNA, 825 bp, Artificial sequence
  DNA replication origin
gcctagcccagagtaggtgttcaagaaagattggcgcatgaacaaatacgtttgagctttgctgtgctgtgtggactcttgggacccatcgggctagagatgggttcttacgtggctgaagtctgcatctgtgcgtatgtgtggtgggcggggaatgtctgtgaggtgtgtgtgtgtgtctgtgtgtgaaatgtgtgtgtgtgaggtgcgtgtgtatgtgaagggtatgtgtgagttgtacgacatgtctgtgaggtctgtgtgtgaggtgtgtgtgtgtgaagtgtgtgaggtgtgtacatgtctgtgatgggtatgtgcataagatgtgtgtgtctgtgatgtgtgtctgtgagacgtgtgtgtgaggtgtgtgtgtgaaatgtatatgtgtgaggtatgtgtgtatccatgaggtgtgtgtctgtgagccgtgtgtgtgaggtatgtgtgaggtgtgtgtctataaagtatgtgtgtctgtgaggtatgcgtgtctgtgaactgtgtgtgcatctgtgagctgtgtgtccatgaggtacgtgtatccatgaggtgtgtgtctatgagctgtgtgcgtgaggtgtgtgtctataaagtgtgtgtgtgtgtattcatgaggtgtatgtctgtgagctgtgtgtgagagttgtgcgtctataaagtctgtgtgtgtgtatccatgaggtgtgtgtctgtgagctgtgtgtgtgaggtgtgtgtctataaagtatgtgtgtgtgtgagatatgcctgtgtgtgcatctgtgagctgtgtgtctatgaggtacgtgtacccatgaggtgtgtgtctgtgagccgtgt

SEQ ID NO: 11350 - DNA, 1273 bp, Artificial sequence
  DNA replication origin
tgcagggtaagggagaaaggaataaagaaaaagtgggaggttatggagaagaaacctaggcctgcgcaggaaaacaaatggtctttcttagatgctgaagccctaggtgccaacacagtgcttttttctgtagggatccaggtggagggtggacaagtggcagccctgtcctcatctctgcctccacacaagggtggcaggccctgcctcttccccaacctgggagtgatggaaggccacagacccagcccctccgctccccagcctgactgctggattcataacatttccgacatgagcagtcttcagaggtgctgtctgaagccaccgggaaacaaacttggcggcccccccactaccccaccccagagacccccaaggagaagctgtctctaggaaagggggtgggggggaaagcagagagacaaagtgattcttaaacattttccttctctgcagtcactcagggaggagggggtgaggggtgagggaggctggaaggggggccaaagggggcttaataggctccggtgacagcacagtgtccacattgggaaaagattaatgacgaaaattaatcgcctgacctttctttccaggagctggaggtgaggcgggccattaaagcctcttatgttgtaattaacgttggaggggagaagagagctgccttcagaatggatgtgatcatttaattaggcttaggcgtaggtgccacaacaggtccggagaagtcataatttaactacagctttaaattacacaggcagagtggggatggcagagtttgacggcaggagagcctgcctcggagctcggggaaacaattagataaacatcccgagtgagtgagagagccggtcagagacagacagacagacaaagcggtaggcgctgacagtgagaaaggtggggaagaggcaaggaagggggtggtgcgaagggcggcgaagaggggcaaccgtaggagtccctgagcgagaagaaaagtgagatccccaagagtgagcggcggcctgaggaagaggggtgtgtgtgtgtgtgtgtgcgcgcgcgcgcgcgcgcgtgtgtgtgtgtgtgagcgcgcgcacgtttctggggcgagtgcctctgggcaccctcaacagccccagccggaggtgcagactgcattcttcaaacattcttcaaacacacccgaccttccagaacgtgcaaagacactgagctgagaaggcggtgagggccaggcattgcattggtcctcgccttctcggggcgccgctccccacgc

SEQ ID NO: 11351 - DNA, 1745 bp, Artificial sequence
  DNA replication origin
gcgcgcgcgcgcgcgcgtgtgtgtgtgtgtgagcgcgcgcacgtttctggggcgagtgcctctgggcaccctcaacagccccagccggaggtgcagactgcattcttcaaacattcttcaaacacacccgaccttccagaacgtgcaaagacactgagctgagaaggcggtgagggccaggcattgcattggtcctcgccttctcggggcgccgctccccacgcagtctccctgctcgagctcgggaagaggagacaccttcctttcccaccctggagagtctggtggtccccgagcgccccgccccacccgcgccctcagggacggccagggccgggccgcgcgtcctaggcacccggagcgagctgctaagccggactggacggcgggagccatctgggccagcgcgggggccggggaagttcaaggcccgggcactgcgcagcgccgagggggatgacccgccgtctccggggcgccagcgccggctagttgctcaacctgctggattagtcactcggcgggacccgcgggaccgtcggaaaaacgcgaagggagcgctaacgcgcagtgggagggaaggagaggactgaagagagacgggggaggggagaggaggggtcggctgccaggcctaggtggggtgaatccgcagctgggctgactcaagcggaggagccggaaggacaccccgcgaggcttcggggcgcgcttttagggaggcgccgcctccagctttgtgccagaaagtgggggttgcggctcaggcttgaatccaagaaaggctccgggtggaactcctgggcaccctgggtccttactctgccttcaggcgctggccaccgttgggacttcctgggccccaagggactttgatgatctcaccgtcccctcctactctagcccatgccaaagccactgtgagctggagggacgctgggagaatagagggaagagagagaggccaagggatggagttgtggaggtggggtaggaagcgccgggcagacccctgctgctgtcaacactgaggcctaacctgtggacggcacccaccatttgggttggaagaaacccaacccaaatgtggattggattggagttatggatgcgggggaagacagagaccccgcacccccaacttcccactcatttactagcccccacccacagataatcaagtaagagcctgcctcctgcccctcccccacagaaaaaacacaaaagccaccaaacggtcgctggaaggacactcttttcttctgaagcagggcagtttcttcattttgattaaacatccacacatttccaaattagtgaatctcttctcagttggagcttggtccctgccttgctggttgattgactgattgactgcttgattgattgcctaatgagtctctttggtctctcctagggctcagacgtctgtcctaagaatgtccagcctgcactggggataaaggaggagctgtagcctcaagagagacagataggggtgggactgggtggaggtgctgggtgccagataggggatagggctctgctccttgaccagggctcaggctggcccagaaggcttggggtcacgtctggattgtgcccccgggctgcctttgccgtgttgactgtccacagagcccaaacacccagacccagaactcctgagaccctgacctaagtcagatggggacgcaaaggccacttagcacctggaaggccagatggggagtacggagaaaaag

SEQ ID NO: 11352 - DNA, 933 bp, Artificial sequence
  DNA replication origin
ttatggaaggagtatagctgggtaatatggtatccccatatgaacagaaaataaaacccagtagaggcttaggtccaagggaggggcaggaagagagtttcattagtctccaaatgtcctgagtctagcacactgcctggaatatactaaatgccctcataagtgccctttggagtgagtatggagggtgctccagatacgaggcttccatgggcctagaggatggactcaggaggtttgagactgcatttggattgcggccagaactcagggccccatcccaagaagtttgaggcccagccagaccaccatgagagcctgcagaggactggggttcagggtactgggggcctcttttaggagtgcaggctgttcctgtggactctgccagggctcaaagctgcggactggggggtgggctggatcagagtgaacaggagcgggcaggctggagttgggacacattctccagcctcttctgtttgcaggtgcctgaggacaccttcaaaccttctctgctccgttgtagaactttttccagcaagggggagaggaaggacaaaaggctatgccttgggctccaaagtttaggagaggagccatggagatggacagagagaggtgaggagagagagacccaggaggcctctgggaagggaagggaaggttgctgaggaaggaagtctgcacttggggccagccctgcctctggcaccagccccactgggccagggtcccagggatttattgactaatcctcaaatgatacactttccctgatttattctctctcccgcttgcaatctcacaagatcccattgtctctggacactgctggccaagggcctccacctcaggagctgctgcctctcatccacttccggggcgagggtaatggaagctccctaccgccaagcaccacgaccctcccct

SEQ ID NO: 11353 - DNA, 1184 bp, Artificial sequence
  DNA replication origin
ctacgggtgggggtagattgggggaaggccgcgctgggccaaagcacggagctgctgtgcgctcccccaagcatgtctccgccgcggctgatgcgcccgagcctccgcctgcccctcccttccttgagcgcctcgccagttcccgccgtcactgactttctgacttcttaacttgtcagcaaatcccagagttaaaaatgcacacgcaccccggccagccgccagcagggccgtctggccgaggctccagatgtggggccaccgcgcgggccgcccgccccgccgcgcagactaaacaatcggccttggccgtgagcgcagcgcaattccagatgccgcgtccctcgcgccgcgcgctaattgggccgcgggcgcgaggctctgtcagcgccagtaaggccctgcccagggcggccttggccgggcgcccgcccgctgggctacctaaggcgggggcagggtggagagatggaggggaatagtggggcgggggggggtacgaaggagggagagagaggagggaggagaggaggaggaagacgaggaggaggacagaagaagacacagtgagacaggccacgagacagcgtcagcttgagacagagaaacacgaagaggggcagacagaaagggacagagacattctcagagagatagcttcagagacaaagagaaagccagaagcactgagccatattcagattcagaaggagacagagaaggtagagagggagagagaccacagagatttggagtaacagaggcagggcagactgacacgagaacagaatcaggagagaccaagacaacgagaaggaaaccaacgtggacgcggccgggaagaacgcaggcggtgggagcacaggagacgctcatgtttaccaccgggtcgcagctgcctgatgggtgtctaaccccttttgttttatagtacctcctccctttacattctcactttttatcattcttcctagacccgggcgaagccgggaactgagcccacccgcgcggtgatccattcctagtctggctgggggactgcgtagagaaggaacctgagccgtcgagatttcactcctaagcctgggcttggggacaggggttcgccctggacactgcgggagggtgcgggatggggctccgtggggatttgcctagaggcaggggatgccccaaatgacccc

SEQ ID NO: 11354 - DNA, 1679 bp, Artificial sequence
  DNA replication origin
gaggaggagggtggagagggaaggagggagcgcgcggagagcgagggaggagggagcgagagagcaagcggcggagggaggggagaccaacttctagtgctaccataattcgcctaaagcaggtgcagcaactttcaccccgcctggcagcccgctgagagcgagagaaaaccacgtgcaccaaactttaggggaggaaaaatgggaacgtggggagaagacgtgaggcggcagatctgaaaaagatggtaggtggagggaccccagggattcaccctggcctcggactaatcctatggggcgcttgcaaaccccggccatcccctggagtctgaaggtacggccaagtcctgatcccacacggttcactggttcccggcgggctgcgctcggcgcggggagtggccgggggcccagagacggagccagtgtcaggcccgggccctgtctggcctccctcctgctccccactgcgtgggggctgggggtgggcttcctgagccgagggtagaaggtggggaggccccttcagggctttgtgaacggtcaccccctggcgcgcactgcctccctctgcggaaagggaatttcccgtaaagtgctctgcgaaccagtgaagaaggggcccaaggccagagccatgcgggcaaagtgaagtgcaaagttgaggcaattatccggacaaattagattgtaaacaaaaccccgcgtctctgaacatcgcttttgcccagggggactggagggattgtggtggtggcggcgatggtgtgtttgggttgggagggggaggtctgggtgaggaaatgcccacggcccaagggggagggctgtgttgttagcagacgcaccactcagagtcccgtggaaatctcaatacccgtccccctccccgccccacacacgccggaaacatctcccatctgtctgcatgtgttgggggtggggagaagtgaaggaggcctcaggggtcctcatgaagtaccccaacccagctcagtgatgccgggtccccatgaccaagggaggatcctgttgtgggatcaggacaagaagacagtggctcttgaagcctctcctggccctaaatcctcaggcaggtggacaagaggctggcatagtatgtgagcccctgtggagtgggagctggaagcctgaggtgtggggtcggagctgcaaggattgatgcttagttgcctggggggaggggatttcttggccgttccagtggtccttgaaagaaaaggggacctcagagaggaggcaccctcttgggttgtttttcatcacttctgtcccttttctgcaatgttagtgacacctgcacaggtccacattttatgtatttgcctttttgggcaggtgggacaggcatacttaggtcctgctggagcgttttagatttctaggtgtgaaattgtgcagggaagactctaagtgccatttatgtggatatctcagtgtcctttccagtgtggcaactgagataaccatagccataagaataaaataacagctaacatctgagtcgtaccacccaccagccatttaatcttcacagtaaccccaggagggagatatttgtattatctccattttatagaagaggaaactgaggcacaaagagatcaagtaacttgcccaggcttacacagctgctggtcagtgatgagccagat

SEQ ID NO: 11355 - DNA, 850 bp, Artificial sequence
  DNA replication origin
cgtcagcccgcgcggggcatggggctcgctccggtcgcagcccgggcccgccgccgcccgccggggctgcccttccgcgccgccccgcgtcgcgcagctcccgggcgtcctcccagcgcgccgggccgaccgccgcgcgcctcaaccccgccggggcatggcactttgtgggctgcttggctcgctccggctccgctcttccttcccggtccttccgcgacgctcgtcagctcgctccggctcccgggctcccggaccccggcgtccccgcccccggcccagccctggttccggcccgggctcctccccgccgcgccgccgccgcctgcgccgcgccctcctcgcgggctgggggctccgtcccggccgccggccgccggccgcactgtccggtccgcagggacggcgggctccggactccgaggggctgcgactgagcctgggctgcgagtggctgcgagcgggcggcgcgcgggcggggcgggagggggcgggggaggaggagggtggagagggaaggagggagcgcgcggagagcgagggaggagggagcgagagagcaagcggcggagggaggggagaccaacttctagtgctaccataattcgcctaaagcaggtgcagcaactttcaccccgcctggcagcccgctgagagcgagagaaaaccacgtgcaccaaactttaggggaggaaaaatgggaacgtggggagaagacgtgaggcggcagatctgaaaaagatggtaggtggagggaccccagggattcaccctggcctcggactaatcctatggggcgcttgcaaaccccggccatcccctggagtctgaaggtacggccaagtcctga

SEQ ID NO: 11356 - DNA, 1367 bp, Artificial sequence
  DNA replication origin
ccccatgccccgcgcgggctgacgggccggagcccgcacggagcggccgggcgggacaggtaggtggcgggtcgggcccagggacgtgggtgggggctgggcgggcgaccagaccaactccctcgctcgcgcactctctcgcccgctcgctggctcactttgtgtttgcaaactgcccgcccgagacgcgctgggcgccgggcgccaggaggagccgggcccgggccggcgcactttgttccagccagggccggccgtggcgcactgaccccgcgcagccgcgacattccgcccctggcccgggccccagcgggccggagctgcctcgggaacaggtgggggctgtggcgcggcgggagtgggggcagccggaggccggggcggggaggggggcggccggagaggccaccgaggcccgcccttccccaagaatctgggccccgccccctccccgccgggcctctgggaatggggtgtacgggggcgcgaccccctccccgccccgagtcagacaaagaatacttcccggcccagactttccagagctgggaagggaagtggctccccccaactctagtcggtaccggactccccaggacgcgccggagacagatgaaaatgggggcaagagagcgggggatcgcggtcctacccgccgtgtcgtctctggtgaagaggggacttgtcttgctgaggtcgcacctcggaagtgccagggccagtcagccccttttccatcgctcggtcagctcggggatagagcggaaaacttcttggggacttgagagcgtctggaaatggcccctgtgatttgtgcgccggaggtggagggtggggaaacgatctggctgacacctctactcacccgctgtggagagagctcccgcttcaccacttaaggggggaagagagggcggccacgggggcccggaggccaccagggaaggagcccggagtgaccgagcaggacccccccccgccccaactgaggagtctggtatctcccctggacaaccccagcacctctctgaccggcggcgcttcagcctcgggctcctcatccacgccaaacaaacttccttgggctgcgtcagagcacagccagtggcgctagaatgcgacctggggtcccggccgcccccataaaggaccgggtaatttcgcggaatgcggattttgagacaggcccagacggcggcggattccctgtgtcccccaactggggcgatctcgtgaacacacctgcgtcccaccccgatcctaggttggggggaaagggtatgggaaccctgagcccagagcgcgccccgctctttcctttgctccccggcttccctggccagccccctcccggctggtttcctcgc

SEQ ID NO: 11357 - DNA, 952 bp, Artificial sequence
  DNA replication origin
ccccgccccaactgaggagtctggtatctcccctggacaaccccagcacctctctgaccggcggcgcttcagcctcgggctcctcatccacgccaaacaaacttccttgggctgcgtcagagcacagccagtggcgctagaatgcgacctggggtcccggccgcccccataaaggaccgggtaatttcgcggaatgcggattttgagacaggcccagacggcggcggattccctgtgtcccccaactggggcgatctcgtgaacacacctgcgtcccaccccgatcctaggttggggggaaagggtatgggaaccctgagcccagagcgcgccccgctctttcctttgctccccggcttccctggccagccccctcccggctggtttcctcgctcactcggcgcctggcgtttcgggcgtctggagatcaccgcgtgtctggcaccccaacgtctagtctccccgcaggttgaccgcggcgcctggagccgggaataggggtggggagtccggagaaccaaacccgagcctgaagttgccattcgggtgactcccgagaaagcccgggagcattttggccaatgcgggtttttacctgaacttcagcatcttcaccccggtttcggagacctgcctagattcgtcccagcacgcactgtttcgggttcgggattgagggttagggcagcacacacagcttgaggggcaattgttaggactggcccgagtgcccgcagaaagaaagagcagcggggttgtcgtatggcctgtagctgcgggaaggtctgtgccggtcccactgtcgaacccagaagctcactttccacagaaaaccagggctgaagggccccctgaccgccatgccctgcgggcaccgggcattttgagctctcccccaccccctccccctgctgcgaaccagccggtaggtgcaggggccgaaggccaggcc

SEQ ID NO: 11358 - DNA, 1100 bp, Artificial sequence
  DNA replication origin
cgcctccctccttccgctgcttcagctccctgcaccgcagctgtgcacgcctgggggtgcctcatcacaatgatcgatgagcctgtcagattctgggggccactcctgcctggagggcacccttcccacatgcccggggtgcccccttctgctctggggagggagttttctctcccccagctcttttcctctcttgctttttagatacagagaatcaaggagtctgacgggactcactgggacccaggctcggagaacagtcacatcaccactgcccaggcgccctgtactcgttggctcacccactctacctacccccacccattcagttcttcacacaggcactgacaagtcaggctgtcagcaagtctctcttgagccccatgagccaagcatgtcctgggtgggttgagaggcagagatgtctctgcctgcctgctgggggtgggaagcatggggtagggtgggggctggctattcaatagagagacacaggataaacttagcctagagatttacctgctgataacacagcaattacaagactgctgagggggagactgggggtgctggagaattcctgggtgtcagggcagccttctgggaagaggaaacttagagcttggggctgcggttgggcagcaggagagatgcacaggtctgggacccaggggagaagggcctccagggcctggtatagaagctccgatggggtaggggatgtaggctggggagctctgagaggagaccgaggggtggctgggcaagtcataagaagaaggggaagaagctgggggcaggctgaggtaaggggaggtggtttgctgagggactcagagattcgcaggacaaggaggggagggctgaggtgctgggtcacaaagagacaagggggcaggaagatggtgcgaccacaaggcacatgagcgtggcccggcagacaccacacacgggggtgacacgtacacacctgtctacacccatgtgcacagagacaacaacacgaggcaaggagagaaagaatgaatggggatgaggggagatggagacacgtaagaaccaccatccccatttcccccacactgatccttggtcccctt

SEQ ID NO: 11359 - DNA, 942 bp, Artificial sequence
  DNA replication origin
taggaatgttgtggggaacattgtgttgtaaaaaaataacacttggaaagctctacaaagtgcaaaaatcactttcaaatgtggtgacttaaaacagcagctagagccgacctgtccgggaggtgaggggcgcctctgcccggccgcccctaccgggaagtgaggagcccctctgcccagccagccgcctcgtccgggaaggaggtgggggggtcagccccggccagccgccccgtctgggagggaggtgggggggtcagcccccggcccggccagccgccccgtccgggaggtgaggggcgcctctgcccggccgcccctactgggaagtgaggagcccctctgcccggccagccgccccgtccgggagggaggtgggggggacagccccccgcccggccagccgccccacccggggaggtgaggggcgcctctgcccggccgcccctactgggaagtgaggagcccctctgcccggccaccaccccgtctgggaggtgtacccagcagctcattgagaacgggccatgatgacaatggcggttttgtggagtagaaaggggggaaaggtggggaaaagattgagaaatcggatggttgccgtgtctgtgtagagagaggtagacatgggagacttttcattttgctctgtactaagaaaaattcttatcctgttgatctgtgaccttaaccccaaccctgtgctctctgaaacatgtgctgtgtccactcagggttaaatggattaagggcggtgcaagatgtgctttgttaaacagatgcttgaaggcagcatgctcgtcaagagtcatcaccactccctaatctcaagtacccagggacacaaacactgcggaaggctgcagggtcctctgcctaggaaaaccagagacctttgttcacttgtttatctgctgaccttccctccactattgtcctatg

SEQ ID NO: 11360 - DNA, 1513 bp, Artificial sequence
  DNA replication origin
cagttagccctctcctcttgctgctggagctgagaatggcttcaacaaggaaggggatcttggaaggaggtagtggagggagagcagagaaaatggataaggggagggagaaagctggagagagtaagaggatgggagagcaggaggctgaggaagggaggaggcaggaaggaggcccagcgggacagggaaggttcccagacacagagaaggacccttccaagtgccctgcccccagctgtccctccgggctgaaggagtccaattcttggaggcgctcatcctgcagaaggccccgttgcaggggccccacagagacagcaggcaatttgaggcttggccaagatgggctgtagacacactggcctcatctatgtgctggctgttggccagacatcttccacttgtcctcactctggtttagaggaccccccacctccacaactaggcgtccataccaagtaggtggggagtggagaggggcctcctagaacaggcaggcaggccggcttcgagggcgcatgtggaggctcaggccagagaagggaaggagcttgtccaaggcaaggcagggagttcgtgtcagaggttcaggaacagaccttcattattcagagtcaaagaggggaaagggggaatggcgctggtggggaggaaggcaacgacttagacagtggagattccaattatgaaatccgggtccacactcctgcacgcggttcccctggccctgaacacatcccagaggttcctgacttctccttgacccggacttccatttgggagcttcggcttaggcatctggccagtgaggggaagggactgagaaccagggccggcgaggcccctactccaaaccccttcagggagtcacaaaccgtacttggcgtgagaggctcccccaggaatcgcgggtaggttacagacggcgccaggcgcgggacggggcatttcacttgggctgaagacactgggttggggtgcgtgtgtgtgcacagggcaggggcggcggggactggccggcacgagagggaaggaaggcgagggagaagggatggcaagaaagaggggaggggctgggtcctgcagccgctcgcggcagacaaaagttttcgggaagcgctgggctctggttgggctgggggaagggaagtagagaaagattcagacaacgccccctcccccacaccaggcccccacaaatatttacacactgggcagaaacagttgagacacaaatcccagacggacagacaccgcggagtgtatgtgtgtgtgtttgtgtgtgtgtgtgtgtgtgtctggtgtcgggagttgcggggagttggagccaacttggcgcagccgcagcctctgttcagggccctgcctccctcgcccagccccctactctccttggaccaagtcctcaaacccagacttttcgtccctacccccaccaagctccctggaacggtctccccgcgtctggggacggagaggagaactaataactggccccttcagccgccca

SEQ ID NO: 11361 - DNA, 1105 bp, Artificial sequence
  DNA replication origin
tgtccatattcatctctgcatccccagggggcactcggcaaatgcctactggggagtactttctggagtttggaatgcccctgtcaggggaaggagaaagagaaagaaatgaagactaggggtggcacctggacctgaaccccaagaaagtcagagagggtggactcctttgatgcacacatggttgatgcgaatccaatggtcacactcccaggccaccaagctgaaaactaaagagggcctgagctggccagttagtctgggacaagttggttttattttaggtctgaaggttccaaatccccaggaaattcaatttagaaccatgaacaggaatgtgacgccccaatgctgggcaaaaatgtgcctgtgggctagggagccaggctcccggggctctcaggggtgggtggggaggaggccactaggagagccaagggtgtgggggcttggccacctgcccctaccagatctgccctgagtccccttgtgccctgtctgcatctggggtggctgagggaggaggccgacttgctccctggctgtcctgccagcagagcccctggggcagcgctgtggccttgctgttctgtcagcactcagggagtaaagcgtgggggattctggtctcaaattcaggcatctgtggggttttggctgggtctcctgcggtttgggcttcctgggcagcaggctcattctcccaaggcggtggcagagcgaagccttgagttatgaaagccgcattgtctggcccagcccaggctggggagggggtctgctggggtgctggggggcctcaagttacagcccagagcttaaccctcccagttgcccacgctggccccggttgtgtgcagttagccctctcctcttgctgctggagctgagaatggcttcaacaaggaaggggatcttggaaggaggtagtggagggagagcagagaaaatggataaggggagggagaaagctggagagagtaagaggatgggagagcaggaggctgaggaagggaggaggcaggaaggaggcccagcgggacagggaaggttcccagacacagagaaggacccttccaagtgccctgcccccagctgtccctcc

SEQ ID NO: 11362 - DNA, 925 bp, Artificial sequence
  DNA replication origin
tagagatggggcaggggcagaggcgacagagaaggtagcactgtgtgatacagagcgcggagggagacgggagaaactgggtcagagaggatgatgatagaggagtcagaggaacctgggggtgaggagcagggaggggctacagtcaggaggaggacaaggagccggccggagcactggggaagaggtgaaccgcagccacatgtaattacagtggctctgtgcaggggcggcaggaggcagaaatggagccaccttcaaacccacagctccccagcctgcaggactagggcccctaggctcagggggaaaagggatgggggatgggaggtgagggagggaggaagaaaggggtccgagcgtccacacactcagccaggggtcaggggcgggcccaggctgtggcaatgaaagggtgtagggtgcagcctgggcctctcatcagacctcagcctatgcagttagttggaaggacaggggtctaaagagggtggccttccacctgccccctccccaaatatcatgttgggagaaggagcaaggagacacagaaacaagagactcagagatgcagaggccaaaagagcgcagggagaggcagggtgacacagagggggacacaaggagaggcagggtgacacagagggggacacggggagaggcagagtgacacagagggggacacgggcagacagggagatgatgagaaacagcagggaagcccaaagagtacacaccccacagagagaccagaaagaggcacatgcagagacagagacacagagagacacagggtagtcttgggaattgaaatggaatcaatcacagagaatagtgaggggttgacacagagagggagagagtgggggtgggggagagaggcaaagagagggagatgagagatcaaagaagagaggagggaggt

SEQ ID NO: 11363 - DNA, 847 bp, Artificial sequence
  DNA replication origin
ggccaagcgggtgcacccatttttgccgacccatttgggttgagttccctagtgcaaccctacatgttgccatccaacctcctggccccctaggactcacatgtcacagcttctgtggggacgtcgaggtcagtgctgtccaggccctgggggatgccagggccattgccttggggcatgggggttgccgcctcctccagggagccctcctctggtgctgcctccgcagggtgagtggatcctgttactacctccagcccaggaaggagggatagggtctgggctaggaaaaaagcagatgactgaggtccattttcctggggccttcctgtttgcccagccgtgggccccgccccacagcccagcatgcccactgaaccctcattctttgtctgtctgcatcagttatgcagcccttactctagctgacaacagcaccgggctccaaaatagaaagctcccaaaccacaatctgggagtgagcaagggtgtgcatgcatttgagtgtgtgcacgtgtgcatgtggtgtcgggaggggcagagatggcagaatataaagagaagtagggagaggaggcagaaacacaacacgggagaacagacggacggtcagcaacggagagatagggacaggcatcgagagtgacagggagaatcaaagggacagtgagaggtagaggtaaagggagatagagcatcggactgcgagagattgggcacggaaaagggatccacagtgacccagtgacagacagcctgagacgggagtgagacgcagcaatagcacggaagtcagtaatggagagaaagatagagatggggcaggggcagaggcgacagagaaggt

SEQ ID NO: 11364 - DNA, 1508 bp, Artificial sequence
  DNA replication origin
tatgaccctggggaacaccaaccccggagcgctccctccgtgcgccccgttgtctgcctccccccgggttcccagctgcctgcccgccccccgagtttccccctccccccgtctcggtcccgaatcccggaaaacacgcccccttccccccgatcccccgagtccgtgccgcccacccctgggctgtcccgaccagctctggcccagcgcgtccgctcgcctcctggaagggagcgggcagatgccagctcggccccctccccgcgcggggttccggcttcacgcacggctgccccgagctgctccgggctgcgcgagcaggttcgcgccgcagccgcctggcgcgccccagccccgcgccccgggtgaggaagggagggagcccggggcggggcttgtctgcgcgaaccccgctgggcccaggcccccgccctccgctctccgccagcccctggccgctgcgccttcccccgaacccccctcagctccagccgtcgttctctcgcctgtctgttctggggacggttcagcgcggagcttctgcactcaacttgagcgcagtttttggcttagagctcgctggggaagtgcaggttaattactgcccagctcccatcctctgccctccccccatcccgagtgaggggctgcttcatccctcagggaaagggacaagacggatgcaggcccccagtgacacctctggggtgtggcctcaggcccctgcacccgccctggccgagattccattggcccagacctggcactgttgggcagctggggatgaggttggaggctggtctctggtttccttctgggtggacagatgcggatgcgctcggttagaacgcagttcttggtgccacgactgggagacagtcctcaggccctcccctcagggagctcactgtccggggagggacagccagcaatagttcctggccggccaggagaggcagaggcagaggaagggaagggtcagctgccttgaggtccctgcctgctaacctgacggtatgctttcaccatgccggtgaccccagccccaggaccacgagcaactcgcctggctcccttctctccgtctgcctcctggccgcggggcccggagagctgggagccagagggtgtaaatgaagggcagagctgtttgggtgactccatgctctgcttctccccgagggaagccaatggtgcttaccatttacaaggcttgttacagctgcagggttattttgtcctcaactcagctctgggagacggagccaaatggggacccaggtatcttggttccgggtgccctggaaggagttcaggggatagggcaggggacaccctaggtgggcactgaatctagggagagccaactgggcttttacgggctaatggcctggtgactcacagtcagaggtgggcagggagtgggccagggcaggcaggagcccttccagggtcccacgtgcgctgtcacaggcctcctcagcctgtttctggaaagctgagaagta

SEQ ID NO: 11365 - DNA, 916 bp, Artificial sequence
  DNA replication origin
agcgagctctaagccaaaaactgcgctcaagttgagtgcagaagctccgcgctgaaccgtccccagaacagacaggcgagagaacgacggctggagctgaggggggttcgggggaaggcgcagcggccaggggctggcggagagcggagggcgggggcctgggcccagcggggttcgcgcagacaagccccgccccgggctccctcccttcctcacccggggcgcggggctggggcgcgccaggcggctgcggcgcgaacctgctcgcgcagcccggagcagctcggggcagccgtgcgtgaagccggaaccccgcgcggggagggggccgagctggcatctgcccgctcccttccaggaggcgagcggacgcgctgggccagagctggtcgggacagcccaggggtgggcggcacggactcgggggatcggggggaagggggcgtgttttccgggattcgggaccgagacggggggagggggaaactcggggggcgggcaggcagctgggaacccggggggaggcagacaacggggcgcacggagggagcgctccggggttggtgttccccagggtcatagaataacccacggggagaaagagactgcccagggactcgaggggacggggccaggggcggcttcttcaagagaccgagctggaggaagggacgggaagggagggagagatggtacttccacccgcccccccatcagcccagcccccggggcgtggcgccgctctggccctcccactccccccgctggcctggccagactcagcccccgcacacctcccctacctccgaccccctctcaggcatcgccggccccagccgtgtccggtggagggggagtgggcgcggggcccgcgcgtccctcaaacttcttgcgagttcaccatcacgcctcccgc

SEQ ID NO: 11366 - DNA, 1432 bp, Artificial sequence
  DNA replication origin
ggcagagaccctggctccctcagctctgcacttgtgctcccagcccagggctcagagctgagcagggcccagctcatgtgtggacaaatgaatgagtgctgcctttctttgttgagcagaacaacggctactgcaccgtgggagtcgagcccacctacctgtcctcccagaacggccagcccctgtggatcctcggggatgtcttcctcaggtcctactattccgtctacgacttgggcaacaacagagtaggctttgccactgccgcctagacttgctgcctcgacacgtgggctcccctcttcctcttgaccctgcaccctcctagggcattgtatctgtctttccactctggattcagccttctttttctggactctggactttctctaataataaatagttcttctttatgttggtcatcctgttgtttttggaagggagttttccctgagtggctacaaggtttcctggtgggtcactgtgattctaagagaaatgggacctaaggcatggcttgggatgggctctgtaaccctcagagcttaaagttcatacttttcccctggaaagggaagacagtggtagcgccatcatgggtgggtgggtggcgggccgggggagagtgttcctacttgagtcacagagaaatcgagcctatttgctggaaccaactcagcaagggatcttgtccctttggacttcatccctgtcctcctcaggagcctcttagcaaaagatccagaaaccaggagcaacattgtatgtggggaaggaggagagagaggaagaaaaggaggaggggaaggagaagaaaagcaggggaggggctgggggaggagacagggaaaaaggggcggggaagaggagaaagtagagaatgatgcctccgcaccctgtgaacttccaacaagggaaggtgacatgaaaggagctcagacaatttctgtccagcaacatgacagcaagctcaggctggtgagtggggcgtgaatgtagaacccataatgggggcaggctgccttctactgtcatattttaccctgtacttcgccaggctcaccctggccttgccccttatgatcggggcagggataaaagtgcaagatccaggtcctgcaccctactcctgaagagaagctggaatttgccacaggtggagtttctatggcaacagcacaccatctgggaccctctctttcttagactgccgaaggacagcaggctgcaggttccttttagggggtcggacaggctacagaatgtatcttagtgagccctggtttgggactttactgagaggagaaagaaaacttgcaaagaggtagaagtggatcagaggttccaagtcaagagcctctttccctgtaagccttagtccgctgagcgggactacaaatcccggcgtgcctagcgggactgcagcgagaac

SEQ ID NO: 11367 - DNA, 1011 bp, Artificial sequence
  DNA replication origin
tacatgcccgtaaggaatgaggaggtctgggtgcgcgctgtccccggatccccgcccccagccccggtgctccgccgcctgcccgcccgcccggggcttcctagggagggagtggagactgcggcgcggcgcggcgcggcgcggcgcggcctcggtgaagccgcctcgtccccgccccgccgcgccccgactcacatcgccccgcggcccgggcggcgccgggccccgctcccgggtcccgctgcagcagccgccgcccgcccggagctaaggcctccccgccccgccccgccccgcggccgcggggtcggaggtcaccggcagcaccaacgagacgctgcgggctggcggacccgagcgggggcgaccggcacgcagcctagaaggtccctttggaggactttgcagtcgggagcagtgagcatgcgcagacgccagagggcgctcctggccaggggctgagcaagcccggaggggacagggcggagcctgcggcggaggcggggcgcggaggcggggctgaggacaccaaagttgggggtggtccggggagcggaaaggggacggagggttgggcgagaaacgaagggaaggggagagggtctgaagggacctgaaaggagaagggcaagacgatggaacctggaagagggttgaggggaggggaaggggccagggggaccactggggacaagggggagagaactgaagggaaacacgcggaggagcggggctgggagaccacagggagagtttggggagacctgggaactgcggagagacagggctgcgggcccggcgaggcgtttccattcagcgaatggttgaaaacccagcgtaaacgcggctcccggcgtctgctggatgcctgccgggcgcagtccgagccagagagcccttgcacctgcatggcagaggccatggagcccgcacatttccaccctgagatcccataaatgtggttttgttttccttttttttttcctccccccaatctgcagctccaggccc

SEQ ID NO: 11368 - DNA, 1456 bp, Artificial sequence
  DNA replication origin
aacctggaagagggttgaggggaggggaaggggccagggggaccactggggacaagggggagagaactgaagggaaacacgcggaggagcggggctgggagaccacagggagagtttggggagacctgggaactgcggagagacagggctgcgggcccggcgaggcgtttccattcagcgaatggttgaaaacccagcgtaaacgcggctcccggcgtctgctggatgcctgccgggcgcagtccgagccagagagcccttgcacctgcatggcagaggccatggagcccgcacatttccaccctgagatcccataaatgtggttttgttttccttttttttttcctccccccaatctgcagctccaggcccctccctgagccgcccctctccaccagccggggaggggcgggcgggggccgctggggcgtgggagaggaagggccgcgctattagggcgggcgggggcggacgggggcgggcgctgaagccttggggtggggaccgggtgaggggcctgacggcagagtcggtccagaactgcccggacagcgacgcacagcgagggtgagaccccagcggagtcctggtcccctcccctaaaatcccagcagccagaccgggaaccccagcggactcgggaaacaccgcgtcccagccccggaggcgggcccgccaagttccagaaaaactctggggatctatcgagagggcagttggcgggactgggcactccccttccttctccctcccactgtccccagaaatcttcccatccctccacctccccaagccctaagtcctctcgggctctgcccttcagggcagcgggtgttggggatgtccagctcctgagccctcttgcacggaggctctgcacggaggcaagacaaggggttcagctctgtcccttatctgaggtgggagggggaagggaattatggaaggaatccagctggcctgttagtaagggtgttccagtgctaggtggaggtggagtttggctgcctttggggagattggaagggtgaggaatagaggcctgatttctgagtgttgtttctgtgttggacaattctatgcaaactagagccaaaatggaagagggtgcaagtcccctcctggggccccagacgccccctcctttcttgctgcctggagcaggggcagtgctgttagtggctactcctggtgtgaacagcccatcctggccaccttccacaggaaacctgacctgaaggacagaagaggaaggaagcaggtgggtgtgaagccaggaaggagggaagggtggcacaggacatttgaagtgggagtggaggggcggtgctgaggagggttcagtgctgggaagcaatattaactgttacagtccaaaccctcacctcaaccccagtacgaatccctggcccagtcttagaggccagggatttgatgatgaccctcctgtgcccag

SEQ ID NO: 11369 - DNA, 1058 bp, Artificial sequence
  DNA replication origin
gggccgtgcgcgccgccgccgccgccgagagtcctcgccagggtcccccgcctccaccagagggcgtccgcctcccgcgcctgggagggagtctggcgccgcaaccccgaccgcggcgcggggtgggttcgggcggcccttggaacgctccggccagggatgcgcggtgagagctgcgggccccgaggcttgggtctggggggtgcggtgggggcgctcctggagggacgggacggcgtgggaccggggcgagggtcccagcccgggagaacccccacagcccagcccaagctccctcccgctttgctctgcatcctctcccttaccaaggaatgcctgcccttccagtgccccggcccagctcgagcctgcatccgagtagcggttctcgaagcagctggggcagcaggggcttcccccaggcagggcataacgtcccccgcccagaggcccggcgcagtcctggcaacagaagtggttctcatgccagcgctgtccctccgcctcggtgcagcgccaggagaagatcagctgggagagggagagggagaggggaacgtttcattcattcattccctcattcattcatccagtaaccacgccttttacccagttaacgctaaagcacgtctgcacacattcccatttaattcactcagccacttttggacgcagggaggactgattggcttagccaggatcccagctagcaagtgggacaatccccagtgcgacctgggggtctggactcccaacccagggctccaggcttccttttatgctgacatcaagggaatttctagcatgatgaggcacagcactgggcactcggcatctactgagatgagcatgtgtccaagactccctgctctagagaaattcgatgagtccaggaacatttgagggactctgcagtgggggaggccagagagaagggcactgggtcctacatgcccagagctcaagtcagaacacagggaacttggtagtcccaggctggttcctacttctccccactccctgatactgggagaaactgtggcccaggagagtgtccc

SEQ ID NO: 11370 - DNA, 1239 bp, Artificial sequence
  DNA replication origin
gaagacgccacaatgctggtaatgttaaaaaacaaaaacaaaaaaccctgaggcgccagcctcgcaagaaaggggaaatacggatttaagggccagaaaaggaccaagttcctcgggctcggttacctccggaagtcattcctatcagtggcaaagcggtagacgccccgaagccaatctcccacgttgtccggtatttcgggagtttcattagccgagccagcagcgctcaccgggacagtgctggaagccatagtggaaagcttcgcatgggcctcggtggaggaaccgtatcggcgtcgccggtgaatgacgcacctccggtctggcacttccggctgctaccggccggcagtgggggcgctgttcgcttagtccgacatccggaagagggacggccctctgctgcgcctccacgaactctaggaggggaggagcgcggcccggttctacggtcccctgctcccggtcccacctccggctctccagccggtaactgtcacgcgtgctgtgatcatttaattggcttgggaggaggatggtggggacggggctgtcccagcctgtggaggtgggggtaggggctatctcagcaggggaagcgtagctttggggaatgggttttgccaagaaagtctccgccaaaagtcttagaacgcgcagtactgaagggggcgcactccaaacttgtcacctcgccgcctcttgcgggcgtgcgcctgactgcgtctcagtctaggattgttagggggaggctagccttgttctcccgctttacagacccctttcctcccactcacatcccctctctgagctgcgccactagcacatggtgcagtgcgtcttagaggcgttgctgtcctctgcttggaggcttccgggggtcttccaggactggggaaggcgctcgcctaagaaaaatccttcaggttccgagtcagaggaggaggagcaggtggagaaaggggtgtccttgggatcacgaatagtctccaggcggcattgctcctgccctttgggtgcctccgctttgtccccaggtcggttctcctgctggggactggatccaggcagccccctctgagtttgcaggctggaaccgccggcagcagcgaggagtgttcgggagagggttgcagagttcaccgaggtttggtcccttccttcagttcggtcgagtccagtctcccctgttccgggccgggtcggaaacgctggtctcagagccgcggagctgga

SEQ ID NO: 11371 - DNA, 885 bp, Artificial sequence
  DNA replication origin
gagaacaaggctagcctccccctaacaatcctagactgagacgcagtcaggcgcacgcccgcaagaggcggcgaggtgacaagtttggagtgcgcccccttcagtactgcgcgttctaagacttttggcggagactttcttggcaaaacccattccccaaagctacgcttcccctgctgagatagcccctacccccacctccacaggctgggacagccccgtccccaccatcctcctcccaagccaattaaatgatcacagcacgcgtgacagttaccggctggagagccggaggtgggaccgggagcaggggaccgtagaaccgggccgcgctcctcccctcctagagttcgtggaggcgcagcagagggccgtccctcttccggatgtcggactaagcgaacagcgcccccactgccggccggtagcagccggaagtgccagaccggaggtgcgtcattcaccggcgacgccgatacggttcctccaccgaggcccatgcgaagctttccactatggcttccagcactgtcccggtgagcgctgctggctcggctaatgaaactcccgaaataccggacaacgtgggagattggcttcggggcgtctaccgctttgccactgataggaatgacttccggaggtaaccgagcccgaggaacttggtccttttctggcccttaaatccgtatttcccctttcttgcgaggctggcgcctcagggttttttgtttttgttttttaacattaccagcattgtggcgtcttcgtagctctggctgtgcctcactgagatccctggccaggagagttcccgtgtggcaaaagcgatctttctgtcatgtggctgtatctgtaatgtcaccctgatcaagggaagaagtg

SEQ ID NO: 11372 - DNA, 1265 bp, Artificial sequence
  DNA replication origin
tgataacccagagggggacctgaagctgctaagaagctccctcctggcggtccggggccagaaacaggacacgccggtgagacgtgggcggacgctgcggtccatggcttcgggtgaggacgtggtcctgccgcagcgcgctcctcagggacagccgcagatgctcacggctctgtggtaccggcgtcagcgcctgctggccaggacgctgcggctgtggttcgagaagagctcccggggccaggcgaagctggagcagcggcggcaggaggaggccctggagcgcaagaaggaggaggcgcggaggcggcggcgcgaggtgaaacggcggctgctggaggagctggccagcacccctccgcgcaagagtgcacggctgctcctgcacacgccccgcgacgcgggcccggctgcctcgcgccccgccgccctccctacctcacgcagagtgcccgccgccacactcaagctgcgtcgccagccggccatggccccaggcgtcacgggcctgcgcaacctgggcaacacctgctacatgaactccatcctccaggtgctcagccacctccagaagttccgagaatgtttcctcaaccttgacccttccaaaacggaacatctgtttcccaaagccaccaacgggaagactcagctttctggcaagccaaccaacagctcggccacggagctgtccttgagaaatgacagggccgaggcatgcgagcgggagggcttctgctggaacggcagggcctccattagtcggagtctggagctcatccagaacaaggagccgagttcaaagcacatttccctctgccgtgaactgcacaccctcttccgagtcatgtggtccgggaagtgggccctagtgtcgcccttcgccatgctccactcagtgtggagcctgatccctgccttccgcggctacgaccaacaggacgcgcaggaatttctctgcgagctgctgcacaaggtgcagcaggaactcgagtctgagggcaccacacgccggatcctcatccccttctcccagaggaagctcaccaaacaggtcttaaaggtggtgaataccatatttcatgggcagctgctcagtcaggtatgtgtgtgcctaccatgacaatgagaggcttgtatgttagcttgggcttcctgtgagtgccttccccgggttattgggctaataagagtagcccacatttgctgtgattatgcaatttggagggtggccattatacctttcattctgctgtacattatga

SEQ ID NO: 11373 - DNA, 2327 bp, Artificial sequence
  DNA replication origin
cgcctgcggcgcgaaccctcggaacgggtgccggtgccggggtcgcggcccagcgctgcgccgttggcgcaatgcagggcctgaggggcggggctccagcgggcgggccaatagacgggcagggggcggggccgtgttcggttgtctcgcgccctggtgacagctcgcgcgtgctgatgatggcggtaaatagagggggccgggggaggggacggaggaggtggggaggcagcaaagtgggtagctccagggggtagggggaacgggggccggggaggccgcgacggccagggagcccattctaagactcggaggcggggataggagtctccggctcactagccctcccctttaaagaagcaaaatcctcacacaccgggtgaggggcgacaaaggcagcgcgcgcctcgcgggcgggaggagcggcggcagggggcgggaccgcggcgccggcgggctgggggcgcccggggcgggggcggcgggaggcgagagccgggagtcggggcgcgcgggcgccttattttggcggggtgggcgacggctgggttggggcaaaagcgttgaagggagagggaaaggaaggcttggaggcgatgaggggaaccgggttgagaatgagatgaggaggattaaggggagaaagggttagaagccagggagaggaggagtgagaaaaagccagccaaggagataggaaggaggcaaaagccagggtgggcgttaaggaagccgggcagggaatgaggttagggctggggaaagggatcctggggttaggtgtaagagcaggggtttgaaggggaaatcttcgtagcgggtggtgttggggtgaggggtaccggggtaagtgttggaagtggaagacaaggaggggcagagctggggtaatagttgggagtaggaaagagagagtgattaagagccagacgtgacgagggtgtgaactagtgcggagcgagatgagctgaaggactgggaccaacggtgtggtgggaactgctggcgaggttctgagaaaggaatgggttagtgggtgggcgatggatgtaaattctgtaaagtgagggagggcaaatgagacctggactggaaccaggtggagtcaggaataagagtgtggtggaagggcgaaaggaaacagataagagatgggtgtctgtaggacgattctgggaccagaagagctgaaaggagactagagttagggtgtaagaagtgatggccatctgggacaaggataactgggtaattacgttaattgaagaggttcagcaagatccaaggtgaaaacagtgaggtaaagagacagggctaaaagcaaatggtgagaggagcaggaagagatgggccccagaatttaaaggatgagatggggagtaagggaagagagggggctaagagaagctgggggagtcctgatggatgtagaactggggtagactgcaggggggtgggaatcgaatgtgcgtgttatggggagttgctccagaaggtctgcaagggtcagggcagaaatgctgtagtgaaagatcaagtgtaagagagcctttggtgcagaagacgaggaaccatggtgagtgaaaggggacctagagacaggggtaaagactaaaaagtaagggcagaggtggggggtgcaggaaaggaattctttgttgaggagagaactgtgtgttgaaactgtgaatccttttgtccctaaaagtaggaaattccagaaacctctttctctcaagaaatcttgaatctgcttccacccttcattgcttttgatttgactttcctgtccactttgaagaaatgagactcattttgatttgatttttttcttgtatggatgataaagtataaactctgggtgttgaaaacctctgcatttcactagtgttgtgataattcggggaaagggtgtgcttatttagggtgtactcgtgtgatgtgatagttttagtgttgtaggagtgttgcacctgacaagtgctgggctgtgttttatggacagcattttcattttcaatggagaacgcactgttgttgggatagagaaagatgagaatctgtttcttttgattaatcaaccagatttctgcttattgttttcagttgctggagaatgttaagaaatcatttcagagaaaggcagataaccaaccaaggaagtttactgggggagagattaaatcagagctgagggctttgagttcctgagctgcctttagctttgtgcgggacgtttcatgctgtagttggtaactcacccatttaacaaaatggcataaagaaagggagaattgtagagtagtggaggattttagagtagcaga

SEQ ID NO: 11374 - DNA, 1513 bp, Artificial sequence
  DNA replication origin
cgcctggaggagcgctacgtaccccgcgcctcctacttccagtgcgtgcagcgggagatcaagccgcacatgcggaagatgctggcttactggatgctggaggtaccgcccggacgcgtccccctcccccaccgctcccgggtctggacacaccggggccgccctgtcgggacatcccggtccccacagcaatctgcaggatgctccgaggctaagactcccggggcctggcctttcactagggcacccacgccagctgcctcccttgctttcccgagccctaatcggctcctcccgacagtgactgccagtcacttggcaccctaactgtgcctctcttcgggccgagcaaacgggaccaaggacactctctccccttcggcttctcacagcgtctcccgcttccctccgcctcccggccttctccggagagcgcgcctggaaaaccctgggctcggccgcccccgcccgggagccggttcctgtgtctttcgcggggttctggcggggaaggcgatgggggtggcgcgcgccctgttccggccgacagggaaatgaaaagtgcaggaggcagcggcaggagcctcctcccttcccctcgggtgtgtgcagtggtggcggtgatgggggtgaggtcccagctctctggctaccatgggtgacccttgcgtcccacttcccctcgctgtgggggaggggagtctccgtttggaatcctccgtgagcaagggctccttggctttaccactcccccgtcaaggggagaggggaggaggccgcgcagaggaagtggggggcgtcaccttggggagggcgcatcctcctcctttattggtccttgtctctctaagtagcttaccctctctgccgtttttgctccctatcccacctcacttcagcgctcccacccccccgctgctgtgttccccacgctccagacccagcagtgactgtgcgccctcccccaggtatgtgaggagcagcgctgtgaggaggaagtcttccccctggccatgaactacctggatcgctacctgtcttgcgtccccacccgaaaggcgcagttgcagctcctgggtgcggtctgcatgctgctggcctccaagctgcgcgagaccacgcccctgaccatcgaaaaactgtgcatctacaccgaccacgctgtctctccccgccagttgcgggtgcgtgtgtaactccccccacccccgacacgtattgtctccccactttccaggaaaaggaaagcttgagatatcagaggctttctgccccctggagaggaagcaaggggatcaggacctttgggaaaggaattggggtggaacaaacgatggggcattgtggtgtgatggttagtatcactcccgcccaggcttgagctgcaggcaggcattaaaccccctcctcctgacctccaggggatgccactccttcctggtctttcccccagatagcaacaagtcaaattgcatgtctacactcactagtactttgcctctgggtttacgca

SEQ ID NO: 11375 - DNA, 1190 bp, Artificial sequence
  DNA replication origin
tgcacgcactggaagtaggaggcgcggggtacgtagcgctcctccaggcggagcaggctctgcaggacacgctggtcccccagcagccgcgggtccggcccggcccggggcgcgtgccgggtgccttcgcaacacagcagctccatactcgggcagcgaacaggcagggcgggagtgcgggctcgcgagtcccaaggcaggcgacgggccggagagcgcggggcgcgggtctggcgctggcgctggcactgcgcggcggatccccagcccgcccgccgcccgcgcgcgcgcgccgcttccctgacaggcgccccgcccctcgcgacgatgtagcaaccgtggaatgctcggacgtcgcaacgctccgaggggcggggctgcggcgccccggacggaaagggttggctgagcgctctcccctccctcccgcggccccattgggccgctgagcgcaagccggccggcttccgggcactccaggccctctggaccaccgggtgcagagaactttctaggaggtgggcctcctacccacccacgggccctcccattttgcttctcggactctagtcacccaggaaacaatttttctccaaaggtcattcattcacttattcattcgtcaaaccctacttcaccggctgcttgctctaaggaatgcgataaataatgtcagagctagttcttagtgaacgctgctcgaaagcctcacgatgtaatgactcactacatcttcacgaaaactcggaaaccgaggcaactgtcattcagttggtccgtggcagagctaggattgggaagctggccttcttgctgcagattctgtgttctacaccattgctagttaaactgtgatcccagacctgtcccgtgcgtggtcatcgcctgggagctggttagaaatgcagactctcaggcccacccctaacctgaatcagaatctgcattttaactagatttctgtgcactttaaagtatgagagctttagtctaagtcagcatataacagaacggaaaggccatggagtcatggcctcaccttgttaagttgcttgcctaggtttggacaagcccctaaagtcggccttagtttctgtttggagaaactgtggacggagaaactagattctcattgaatcagtttcttgcacagactctgtgagatctaccggttgcatttcttccacctc

SEQ ID NO: 11376 - DNA, 1630 bp, Artificial sequence
  DNA replication origin
aagaaatcggccgggcgcggtggctctcgcctgtaatcccagcactttgagaggccgaggcgggtggatcacctcaggtcaggagttcgagaccagcctgaccaacatggtgaaaccccgtgtctactaaaaatacacaaaattagccgggcgtggcggcgtgcgcctgtagtcctagctactcgggaggctgaggcaggagaatagcttgaatccgggaggcggaggttgcagtgagccgagatcgcgccactgcactccagcctgggcgacagagggagactccatctcaaaaaaaagaaaaagaaaaagaagtcgctcctcatgatgttgtttacttcctggatagcacgtggaggagttgccaacgccgggaggcagcggtccgggaacccgtgctgccccggccccgccgcccacacctgagcctccgtggcgccccgcccccgcacctatgccgcgtggggcgggggctgcgggcgggggtgcgcggcgccggatgagcctcctggcctcgccgagggtgtacagggggtgggagagtcaggccggggaccgaaacttggctgagcagagcaccagcccctttgtctcctccgccccctcttccccacttcctgcccagctctggatcggcggcgcggcgcggactttgtaaacacttcgccactgcaggggtggagactggctctgttcggatgccggccgggggggagaggtgcaatcctctcctcgcggctggtggttgcgaccacccccactccccaaaggcaggctccggaggcggcgggacagagcgcctgcgaccccagtcggtgctccggggaggtcacctgacgaggaggtaggcttgggtgctggagaaaccggggtagatgggatgtcagctcaggctggagaccatgcgttggggatcggtgctgggtgggtcaatggggtcgccgcatcctcatcacttcctagttggcaccgaaagcttggctcactttcccactgagtgaggtgttctgcacggaattgaagggcagagaaacccccaaaggccctgagccctctgtatgtacacacatcggcacaaccccctccagctgatctggaagccccgtggctttaccgggctgttggtcttctcatgcctcaaagatggggtggaaggccagtaggagggcagaccagtgtggatggggagtctgtgagtgctctggcaagtgcaccgggatgaaactggagggagggacccctcagtggtgtctgattgatacatagatgatgatcttagcttcttctgtgtctcttgaagtgccaacaagaggaataactgaataaattggttgctgttactaagggagcattaagttattcatttgcattgattgaacacctactatgtgcctggcattatatggaatgctgagggtgcaatgatgttattcatccacagctaatatggatcacaaaacaatagacatagatgccaagtacactggctggggtggctgggaaggcttcagagagaaaaggacatttgagttgggttcagaaggatgaaaagcatagaagtctttgggggcacttattccacagaactggattgaaccccagctgtggtgttggacactggaatataggg

SEQ ID NO: 11377 - DNA, 2314 bp, Artificial sequence
  DNA replication origin
aatgaccctgagcccccggccccggccctccagtatctgggccgccagagctcccctccccggaacaactactcagacttgaggcagctcccgaacgctggccccggggcgcccccggctctcggcttctcgcgctttcccgcgggcgcgcgctacgccggggctgggggcctggagcgcttctcgggagggggccgctcgctcataaagaagcgcctgtacgtcggggagccgcaccgaggcccagggctaccccacggtggcaccggccgcagcctgagctctcccaactgcttcgggccgcagcccggaggccccgagatgcggcgcgtgaactcggcgggtcgcgcgccccccggaggcctgcacgcgccgaggctgtccctggagggcgccgcccggggcgccgcggaggccaagcacaaagcgcccggcagcgccgactacggcttcgccccagctgccggcaggtgagctgcgggcccggctggtgcgggaagccaggaggggtggaaagccaggcgagggccaaggagtcccggccatccgtcaagagaaaacatttggttttctcccttcggccttgcaggtagaacgcgggagggaggcccacttaccgggagagggcgctgttggcgccttcctgacctccctcctgacctcccttctctttccccaccagctcctctcgtctgtctctctcctgcccgctagatcccagaggtcaggctaagtgtggggcggggagagatctgagtggcccttgggtggagggatttcccaacacagagttggatcccgacacaggccaggagtgaaagagttctgagtgaaaggctgttaggcatgttctccggccagcagggcccagaccagaatgggagccctgtttgtgatgtctgcggtccctccctggggtcgataagcccagggcttgtcggggcaaatacagaagtatgagcagcatcttttcctctcggtccctcggggagatgagagacgtgttggctaaccagctgcagatattcacctcacatctcttgctctcccccaggtctccctacaccaccacccgctatggaagccccatcaacacgttcaccgtgaggcctgggacccgccatcccatctcctatgtctgctcaggggcccatcggaaagccacctcctgagccaggggttctcttagctctactccaacaaactgtgtctttaaggatctgggcacttgtttcttgtggggggtgggaggtacacagcaggtgttgggcgacctgactcagacacagaggagtctttgatccccaaagaccaacgatgagaagcagtggcccaggaagaccgagagtgggcttctgtttcccaaagcgctggtgtgactgtggactgtttacacgtggggggtgggaggggaaggagggtagagagaaggaaccattaaggacctgggcgctgagtttctgctctctggtactatctgctttagcaagagttatttaaaacagttttacaagcacggcctactgagcaggttctgaaagcaaggggtggggcactgactgaactggaacccatcgagatagctgtgattgcctgtcaggcccttgcaaagggctgaggcccagctctgtctggtgggtgtgcagggcaccgaagggagatctttagcctccatcacctgccatcccaagcaagagtggacacctggggttcctagccgcattgaggtgggaccaggaatgtgtatgtataacatgtggagaaggaccatgtgtggggtggggagtgaagctcccacatgtggaatggaagccctttgcattggccaagggcagaggtgggagattgatggttcatttttccttggccctagcccttagctacagggaggcctagagagaggacacttggcaagtttaggatgggaaacaaggttaagcctggctttgctattcagacctgtgcagccctgattttggggactgggcccaaggagccatgagtcttaggcttgacactaggggccttacatggccaggtctcatatgggatttggagaaggcatttttcctaacactgatactacaagtcaccaatactcttgatgccttaagatgctagaaagccttggagagtggaggcagcagagatgggaatggaggtctgaagaagcttgctgctgttggggaatgtgtttgggaaagtcaagagtggtaggattggttggctgggcgcggtggctcacacctgtaatcccagcactttgggaggccgaggccggtggatcacttgaggtcagaagttcgagaccagc

SEQ ID NO: 11378 - DNA, 1056 bp, Artificial sequence
  DNA replication origin
gccgaagggagaaaaccaaatgttttctcttgacggatggccgggactccttggccctcgcctggctttccacccctcctggcttcccgcaccagccgggcccgcagctcacctgccggcagctggggcgaagccgtagtcggcgctgccgggcgctttgtgcttggcctccgcggcgccccgggcggcgccctccagggacagcctcggcgcgtgcaggcctccggggggcgcgcgacccgccgagttcacgcgccgcatctcggggcctccgggctgcggcccgaagcagttgggagagctcaggctgcggccggtgccaccgtggggtagccctgggcctcggtgcggctccccgacgtacaggcgcttctttatgagcgagcggccccctcccgagaagcgctccaggcccccagccccggcgtagcgcgcgcccgcgggaaagcgcgagaagccgagagccgggggcgccccggggccagcgttcgggagctgcctcaagtctgagtagttgttccggggaggggagctctggcggcccagatactggagggccggggccgggggctcagggtcattgctgaactctggcggcggtgggatgacctcgaagttgaactcctcctcctcctcctccctcttgttcgaaggagaaggtggggaggagaaggacttgggcagcgggtggccctgggggaggttggagggagctactctttcccaggccacaggggcctggggctctggctttgtccagttgtgcctgcggctcagctctgtgccctctgcgtctcttcccagccgcggcccccacttattgggtatttcggtcgtcagcggggagtccttctcagcctccttgggtaacttgggcaccacagtgaaggagttgggcgtgccctggctgtggaagatgctgtcagagctggcctcggcttggtggctgtggtcacggagacttcctggcagagaggaccgacccagggcagcccctacagaccttcccttctgagccctctgcctggccgccaggagcagggccatcggcgagcc

SEQ ID NO: 11379 - DNA, 914 bp, Artificial sequence
  DNA replication origin
gcgtgccctggctgtggaagatgctgtcagagctggcctcggcttggtggctgtggtcacggagacttcctggcagagaggaccgacccagggcagcccctacagaccttcccttctgagccctctgcctggccgccaggagcagggccatcggcgagccccgctccaccacctccccagtcaccgggtgcctgaggagttcatcagtgggctgggccgaggcaggaggcttggctggcagccctgggggctccttcacctccacgggctcccctggccctgcagcccctcctctggccagggtgggcatcaccacagcaacctcacggctgaggctgctctggtggcagtggggcttgtagagacatggcacctctcctccaccaggagatgtctttggtgggaaggctgcagatgagcgggctccctgtgtgggcagcctagtggcctctgagggggacccctctccccttgcctgggagggagtggaaacttcttgagatgctggcttctctggctggccagctgggcctgagtccttctctgccatcagttgggatgtggtggtgggcagagttgtggctgtagatgctatggcagggccagatgtggccttgagtggtgtggttggcccagatgtggccttgagtggtgtggctggcccaagtgtggccttgggtggtgtggctggccaaagtgtagccttgggtggtatggctggctcaggtgtggccttgggtggtatggctggtcccaacatagccttgggctggagtgatgtagttggcagcagggtggtggattgaggtggcagattcttggccacaggcttggagagtttgtcatcatcagccccgttttcacaaattcttcccccttctagccgaggcttagggggcagagatcctatgctg

SEQ ID NO: 11380 - DNA, 2218 bp, Artificial sequence
  DNA replication origin
gggcagggtcaggctgggggcagcctctgtctctgtcaggctgctgccgccaagactcttttcaggaacacctgggggagtgtcctttgctggcaggctcaggagagtctccttctcaggcaggcgggggcccttcttgccctccttgctctgaggggccactgttgggcctggcctgtgactgaggaatcggtcctctctcctggagccacagagataggctgccagctcgttccgcagcttttccatctggctggggtccctccagtccacaggtgctgaagacgctgtgttctctgggctgggggggttgggtttgggtttgagagcaggagagctggatttaggggtttttgtaaacccagcaggtggatgggctgccttctgagcacagggcaaaggaggtgcagctgggggaagtgggggtgctgggggagggagggggggtgcaggagggggcaggggaggggctggaggcggagtcccagctcgttcatctgcttgggactgggactggccaagccttgggctggctggtgctgtggccttgagctccccagggcagtctggctcgggggccctgtctgggtagacctgggaggcggggcggatgtggaagctgggaggcagtgggagtcggctgggagccttcttggtggccccctcttcctttcggggagcctcttgtgcttcctgaactgggatggacgaagtcctgactggggttgggggaggcactttgaaagaacgggggaaggtgagatggggctctgggttaggtcccagggcgctcccctttggctcagcagggcttctcggggggctggctctggtggcctctgcctgcctgccattcagtgctacatctgatttccacttggtgacacccccagggggaaagagacgagtccccactgtgtgaggagatgctggagctgggggtgctggggctggcacaggaggcggtgggggggctagaaaggccaagggtggggcagggggaatgaagtcaggaggggtgggtatggatggggaggaaagagtgtgtggtggggatagggcctccaatactgggggtggaggtggggccatgctgggcgggggtgggggttccagcagcaggggaggtggtgggggtgctgtggaaggtggagatggcagtggcgacccccctggaggttctgaaatgtcctgagggggccctggggctgggcctgggggaggtggggggatgagtagatcctggccatattgtccaggcctcaggtcacccacagagctgtacagtcggaggttgccattgactagtgagctggtacctgaaagaaggagaggcaaagatggggggcaggaacaaggcagactagccctgccaatttctgtttacccagggcaggggcaggggtgggcacccaagagaatgactggatcattttctcctgaacaccaagagagggagcagccctgtgtccagtctcctgagctgtcctgggggtgtccccccttctttctagggagcgtctcctgcctgtccctggcacagcctttgaagcctgtatggaattacctccatttgcctccccagagtcaccctctaacctgtgccgggactcccttgccccctgagatggggggtggggacaagagggccagggcactgattcctctggctgcctcctggctgcgtcacaggttggcagcagctgtctttcctgccccgcagacacaggtcctgtcggggtgtccctctcccactatgttcagtccctgggtgtcactgtccccaggagacaagagtcgcctaaccaagctcacactctggtatactgtccctttactcaactctcttcagttatcccctttgagtgcgccatctgtttcttgctgggaccttgaccttggccaagccagaaagtccagggttcaaatcccagctctaccacttattagatgagtgaccttgaacacactaattaaccttgctgagcctcagtttcctcatctgtcaaaggggcatgatgtcagtgctcgcttcttacagctgttgtgaggattaaatgagagaatccatgcaaatacacagaaagggcttgtcatggtgccaggcctccagtaggcatttaataaaatggaaccactttgattcctaccatctgtgcttaacttttcagactgtgtgagacagggaaggtgggaaagagataggaagtcatggggc

SEQ ID NO: 11381 - DNA, 1270 bp, Artificial sequence
  DNA replication origin
cggcggggcggggcccggccaagcggctgccttttacctggccaggtagctcgcatttcccggcaagcggcggcgcccgcagcacctgttgcccggtgcgcgggcggggaggacggcgggggacatggcctggtagagtcccctggggagaccgtgctgagttcagtccggggcagggcagggcgagggagggaaggtccttccctggcgcccgcgcgggctgcggcagcatgaaaaagaagcagacggtgcagggcaccttcagcaaactcttcgggaagaagcacaccacgacccccagcacctccctctacgccaccaatccgccctggatcttcacccaggaggccccggaggaggggaccgggggcttcggtgagtactccggggacggagggcgctggggcggggacggagggcgctggggcagggccggcggtgctgtctcctggaggcgcggaggggagggacacgttggaacctgcggactggccgagagcagccgccgggcaggggaggaggcaccgcacaggggtgtctgggaagggctgtgcggtgagagaggtgtggggaacgaggggaccccccccaccaccacggggaggtgggagaactttgccgcccccacctctgaccccaggccttattcggaggtgtttaattccccctcttggcgaatcctatgcttgtgttactgttagcggaaaggcttccggaggtttgcgatatctcccccgacccccaccgctacacccccattctggctgaagcaaaagtgttcctgaagaactgggggctaaggggctaagaactcctccctcaccctttgcactccctgtttcccaagcccacgtggcagagaggggcctgctatctgggtgctcacaaacttggctctggctaggtgaggcccaggaaaaaacaacaggcgcagctgctaccaggttaccagcctgtttgtgacaccaagtcacttattggggccacaggctcctgccagttcaacctgggacctgggctgtctctgggctaagaccgaggagccagaaatgggacagtggaggccaaggaaccctctccctgactgccagctgccgctgaccctggaatcagactggtgtgtctctgcaggcctctaaaagcaccgccttggctcatccccaggctctggctgtgggtcatcttatcattgcatcgttttgcaatttgtattctctataactaggggaagccagcggctggagacagaaatccatttcttgtgtatgac

SEQ ID NO: 11382 - DNA, 1351 bp, Artificial sequence
  DNA replication origin
tcaccatgttggccaggctggtctcaaactcctgacctcaagtgatccacccacctcagcctcccaaaatgctggaattataggcgtgagccaccttgccagccaagtggctccatttgtttgcaacttctactatataactattattattattatatgtatattttttagatggagtctttctctgtcacccaggctggagtgcagtggcgcaatctcggctcactgcaacctccacttcccagattcaagtgattcttctgtctaagcctcccgagtagctgggattacaggtgcccaccaccatgcccggctaatttttgtatttttagtagagatggggttttaccatgttggtcattctggtcttgaactccggacctcaggtgatccaccggccttggcttcccaaagtgctgggattacaggcatgagccaccgcacccggcctgtaactaatattcttgagagccactgtgtgccacacgctgggctgtgaaagagccagaaaaattaaagacatggttcttgagtccaggttgttatatagtctgtggagacaggcagtgacctgtggagagctgggcagtggggaggtaactgaaaggaaggaaatgaaggggggaaagtgcagagcaatttgggggctgcaggatctggggagggtaggcaggagacctcttcaggggctgaggatgggggagctcggaattatccagtgtgtgggaggtcacggcaaggttggccaaggtgtggaaggcttaaaaaggccacctgggtggccgggcgcggtggctcacgcctataatgccagcactttgggaggccgaggtgggcagatcatgaggtcaggagttcgagaccagcctggcaaacatggtgaaaccctgtctctactaaaaatacaaaaattagccgggtatggtggcaggcgcctgtaatcccagctactcgggatgctgaggcaggagaatcgcttgaacccgggaggtagaagttgcagtgagccgagatcacgccattgcactccagcctggaggacaagagtgagactttgtctcaaaaaaaaaaaaaaaaaagaaagaaagaaagaaaaagccagctggggctgggtgcggtggctcacacctgtaatcccagcactttgggaggttgaggcgggtggataacgaggccaagagatcgagaccatcctgaccatcctggccaacatggtaaaaccctgtctctactaaaattacaaaaagctgggcatggtagcgtgtgcctgtagtcctagctacttgggaggctgaggcaggaggattgcttgaacctgggaagtggaggttttgcagtgagccgagatcac

SEQ ID NO: 11383 - DNA, 1297 bp, Artificial sequence
  DNA replication origin
ctggagattcagacacctgacaagccgcaagcttgaggtctgagactgcaggatagttggcataagacgtgtaggcgcatcctgggagcgaggtctctcctcctgcccccagacccaggtctccccttcttctacatgaccacctctcctcccccttgctcaggccagctgtctctgaacgagtttgttgaaggtgcccgtcgggacaagtgggtgatgaagatgctgcagatggacatgaatcccagcagctggctcgctcagcagagacggaaaagtgccatgttctgaggagtctggggcccctccacgactccaggctcacccaggtttccagggtagtaggagggtccctggctcagcctgctcatgcccactcttcccctggtgttgacttcctggcaccccctgtgcagggctgagtggggatggggaagggctgctgggtttgaagtggccaacagggcatagtccattttggaggagtccctgggatggtgaagggaattcagttacttttcctgttcagccgctcctgggaggactgtgccttggctgggtggttgtggggctcccacagtttctgggtgttctcagttggaagcaagagccaactgaggggtgagggtcccacagaccaaatcagaaatgagaacacaaagactggtaggaggcaggggtgggagggtgttgagactgaagaaaaggcaggagttgccgggcacggtggctcacgcctgtaatcccagcactttgggaggccgaggcgggcagatcacgaggtcaggagatcgagaccatcctggctaacacggggtgaaaccccgtctctactaaaaatacaaaaaatcagccgggtgaggtggcgggcgcctgtagtcccagctactcaggaggctgaggcaagagaatggcgtgaaccccagggggccgagcctacagtgagccgagattgcgccactgcactccagcctggacgacagtgagactccgtctcaaaaaaaaaaaaagaaagaaaagaaaaggcaggagttttggggggcagggggcagcaataattctataacttccgggatgctgaggggcgttcatggggaggaccctggcctcctcctccccaaggcatcctcaccagtggtgtcaacaggaaaaatggcagcaaatacgctgcaggctgtggtctttctgcctttgaaagggtcagctgtacttaaagggactgtttcagctctgcctgggtgctgctctgggaccccctgctgccaacccaccactcccccaacaatcctctctttcc

SEQ ID NO: 11384 - DNA, 854 bp, Artificial sequence
  DNA replication origin
atgcctcctggattcccagcagctacctattcctaaggacaaatatgacccaacatgccactttgtggggagggggtaggtttgatattgccaaccacacaggtcacaaattccctaggggcagagagagagagagagagagagagagagagaggagagagagagagagagagagagagagagagagagagagagagagagagagagagagagagagagagagagagagagagagagagagagagagagagagagagagagagagagagagagagagagagagagagacagacagacggaaacccttcccagaggcaaattaagctgtttgagtgaagcacttaaaattggagaaaggagaacagtgagtgagaaaaacaaatctctttgctttcctgagattaggggtgggtggctctcagtggaactactttgggaactttaacgaattaggttctccagggtatttaagcagacaaaaatattaagcaactggtaaggctgcttgtcagaatggatgccagggctattgcctggaagcctgctgcgccagtggttacctctttggttgtggatttgggaggtctggagatcctggggaaggggccagggcctggggcaacagctgcttactttctgggatacaggacttccatatttcaataatggctatgattgtctcagtgactcccagctgaatgatcgtctctgtttaaacctgggaacactttcgggtctctcagaatctaacctaggccattagtttggcatttaatggggagcaggcagtgtgaacaagggtagggttcccaatgtggccacgggttcagccctgagagaccaagccgtatcca

SEQ ID NO: 11385 - DNA, 976 bp, Artificial sequence
  DNA replication origin
ttgaagtgtagtgggaagccattgaaagtttggagtgggactgggcacggtggctcacacctgtaatcctagcacttcgggaggccgaagcgggtggatagcctgaggtcaggagttccagaccagcctggccaaaatggtgaaacactgtctttactaaaaatacaaaaattaggctgcgtggtggcggatgcctgtgatcccagctacttgggaggctgaggcaggagaatcacttgagcccaggaggtgaaggttgcagtgagtggagatcgtgccactgcactccagcctgggtgacagagcgagacttcatctcaaaaacaacaacaacaaaacaaacaaacaaaagaaagtttggagtgggaagcgacagcccctaattcacgttttaagaagattgcattggtggagaagagagcagagaaaggcagagcacagtaaagaggcaggtggaggaggaggcgaaggaggtgcatggagaggagtgggtgggtgtgagatgctcattaggagtagaatgggcagggctgctgtggggtggggagaagcatctagaactccgaggtttctggcttgtgcagttgagtagatggtggtgctgtttcctgagatgaagaaagattgggagagggaggcgggcagaatcaagatattttagttggggcaccactaagtttgaggtgcctattagactcaaagtggagatgtcaagtagggtaatctgatctaccacctagcacgagataaaaatgtgggagccatcggcatggagagaacatttaaatgcaggagagtggacagaatgccctaaggagcccgtggagagagaagaacaggcagtgtgaaggaggtgtgtgctgtgtgtgtgtgtgtgtgtgtgtgtgtgtgtgtgtgtctgtgtgtgtagtgtttcctgaggctgataaggccagaaaaatcaccattggatttgtttcatcgttttttgtttttt

SEQ ID NO: 11386 - DNA, 1632 bp, Artificial sequence
  DNA replication origin
gccgcgaaggctgcgaacaatgcgccgggcggcccgcgcccgccgtagcgctgcgccccgggggaaaggggacgcgggcgggggccgaggcggacgaccagccggtcgcggcgctggacaccttacttcctgcttccccgcccgcggccagacccagctctgcggagggatatctcccctcctcggtccctctccctcccttccccctcccttcccccgccctccccctctttttgctcctgctccccccccccaccccgcctttctccttttgcaagaaaataatttgacagtcgatttgctgacaagggaggaatttgcatcctggatttaaaaaaaaaaaaaaggccgagaggagcttgggaacggttgctaggggtgggtaatgggtgaaaaaaggggggtaccggggagcggataaggagggttaagggagggggcgaggatggggagcaatgcaaaggtaaggccaggttaccgcggctcggccccgagtgggctgcgaccgggggaggggcgagagatacatatgtatttctgtctccccagcacacccccttccctctaagcgatggctgagaggcggtgcatgcagatggggagtaagtttcctgaaggggagggtggatgcacgcgcgcagcccggcgctgcaaatttccactggggagggagaacggctggatgcggagagtttggagttgcttgcggcggagggcaggaaggggagcagggctgggaaagggggctggcgggcgctatatctgggagtaagtttccagcatcaggagagcctgcacgcttgctcactagtaagtttctggccggggagggcgcatggggaggaggagagggaggggtgcatgtatatagaaggggggaggggggagcagatttcctgcggggaggctgaatgcatatggagagtagatttcctgaagggagggtggaggcgtagacggaccgagtaagtttcttgctggggtggtggaggaggtggtgggttggtgctttggaaacccaaagcttcctaccctgggtgggggagcacactcttgtcggggggacgaggggccaggttccctgctggggagaggggcttgcatctggggagtatgtttcctggcggagcgatatttgtttacaggctgagggcagtacagtaagtgagtagcgctgagagaaggcggctgacataaattaatattgaaattactccatcagctctgctcgccccccatctcaccccccaagcggatactggtcttctcgtcggattgcccatgcacttgttgcagaaacagccaaggtaggcaagaagcttattaagtttcatttttaaaaaattagtttggggatgctcctcgagaagacgggggtggggcgaagtggggagggaagagtggggagacagaaggagaagtctcccccccctttactttcactatgcaagcaggccttctcccttcttcccttcttccctctccgggctgcacagcatcccagcaaagggggagggatgaggtgggcgctataattggcaaccctggcttaaaggtagtgatggtgggcttgcatttgaggttgtgatgttataaaggcttcattctccagctaagaaaccgcaggactct

SEQ ID NO: 11387 - DNA, 1466 bp, Artificial sequence
  DNA replication origin
agggtgtagggggtcctttgaagatgacaaaagcgtccttggctgtgtagccgcaaatcccaaatccttccttctctgcagcttctggtttaggagctggaaagacaggctgtgaatttccacattgacctggggcaattaacttaactctccgaataggttccttatctgccccggggaggagttttagattaagagggtgtgtgtgtgtgctgggagggaggtggaggggctgagttttctgggtggtgcggttttcccaagtcccgttttgaggttttgtcctagccagctcccgctcaggtccctgggcggtgacggtggtcaagcttagcttggctgttcctcctccgcttggaaaaaggccgccactggggccaactccggccacagcgctgctgccaggagacctagggtaggtcttttcccctgaggtagagacctgggtgtaccctcaggaaggcatcttgaagttactgacagttgagtcaaatcttgaaggtccagcaggagttagtaagaagaggtggaaggggaaaggttaggcgccccctcctccaccccttgaacaaagaaagcttgacggggcttacaatatccgaggaagagctgggcgggtagagaggtctgtagaggcgaaatcacaacttggctttattctaagggcaatggaagagggttttgaaggctttaaaataatgtcattaggagttttagtcgcttgggaggaatgggtcggagggggacaggaagctatcgcagaaagcagcccacttggaagatgaccgaggactgaggaaagagggcgggggacatcgagcatctgaagcctttcccagtcgccgcaacactgtgcgctgtccctcggctttctttgcttatgtggaagggctccataaagggctgggcacgcgccaaacgctcattaagcgaaatagcccgggtcccctcctcttttcagggactctgtggtccacgtgccccagaattggtagggtaggcgggaggactttccactgctgaagatggagaaccgttacccctcaaaaaacacaaaaacctcgggtgcttttggcagcagtctcctccgctcatgacctcatgctttaagctcccatatagcctccctccgcccaatccacacccagcgcccgggtgggggtggggtgggggacactggcgaaggtctgggtagcgggaggtcattcttcttgcgcgacattttgggggaaggggcgcaatgatttcccccacggaaaaaaatggatggtgtaactttctgtcgtgcaaaaaatactgtcttgccctcgagacagatgcctcgaacccggctcgaggtggtctgtttagctgaactacctttggttcacgtttcctctgaccaggaaagaagcttggaaatgcaggggtctcaggccaggttccctgacacctgggccgaccactgccacgccttctcgggacct

SEQ ID NO: 11388 - DNA, 1212 bp, Artificial sequence
  DNA replication origin
aatttttcttagtacagaacaaaatgaaaagtctcccatgtctacttctttctacacagacacagcaaccatccgatttctcaatcttttccccacccttcccccttttctattccacaaaaccgccattgccatcatgacccgttctcaatgagccgctgggcacacctcccagacggggtggcggccgggcagaggggctcctcacttcccagtaggggcggccgggcagaggcacccctcacctcccggacggggtggctggccaggcggggggctgacccccccacctccctcccggacggggtggctggtcgggcagaggggctcctcacttcccagtaggggcggccgggcagaggcgcccctcacctcccggaaggggcggctggcctggcggggctgacccccacctccctcctggacggggtggctgccgggtggagacgctcctcacttcccagacggggtgtcagccgggcggaggggctcctcacttctcagacggggcggctgccgggtggaggggctcctcacttctcagatggggcggttgccaggcggagggtctcctcacttctcagacggggcggccgggcagagacgctcctcacctcccagacggggtcgcggccgggcagaggcgcttctcacatcccagatggggcggcggggctgaggcgcttcccacatctcagacgatgggcggccgggcagagacgctcctcacttcctagatgtgatggtggccgggaagaggcgctcctcacttcctaggtgggatggtggccgggcagagaggctcctcactttccagactgggcagccaggcagaggggctcctcacatcccagacgatgggcggccaggcagagacgctcctcacttcccagacggggtggcggccgggcagaggctgcaatctcggcactttgggaggccaaggcaggcggctgggaggtggaggttgtagtgagccgagatcacgccactgcactccagcctgggcaccattgagcactgagttcattaaaatgcttacattaagaaaaaagaaaggtctaggccgggcatggtggctcacgcctgggatcccagcactttgggaggctgaagtgggcatattgcttgagatcaggagttcgagaccagcctggccaacatagtgaaaccctgtgtctactaaaaatacaaaaatcagaagggtgtggt

SEQ ID NO: 11389 - DNA, 752 bp, Artificial sequence
  DNA replication origin
ggagcgtctctgcccggccgccccgtctgagaagtgaggagaccctccgcctggcaaccgccccatctgagaagtgaggagcccctccacccggcagccgccccgtctgagaagtgaggagcccctccgcccggctgacaccccgtctgggaagtgaggagcgtctccacccggcagccaccccgtccaggagggaggtgggggtcagccccgccaggccagccgccccttccgggaggtgaggggcgcctctgcccggccgcccctactgggaagtgaggagcccctctgcccgaccagccaccccgtccgggagggaggtgggggggtcagccccccgcctggccagccaccccgtccgggaggtgaggggtgcctctgcccggccgcccctactgggaagtgaggagcccctctgcccggccgccaccccgtctgggaggtgtgcccagcggctcattgagaacgggtcatgatggcaatggcggttttgtggaatagaaaagggggaagggtggggaaaagattgagaaatcggatggttgctgtgtctgtgtagaaagaagtagacatgggagacttttcattttgttctgtactaagaaaaattcttctgccttgggatcctgttgatctatgaccttacccccaaccctgtgctctctgaaacatgtgctgtgtccactcagggttaaatggattaagggcaaaaaaaaaaaaaaaaaaaaaaaaaaaaagcattttaatggcat

SEQ ID NO: 11390 - DNA, 889 bp, Artificial sequence
  DNA replication origin
ggaagatgaggatcaggatcatgcccatgaatagtcggggctgctgggccgtggctcgcacaccggcgtcccccaagatgtctatggcaaagccggctgccaggccgctcaggcccacgctcaggccggcgctagctggaggcagctcctgtagaggctgatgtcgtcattcggggagctggcgatgaggactgtcaccaccaggccatagatggcgatgatgccagccgtgaccaccgggatgatggacttcatgatcagctccggccgcatgacagacatggccgcgatgccggcaccggtcttgaccgtgccataggcagcgcgcggggcgctgaagaccatggcggccgaggctgccatgacggcgaaaaacgaagcatactcggggccgttcttggactcggacattgtctgcgggtggggagggggcaagctctgcggccgaggcggaggcgaagaccggggcgaggccgggccgggcgcgaaggcgagcacgcaggcggcggcgaagacgatcagcattaatggtatttctaaagaagaaaagtgaaccatccttggttccgctaacctcttctattatctctataatagatgtctcgcatctagactcacatccaacatggtccggaagcaggaaggagccctcccttctctgacagattaattactgcttcctttgcagtccacttttctctgcttgttcatcgccatatcttgccttgattcgtacttgaaaggtttggccagagacatttctgatgtgtctgttctttttctcttacttttctgggtaatttaacgtgctggggatgcgagcacgttaaatttccatccattgaagccattctatttagggccaccagggggcatccacagacttgct

SEQ ID NO: 11391 - DNA, 1059 bp, Artificial sequence
  DNA replication origin
ggctgatctcgaactcctgacctcatgcgatcctcccaccttggcctcccaaagtgctgggattacaggagtgggccaccacacctggccaagaaaaacggtataatttcgttattataatagcattaatggtcatttcttttttttccccccaaatccgagaactttattggacagagctccgtgcagggccaagggcccggtggcgagggcagctccatccaggaggtctcagcaacaggagcccacaaggccacactctagctaaggttatagacagctgggagaccagggcctctccgcagacgcgggaacaggccagatctttataaataaacatccagtgaagagaaatgacaactctaagtcatccgaatacacagagcactctagggggtggggcaccgggggcctggaggggcgatgagtggacccagatgtccatggcacggggcggcgtggggggtggggtgggggcaaggccagggcaacagacaaccggcactaggacgctgcgctgcgcatgtacaagatcaactactgggggccgcggtcccgtgcgtgtgtgtcaggctcttcgttctggaatgaggaggggtggtttttacatcatattcggtggctggtgggctcggagaggggctactctgtggagaggatgagggcaacgacgagaccgtacaggccgagcacctcggggaagatgaggatcaggatcatgcccatgaatagtcggggctgctgggccgtggctcgcacaccggcgtcccccaagatgtctatggcaaagccggctgccaggccgctcaggcccacgctcaggccggcgctagctggaggcagctcctgtagaggctgatgtcgtcattcggggagctggcgatgaggactgtcaccaccaggccatagatggcgatgatgccagccgtgaccaccgggatgatggacttcatgatcagctccggccgcatgacagacatggccgcgatgccggcaccggtcttgaccgtgccataggcagcgcgcggggcgctgaagaccatggcggccgaggctgcc

SEQ ID NO: 11392 - DNA, 1011 bp, Artificial sequence
  DNA replication origin
cccctgttgcgatggcgcagaaaccccgttgacaaggcactgctttttcatgacggtgagtttccctttgagtgtattataattttgtgataaaaatttcaaggagaaaaaaaaaacacacaacctccttcctctgcctctttccttcggggaggggaaaagcgagggagggggggctggagatctgtctccagactgaaaagaaaggagcaaattaaacaccgagttgccaaaaccaggatattaggtttcagcccagagagctattggctaaggctgtgttttttttttttttttgggggggggtgggtttgtgggtgggtgatggtggtggtgggtggatgtttaatggacacggagaaaaggggaatcgagtgtttatgcctttcccagcgctgccggggccccgggaagaccaagttcagtgtctcgggcgggggcgcaggcgggcagggggcggcgaggccgggccgggggcgcctcggcggggtgggggcccggcgcctttctttttccttttttttcttttccgcggatgcaaatttctggagcggggagagggagagcccgggaagggggtggcgtggcggttggtggtggggaggggaggggagggaagccttttaatgactcattgattgagccggtttaaaattagttgtgtgcgcgagtgtgagtgtgttttccgccccccggagccgccgggagccgggaaggagggagcagggctcggcgaggggaagacggcgcggcggggccgcgagcagggggcagggagggcctggagtgacggcgggcgaggaagaaaaataagcttttccaatctcctcccctctgttttccccccctcgtttcttttctctctcggaagctctagggtgtgaatcacattttctttcttctcggcaaaatggaccccgcgtctggggagggggaggggagagggtggggagggaggcggcggagacggggtttatttttcatcctggcttccccattcccgccgcatct

SEQ ID NO: 11393 - DNA, 1066 bp, Artificial sequence
  DNA replication origin
gccatgccttgtactcggcggtgcggctgcgggtgtctccgatatacagctgccacacgcgcgccgcctccccgtccgcgtactggtccgggagcccttcggccgccacccccagggagcgggtccggtacacgctgtccaccatcctgcgccgcgcctggctccgcagccacccgctccgcacttaaagcataagcactgctggcagccgacagccccacctggccaatagcaggtgagcgcgcggacacgcccctgccgggctttgggccgggcgcccgagtctgtccagctgcagggagggcgctgcctcgcaatcctgggctaggtccttttagccagcctgcggacccagccctctgtgcaatcccacggcgggagaggaccctcggagccctctgcccacttaacccgggtctcgaggagaaggcgagaggggtcaggagaggcgggagcaatgagattgccactccatcccctgagatccgcagagctgagcgccaggcgggcaggactggaccgttcccagcgaaggaaggcatcagcatatctaaacaaagattgtgccaccgaagtgtgtaggtatagtcagccggtgcagggaagacagggggagtctctggaggtaaagctggtctgtccaccgaatccaggggcggagcccggctggaatacggtaacacggtaacacggtgaaacctggctaacacgtctctactaaaaataaagaaagattagctgggacatggtgacacgcgcctgtagtcctagctactccggaggctgagccaggagaatcgcttgaacccgggaaggcggaagttgcagtgagccgagtgcaccactgcactccagcctgggcaacagagcaagactccgtctcaaaaaacaaaaagcaaaaaacaaacaaaaccctctgctttcacaggaagcaggagaatagggtctagagacagggaacataaggccaattcacacttcagttataacgggaaatatcctctccatagggcgtatgcccgccattaataactttgtaactgtaactttacttcatcctcttcat

SEQ ID NO: 11394 - DNA, 1071 bp, Artificial sequence
  DNA replication origin
tgtgtttcccccatcacattgagggcagaggctttttctttaaccgagtgttccccaagaaatgctagaccacagactcctccctctggatccctctaaagacacggagctcagggctgtctagagggcagccaaatggatgggagatgactgagaagccactgaggggtgagagaagggaggactgaaaggctgaaaagtaggagggctggcccccccgctcccccttttttttttttttttaagactgagtcttgctcttgtcgcccaggctggagtgcaatggtatgattttggctcactgcaacctccgcctcctgggctcaagtgattctcctgcctcagcctcccaagtagcctggattacaggcacccgccaccacacccagctaatttttgtatttttagtagagacagggtttcaccatgttggccaggctggtcttgaactcctgatcaaggcaggtgatccacctgcctcggcctcccaatgtgctgggattataagtgtgagccaccgcgcccagccggcccccccagctttgagaggcccagctctgtataagtacctgttgagggggtcctcattgaggaggaggtgacgcagcacagccatcacacgggcatcctcacccagcccatcacggtcccggcccagaaggtccacagctgtgagcaacaggactgcaggccggcaacggcgggcccgggagaagatggcctgcagttttgtctccacagccccactactttctgcacagaggctggagcagggcacctggggaggggatcccaatgggtctgtgagcaaggggaaagcatgacaagggcaggagaatcaggggaggaggaggtggaagatgtgggccatctttttctctggagggcagggacagggaaggtaccctggccaagtcctacctcttttttaccctatcccattccctggactgtccaccaatatcttgcaactccctcctccttgaaagtacctctccatagctcagcatcatgggaatatgcctgacccactgggctgaagtgctagggcctgtgagtagacagaggagg

SEQ ID NO: 11395 - DNA, 1313 bp, Artificial sequence
  DNA replication origin
tggggcagatctggaagaaggaggttaccctgggccgggggtaagagaagggaagaagggagggaggtgtatgtggggggagtctctccggggcaaggtgggggagctgtcctagctgcggcacaagctgggggtgctgccagccgcgggggcggagggctggccccaggagtcctgcgggggctggacgggagggtcagtctggggctgtcccgggcctggctccggcccctcccagagctccgcgcaggctccaaggcggcggtgggggaaaaagggccacgctcaccttctcctttttcagtttatagggcatctcggcccgtccggacccggcccgtctcctgcggccccgctccggctccggctttgctcggccgcactcggcccgctcggcgtctcttcgccaccgcctgcgcgctgcgcccgggtcgagcggtgcctgcgcctccaattggcccgaactcctacaaaactgcctgacaaccaggcgccgcctcctcggattggtcattggagccaagctgcttcctttttttcttattggaaagaaatagtacaaaccgccagggttcggcttccagaattggctgaagtgggtggtcccgccctaaagtgggtcgagcttagagaaggaggcggggataaggggaaacccaagcttggctaggagggctgcactccagcgtctgctgtgcgtcggcctcggccattcttcgcggcgcttggagccctgctctttccttctaaaggctctcacactttgcccgctctgctaccctgtccagtcggaattggaggaaggaagccctaatacggagggcacctttcttcactggggtaaagtagccctaattgcagatgcaaaattgatggagggagctcccaaggaccttccaagacacccgcctccctagacaggggttgcagaggagcaaaggggaagcctggcagggctaggacctgggcgaaatgagtggagaatccctggcttggtgcaactttaggaagagggtccccgttgctactgcaagtgtactgggattggggaaccagctagatttgagcagttgggaacgcagtggaaaagcaacttcattgttgactgtctcaggaaatccatcccttacttgccaccctgctcaagtccgtgttctaatgggtaagactcagtttatgcccacaaagagttcgcagtctggtgaatcacagatgtgtataaacaaaggattaagagagaatgtaaaccaggcaggcacggtgtctcacgcctgtaatcccaacactttgggaggctgaggcaggaggatcac

SEQ ID NO: 11396 - DNA, 1860 bp, Artificial sequence
  DNA replication origin
tctgtggatgggacagtatctagtccaacagactaaaaattacaaatgggtggggacctcaccagctttccccgaattccatttcccttagcccctgttgtggctgatttctgtgtgcattgtctacgactgagctacccaaaccacctccgcatgcccactccccaaggacagggcctgggtggggcacaaaaccctgtccagctcactactcccaggaggctcactatctagtacaccatcaccaaccctgtacttagaacctcaggccctgaaaggttaaggggacaactcagaatcagagctgcctggcaaatacagaacagccccaggagaaaaagtttgattgaaaaggtcagagatggcagcccagtaacccagccaatcagagggcaaatgaaagcaatatacctctggggtcatcgagcaggtggccagaacaccaggccagagccaacccccaccaaaaagggccagccccaggagaggagaagctgggggaggctggaactggtatcctagcatcctatgtgtgagtctgtacctcaaaggaaccacacctctgagtcagacctcagcaacagcaggaaacagagggtagaaaaaggcacggatgaggagcaggggaaggcagcaccgaggtagatgaggaaggtgaaagaaggcaacattaagaactggcctgtgggccaggcacggtggctcacacctgtaatcccagcactttgggaggccgagggggtcagatcacctgaggtcaggagttcaagaccagcctgatcaacatggagaaaccccgtctctactaaaaatacaaaattagccggatgtggtggcgcatgcctgtaattccagctacttgggaggctgaggcaggagaatcgcttgaagctagaaggcagaggttgtggtgagccgagatcgcgccattgcactccagcctgggcaacaagagcaaaattccatctcaaaaaaaaaaaaaaaaaaagaaatggcctgtgtcaggacatcatgataaagacatgggtgttcaggggtggctggcctgcaggctaagaaggaacaataatctgacagtgaggacaaattcccaatttgaagatggtgtagcttaggaaaggcagaaatccagcactggtgcgaaaagaaaaaaaaaaaggaaaaatgcaaaggttatcctaggattaagaataagggtgaggagcctactcagattaggaaaggtgactggtctaggatgcacttgggtgacagttaggagggctttgatacaaaagaggcctttaagtcaggagacctgatattgcagctgggcctccagcaggctgtgtgaccttggacaagtcccttgccctgtcggggcctcagtctcctcatctgtaccattagggattgcactgcatgcgctcagaggtcccttccagcaccaacgttgtgaggttccatcaacagaagggctcagtcctgcttacaagtttgtgtgtgaaggaagaactagagggaggggcctaggccagatttgggtggaggagagagaaagcagcgctgttctaggtcaggggcttggcatggaaagagaaggggccgtaggggactgcggggcggctgtcccaggcgggtaggaagaggagacaaggggctgctcagggcggggcgagggggcaattctggaggaaggtgcagtttcagatgaggggctgcccaaaccgaagggggatcggggccaggggtgatgggggggacagaaaaagcaggacagtgacctgggaatggggcagatctggaagaaggaggttaccctgggccgggggtaagagaagggaagaagggagggaggtgtatgtggggggagtctctccg

SEQ ID NO: 11397 - DNA, 1172 bp, Artificial sequence
  DNA replication origin
gggacttgtagtccatacgtttcctgagggacgagagggctgaggagtgggcaggggcgtaggagagattctgcgcatgtgcaaatatgtgtcgagaccgaggaggccactgggtaatgcagtcctttgttttttgggctgggaatgacggaggcggggcaaggggcggactcctcgtcctcgccagcgtcaatcatggatatggggcggggctggaggactaggcacctctgcacgtcctgccccgccggaagtggaggccgcgggctctgagcgggtgaggcgcgcgggaacaccggcgccgggattcggatgggggcgggtgggggacgctgcagctggggccatttgaggggagcccatggggcctgaaaggcatctgtcaggcggtacagagggggtcctctaggagaggggagaagggggcgggtacgccgacctgtttaggggagtctgatgacccagagttcccaagtcgcgggggaggcgtggcgcggggagccggggttctggaaggggtgtcttttaggaggtggcagggcctccggttgggcgtttaactaggaagtggcggagcaagttggtggggcctggttcaagataagaaccccgacttaggagggggaggaacgagaggctggaattggggcggaggggtggaggatgcaggagcctcggggaggagctggttttttgcacgcaggagactacaaggagatgatgagaggatgaagatgggcctggtttcatccgatccctgtcctaccgcctccctgttcttgcagcccctgcccggatggcaacagtagttctaggaggagacaccatgggccctgagcgtatcttccccaatcagactgaggaactgggacatcagggcccttcagaaggcactggggattggagcagtgaggagcctgaggaagagcaggaggaaacggggtcgggcccagctggctactcctaccagcccctgaaccaagatcctgaacaagaggaggtggaactggcaccagtgggggatggagatgtagttgctgacatccaggatcgaatccaggtagggtggaggagggatggttcctgaacaggtgaagctgggctccctgaaagcctagacccaaacggtcttctgtggctctgcaggccctggggcttcatttgccagaccc

SEQ ID NO: 11398 - DNA, 933 bp, Artificial sequence
  DNA replication origin
ggagtccgccccttgccccgcctccgtcattcccagcccaaaaaacaaaggactgcattacccagtggcctcctcggtctcgacacatatttgcacatgcgcagaatctctcctacgcccctgcccactcctcagccctctcgtccctcaggaaacgtatggactacaagtcccgaaatgcctccggcacttagctacgactgcacgtgcgcgcacagctgcccgccggaagaaccgagcttggctgtgtttatctcgttggggactaaggcgtcggttggcgcgcaacgggttctaggctgcaggcagctcgaggacccgcggccccgccccggctcggcctggcaggtagcctgggatgggtagaagggcaagggagaattagggggcttaggacgtgctgtctggagctggagtggcgggggaggggcctgagagtgatgaggtgggggtggggagggagctagggggatgatgggaaaggagagtgttaatggggaaagcagggctaggggaggatggcgaggagatgggtaggagagacctggtgtctggaggaagcaatgaaggaaatgggaaggaagactgggccatgaaaacagggaagctgagcataatggaaggggaggggtgtctggcgtggtgggctaggggaggccggaatgtctggaagaagacagggatagagtcatatgcagagaggggtatcgtggtcagtgcatgctaatttttctttccttagtggaggtgggaaaatggagggctgttgggtggagcttggaatggtaggagaaggaaaaatgagaaaactgcaaagctctcacgagatcaagaagggcgagaaatggggaataaaaaatgcaagagaccaggcgggtagatacattaagggaatagaagaagtttgaaaatgcttggtggtgatggaggact

SEQ ID NO: 11399 - DNA, 744 bp, Artificial sequence
  DNA replication origin
taggggaggccggaatgtctggaagaagacagggatagagtcatatgcagagaggggtatcgtggtcagtgcatgctaatttttctttccttagtggaggtgggaaaatggagggctgttgggtggagcttggaatggtaggagaaggaaaaatgagaaaactgcaaagctctcacgagatcaagaagggcgagaaatggggaataaaaaatgcaagagaccaggcgggtagatacattaagggaatagaagaagtttgaaaatgcttggtggtgatggaggactggggagacccagggataagaggagcccctgagcgcctgggggcttgttctccttgaatttgagttgtttatatggcagagaaactaaaattttttttctccacctttggctggaattgcttatctcctctcctgtgcatattttactttaccttgacatatctgaagggaagaatagagaatataagggaggatggaagacttccattcttaagcccatcgacctcctaacagtctccacaagcccagacccaagatattttggagagcgggagtaatgaagtgagagtagcttcctgctggggctatttcaggatgggtcccatggctatttaaagcttagggtgtggagttgggggaggttgggtgggtgggactagcaagccagctgaaagccatgtctctttcctgcaaggggcctcccttatttgagctgttttagtgcctgaggttttgcctg

SEQ ID NO: 11400 - DNA, 1061 bp, Artificial sequence
  DNA replication origin
ctcgcccagcatcttgtggcagttggcatagatctcatccttggacatccacagcaggatgtgctcagccttgcagtccacttggccagagcccccgtccccctcatcgccacgccgcaggatgagccaacggatctggtactcaggatgcccatcatggcccacgcgctggcggatcagctcatcaggataggcatgtaagccgggccccaggggcaccctgaattccctgtagcggagttctcccaccatcctggcacctggagcacacaaggaaaagagaacagacaagctagaggaaggagaggtcagaaaatcaaagatatccaggaggtggggaagcaaatggcaacagctgtcaggcggggtggggtaaagccaggcccaggagttgcatgctgcacgctgggtgggggcaggcctaagcagagaacactggggtgtttgttgtgaaagaacacaaaatttgggggctaaaaggaaggtccccaagaccctgtggcctggagtgggttgatatggaacagtgggcggactagtgggggcagggcagccttggagttacaagtgaatcccaaggccttggaacaggcagcaacctatggggtatgtgaagcccagaggggtatgtttgggagggagatcgtgagtgtgtgtgaaaaggggtgctgtctctaaggattggagcatgggagtgcgagacccaagttaagagtcccgagatcgcagagttaagagacctgagaactggtggtggagtgggagggcaaggcgcgatggactaggaggaggcactggtgggttggaggcgcctccgactggagcaactggaacaagagggctggtgagggcgccgcgagacccagggcagggtgcacagaccaggtaggcgaggggcttggggaccgaggttggagactggagaagccaggggcgcgcggtaaggtgggggagaggggattaggccccataagctagaaccccgaggcacggtaggatggggaccgaggttgggtgagcgcgaggctcgatgggctagtgggcagggaaggagaagcaag

SEQ ID NO: 11401 - DNA, 1559 bp, Artificial sequence
  DNA replication origin
ccttaaccttcagccccaggataccctcaaagactcacctgcaatctgccggtgtggctgccgctcttgccggtactgcccctttaaatccatgatggctgccgctcgaggcaattgttttgacgggtctgggggggcggggcctgtttcctagtcacgcgacattagagctgcccgcggattggctctcacggcgttcaggtaggaaaggaggtgtgtatccagcttgggctccagttttctgcccgcctccttttacgttattgcggagcgacggcgccggacagtcaacgtcatctaggagcaccgagcagcttggctaaaagtaagggtgtcgtgctgatggccctgtgcgcactgacccgcgctctgcgctctctgaacctggcgcccccgaccgtcgccgcccctgccccgagtctgttccccgccgcccaggtaatccatcttacccgggaagaaggctgcttccattcgggctgccggagatggggtctgcgggcatgcgaggcgggagttgcgagtctggtcaggagtcatgcaggtccgtgaccttggataaggcacacttagcctcagctttttcctctacaagtgttgctttctcatagggcgaaattcttcagacgagatacttaaggtgaaagtgctttgcagatcaccggttgtgcaggtttcagtaataacgtttcgagtgcctatgataagccaggtataggtaatagacgtttcaaataaatgaactcctttcaaatactctataaggcagttactattcccattttatagatgaggaaaataaggagtccaaggtcacacaccaactatcagagctaaacagtctgtctttcagagcctgtgctcttaaccattatgatatgatgcctgcaaggatgagttactgctgatattagagaatgcagggcaagataccaagaacagtggcctcaggggaaggtatcctgaggtcctagtgggtgactggtgagtcacacaaaagagaagtaagtcctgctcctctggagctttcaggctgcttatggtacagtttgggagatgcatgtttaaaattcaaatccaaatcaacctactccgaaatgctgggaatacatcaaggaacaagagtgaaatgacccctcccctccattcatatgtgaagaattcccagaaacaatgcagagggcaaaaggaattggcactgatggtggtacatggatgtgtggaagctaccagctctggagaagggaattgtttaggtaaaaacagattcctggagatggagagttctgagccaaatttggaaggagatcaccaaggagagaacattactgtgcaagctgtgaagggtggagtttttggatagctggtttgggatacatccaggaggaagtgggctacaagctaaaattgatctgtgccctctgccttggttctctgatgctttgccttcaattagctttcaaatgaaagagatgtctttttatccctagatgatgaacaatggcctcctccaacagccctctgccttgatgttgctcccctgccgcccagttcttact

SEQ ID NO: 11402 - DNA, 743 bp, Artificial sequence
  DNA replication origin
ttccccaagccagcctccctcattgcaggcctagggagctactgtctcccaggaagggaatgagagagagagacttaaccagagacctacagcaagaggcgtgtctgggaaaggggagggaggaacacctggtcactccaaacccagtcacttccatggttttgtctctgtcacggtcacctacaaacaggctctgagaggaatcaccgtagggtgcctccacaatgcccgatgatgcaggaaagaatgggaggtctgctgaacggctgccgggtcgcaaggaaccgcggcgctggagtgggtctcctgggcctggaaacgcagtagaggagtgcctcgggctgtcgacctgccctggtgcccagggttgggagagtgagatgggcgggggcggcaggggggaggtgtggatggacgactgaggtccgcagctccagcgaggacgtggaggcctaacgaccccgaggtcactgagtcagtcggtggcgcagggggcggggcaggtcgtctgtctatctgtctggacgccgaggggcggggaagaatcgcgaagggcggagttttggaggctggagttttgtaaggttggttggagggggtttgttcatctttctggtagtgcgagaataagagatggcagagaccttaaccttcagccccaggataccctcaaagactcacctgcaatctgccggtgtggctgccgctcttgccggtactgcccctttaaatccatgatggct

SEQ ID NO: 11403 - DNA, 1585 bp, Artificial sequence
  DNA replication origin
gcacccccagcgagcctctccactactccagggccgttccagccgcccaaacccaccgccccgggcgcagccttttgcccacgggactcccgcgcttcccaagctctgtgcccccaactctcgggtactcaccgcccagcagcggcagcagcaggacgctgagcagaggcaaccggcggggtctggccggggatccccgcgcagctcccatcgcggcgggctcaggaaaaggagctgagggcgcacggcgggcgcgcagactgcgctccgcggcgggcacaggaggcggagcgcaccggagcgcgggcgccgcagcagcagccgcagccggagcccgaccccgaggcgtcccgaggcgtcccgagccggagccgcgcgcgcccagtacctccgagtccccgcgcgccgccgccgccgccgccaagccccgccccacgacgccccctcccctccggcccccgcacggcgccccgccccctcgacgccccctcctcgccgaggcggggaggagctcagtagggggaggggtctggagagggatggagaatagagagagcaaggctcagggaagtgcaggggacctgagtatttgctgtacccaccaccgactctgcagggatccgggagaacctaagtgacttgtgcgattccgtggaccctggggagaatggtccattctgggcatacctggaggctctggccaacagttcccccagaattctccaggtgggggcaggggaagaggcgggccccgccaactcttcagcaacccaaaatcttaacggcagacccagaacagcagggtgtccttaatgtccccaagtaacctgaagatgctgtgtagcccggagaggggctgaagtgtgcatgactggggtctggtttggctgtagaccaatctgaacccaaaggtagaaacacgctgggctctgaaagccaggctgaagtctgctaactgacaaattcatcccaagtccatctccaggcagtctgggctgtgtcagggtatggccaagtctccagctgtggggaggcccagcacaacccttgttccaggcacccccacccccagcgccaccacccccacattctttctttgttgtgaaagcagcaaggggtgtaggaggcgggtcaggaggagtcaagctttagaagatgggccccagctgctgctcaggcctccaagatatgctgagaggggatggatagtgccttgtctcccctctggttccggagggccccccaggcctgtttagacctcccttcccccaagcagctgggaggaggaatggcagccacagagggcctcacagccaggagaagtggcgccaggactccagggtcctgccacatggccaccacatgtccctgacaacccagtccacagcaccttctccttgggttgtgagcctccttcttccccatcccccagatgccttcctacaggccctgctggagatgatacaaacaacgggaggaagagaggagagatccaagaatcaacactcctcctgctgctccatccatcactgcccctcaccttctgtgaagggccccaacacaagccctgcttcataccctcttc

SEQ ID NO: 11404 - DNA, 1311 bp, Artificial sequence
  DNA replication origin
ggtactgggcgcgcgcggctccggctcgggacgcctcgggacgcctcggggtcgggctccggctgcggctgctgctgcggcgcccgcgctccggtgcgctccgcctcctgtgcccgccgcggagcgcagtctgcgcgcccgccgtgcgccctcagctccttttcctgagcccgccgcgatgggagctgcgcggggatccccggccagaccccgccggttgcctctgctcagcgtcctgctgctgccgctgctgggcggtgagtacccgagagttgggggcacagagcttgggaagcgcgggagtcccgtgggcaaaaggctgcgcccggggcggtgggtttgggcggctggaacggccctggagtagtggagaggctcgctgggggtgcaggcttgcggcggaagggcgcaaggagcccgggtgtcgggaggctggcgaagcctccagggacgcggtcagggtacccctcccactcgcgccgcggggacgcatttccagcctccctgagtttttctggtctgagccgagagtttgctcgagaactgccgagagttgctggctctcgggcccagatggggagtttcttgtcgggggagaaaagaccatccgcacccaccgtggggagcgcgatggagaaaaaggaattccccaccccacccggcagggtcggcccaggtaagagttgctggtttggggcccgatgccggacagacctgcggcgcgcaaagcgcggagctttgttacctacgccgacccgacgttcccggcttccctcctccgagttcctgggcaaagctgagaccccagatggccctgcgggtgagggcggaagaagggaagagttaggggccgcccccatccatggcctctagctactggtctggaaccctgcgcccactccgtgccagggccgaatccggggatccgagggtcccaggctgtcgcggtgactaatgtgtgaaggccgctgccaaaatcgggcatggcctggctgcaaaggtgcggacggggtttgttctgctccttcctggatttccatcctgactgtcctcacagaggaaaggaagtatttctaagggaagaaaggcaaaaagagctcattctggcttttcttgggggggggccttagcattttaacgagggtgtggccctcatcaccagggcagacagcaccgcccccccaactcccgcagcttttatttcctggcttggtcacacctaagagtcatcactgaggtgttgaagtgccttacaggaaagcaccaagccacccgcacatcccaaatagcccggactggaaataaagcccc

SEQ ID NO: 11405 - DNA, 1383 bp, Artificial sequence
  DNA replication origin
tggtcctgagacatctgacggatggcgttttcttttaccatgttggccaagctggtctcaaactcctgatcttgtgatccgcccgccttggcctcccaaagtgctgggattacaggcgtgagtcactgcgcctggccggatggaattttctttaatgagagagagaagttgattgatagaatcaaacagtgatgtgtggcagattctgaggcctatataggtcctgggggtgtttttcctaaaccaggagttctagctcctgagagatgggtagttgagtggcccagatggatccttggattgaagcagccaaaattacttagagtgggagtgcctaggaaaaacttcctgctgctccctgctctctgtaacaattgtgtttacacatatgtgtgtgtatacacgcacacatatgcacacatgggctggctgggcctgagcccagagagcaacacggagggtgggcaccagaccagatgctggcgggggtgggggtggagggcaggcacgggagacgcaggcagagtgagtgtctgcatatagatggctgttagggagccaaggaaatggcttggaaaatgtccttattgggtgtttgcagctccggctttgttggggtcggcgcctggtgtgggcagatggccctgtctgcctgttgttgctgagggcttcttgcctgctgagcccggtacggcaggctcataccggggaagcagcaccctctgcgttttgtgccgtgtgtgggctttgtgaatgtgaacccgttagcccttactcaggtggggtggtggccgctgtccccatttcacggcaaagaagggtgcagaggccacactaaggtagcgtcactagggagcagcggaggcagggctgtttggcagcagcaaagctgcacatggagctggctgcctccggggtcacgtggcctgcatctccatgggggcttgtgtgcagtggagggggttgcatggcatggcccggtggcaaaagaggaggcagcctcgggaagcccaggacctttcccagaccacagtcctgggggcatactcaagtcagggggcggggacaggaatgtgctggtgactacatcaccttgaggcaggtaccacctcaatcccgaaccgcctgccttcttctctgtcattgctgtcctccatttcttgttatcagcaaagcttctgacaaagcaaaagtagagtcccttacttcccagctcctttcttggagtctgacctttctgccaggtctcctttgtctgcttccccaaaacaaaacagcggaccaaagccaggcacagtggctcatgcctataatcccagcagtttggaagccgaggtgggaggatcgcttgagctaaggatttcaagaccagcctgggcaaca

SEQ ID NO: 11406 - DNA, 1534 bp, Artificial sequence
  DNA replication origin
ggaatcggagccgccgcagccgccgccatcggcttcccggctcaacccggcactcccgctgctgctagtgccgctatcgctgccgcggccgccgctgcgaacccggggcccctgcacgcccgggccgacctgggccctcactttcctgcccctgtggcccgggttgccccaggccgcgcgcagcgccccctgtccgtctgctagggcggcgcgccgggcggccgtcagcgtcccccggggggcaggggctgctggccgcggccgagacggcgggtggagggggccgggaccacgcgctggcggcggagggatcccccgacccttccccccatataaagagatacaatgtttccttttatggcgaggccgctccttatatggtgagccccagcgcccccgccccattggtccgtggttccggcacctccgctccccattggcccacaagagggcgcttatttgcatagacataccgaactcgttgctgtcatctcgcgtcagaccgcgactctgagaggggtggagccgacgcctcttaaaggaaccggagagcaggcacgattccgcctccctgaacccgagaatgatagaacggtttgggaggcacccgcggagaaggaggctgggactggagcgcagtcttgcggaagagagggagcagcactagtaaatgggcaccgggaccgctggaggcaaacactggggaaacccctgggtggattgtggggtttgcagtaaataaaaaaatacagcccaaattccaagggaggagtgcagggattgattggagcatttcctcacgccttcctaagggaggcacagttattggctgagcggagagagcttgggtccccgcccggtgtccagactcgtcgcgccccagcctctcagctctaacttttcccctacccccaacttcccttccctttccctcgcttttgtaggcgacgaaactttcccaccgggctggctcgaggatcttcattcatcatcctctgcactggggggtctttggcagacatacatctggaaaaggctggtggaggggagggcgagagagagagatcggcctcccagtcctgaggcgggcagggaggagagacggagatcagggaggagagatggagatcagtgaagacttccagctgcaggctggacttggggaggaggacgtcccgaggataaagcccaccctacagccagtgcaaagacttgggaaagtgtggcccgacagaaagtttaagcccaagcaagcacgctcgcgcacacacacgcacatacacacacttctctggaaagcccgttggagaaaaaaaaaaaagtttcacacagggtatcgctctgtcgcccaacctggagtgcagtggcgggatctgagctcattgcaacctctgcctcccgggttcaagcgattctcccacctccgcctctcacgtagctggaactacaggtgcgcgccaccactctggcctaatttttgtattttttgtagagatggggttttgccatgttgcccagactggtttcgaactcc

SEQ ID NO: 11407 - DNA, 1866 bp, Artificial sequence
  DNA replication origin
gcggcggcgggacacgcggggctaacgggggccgggtccccgggaatggcgcggggctcgggcccggccgcctggagcgggaggctgcggcagcggcggcaaccaccccggcgcccaccgcgggggccctctacagcggcagcgagggcgactcggagtcgggcgaggaggaggagctgggcgccgagcggcgcggcctgaagcggagcctgagcgagatggagatcggtatggtggtcggtgggcccgaggcgtcggcagcggccaccgggggctacgggccggtgagcggcgcggtgagcggggccaagccgggtaagaagacccggggccgcgtgaagatcaagatggagttcatcgacaacaagctgcggcgctacacgaccttcagcaagaggaagacgggcatcatgaagaaggtaccaagccggggggctggccggccccggggcccggttggggtggggatgtgcaaagggagcccgggaggaccgcagagccgaggcggaggtgagaggctgcgagtccgcaggaggtgtgtgggaggggatggctcctgcccggggagggccgaaggggaggggccgccggggaaatgtggggagaggggagatcccgcgaacgctcgcaaccgtggggaaaggcgcagaggtgggagtgaccggcgccagagaggaagagggcccttgctgagtgaaggggtgaggagcggtgatgggaggctacgaggctgccggggaggtggataatgagaacccgggatcagtaggtccagtgcactccggtgttcggacgagggcgccggaaaagcagggagcaaacgagaaggtatggaggtgaggaggctggagctgcatgacaacaatgagcgaacatgtgtgggaggaagtgggcaccacgagagtagtgctggttggaaggacaggcagggttagggaccaggtaagggagcggggcaggagaactggtgctgccctgagcagcaggaacctagtcctgcgccggccgtgagtcttccatggcatccactgggaaccacatgctcctggcaggacccgctgcagaatctcctgccgttaggacaagtggggtttccagccctagggagaatctatgcttggatggggtttgggggaagtcagggaggcttgcagaggtacctaggaattcctcttctgccagccagtgaaaagtgttgaggaaaggagtcattttggggtgtagacgataagggaagagatgaaagcagaggaactgggagacaaggagctggatccttgggaacactggctggtgtttatttctgtcccatgtagaaaccagagctgcttccaaggtggtttgcagaactttgttgggagagtatggcatctatggggccatccttgaaggtccccttcctgggctcatggcaggatgtttagtgctaatctaggtctcgtctcccatcactccagacactgttgtatcagtgtcccttgtcacttgatcatcagtggagaagattgtggggggaggtaattaaggaaaactctcttctctccttccataaccttcttcccaagacaaaggagtaagggcagtaaagtattacagggcaaaaggagaaactaggctgtggcaacaagttggagcctgtgcagtttctggaaagaaacatgggacagttggagcttaaatggtccattatcactaatgtcttgtacaaattccagtgtgataggtagggatccatcctggtccctgtgacagtgagaaggggtgaggctctgggacattccaggcactaagctgtgttggggagcagctagctgggtccttcgtatcccctgaagttatatgttccatcactgggggctgttactg

SEQ ID NO: 11408 - DNA, 843 bp, Artificial sequence
  DNA replication origin
gggagtgagcagctactgtaacttttttaaattaagacaaaaagccttgaagaaaatgactttatttttctaagtgtaacctcagtatttatgtaatttgtacaggggccatgccccacccccctcctccccctttggggtagaccttgagggtgggccagcataggggggagggtcttttaccctgtgtcagagcctaccttcaccacctatatccagaaggggagctttttcagaaacagggcagcagtggggtgaaattttcttaacccctaagactgccttcagtaggaacaagctggcttctgtgattaggtgaagggatgggggaagattttatgcacagcctagttatcaaggggatgatttgccgacatgtttgagaaccccctaacctctaaccctcattgctgtcttgccccagtttggggtgccaagatggaagtcacctttctgggctttctcctggagatagctggggcttatgggtggctttcaaggctggggcatggcaaatcaggggccagagagcaggggagcttgggactcaggtctgtaactgcccagccccttttctctgctcttgtttcactccaccatcactcactcactccccactcccccacccatggggaggagacctttgatgaattcttcctctccttcccacaaaagacagacccagtgagtgaatcaggcaaagtgcttataatgtgtgttgtgtgagcgtggccttgggaggacatgcgtgtgtcagggatgagttgaggtgatatttttatgtgcagcgacccttggtgtttcccttcctcggtggctctggggtatgtgtgtgtgggtgtg

SEQ ID NO: 11409 - DNA, 853 bp, Artificial sequence
  DNA replication origin
aatcctcccgccttgacctcccaaagtgctggaattataggcataagccaccacacccagcctgacagtggattttattttatgagaagccatggtgggtttaagcagaatattgatattatctggtttacattttttatttttattatattatttatttatttttattttattattattattttttgagatggagtctcactctgtcacccaggctgcagtgcagtggcgcgatctcggctcattgcaacctccatctcccgggttcaagcgattcttctgcctcagcctcccgagtagctgggactataggcgcccgccaccgcgcccggctaattttttgcatttttagtagagacggggtttcactgtgttagccaggatggtctcgatctcctgacctcgtgatccacccacctcagcctcccaaagtgctggaattacaggcgtgagccactgcgcccggccctacattttttaaaagatcgcttctgccgttgtgtggagaaaaggcttggagggagcaagagtggaagcaggaaggcccatttggtgactgttgtacgagagacaagagatggtggtagtttggactggggcagtggcgatgagagagggtggattgggacacatttggaagtggagctgacgggagttggtgggttaaatgtaggggcttcagacaggggaatcaaggatggttcctgtgctttgacctgagcacctgggtggatggcatgtgtcatctttactctgttgtggccctgtgaagtttgagctgcttgttggacacctgtgtggaactggcaggtagacagtggatttttgaatttggaatgaagcagagaggcct

SEQ ID NO: 11410 - DNA, 810 bp, Artificial sequence
  DNA replication origin
tgaaggctctgcccaaatcaaggactcttccttgcaagctcttgatgactatccccatcaggccgggactctgtccacagcactctccttggactggttcgttaaccccttttctcttgatgttaaatgttcttgtgtttgatgtgaaattttaacctgtaacatttatatccttacatataatactatggatggtttgcaatacagtctgacttgtggagtggctccagcttgcatgcccgcggctctgactaccgagtgaacaggtggtcctaaggagaactgacttcttgggaactccgtgtgacgcctagcttttgtgattgaaatagcatcagtaaaaacctgatcttgtggacagacacaaaggtgggtggacctggttctgtctgaccttgagcagctcacgacatgtggacacctgttaggaggctgtggagagcccagaggaggcttagaccagggtggtggccctgtaggcggtcgtgagatttcagatttggaaggacgaatccacacgagttgtcaatggatgggacgcagagtttgagagaaagggaacgatccagatgactccgagggtcttgggcctgagcagctgggaggatgcagctggggaagacggcggggaggaggggagcagaagcgggtgaggtggggaagccctcgagttctgcctggacaaggtcaagttaaggtgcgtgttaggcatccgaacgtcaagtccaggaagggtgtgttcccgaaagggtcccggctggatcctcccagttcgtcgtccccattccacaggtgtggactcagcagccg

SEQ ID NO: 11411 - DNA, 950 bp, Artificial sequence
  DNA replication origin
ctgatgcatttgttgaaggcattaaggaaggaaagaactggctgggcacaatggctcatgcctgtaatcccagaaatttgggaggccaaggtgggcagatggctttgagctcaggaattcaagaccagcgtggggaacatggtgaaaccccgtctctacaaaaaatacaaaaattagccggggatagtggctcatgcctgtagtctcaaatatttgggaggctgaggctggagactcgcttaagtccaggaagcagaggttgcaataaactgagactgtgccactgcactccagcctgggcagcagagtgagaccctgtttcaaaaaaaaaaaaaaaaaaaaagaaggaagaaactgaaagagacaggcggcatgcagaatgtgttgttcaaggaatgttggaatgttgagttgttgagtaacccaacatgtcagaaggggagtaatggcctaatgggtccatgttgggaagatgttttgatgttacagtaaagagtgtccatcttatttggtaagcagtaaaaaccaatggcagagtttgtccacaaatgaaagaaagggccaaagaaagagagacacagattgagccaaaagataaagcatataggtggtgaggtgagaattgcacatgacgggtggtgggtgcgagtgtgggatggtcccagaagtggtgggtgatggggacgtatgggaggatgggtacaggagagggggatgagttgagaggaaggcgatataaacatgtagaggatggagtggggaatcaggcgagactgatgggtcagatgaggaattttagacatgctaggagtggggaagataaagggtgatggagacaggtgagttttatgggaacaggtaaggagtgatggggctgtgctgggagatggagtcaagcgggtggcagagagctgtaaggagaacctgagagctggagcgggacagccaga

SEQ ID NO: 11412 - DNA, 1739 bp, Artificial sequence
  DNA replication origin
cccatgtgtgcgtgtgtgtatgtctgtgtgtgtatctgtgcatgtatccttctgtgtgtgtatgtttctttgtgtgtctttctttgtctatcttttctgtgtgtctgtgtgcttttctacatgtatctctgtatctgtgtgttcttgtgtgtgttttgtgtctgtgtgtgatatgcatgtgtgtaggcaaggggccagaagacatgactttctgagatttctgccaacccaggacaggatttggaaccaggatattttcctcttctctttccctcacactttttagaagcacactaccgtgccctcacaacgaccctggagagtcacaaatagagaaagagggaagttacttaggctggggtttgggggttgcgggtcgggggaggaaggtggctaaagagatgtatagatggggtagaaactacataaacccacctttccttgggatgaaataacttcccagggctcttgcatctagacatcctgccataggggacagggtgggacgtggaggtgtggaaaccaccttctaattcatgatgggccatggtggacatatggagaagggatcttcatggggagggacgctgccactccttttctctttcttcaagtgactaagctgagctgtttcctccaatccttacaacttcagagcatcaggacttccctctttctgccaaagtgggatatggggcatcaggaatttgaagggcagtgagggcagtggcaggatgaagggagaggtagggatgggggttctagaataaaggtggaggagacaggttgaggacaagactgaagaagcaattgaactggtgggagggggccttcagaagctaaactgggtgaactctggtgggctttccagtcctgggacagtggatctgttaggttgataaggaaaatttgtgtcctgctctcattttatagatgagcaaaccaaaaagaaacagatgaggcaagagaaggaagagtggagccaggaagataaatgagggttacctgcttctccctctccaccctccttctctctgtgtctgaggactatgctcagctgagactgggttggatgatacaaacatgggacacttggctgccccgttactgccgcctcagacccctatgtgcacatgggcgcatggtgaaggcgagggcttatgcaggagtttgtatgaatatctgtcagagagtgcagataggagcatgtggggccagtgatggtacacaggggtacgtggaactggtgggagctcatcatggcctgtgaatacaagtgttgatgtgtaactctgcaaggtgtcagcaggtgtgtgtgagaatctgggagcccaggtaaggagaggtgatggagactagcgaggggtgatgggaacaggtgaaagaggtgtggagggaggcagaggggaatggcagggatgaggagcgacaggatcagaggagaggggtgggtaggatagagacccgtgagagataatgatgacaggcaaggaagagataggaccatgggagggatctctgggcacagttgagggggtgaggaagtaggtaagaaggcaggtgggaggcatggagggactgaggacagggagggaggttacggagacagccgaatgattcgtcagggatgacaggagagccaggggtgaagccatggggacaggggacggaggtgagtggggaggagcaaagtgcccggaggacgggttggggagggaggtctgtgtgctggggacagg

SEQ ID NO: 11413 - DNA, 1177 bp, Artificial sequence
  DNA replication origin
ggccagtgtggcggaggaggaagaggggtgggggagggagctttttctctgacggaccttggagaagggcagtggacgagcatgtgtccctccgcttccgcagaggacggaaaggcttgggtttggggaaagaggccctgcaggctgctcccgccgcacccgcactccatcttctccatccagcctcctcccctcgccgggtcctgcggcaggtgcagcacggcgagactccatctcccggcgtgccctgctcctccagcccggggcttcgggctgctcggcctgctgggagttgtagtctcagcctcctcgggagccgggcctgcctcggagcgggggcgtgagggctgggggaatgatagtatttggggagcgagacctactgtaaatcacctccctttttccgtcacttaatagcgctctggtgtcctcttattattgtgggggcaggataatgtggggcagactgtgggcggcagtgtggggaaacccgtgtgtgagcctgtgggactgcaccggagtggggagccagggggaggggagggagaacaacagaggtcaggtacactcctgacctctgagtcgtgtgtgtgtgcgtgtgtgcttggcgcgtgtgcgcacccgcgtgctttagtggggaggctcagttcacgggagtgcggggttggagaggagggtgaggcccgggtgcaggcgggtctccacggcaacagccaccggccgtgcaagtcccctagaaacctagaaagaggcaacggtggcgacgttttcagagatgtctctgggactgggggttgggagtggaagggatgaagaggaggagacttctaggggtccccaagggatgaggaaaggggctgtttatgtcccagagggggacttcctgagagggagagtacagaaatcgggggaggaagagccagggcagtaataaaaggaacgagggtctggcgaagacaggagtgttcctctgaaacctcggggcccctggcaccggagcttagtttctggcggattggaggcagaatgacatttgcactgaagtggtgaggaaaagacagtttttacacacatgttgagtttaggctggaacttttttgtgatttctgagggaaggagtagaagatgagtggggagcgaaatggagcagggagctggggggagggcaagcatggca

SEQ ID NO: 11414 - DNA, 837 bp, Artificial sequence
  DNA replication origin
aaggcggaggttgcagtgagccgagattgcaccactgcactccagcctgggcgacaaagtgagactccatctcaaaaaaaaaaaaagataccccccttccccaccaatgaaggatgcaaccaagcagcaggtgggatgaggagctgttcagcctgatccctgagcaccccctatcccctcatcttcatagctgaaaaagatcgggggcgggggctttggtgagatctacgaggccatggacctgctgaccagggagaatgtggccctcaaggtggagtcagcccagcagcccaagcaggtcctcaagatggaggtggccgtgctcaagaagttgcaaggttcgggcctcgggcagggggatgggaaggaagagatgatgaagccaggggctaagagaggtgataagatcagaagctggggtgagggaggagatgtcgtgtggtagagggaaaaggggatggagccaggagctaagggggaggtgacggagccagagtctaggagagatgggaccggggtctaagacagtgatggggcaggaggccgggttggtgatcaaggaagtaatcgagctggagtctaggagacatgatgaggctagggccagggaggtggcaagacaggtgctcacagggccagcactggagggaccaggaatcaagagtgcactaggaacccatcttagggttggaaatgaggaagaaagagtaagagctggaagacctatgtctgtgcccctcagggaaggaccatgtgtgcaggttcattggctgtggcaggaacgagaagtttaactatgtagtgatgcagctccaggtgagtccccgtggcccatcc

SEQ ID NO: 11415 - DNA, 1077 bp, Artificial sequence
  DNA replication origin
acatcggcaaagtaactgccgccagggcgaagggcgtgggtggccttttctctcacccccgattcccagccttgtgcccctgccctgttcctcctaagcaccctgtccccggccatctgcctgcttgccctgcctctgtttcccggtccctccccgcactagcctcgctgtgtcttccatcatcatcatcctctgtctccttcaccctgaggagaccatccgcccacagccgcctcatcagccccagctcatggcactcccctctcctgcagagcccctgtgtggaggaggaacagagccgaggcatgggggtccccagctccccagtgcgtgcccccccagactcccccacaaccccagtccgttctctgcgctaccggagggtgaacagccctgagtcagaaaggctgtccacggcggacgggcgagtggagctacctgagaggaggtgggtctggggccaggggcatggttggggcccaaggccctctccgccttcacgtggctggtctggaggaaaagttagatgtgtggcggaggtgggcagaccctgggaagtgctgagagggttatacttgggcctggggtcagactcagttggggccagagacagggcctgggagaaccagtgggggatccagagaggtcccggctcatgccaggaaacgtaattgggtgagtgcaggctgcaggagggacaggtggggcgcctgggcccaggaagggtgaggggcgagttggttggtgggtgtgtgtgcttccagaatctcttctcctagagactaattatagacacttcaagtgcagctgaggtaggctctcttcagctttgggggagggggcctgggaattgctggaagagagagcagggcaagttttgggggttagggctgaaggatctgaagtcacagaggggaggggaccagcgggaacctagttggggaaaaggagcattgagaagctaggtgagcctttaggaggtgaagatgggagggtgggagaatggtctgttgacctcggatggtgggtggacaacaagggccagggcccggtccccatctgtgctggtggtgggtg

SEQ ID NO: 11416 - DNA, 1285 bp, Artificial sequence
  DNA replication origin
catgaccccaagttgagaagctctgaaagtaatgtgagattcacagcacagttcaatataatgaggctgggaacagtggctcgcgtctgtaatcccagcactttgggaggccaaggtgggtggatcacctgaggtcaggagtttgagaccagcctggccaacatggtgaaaccccatctctactaaaaatacaaaaattagggaggcgtggtggtgtgcacctgtaagcgcagctactcaggaggctgaggcaggagaatagcttgaacctggggggtggaggttacagtgagccaagatcatgctactgcattccagtctgggtgacagattctgtctcaaaaaaaaaaaaaaaaaaaaagataacgacagaagagatgtcccaaggcaggatcaatgcccttggggtaaagtcagatgggacccaggccctgcgcagcagagctcacagtctcttggggagacagattatgtgacagacatgaggttcaccctgtgatgagagagagatagaacgcactaatccttgtaggatgggaaaggcaggctacctgcccaaggtgacagccaacctgtatcagacagcaaagggtagaaggacaggctgtgtgtggggagaggtcctgtggggagaggctacattgggggtgggccgtaagggtggaatctgagatggggctggtgagggaaatggggagacagctgtattcaggctgtgagaggccttgagtgtaaaccaaggaatgtggactttgttgttggggccggggagtcactggagtttgttgagctgggactagcaaggccatcttgggggtgatgaaaccagccaggcaggcctggagggtgatggcagaggaggctggaaagccctctgtaaactcaagggccagttgggtgtgtttgcctggaagcagcaggaagcagccactggcgggtgtgagcactggagaggcaagaacaaagcttgcctgaggaagattagcttccctagggtggcccaggagagagcgttccttgcacagaaacccgagtttattttctgcttgtttgtattcctggagcacggtaagcattcaaaaacatttgttgaatgaatgaatgaatgaatgaacgaacgaactaacaaacgaactaacaaagccttgataggaagtgaggttggagggtgacaacctagaggtaactggcctggctcagggtgggaggggtactgcggtcaggaggttttgggagtcacgccccaccctgccgctggcgtggggtccttgggggtccagtgggg

SEQ ID NO: 11417 - DNA, 1248 bp, Artificial sequence
  DNA replication origin
caggccacgctgaccgacaggccagtggccgcatggacgtgtcagcctctgtggagcaggaggccctgagcaacgccttccgctcggtgccgctggctgaggaggaggatttcgacagcaaagagtgggtcatcatcgacaaggagacggagctcaaggacttccctccaggggctgagcccagcacatcgggcaccacggatgaggagcccgaggagctgcggccactgcccgaggagggcgaagagcggcggcggctgggggcagagcccaccgtccggccccggggacgcagcatgcaggcgctggcggaggaggacctgcagcatttgccgccccagcccctgccaccccagctgagccagggcgatggccgttccgagacgtcacagccccccacgcctggcagcccttcccactcacccctgcactcgggaccccgccctcgacggagagagtcggaccccacaggcccacagagacaggtaaggttgggcttgcaccccactccccatctccagatgcccagagtcctggtgtgtaggcctggggtgctccatgtgtgctggcactactgaccagtaagccagcagtcacagggctgtgatggaggtagacaggcttaagggtctgaaaccatgtttgaggggcaggcaaggcttcccagaggaagtgccctctcagttctgagttgagtctggcactatgagcagtgaagccaagtgacaaggcaggagaagggcctcgcaggccacgggcacagtgttttgcacaggccgggagggggcgatctgagaacactgagctgatggcacactgcagcagacaaggctgtgaggtcagccctgggccctgccacggagggacttggggctatactaaggggccaggacttgatgctgcaggtttggtgagccactgaaggcttttaaacaggagtgcaatatgattacattggtactgttgaatgatccttaggctgctgtgtggaaaatggattgaaatggcctgaaatgagatgcaagcaggccacgtggcaggcagtggcaagagagtgtcccagtggcttgggctgaggtggggctgtggatgtggggcaaggtggatagtgccaagggtgttggggataggtcaagcaggctgtgatggagtgggggccagggcgtctcgtgtctcggctgatgccctgagtggttttgaagggaatgagaattcagatttaaatacaatgatctgaccagtgcggtg

SEQ ID NO: 11418 - DNA, 834 bp, Artificial sequence
  DNA replication origin
tgagtggttttgaagggaatgagaattcagatttaaatacaatgatctgaccagtgcggtggctcaggcctgtaatcccagcaatttgggaggccaaggtgggcagatcacctgaggtcaggagttcaagaccagcctggccaacatggtgaaaccccatctttactaaaaatacaaaaaattagccgggtgtggtggtgcctgcctgtaatcccagctacttgggaggctgaggcatgagaattgattgaacccaagaggcagaggttgcagtgagccaagactgtgccattgcactccagcctgggtgacagagcgagactctgactcaaaataaaataaaataaaataaaataaatataataacttcatggaatctaagggatgtccacgtgtaggcacctgaggctcaggagagggatctcgcctggaaatacagatttcggggtttgggaaaccatgggaatgggtgatgttacccaaaaggactgtgcagggtgtggaacccaaaagtgagggcagaagctgagaggtgctcacatctagggggaatgagaggagaaggagctctgcatgatgagtgagagggagaggtcggagcatgggaggagcacaggggagaaggtcctcgaaatcagggcaggagaggtctggagggcagcagggaggagtgggaagtggttcccatgatcagggcgggcttcatggaggaggtgagctctgagagccaggtggatggccgtggggaggagtggagccaaggcgagagagactatagttgagcacagggacaggtgtgttgggtgccctgggagagcccagtctggctgcaat

SEQ ID NO: 11419 - DNA, 1172 bp, Artificial sequence
  DNA replication origin
acccctccctgcaccatttggctggcacctacaaagggagctgatggggaggtgggacggagactctgcttggggtgggagtattacagtaccttgggccaacgttctaggggggctgtattgcatgatggggtgggatgggatgtgtgagtgtgtgattattgcgtcctgggaaggaaccatggtcctctgcctgctccccacccccccccacctgccccctccaggagggggggggcccagcctaggtcttgtgggtgaaccgggcccacacctgctgcagctgggaccgcgagatgcggagcaccgagggcatgagtctgtggttgccagcagcgaggggcgcgtggcgccggtggggcgcccgcacagggctgctctcagccgagcggctgcgctgaatgagggaaccggaggagcccgaggagccgccgccgccggggtgagggtaatgctccgtctccagcgtggaggaggagaacacggaggacgccagtcgtcgcagggggctgtaccgcgggagggagtgccccgagagtctgtcctcctccaactgaaagagaccaagaaagtggagggaaaagaggtgtcaggcacagactcgacagctccgtctccggggccacccaccgctcacagcccctgcggcgccggcgtcccgggcaagtgggcggggtcaggcagggtggaggagggtgcaaaccacccgccccaaggtcctgcctcagaatctaggctctggcctccaacgcccttccccctcctccttctctctggaacttctcacactatggtctctgcaaggagaccatggtcactcacctcctccgagaagccttcctggcttagtcctacctagctcagggttgttctggactggggaaccctttctctcaggaacgtggctgtgtgctctgagagagttccttgccatgtgttgacagctgtgtgtggcatgtctccccagctagattccgtgctactcattagggctcagaaactttccctgtacaccctccgccttggcacccccgccccatcacagggaggtgttgggatcggggtgaccatgcggcataaggtggtactctagagcccaattactcgtgtttgaatcccaactccaccacttaaaatctgagtgaccttgagcaagttactgcacctctctg

SEQ ID NO: 11420 - DNA, 1716 bp, Artificial sequence
  DNA replication origin
ctcaaagctctgctccccctcaactctgggctctttggcatccaattgcaaggccaattattggggcggggtggggggcagcccgacgggcagtgaggtaacgggagtcaggggtggggcgacagggccctccgagcctggaggcttagccgaacgcctccgcctgtccccatccgcaccccagcctggcagcactgaggggagccccactccagcccgcccccgccccggggccagggacccaaaggccgccagccagcagcagggaaaagcaaacgaaaacgggcgcgaaggcggggcgacgggggcggcgggggacgcgaacccaggggaagcctcggcggcggggtggggcgggagcgcggcggggccgaagtccggcggggggtgcagggcgccgcggggcgctgtgtggggcgggccgtacattcgtggcgctggccgcgggggcgggcggatggacgggacccctggcttggggacctgcgggggtccggctgcgcagtcctcgtgccctcccggccggggccgctagtgcagggtccggagagtgggcgaagtgcgcgcagctacggagggagagtgtgtgagtgtgggtgtgagtgtgagtgcgtgagggccggttagtgagtggccaagtggaccccactgcccgcacccccacagcctgtgcagggagggagggtgagtggtgggactgacggcggagccaagcggaggagagtctaggaaggttgtaggaaggagtcctgtgggctccatttccccctcctctccaccccttccccacccctcatttggaggaagcgggcactcaggcttggggcctcctgggctgggacgcccactggatggtgtgtggggaaccagagggatatgggagggttgtggccctcagacctggagcccttcccttagggagaaggatgcttgacattttcaggggctgactgtatggagggtgggctggttcctgccccttgagttgagtgtgtcccaggtctaagtggagtttggggtagggtgggatggggttcaggccctccggagagatctacacttccatccccaagtaccacatcaacccaaggacagcagaggatacagcattttccaggctccccacacacagctggagttgcccccatccccggtcagagccacaccctccccaagtatggttccctccactgcccactccatataaatacatttacacagctccttctgcctacccaggggcccaaggctcccccgaccactgcctgagcaagacagcaccacccctccccagaaaaagggatctaggcaggacagaagagagagcgagtccgggtgtcctgggaccagcatggctcagaggtgccaccatcccccacccactaggcagggctgtgtctgttttccccaaaactggaaatgcaaagggatatcgttgggttcaggatgttagcggttgggatgagtgttcagtggttattgctgtgacccaagctgccttgagtgtgtgggggatgtatattgagttatcgaaaatttactagcgcatttgtcacggacccagggtcctcagaacataccctctcccatggagaaaatactagtcccaccaggaggcccccactcaccacaaaaaggtccactggcccccacactcattcaggcacttatgcacaccacatgtataaacacagcacacaccacacatccccactg

SEQ ID NO: 11421 - DNA, 946 bp, Artificial sequence
  DNA replication origin
gctatgtacactaaggaggacgcaccccggagagagagaggaagaaaaaaagcgtcccatcttcgtgtgcgtgtgtgtgcgtgtgagcgtgtgtgtggttttgagtttttcgtgcatgcttccgctggccagggtcgggaaatagtgcaagcgtataatacagtattattgcagtacaaaatggggggtcgagggaaggacttacgatgggaggggaaggctcaggaataaaccgactgggactcaggacctccgcgagggtcctctcgctaatccccttcctatccctcccctactccgcccccaccccgcaattagaaggcgtctccttacgcaggaaggggctcagctgggccccggtgctgagtttctctctcctaccagtcccgcttctccgggggcaggggccagcccctctcctcgctcgacactgagaactctgagggcccggagccccgccccctcccccacggaagcccctccgagcggggagcggggtcgacggagcaagtgcaaaggaagcagatgttggtccctgagttttattttcgggggtgggggtgtgggaagagctggaaatgggggggcatgtttggtgacccccagggccctcagtggtggggtggggcaggggacgcggattggggcgtgggcaaaaagggggctgttgggttgctctgagagacctgggctcaaagctctgctccccctcaactctgggctctttggcatccaattgcaaggccaattattggggcggggtggggggcagcccgacgggcagtgaggtaacgggagtcaggggtggggcgacagggccctccgagcctggaggcttagccgaacgcctccgcctgtccccatccgcaccccagcctggcagcactgaggggagccccactccagcccgcccccgccccggggccagggacccaaaggccgccag

SEQ ID NO: 11422 - DNA, 996 bp, Artificial sequence
  DNA replication origin
tgaaaggagactgccagcagggcaagggtgactcaagtccaactaggcccaaacctctggggtgccctcctcacccagctgcctggctaaggtgtggacgaagctcatccactgacccagaacttgcccacccctcagtcccagagtcagcaacagactaacccctgccctctgcccagcccggcgacctcagagccagggtctacactgagagctgggaaaggaagggggagggtgaaagaaagcaggcggaggcgcaggttcctggaaggcgtctttaatcaggatttggtagtacacaagctctccggattgtctgcattaacatacagggacttaaaaaggcacaaaatccctcgcacagcgacgcgtgacggcggggcgccccctccccgcccgtgcgcggccgtgtgcgcgtgggtgcgtgtccgtgtcccacccccgtggcggcgccgcgcgtgtgcgtgtcggtttcaagtgttggatttgtacagtactcgcagtctaggggcagggggctcagtgcatgcttttctacccgggcctggggccaccccccgacgccgctatgtacactaaggaggacgcaccccggagagagagaggaagaaaaaaagcgtcccatcttcgtgtgcgtgtgtgtgcgtgtgagcgtgtgtgtggttttgagtttttcgtgcatgcttccgctggccagggtcgggaaatagtgcaagcgtataatacagtattattgcagtacaaaatggggggtcgagggaaggacttacgatgggaggggaaggctcaggaataaaccgactgggactcaggacctccgcgagggtcctctcgctaatccccttcctatccctcccctactccgcccccaccccgcaattagaaggcgtctccttacgcaggaaggggctcagctgggccccggtgctgagtttctctctcctaccagtcccgcttctccgggggcaggggccagcccctctcctcgctcgacac

SEQ ID NO: 11423 - DNA, 1959 bp, Artificial sequence
  DNA replication origin
cccacgcgcacacggccgcgcacgggcggggagggggcgccccgccgtcacgcgtcgctgtgcgagggattttgtgcctttttaagtccctgtatgttaatgcagacaatccggagagcttgtgtactaccaaatcctgattaaagacgccttccaggaacctgcgcctccgcctgctttctttcaccctcccccttcctttcccagctctcagtgtagaccctggctctgaggtcgccgggctgggcagagggcaggggttagtctgttgctgactctgggactgaggggtgggcaagttctgggtcagtggatgagcttcgtccacaccttagccaggcagctgggtgaggagggcaccccagaggtttgggcctagttggacttgagtcacccttgccctgctggcagtctcctttcactgaacgggtggggagggaaggggtgagtggactctggtctctgggactcagctccaaattgccaacttccgggtggggatggagggtgtgtagaagtagggggctgggcccaccaggcccagtgatcagttctgtatgggatcaggcttttgagaccaagtgtctggtgggactagaaagctaggatgccagaggcctgtgagaggacactgtactgaggagcctcccactggccctctgctacgatgggcaatctgagagatatgggagatgcagccctggccttgggggtgccagggtgggggtggcccgccaaggagggacactggagcatggactgtgagaacctggggttgggggtgcagggatggaacatgggttgaaggagaactcagtcagtgggaggggtgggccactaagaaggaaataatggcagacttctgagactggagagagaggggaaaggtgaggaggacaatgtaaaagaggaaggcccccccatacctccaccccatccccgcacactgccaaccagaaaggcaaaggggcaagctccagctgcattcccaaagccccggggcatttagaagacgccccccacaggctgtcagctcctcgccctggggcaggcaagggtgggttttggacacagagatgtggggtcaagtgggtgtggttctgcatagacccagggtaggtggccacgttcccgggtcatcttaccccttccgccaccttccccttccccggcattcctgggtgtggggtggagtggagggagggctcttggcttggcagagacgtttggagagtggtggcacagacagacaaatgcaagtgaagggtctgggagaggcggtgctgagtgcggagctgacagaggtgatgcaggcacatctcatctcctcgcaggtggagcaggggtgttgggggtgcttcttccctactggaggagaggaggtgggaggcatgcacgaggcagtttctgagagaggaggaggaactgctgtgagaggcacaagcctccgacctcagcataggaggagtggggagccagggctcaccctcctgctttcatcacacatcgcctcccagccccacatcttggactttgggactgtgggccggggtgcagtgcctgaagtctggggctggctggggtccaggcaggagtggctccatgcaccctgtgtgggggttaagggtggggctatgtggagccccgtctccagtgtcggtgtcagagaagtttccccaagggcatgagagcccagttttgttggtggcaattgaagatcagagtctggtccatcctctcccttcacttttcctcctaactggagtaaacatggacttgggctgggctcttgagctggtgaggcctagccctctagatgaggcacagtgcatggaggggaggggctggggctttcattctctctgagggtatcagtttgattggcctgtcctcctcctctccccacagccgaacccttaccatatatgcctttggctgaactctgaatcactaaggagc

SEQ ID NO: 11424 - DNA, 1333 bp, Artificial sequence
  DNA replication origin
gtgtgctcgcgcgcgtcctcgcgggtgcaggcggaaagctggggccgcgggtggcgcgcgtcgggcgcgtaaggctgtgctgggagctgctccagtgtggccggctgcgggtggggggccggggtgagggtgggggaccgcggagagcagcgggcgtcattatctggccccagcccggccctccgcgcctcctgcccggcctttggttgttgcgcgctgagcctggagtttccctctgggtcctttcttggagcccccgggggagggggtgccatcaggctgggcccgggccggcgggacgccccggggcggggggaccccgggccgggcctggtgcgagggggaggggctctctctgcgggacagggactggctccggggggacgcgctggcattgcgcgcggcggatgtggacgcggggaggcgcgggctgcgcggcgctgggggcctggctccggcttgggctcgccctgggcccaggccgcggccaggaggttgtttggggcggaggtcagcagcagtggccgaccctgggggcgtctgcagctggagcctgcttgagagcagaaggcaggagaaaagaagagggcaaagaaacaaaacaaggagaaatatttcagaatcctcctgggcactgagcactggagtccggcatcctcagagctgagactgagaccatggcacagatgggtaaactgaggcctggctctctgtcctccagggcaggacctcgaggggccacacgcttccaggctgctgctggaagagcctgctgctggctttctttggggtcctcatttcatctttaaaattctcatggattttgcattctaacctagaatatacctatgtttatattaatatgaaataatgttttctcccaaggagtcaaagcactgggctttatcctttggcttccaatgccccatggcataccagaggctgtgtgtggacccactggcccccatcagcttttcctaagcctggcctctccggcaccccctccacacatgcttactgaagccacttcactgagcccagtgacagggctggaacccgaatcagagtgaggcagagcacagttgggaggtgctggacaggaggtgtcactgagggtccctcctgatcttccatagcccctgaccttggttctggagaagcccctcctggtggaggcctgtggccaccctctgcccaccctggggctggcagcggtttctcacctgctggtgatggctgtgtccaatgctggggccgcgccatgggatctgctggcgggctgctgggctgcaacaggcatgggcatgcggaggccaatggggcggggaatccg

SEQ ID NO: 11425 - DNA, 2199 bp, Artificial sequence
  DNA replication origin
ggtgtgacacttttacagaggaagggctcaggacctggaggcctggtggagagaatgaatgctcagggggaggaggctgcagctggggttgggggcaccgggagatgtggcttcctctgccctggatgcttcctggggagaggcacagaggcagtcccctaggtgaccccctccccactggcccactttccctcccccacctctcctggtgacattcagtgactcagaggcctgaggtcagttgggagccctagggaggtttggaatcccaagggcagactgggttttgcgtctctgccagctccagtgctgagtgaagctgggggtagaatggacctggggctctctcaggcccccttcttcctcccagctccaaaccagggtgttgttggtcctggggcagaggtgaggctgggggccctacattcacggttcggttggtggcaaggagcaggcccagggcctgggcaccaggagtcatatcctggtccccacctggcacgagctgattgtcattcggagaagctctaggtgggaggcagtggcccttcctccactccctctgctggacccagagggcagtagagggccttgggagggcctcaagttgacaaggagggctctgtccggagaagtttcctgagtgttctgggagcttctgcatcagcgtggggtggacgtcaaaggctgtccacccaggagtcctcccctcagctggtctgcagagaagccaccaccctggcctggaagtggctgcccaagctgctgactctccatgagggggaggctgctttcagggtcagctgccttgtgggcatccttccgggtgatggtggctggacgcagccagactgctggggcacactaaggcctttcttcctctttccctggatgtcttggcttgctctctgtgactcagggaaggacagagaggctaggccaggggacagaggctgcaggggcctgtccagataggcagggctggctgtcccatctgcagccggtgtgctgcttgccccagatgtaggcagttgaggctcatgatgaggtggggtgagctatgcaggagccagaacccaggaagagtccccacatccattcctggagtagagcagctgcacgggctggggtcagggcaagaaggaacaggctgaagggtgagctgagggaagagtgggcttgggctggggacccatcactcaagcatacaatctggaagttagaagggcctttctgcctccaggggccagctgtctgttggtccacctgtctctgctctctctgcccattgcgggagacgatgcctgagccagccctccctccctcccacaggcgggaggacagggagggtgaccccaccagaactgagtccccgaatctccgaagggccagtgcaaagatggtaaccagccagtctccacctgctttgaactcaggaaagagcaggttggctggaactgcagtaggcaggactgaggttagatgacaggaaggaattcctgatggtgaagggtcctgagcactagatcaggggaacaggggagggagtaaaactttgttaaagccccctccaacttcccactgggaaatacttgcccaggaaggcagcccacacacttcctatggttcccacagaggctccacccaaatctggaggcaagaggtttctgcaccccagaggtgcaggggagcacatcccctgcccacagaatcacctgcccacccatctccaagatcacttgcccactgcctctcaccgagttgtccaggatggagccaactttggggcaggtcagacctgccccctcacacctgagtagaccgatgttccctgggtccccaacccagcctggcagtccagaggccgtccctggccacaatggctcccagaagactgtggggctggaccctcgcggggaggctggagcctccacttctggaatttgaggctgcttctctgaaggggtggggggactttggctggaaaggggtcggaggagggcaaggcgccgcaggaggtgtaggcagagattgctgggggagcatggagcgtagcctaggcctggtgggcgaacgaaccaggcgtccccagaagtggagtcctcgatgaaaagtggctgagccttccccggggcggagagactgatgtgaggctggccggcctgacgggcggcgggaggatgagaggacacagggcga

SEQ ID NO: 11426 - DNA, 1144 bp, Artificial sequence
  DNA replication origin
ccctcaggagaagcgtccagagggctgtgagagtgtacgatttgcagtcagaaggacagcaggacagtccccttcctcctctgtgaccctgagcaagttacctgtgtctgtcctgagctttcatttcctcccctgcctccaggacagtccctctgcacttgcccaccaacctgtgctccactctcctggccagccccagccccaggaactgggttttgcctgccctccctcagggaagaagagtccaagccaacagaaaaaggtccacaggctttttaatggtgtgatggctacttcccttccgagacccgatctaatcattgacagtggcttccagggtgttggggtggggtggacaggtgcaggatgggcagaggccatgcagtgactgggaagggcttggggaggggtgttacattctgtttggcatgtaaacattcttaggtggcttcccgagggaggggaagggcaactccctgctccccaccccatgcccaccagggctggtccctggagttcagaagactgagcaaaccaggcctctgtgaggagctgggaaatggggagcctggggcacagcccctctcctctcctgtgcccccttcgtgcacggtgtggctggggagggaaggcatgtgttggggtgagcagaccctgcatctgagtcagtgacataggttgttgtgatggggaagtgctgagggaggtggtgtgacacttttacagaggaagggctcaggacctggaggcctggtggagagaatgaatgctcagggggaggaggctgcagctggggttgggggcaccgggagatgtggcttcctctgccctggatgcttcctggggagaggcacagaggcagtcccctaggtgaccccctccccactggcccactttccctcccccacctctcctggtgacattcagtgactcagaggcctgaggtcagttgggagccctagggaggtttggaatcccaagggcagactgggttttgcgtctctgccagctccagtgctgagtgaagctgggggtagaatggacctggggctctctcaggcccccttcttcctcccagctccaaaccagggtgttgttggtcctggggcagaggtgaggctgggggccctacattcacggttcg

SEQ ID NO: 11427 - DNA, 1097 bp, Artificial sequence
  DNA replication origin
aggtggcggcggctgcagctgcggcggcgcgctccgagcctgcgtctagggcgcccccgggtcagagctgtcgccgtggccgccgctgcaagaaccatgtaccgcagcagcgctcgctcctccgtctcttcccaccggcctaaagacgacggcgggggcggcccgcgcagcggccgcagctctggctcctcctcaggcccggctcgccgcagctcaccgccgcctccgccctccggctcctcgtcgcggaccccggctcgccgaccccgctcgccctcagggcaccgcggccgccgggcctcgccgtccccgccacggggtcgtcgcgtctccccgtccccgcctcgggcccgtcgcggctccccgtcgccaccgcggggccgacgactcttcccgccgggcccggccggcttcagaggcagcagccggggggagtcccgcgccgactatgcccgggacggccgcggagaccatccaggcgacagcggcagccgggtaatcccacccctcgtccaggactccctccatcccccagtcccctcccccggaattcccgtttccagaaacgcccggggcctccagaccagggtcctaagcgcgaagcctccggccaactccctcggggatgccgagcctggaggcttctgtcagacccgggagcgttgacacaataacggactcgggagcgcacgggcgtctcgtcgggagtgcgcgctccgttccttaggaataggctgtttctctcatgccgggtgaggtgtggaaagtttgccaaggcgaggggcatttcgtccaaaccgtgtgtcttggtactttttgtagagttgatgtgtcctcggggttccgtacttttcatccccttacacctgagctgccttcctggatcttaggggaaaaagccgaaatgtccgtttttgtggcgagttagggacgcttgaaccctaccaggctttacgtctagagtgtaaactgttagcttaaatgaattggagctgctgcttcggaatgaagtgtgcaggaccacagtcactgccatagccactacctcttatcgagttctatgtcaggaattatgcctagcctttcactttgcacat

SEQ ID NO: 11428 - DNA, 1680 bp, Artificial sequence
  DNA replication origin
aaacatgatttaaaatttattgactccaagtatctatacacactgatttacatttttttcacatttattaagtcccaccaaaagtatgggtaaccaaaatccatatatactctaataaagacagggcatacacctctggcatatttttattatttttttcattaaaatgttattggtttcttattttatataaattatataaaatgtgaagctgggtaaaagtagtcaactagtaaaaattttatacatttttactgagtatatgccattataagaacgtatggaaatggatatatatatatatggatgtattttttgagagagggtctcactctgtcacccaggctggagtgcagtggcatgatcacagctcaccgcagcctcaacctcccgagtagctggggtacaggaacgtgccaccacactcggcaaattttttttttttttttttagaaatggaggtccttctacgttgcccaggctggtctcgaactctcaggctcaagcaatcctcctgccccggcctcccaaaatggtgggattataggcgtgaccctttgcgcctggcccacttttgtatttaggatgcagggccctgagattggcatctaggaaaattctggacttaggccaggggagggggcatgcctggatctcttacaaaaacttgccacgcctccagttggtcatgatgtgggcccctggtaatgaaggacctccaccatgaccacaagtactttagtcagaaaacagctcgaaaacgtgtgaagagagtccaccaaacaggcttcgtgtgagcaacaaggctgtttatcttacctgggtgcaggcgggttgagtccgaaaaaggagtcagcagagggtggtggaattatcattagttcttataggtttgggataggtgtacaaagtacattcttaagggcgggggagaatattacaaagcacctacttaagggcaagggggagaatatatcctgtcagttagggtggggcaggaacaaatcacaatggtggaatgtcatcagttaaggctattttcacttcttttgtggctcttcagttgcctcaggccatctggatgtatacgtgcaggtcataggggatatgatggcttagcttgggctcagaggcctgacaacgtctattttgggtttgattctggcccaccacctccacctcgtactttcctatcctcaatttcaacctctagaaattaggcaaactggaaagtaaactgatgcgggtcgtgttgcttcagctggggacaggatttcggtgggcgctcctgccggggtccgtaacctcccacacagctaacgtttacaggcccgtttatattatcacgaatggttttcaaccatttcgtgtccatccctaaattaagaggcttgaggggcggcacgaaagagcgaagacacctccgcacggtctccaaacccctaagtccagaggcctggagcatccccggaaaaccagatccctctccagagaagcccttccttccgctccgcccaccccgcgcggaggccacaggggtcacgtggcggccgcgggagggggaagtgggcggctctgcggccgccatcttgaggattcggaggcggggcgtgcagagctcagggcgcgcgcttcgcttcccctcccctcgcccagcctcgcgccggcgtctgtgctcct

SEQ ID NO: 11429 - DNA, 1206 bp, Artificial sequence
  DNA replication origin
ccaggcagaggctgcaatctcggcactttgggaggccaaggcaggcggctgggaggtggaggttgtagccagccgagatcacgccactgcactccagcctgggcaacattgagcactgagtgaatgagactccgtctgcattcccggtacctcgggaggccgaggctggcagataactcacggttaggagctggagaccagcccggccaacacagcgaaaccccgtctccaccaaaaaaaatatgaaaaccagtcaggcgtggcggcgcgcgcctgcaatcccaggcactcggcaggctgaggcaggagaatcaggcagggaggttgcagtgagccgagatagcggcagtacagtccagcttctgctcggcatcagagggagactgtggaaagagagggagagggagaccgtggggagagggagagggagaccgtggggagagggagagggagggggaggggggagagagagcgcttttttttttaatggaggcagggtctcactatgttgcttaagctggtctcaaactcctggcctcaagccatcctcctgcctcagcctcccaaagtgctggaattgcagacatgagccaacatgcctggctcacagatattcctaatggcatctagtgtggtgaatgttttccagagggttttaaatttactttgtccagatccatcagaggaatcactgtctatgacagctatagccttatggaatgtatttcctaaataatacttgggccaagcacagtggctcacacttctaatgctagcactttgggaggccaaggtgagaggattgcttgtggccagaagtttgagaccagcctgggcaacatagcaagacctcatctctacaaaaataaaaataaaaaattagccgggcatggcagtgcccacctgtagtcactgctactcaggaggctgaggtgggaggatgggttgagcccaagagtttaaggttgcagtgaactatgattgggccactgtactctagcctgggcaacagagtgagaccctgtctctaaaatgatacttgaggccaggcgcagtggctcacgcctgtaatcctagcactttgggaggccaaggcaggcagatcacctgaggtcaggagttcaagaccagccttgccgatatggggaaaacccagctctactgaaactacaaaacttagccaggcatgatggtgtgtacctttaa

SEQ ID NO: 11430 - DNA, 996 bp, Artificial sequence
  DNA replication origin
taaggtcatatattaacagcattccaaggcagaagaatttttcttagtacagaacaaaatggagtctcctatgtctacttctttctacacagacacagcaacaatctgatttctctatcttttccccacatttcccccttttctattcgacaaaaccaccatcgtcatcatggcccgttctcaatgagctgttgggtacacctcccagatggggtggcggccgggcagaggggctcatcacttcccagaaggggcggccggacagaggcgccccccacctccaggacagggcagctggccgggcggaggcgcccccccccacctcctggacggggcagctagccgggcgggggctgccccccacctcccggacggggcagctgccaggcggagacgctcctcacttcccagacagggcagctgccgggcggaggggctcctcacttctcagacggggcggctgctgggcggaggggctcctcacttctcagacggggcggccgggcagagacgctcctcatctcccagacggggcggcggggcagaggcgctccccacatctcagacgatgggcggccgggcagagacgctcctcacttcctagacgggatggcggccaggcagaggctgcaatctcggcactttgggaggccaaggcaggcggctgggaggtggaggttgtagccagccgagatcacgccactgcactccagcctgggcaacattgagcactgagtgaatgagactccgtctgcattcccggtacctcgggaggccgaggctggcagataactcacggttaggagctggagaccagcccggccaacacagcgaaaccccgtctccaccaaaaaaaatatgaaaaccagtcaggcgtggcggcgcgcgcctgcaatcccaggcactcggcaggctgaggcaggagaatcaggcagggaggttgcagtgagccgagatagcggcagtacagtccagcttctgctcggcatcagaggg

SEQ ID NO: 11431 - DNA, 808 bp, Artificial sequence
  DNA replication origin
cgtctctgcccggccgcccatcgtctgagatgtggggagcgcctctgccccgccgccccgtctgggagatgaggagcgtctctgcccggccgccccgtctgagaagtgaggagcccctccgcccagcagccgccccgtctgagaagtgaggagcccctccgcccggcagctgccctgtctgggaagtgaggagcgtctccgcctggcagctgccccgtccgggaggtggggggcagcccccgcccggctagctgccccgtccaggaggtgggggggggcgcctccgcccggccagctgccctgtcctggaggtggggggcgcctctgtccggccgccccttctgggaagtgatgagcccctctgcccggccgccaccccatctgggaggtgtacccaacagctcattgagaacgggccatgatgacgatggtggttttgtcgaatagaaaagggggaaatgtggggaaaagatagagaaatcagattgttgctgtgtctgtgtagaaagaagtagacataggagactccattttgttctgtactaagaaaaattcttctgccttggaatgctgttaatatatgaccttacccccaaccccctgctctctgaaacatgtgctgtgtccgctgagggttaaatggattaagggcggtgcaagtgctttgttaaacagatgcttgatggcagcatgctcgttaagagtcatcaccactccctaatctcaagtacccagggacacaaacactgcggaaggccgcagggtcctctgcctaggaaaaccagagacctttgttcacttgtttatc

SEQ ID NO: 11432 - DNA, 1308 bp, Artificial sequence
  DNA replication origin
gactacgatcccaaccccagccattcccgcgcctggcctcgctccgcgatgcccatctttcccctccttgcagaccccgctcccgggttcctgtcttcgctctcctcgctctcttcgcctgctcaacccttccctgcccccatcctcccgctacccccatccccttcttctgtcccggcgcccctctccctcgtcggctcctgtcacttggaacccgtatccgtgccgctatctccgcgtccggccgcctcccaaccggtgccgtcccacaggtgtccacgcgtccggccgtccatccgtccgtccctcctggggccggcgctgaccatgcccagcggctgccgctgcctgcatctcgtgtgcctgttgtgcattctgggggctcccggtcagcctgtccgaggtgagcgcgcccgctgggctccagtcgcggccctgtccagccgtcctcgcttgcacgttgacctctgccggccggaggcggcactgcagtcgctccgacccgcggggcaagcaagaccgaggttgcctttttggaatgggatgagtttctgtgttatgtcctgccctagggttgagtccgctcagttactggaaccccaatcctctcctgagtcccgcatcccagcgagctgtgccctgactcagactcacccctcccacatcaatctcttgcagccgatgactgcagctcccactgtgacctggcccacggctgctgtgcacctgacggctcctgcaggtacctgtcctgagcacgtgcccccaaaccctttggtacccatttctaagcccttcacgtgcacaacagtgtctaggggcttcagactctactcttcatgcctcatcactcctatggctgactggccagtccccctttcccctttacctcacctctcttgcttcttctagtttttatctccccacttctttaatctcccaagtctgatccagggattgtctgaactcctgacagggagagagacctaaagcttgagagagcttggggattgggtgccatgaggaaatggaaagataaaggaaaaagggaaagagaaatggtttagcctggaaaagaaatgctgcagggagagttgctggggagaaacacttacaatgaaagaggatctttcttgatgagtttgagtagttgactcactgggagattgggcaaattctgtagcaggaggaaagtggacataaggaaatgagttgatgaggcaggtagttcaattggctgggggtctttgagactcttcacccctggagggcttttaaaatatgggtcaagtgtttgccctggaatca

SEQ ID NO: 11433 - DNA, 775 bp, Artificial sequence
  DNA replication origin
gtacctgcaggagccgtcaggtgcacagcagccgtgggccaggtcacagtgggagctgcagtcatcggctgcaagagattgatgtgggaggggtgagtctgagtcagggcacagctcgctgggatgcgggactcaggagaggattggggttccagtaactgagcggactcaaccctagggcaggacataacacagaaactcatcccattccaaaaaggcaacctcggtcttgcttgccccgcgggtcggagcgactgcagtgccgcctccggccggcagaggtcaacgtgcaagcgaggacggctggacagggccgcgactggagcccagcgggcgcgctcacctcggacaggctgaccgggagcccccagaatgcacaacaggcacacgagatgcaggcagcggcagccgctgggcatggtcagcgccggccccaggagggacggacggatggacggccggacgcgtggacacctgtgggacggcaccggttgggaggcggccggacgcggagatagcggcacggatacgggttccaagtgacaggagccgacgagggagaggggcgccgggacagaagaaggggatgggggtagcgggaggatgggggcagggaagggttgagcaggcgaagagagcgaggagagcgaagacaggaacccgggagcggggtctgcaaggaggggaaagatgggcatcgcggagcgaggccaggcgcgggaatggctggggttgggatcgtagtcaggacggaggggtccgcgggatggggaca

SEQ ID NO: 11434 - DNA, 1202 bp, Artificial sequence
  DNA replication origin
ggctctgtgcctgtggaggtggctgtgtgaaggtgggaagctgctctgccccgactagcgactgctccttccgatgttttgaatttaaagatggtgaaatctcaatctgaaggactagagatgggcgctagcgttcctgacctctgccctgttgtcctgcacaaactagaaattatgttctgggtccttgtctttttttgggggggggcgggggtcggagttttgctctgtcccccaagctggagtgcagtggcgcgatcttggctaactgcaacgtctgcctcccgggttttcaagcgattttcctgcctcagccttccgagtagctgggattacaggcgcgcaccaccacgcctggctaatttctgtatttttaatagagacgggtttcaccatgttggccaggctggtctcgaactcctgacctcaggtgatccgcccgcctcagcctcccaaagtgctggaattataggcgtgagcccaccgagcttggctgggtccttgtcttgaaatgtgtctctgagccattagccagaagggggcaaagaggcctggagggcagctttcccccactccccctccgttactctctgaatctgagctccaggtttgggcagttgaggtttagcctgaggccaaggacgaacgtgatggggtacaggagaagacttggcggtggagggggttttgtgtgcacatttacagagtcaggggcattcccagtccagaaaggattctcagaggcagtcacaaaaaggaatggggtggaagggctgagacttgagggagggaagggtggtgggggtagggccggggtgtggttgggtggatcgggttgatatttatatagggataggttgatcttggaaggctggagacggcaacgtggacaggaagaagcggagggcgaggaggagcagaggagcacacagatgaagcaggtgatgaaggctttacaagcggggaggcgtgggctggtgacaggcggagggcggggagcgattgcctgcgtgtgcatagatctatatgagaagcgtgatgagcggcggacaagcgaaggcagggctggggcgtgggccgcggagcgctggtcgggaaagtgggcatgggagatgagagaataacggggttgcgctcctttggcttaatagtttgctcccattgagactcctaagatttcctcctctcttggaaggaagctg

SEQ ID NO: 11435 - DNA, 1045 bp, Artificial sequence
  DNA replication origin
ccagaatagggagggttaagccctcctccagcccttccccacaatccctgtgtctctggggtgtccctagtggctgggcaccaccttacccccaccatagaggtcaagagccattaaggaggcccatgcttcctctgcctgccccagcctggattcctgagtctccatgctgccccccgtcctgccccttcctgagaggagtagaaagatgttctcgcccacatcatcagagctctggggccacacccccttccctctgcatttcgattttcatcactgccacactagcccaagccctcaacagggtcctgctcaccagatttggccccatctgggggcaggaggccacagatgaggttgatggcttcatcacccagcatgcagtcccccaggtccagagccacgagggcagggtggagggccagggctgggttcagcaaggccagccccgcatctgtcagggggctcccatgcaggctggaggagagtgagagagcagggttactgcagtcctccgcactatctacatgggaaaggggcactttcacttctgtcagccctaggtatggggagggcagtcacagcgcttgagaggcctggaaaaggagaaggaaagttctagattctcagggaatacagatagagggagaattcggtttgttttctggggcagggatccaggacattgcacagggaggggcagagaaggggtgggtgggtggtggaccggaactctgcagtgggcagggctctcgtccccacggggatattcccccttgggaaccaaggagctgccccagtgaagtaaatgcagatgattaggtggggaggtacggcccccacctcatgtcaggaactggtgggtatcccaacacggctagggtcgcgcgtgcaaagtccaagcatgtgcttggagggtgctgtgaaggcatgggccgaggcacggtgtatgtgcataaggcatgtgaaggtaggatggtactggaaggagtgtggaggaacaggaggtgccaggggagtgtatggaagggtgcagtgcccggga

SEQ ID NO: 11436 - DNA, 801 bp, Artificial sequence
  DNA replication origin
gaggctgcggcgggggcggagaagagctaccgggactgagccggagccggccagaggtgcggaggcgtccagggcgcgggccgggctgaagtggggcggcgctggggcgggggcggcccgcacggtccgtgtctgggcgttggggcgggtgcgcgttccgggggttgggcaggcgctgctcggcgcttgtccttgtccctcgcggtcgcggcggcggcggcggcagcggcagcgagcggctcaagggcttcggcttaccggtctcggctaggaggccgtacccgctccctccttctctgccgcccggctccccccgaccaccccgcgggcctggccgcacggctggcagagagagcctgaggcgggcggctggcggcagctccggctccagctccagagagcgagcgggcggcgagttcccatggcaacggccgcgtcaccggcgctcgccccgccccctgcccggccaaggccacgccggcccgcgaggttcgcgtacactgggtggttcggggcaaggagctgggagcgataggccgctcttcccttgggagtggggtcagccaactggcaggcggcaggcggcagggctgagtgggtagggctgacggggagcggaatggaggcacgccccgtggagatggcgttgggcacggttactgctgcttctgcccattcttccatccttccccgttcctaaggtccatacccccgccggaatccagggcactgttccctcctatttggaaggccccagggccctttcatccgcgccgcgcctcgctcccgcccccgtgactc

SEQ ID NO: 11437 - DNA, 1112 bp, Artificial sequence
  DNA replication origin
ccagggccctttcatccgcgccgcgcctcgctcccgcccccgtgactcgaggcgcagcgtgcgtggtgatcccggcccatggggacttccccgcttgctcctcgccaagatggcggcctcatcagggaggccccaggggccacggctgggcagagccagcttgagctgctggggagaagggtaccccatagggtccctagggcaggggagcctcagatagatgcaaggtcctggtgccacaccttctcaggtacgcagggcactgttgacatctgagggtgtgtccgtgccgcgagactggggcagccaatacaaagaaggtgccagggccagggccctggagcactggtgaggacgtgaaggcggctgagccacactgcacggtgcaggcggtgctgtctcaactttgtcctctggccagggtggtgggggactcacttgtgtaacgcaggacaaatgaagggcacctctgtttgtccctttgttaggagggatagatgctgctgacccagatttactagtgttaagatgattattttacataaaatataatattcaatatagtgaagggaggtcaaaggccctattcccactcttagccacctgaattaacttattaagtggagcatattaaagaggtggtgggggtggatggtgctatgttaggagtggtggttggttttaagaggaaagacagaaaaactaaaaggagctggccccagtaccaccaaggcaaagccaaatttggcttcaattaagagctccacaggaaaattatcaacacaatgcccaggtgcagaagatccttgttttgacacggggtttaagtcgggatgttttgttcaattgtcactgcttccttggcttcccaagagagcagctgagcccagactcaagctggctgcagtgttccatcaggcttatggcttttgtgcttgaggcctccctgccgcttcatgggtcaggtgtgatattcaatcactgccttctatgtagtctggcctgtcccacctttatcttgcctgggtgaggatatgaagaagggaacatatgacattaccactgttgactgagtaggaaagtatataggaagcgggatgacagggaggacc

SEQ ID NO: 11438 - DNA, 1038 bp, Artificial sequence
  DNA replication origin
tgactttagtgtgcacgaagacccaaagaagagagttttgtaaatggagcggacttccaggcccagagggggaatccccaagacacttctggacatcgccggccctccggctgctggcagctggtgccttggggccattacctggatgttttcttcgaaccctccccattccgggccagctccatttcgggcgccgcccgccggcgccgctgtagttgccatgtcccttgagggctcccgtcgctgaaacccgcgctagccccgcgcgcggagtgggcaagatgtgggcctccggaaggtagacgtccagggtcgaggagaggtgggatcggccggaacacaaaaaggagaagcccggatgtttggacaaaagcaacttccggaagctggggacgtggacgggggcggggaaaaatctcgcgatatttaagattccaggaggcggtgcgttgccacggagacggagcagggctactaggacgcacgcgcgagatagaacctctagtctcgtggagagattgaagatggcggcttctcaggcggtggaggaaatgcggagccgcgtggttctgggggagtttggggttcgcaatgtaagccttgtggccttgagctcgggcgggaggaatgagagcggaacagggatgggtcttgggattggcgtggggatagctgtgggctcactgtcccttcgtggacaaattcgtccctttgctctaggtccatactactgactttcccggtaactattccggttatgatgatgcctgggaccaggaccgcttcgagaaggtaagtggggccggagttgtctggggagggttatgaaggccagaccttgtggtctgagcagcctgtgtctgtctcagaagctgctcttgggggtcgctccgtttgtaagtttgttgagcaatgtgctagacgctccgtttacaggccaaattagacacggtttctacccagttctgcaaagatgttcagtcttgttgaggaatggtgtgtataaacagtgaatctagtgtaatatggtgaaggtgg

SEQ ID NO: 11439 - DNA, 773 bp, Artificial sequence
  DNA replication origin
atattaataataaaaaccaaactaatggaacccaattgtttctgattccaaaccctgtggcagacatctacatattgtaacatttcctccaagtggtggtcactctcttttttgaagttaacatcactttaaaaatgtacagcacaagtattttctcctaaatggccatttctcacagcccacacacgttgttttatgggcaagtaagcttgaattgtattaacacccccaaactgcaacataagtcagtcccaagagcagagcattcgggtctcacgcaaactactttcaggaaaccaaagtgcccttgttaaaatgcaaagtaagtggtagaagttatctttgcgcaaaatagcctaaaaatattacactcaaaaacatgggagaagtaggggtgcgagaatttccccggaaaatgtccaagacacaaacgaaagttagcgagatgttaaagcatataagcataagggtaccagaggggctggagctcggtcagggccaggggagtgggccagcaggaaaacgtttagtgcaggagagaccataaagaacgaagctggtgttgggggcgggatctacacgtgcgcctcgggaaggcgaggggatgtcgggcttggggaatgaaaatgggcgagggtcatgttgcggacaagagtgcacagaagcgaggaaagggggaggagagggctgtgggaagctgcggcgagatgagaagcagcatagggaccggagtgtcccaggcaaaggacaggagcggcgagtagagaaggcgg

SEQ ID NO: 11440 - DNA, 1444 bp, Artificial sequence
  DNA replication origin
tgggggggtcagccctccgcccggccagccgccccgtctgggaggtgaggggcgcctctgcccggccgcccctactgggaagtgaggagcccctctgcccggccagccgcccagtccgggagggaggtgggggggtcggccccccgcccggccagccgccccgtccgggagggaggtgggggtgtcggccccccgcccggccagccgcccagtccgggagggaggtgggggggtcagcccccctgcccggccagccgccccgtccgggaggtgaggggcgcctctgcccggccgcccctactgggaagtgaggagcccctctgcccggccagccgccccgtccgggagggaggttggggggtcagccccccgcccggccagccgccccgtccgggaggtgaggggcgcctctgcccggccgcccctactgggaagtgaggagcccctctgcccggccaccaccccgtctgggaggtgtgcccaacagctcattgagaacgggccatgatgacaatggcggctttgtggaatagaaaggcgggaaaggtggggaaaagattgagaaatcggatggttgccgtgtctgtgtagaaagaagtagacatgggagacttttcattttgttctgcactaagaaaaattcctctgccttgggatcctgttgatctgtgaccttacccccaaccctgtgctctctgaaacatgtgctgtgtccactcagggttaaatggattaagggcggtgtaagatgtgctttgttaaacagatgcttgaaggcagcatgctcgttaagagtcatcaccaatccctgatctcaagtaatcagggacacaaacactgcggaaggccgcagggtcctctgcctaggaaaaccagagacctttgttcacttgtttatctgctgaccttccctccactattgtcccatgaccctgccaaatccccctctgtgagaaacacccaagaattatcaataaaaaaataaatttaaaaaaaaaaaaaaaagattctttcactcaacaacaatcaataaggtagacttctgtgaccaaatgtgtgaggatttctccccaccaacaaacaagcaatcaattctgcagcagacaccaagtgggtatcctccaattcgagtctgacattatctacctggagaaagcgtcagatctcacaggttgatggctcagtcccacaagactgccccctacttctgatgccaatcacaagccacaggttgttttacctgtgcttctaactgactggatataaattgggaatctcatgagcccctctttgggttcagttaatttgccagagtggctcacagaactcaggtaatcaaatttactagtttattataaaggatatacagatgaagagatacacatggcaaggcatgccctccctgggaacaccactctccaggaacttccttttgctcctatcc

SEQ ID NO: 11441 - DNA, 1012 bp, Artificial sequence
  DNA replication origin
aagcatccgtaatccaaaaatcctaaacctacaatgctctaataaacatttcctttgaatgctgtgttggtgcaaaaaattttttggattttggaagatttcaaatttcagattagggataccctgagtggaaaaaacagtttttaagattctttcactcgatcttgagaggaggtcgcggcgccggaggccctagaaggctcgaaggcgccgcgggctggggtcggtggcttagggagcccgtccggccatggtggccgcgggtggtggttggcgcggctgcgctgcggcccggggcagtgcggagccgggacagtcgcggcgctgacgcccgcgggccccagctgcagatatgaagcggagccgctgccgcgaccgaccgcagccgccgccgcccgaccgccgggaggatggagttcagcgggcagcagagctgtctcagtctttgccgccgcgccggcgagcgccgcccgggaggcagcggctggaggagcggacgggccccgcgggcccgagggcaaggagcagccgcctgccttggcctcccaaagtgccgagattgcagcctctgcccggccgccaccccgtctgggaagtgaggagtgtctctgcctggccgcccatcgtctgggatgtgaggagcccctctgcctggctgcccagtctggaaagtgaggagcgtctccgcccggccgccatcccatctaggaagtgaggagcgcctcttcccagccgccatcacatctaggaagtgaggagcgtctctgcccgcccgcccatcgtctgagatgtggggagcgcctctgccccgccgccccatctgggatgtgaggagcgcctctgccctgccgagaccccgtctgggaggtgaggagcgtctctgcccggctgccccgtctgagaagtgaggagaccctctgcctggcaaccaccccgtctgagaagtgaggagcccctccgcccggcagctgccccgtctgagaagtgaggagcctctccgcccggcagccac

SEQ ID NO: 11442 - DNA, 1203 bp, Artificial sequence
  DNA replication origin
aagtcctagaaaaagaacatagcgcgaggactggaagtcagactacagctcccttaagcctttgcgcgccaaggcgcgctccttccccacgcctccgacgactcccgcggccacttgcgccgcgatgcctcctgggagttgtagggcggcgacgtgtcatttaagtgaattcccaggcctggggactctatatcccgtggtgccccgcggctgtttctgacgcgacccggaggccagggaggtggggggcgtagcttgtgcagagccccaccccactctgctcaggccggccggacacggcagtggcagtaagggcggcggcgacggcggcggcggtcgggggaggggccgggcggggggctggcggcagcggcggatggactcgcgggtatcggagctgttcggcggctgctgccggcccggagggggcccggccgtgggcggaaccctcaaggctaggggggccggcagcagcagcggctgcggggggccaaagggaaagaagaagaacggaaggaacagagggggcaaagccaacaaccccccgtatttgccccccgaggtgagcacctgagaagtggtagggcgggaagaagccactctttccggcccaggactctagggaggcgggacccagataattaatctccccttccggtgtcgagaccccagggaggaggggcacgggaggagaacacctctttcaggtcccgggaccccagggaggaagggcagagactggactctcaggtgacaggacctcagggaggaagagtggagagggaggactcccccttctgatctagattaccccaggagagaagtagagaaaggggatcccaggaagagcaccccgaccaactgcgtgtgccgccatagggcaagagagactgcatcctgggacgagaggcagacagtaaccaccacttcttctaaacttgttccacagggagaaggggagtacccgggaaaagagcaatatgttccacacggacacacacacagtactcgggaaaagagcagtatgttcactacacacacacacacacacacacacacacacacacagcctaagccagtggttatcaaactttggcatgtatcgaatcacccggattgctggcccccaacgcctggccaattttatttttttattatttatttatttattttttttgagacggagtctctgttacccaggct

SEQ ID NO: 11443 - DNA, 1056 bp, Artificial sequence
  DNA replication origin
cttcttcccgccctaccacttctcaggtgctcacctcggggggcaaatacggggggttgttggctttgccccctctgttccttccgttcttcttctttccctttggccccccgcagccgctgctgctgccggcccccctagccttgagggttccgcccacggccgggccccctccgggccggcagcagccgccgaacagctccgatacccgcgagtccatccgccgctgccgccagccccccgcccggcccctcccccgaccgccgccgccgtcgccgccgcccttactgccactgccgtgtccggccggcctgagcagagtggggtggggctctgcacaagctacgccccccacctccctggcctccgggtcgcgtcagaaacagccgcggggcaccacgggatatagagtccccaggcctgggaattcacttaaatgacacgtcgccgccctacaactcccaggaggcatcgcggcgcaagtggccgcgggagtcgtcggaggcgtggggaaggagcgcgccttggcgcgcaaaggcttaagggagctgtagtctgacttccagtcctcgcgctatgttctttttctaggacttggggggaatttagagcctcgaggcctggggtggggacgcgaggacaccagcgtagaagagcttacatcagaatcgagctttgtgggcgctccgggatttggccctttagcgcggatcctagacaacaggttttggacctcgagagctgcagaactgaggctactggtgccgccagcctgctggctccgcctctgcctcagtttcttcccctatggcccgcgtgccgctggggtgagtcagggcgaacgccagggcggaggcggatggtgattagccaaattacggctgttattgttgggatgattatgctacctttacatagtagtcactgctttattaccaggctggcaccgtccaggggctggttttaataaccggaggcaccgcggtggccccgacacgagacccgaacccgtaaaccagcttcctccccgaaggctgcaagcatacccaaagcgag

SEQ ID NO: 11444 - DNA, 825 bp, Artificial sequence
  DNA replication origin
cctttagcgcggatcctagacaacaggttttggacctcgagagctgcagaactgaggctactggtgccgccagcctgctggctccgcctctgcctcagtttcttcccctatggcccgcgtgccgctggggtgagtcagggcgaacgccagggcggaggcggatggtgattagccaaattacggctgttattgttgggatgattatgctacctttacatagtagtcactgctttattaccaggctggcaccgtccaggggctggttttaataaccggaggcaccgcggtggccccgacacgagacccgaacccgtaaaccagcttcctccccgaaggctgcaagcatacccaaagcgagtattcctcctcccctttgttttgaagcagaaccaatcgggaagaactgagtttggttttaaacggccaagactgtaggaggggcctggcccctacttcgggcggggctagggctcgggttacaccaaccaccacgagggcggggcagtggccgggaatagaaacttggcctagggccacaggggatttttggcttttgactctcttgtgaagcaatctccagctctttagtgctgttgcactctacagagtacatacattcagcgacataagccagtgcacagaacacagaaaggcagggtggaaaagcagttatgttgctgagctgcgagtcaggacgctagggctcaattcacagccgcatggctgtctcatgactcagaccactcacagtgtgtccacttctcccctcttctcgaactgcgaggtgctcatacacggtcaagaaattaaacaactcagccgggt

SEQ ID NO: 11445 - DNA, 1165 bp, Artificial sequence
  DNA replication origin
gccgtggcaactgaagacatcccgtcccaaactctggaaaggatgagggagggggctgatgcctaggcctccgtggggaggaggtctgggcggtaggcggtggggtgggtggaacctagcgtccagctaggcggaagggcggagcttcaggtctccatggaggcggcttctcctagcaactcgacgggcgttgagcggagccgctgacctgatggacgccgacagcctcctgctgtctctggagctggcgtccggcagtgggcagggcctcagcccggaccgtcgggcctcgctgctcacgtctcttatgctggttaagcgcgactaccgctatgatcgggttctcttctggggccgcatccttggcctcgtcgccgattactacatcgcgcagggcctgagtgaggaccagctcgcaccgcgcaagacgctctataggtgaggaggcccccgggacgggctccccagagggtggctacctggaggcagggcggggtgggcgggtcgcagcaattgaaaggggcggggcccatggggccaagggaggtgtgggcgggatctgagatgagtggaatgggggagaccctggggggcgggcctggggacggtcaagaggtggttgagggaaagggcggggatggggatgtctcggaatctgaggctagggcggagcctgagagggcggggcaatggacgggcgatgtcccccggagggcggggccttgcgagagcttgttctccgcctgaggaggccaagagaaacttacatgcggatgggtttataagagagacagggccaagaacgcaggtgaagcagtgggaaggtttctggaaaatgcggacctggagaagaagccaggttccagccaagtgctgggcctggctcagtttggagaaggctcagtttggagaagagtcagacgccagagggagagggtggtgctctttgatagaggtatctgctctggagctggaggcgcttttggaaatagagaacgaatgcggaatggggagagagctggggaaaattccctggtcactaccatacaggaccatccagctatttatttatttatttttgttttgaggcagagtcttgctctgtcacccaggctggagtgcagtgtcgctatcttggttcactgcaacctccgcctcccggatt

SEQ ID NO: 11446 - DNA, 1194 bp, Artificial sequence
  DNA replication origin
gaatacaggatgggccgggcgcagtggctcatgcctgtaatcccagcactttgggaggcagaggcaggtagatcacctgaggtcaggagttcgagaccagcctgaccaacatggcctgaccccatctccactaaaaatacaaaattagccaggtgtggtgttgcaagcctgtgatcccagctacttgggaggctgaggcaggagaatcgcctgaacccaggaggtggagtttgcggtgagctgagatcgcaccattgcactccagcctgggcaacaagagcgaaactctgtctcaaaaaaaaaaaaaagaatacaagatggggtactattttaaatagtttggtcagggatagcctctttgataaggtcacatttgagaagacacctgaagtgactgagagagtgagctatgtaaatatctgagggaagagaattctaggcaagtgcaaatgccctgaggcaagtgtgtgcttagtgtgtttgtggaaccgcatggagactagtgtggctagagaagaataagtgaggggagtgttgtaggatacaaggtcagagaggtgaggagtaggaaacaatcatgcagggccttgtggggcattgtaagacttggcttaattggaagccattggaaggttctgcagaggagtgacatgacagcttaggtgtgaacagttgggtggggactagtccaaagggggaatagatgtggagtcagggagactagttaggagtcgatggcaatatctagacagtaggggatggtggcttgggccaaggtgggagctgtggaagtggttggattctggatacagactaggcagtagctggggctctggaaggcaggtgggaaagattgcaaaaagaaaagaggggtgagaatgggtccctggaaatacttaaggccctggaggagcgggaagggagatgtcagaggaaatagaactggagatgcatttcttggccgttaggtgtcaaggatggccttctcccaagcagtttcttgaagtggtggggcagaaatcatggcacagtgggctgaagagtgaaaaggaaggggaggaaagtcccccacagggcaattgttgttctgagattattgttgaaagttgggaaagagggagggaaggacaggaacagcattttctagaaggacatggatttggagggttgctgttttagtaggctgagcagttt

SEQ ID NO: 11447 - DNA, 1276 bp, Artificial sequence
  DNA replication origin
tcagcaaggggcctcccatatgctgtgtgctcaatgatgactgcattaagttggctggcccctcatcccttgctggaggtggtgcttgtgtcttcttttggctgacgagtctcgggagaagggaccacatctactcctaatcattcttctgggctcagtacagggcctgacacagaagagagccctccaaaaatgtttagtgaaagaacaaattcacttgtgctttcccaaatgcatcctcaggatacataccagctcagttgcctcattctttcaaaaaatgtttattaaacacctactatgtgtcaagcataattccaggtatttgggataccacaatgaacaacacagatttgcctgcccacatagatttgacattctagtgggtgagagaggagataaagaggaacgcataaaaataagtaaattatagggcatattagaggctgataaaggctttggaaaataagagttgactaagataaggagagaagacagagtgtcaagggaagtgtggttacagaaataaatagtttggtaagggtagagagatttaggatcaaaagctaaagggatatgagggagtgagccatgatgatatttgggggaagagcgttcaaggcaaagaaaacagctggagcaaaggccgtgaggcaggagcgtgccttgagggtttgaggccagtgtggctggagcagagggaccgaggagagtagggggtggagaggaagggggctgaggtcagatggtgtggttctgaaggccattgtgaggtcctggcttttcctgtgagtgggaagggagtcactggggtgggttgggcagaggagggatgtggttggcttaaaaagagtcaaatagaactctggttactaagtggagagtagactgtagggtcccagggcaggagggaaacctgcaggaagactgaagtagtccaggagagaggggctgggagcttggtgcaagcggtggaggtggctgggagtggtgggtcctgaatatatttcaagggtcgagccaacaagatttcttgatggttgaaggtgagagggagaggtgtcaaaggtggatccaagattgctggcccgagctgttggaaggatagagttgctattagtggagatagggaagctgtggatgaagcacgtttgaaggaaaagatcagaggtttggttttggccatgttgagtctgagatgggctggtgggctgatgcctagatggctgactattcaagtctggaatcctttgatctgggtgaacttaccacttga

SEQ ID NO: 11448 - DNA, 1309 bp, Artificial sequence
  DNA replication origin
tctgttggctcttttaggggctgaagaaggccgagttgagaagggatgcaagggagggggccagaatgagcccttagggctcagagcctccatcctgccccaagatgtctacagcttgtgctcctggggtgctagaggcgcacaaggaggaaagttagtggcttcccttccatatcccgttcatcagcctagagcatggagcccaggtgaggaggcctgcctgggagggggccctgagccaggaaataaacatttactaactgtacaaagaccttgtccctgctgctggggagcctgccaagtggtggagacaggactagtgcacgaatgatggaaagggagggttggggtgggtgggagccagcccttttcctcataagggccttaggacaccataccgatggaactgggggtactggggaggtaacctagcacctccaccaaaccacagcaacatgtgctgaggatggggctgactaggtaagctccctggagcgttttggttaaattgagggaaattgctgcattcccattctcagtccatgcctccacagaggctatgccagctgtaggccagaccctggcaagatctgggtggataatcagactgactggtcccactcttcccacaggcctcagagccccaactttgttccctggggcagcctggaaatagccaggtcagaaaccagctaggaatttttccaagctgcttcctatatgcaagaatgggatggggcctttgggagcacttagggaagatgtggagagttggaggaaaagggggcttggaggtaagggaggggactgggggaaggataggggagaagctgtgagcctggagaagtagccaagggatcctgagggaatgggggagctgagacgaaacccccatttctattcagaagatgagctatgagtctgggcttgggctgatagaagccttggcccctggcctggtgggagctctgggcagctggcctacagacgttccttagtgctggcgggtaggtttgaatcatcacgcaggccctggcctccacccgcccccaccagccccctggcctcagttccctggcaacatctggggttgggggggcagcaggaacaagggcctctgtctgcccagctgcctccccctttgggttttgccagactccacagtgcatacgtgggctccaacaggtcctcttccctcccagtcactgactaaccccggaaccacacagcttcccgttctcagctccacaaacttggtgccaaattcttctcccctgggaagcatccctggacacttcccaaaggaccc

SEQ ID NO: 11449 - DNA, 921 bp, Artificial sequence
  DNA replication origin
tccacagtgatttggggaagtagagcaatctccccaagccgtcggcccgattcaagtggggaatggcaagcaaaaataaattaaaacgagaaacaatacagttttaaaaaaaaatgtttaagaaaaaagaagagggataaaacccggatcaatgaatatcaaattccagcaccgagcgccctggccggtgagtccgctgaccggtccacctaaccgctgcgcctcccgacagagcgctggtgctagcccccagcgccacgacctccgagctacccggctgccccaagcctccgcgatcctccccgctaccagccgacttttaaaaaaaaaaggggggggcgcatggctccgccccgccgggaccccgcccccggcccgccccggggggcggggacaggcgagcctcagcccttccacacgcggctcgggcccgggctctgcggacgctcagtgaagcctggcccgcagcccgccgcaatgaaggggaagctcgacccccaccaaggttcacagcctgaaaattacccatccgcccccggaaactctgtccagagacacgcgcccgcggggcattggcgaggagggagcaggaaagtgaggttacgtgcggacagggcctgagagccgttccctctttgctaggaatattgaagggggcaggggaaggcggagagccggacagggacgggtggggagagggacacacagatctattggaatcctggagtgacccctggccttctccccgctccaacgccctcaaccccacacgcacacactcactcacccacacagacacacacgtcctcactctcgaagacgctgctcgctccattcacccagcttccctgtggtggccgagcgccccctagtgactgccgtctgcacaccccggctctggctaaagagggaatgggcttt

SEQ ID NO: 11450 - DNA, 827 bp, Artificial sequence
  DNA replication origin
tccagccgcgcgcgctccccaggccctggcccgggcctcgggccggggaggaagagtagctcgccgaggcgccgaggagagcgggccgccccacagcccgagccggagagggagcgcgagccgcgccggccccggtcgggcctccgaaaccatgaactttctgctgtcttgggtgcattggagccttgccttgctgctctacctccaccatgccaaggtaagcggtcgtgccctgctggcgccgcgggccgctgcgagcgcctctcccggctggggacgtgcgtgcgagcgcgcgcgtgggggctccgtgccccacgcgggtccatgggcaccaggcgtgcggcgtccccctctgtcgtcttaggtgcagggggagggggcgcgcgcgctaggtgggagggtacccggagagaggctcaccgcccacgcgggccctgcccacccaccggagtcaccgcacgtacgatctgggccgaccagccgagggcgggagccggaggaggaggccgagggggctgggcttgcgttgccgctgccggctgaagtttgctcccggccgctggtcccggacgaactggaagtctgagcagcgggggcgggagccagagaccagtgggcagggggtgctcggaccttggaccgcgggagggcagagagcgtggagggggcagggcgcaggagggagagggggcttgctgtcactgccactcggtctcttcagccctcgccgcgagtttgggaaaagttttggggtggattgctgcggggaccccccctccctgctgggccacctgcgccgcgccaaccccgcccgtccccgctcgcgt
